United States Patent Application Publication US 2026/0117211 A1 - sequence listing, part 2

SEQ ID NO: 2627 - protein, 414 aa, unidentified
  REGION 1..414: note = Human gut metagenome
MVITLDKNKRPLGFMSERRCRILLEKKRAVLYRYFPTIVILKDVDARKLSGLSSYRIKIDPGAKYTGIAIVMDDTNEFMYAMQIEHRGEQIKKNLDTRRGARRNRRSRETGYRRPKWGNRCTAKEQRQSYDSRRDENWLPPSVKSTADNIISWIRRLCRWINITNCSIESVRFDTQLMENPEIEGVEYQQGTLYGYEVKEYLLEKYGHTCQYCGGKSNDPILEWEHMLPRSRGGSDRLKNAALACHNCNQDKGNHTLEEWQTILQDRIPKERGKQKELDQIRQKFVQQVMEGKTPVKGLRYAAWVNSSRRYSQRHLYLRFPELECSSGGRTKYNRNVLKYPKEHHNDALCVGKIPEDGFVDRTNGYYLYAKATGRGTRLRGQINQCGVIIRKWMDRSKTAFGFQTGDLVVADVP

SEQ ID NO: 2628 - protein, 418 aa, Moorena sp.
MPNYVFVIDTNKQPLNPISPKKARRLLDKGKAAVFRMYPFTIILKTAIPNPTISPCQIKIDPGSKTTGFALVQNDQVIWAMELEHKGSLIKKKLESRSAVRRGRRNRNTRYRKPRFLNRRRPEGWIAPSLEHRVLTTETWVKRLIKFCPVNEIGIERVKFDTQKMQNPEVNGVEYQQGDLAGYEVREYLLEKWGRECAYCSKQNTPLQIEHIHPKSKGGSDRVSNLCLACEKCNQKKGNKPIEEFLKKKPDLLRKILAIAKQPLTDAAAVNTTRNKIVKVLKAIKPVVTGTGAQTKYNRTRLGLPKQHWIDAACVGEIKDLVLKTSQPLLVTCKGQGGRQKAALNKYGYPMRHNPLRPIKGWSTGDIARHQKLGIGKVTPRSKGSFGFTPLGAKGYKSCKPQDIFAVHRKDGYIYSFC

SEQ ID NO: 2629 - protein, 542 aa, Streptomyces sp.
MTTFPAGEQTHQTVLPQQPALESVRADTPGSRDETAHGHPAIARGTGREHGRGETDVQGTKPRRRHVKNAATAAEAAENGSGDAPPHNPSYSGGVGASRVFVLSKDGKPLMPCHPARARELLSKERAVVARQAPFTIRLKDRTHAESEVDGVQLRIDPGSKGTGLALTDDKKELDGQGAVITIRRGLVSVELQHRGEQIRLCMRQRAGYRHRRRSANHRYRAPRPDNRPRPAGWLPPSLRHRVDTAYSLASRLCRYAPVTEIHVERVAFDVHSMSTGRPLAGVEYQQGTLAGIEARAYLHARWNGACAYCDATGVPLNVEHLRPRSRGGSNRIANLVLACVPCNKAKDNMPVEVFLADRPARLAKILRQARTPLNDATAMNATLWQLIKALGTLGRPVHPWSGARTKWNREAMGLDKTHTLDALCVGRLAHESGDAIVRLPERVLVVKATGRGSYARTTPDRFGFPRLRRARVKRHFGYATGDLVRAIVPAGKWAGTWTGRVSVRATGRHSLTTPKGRIDVFHQNLRLLQRGDGYGYAFRSE

SEQ ID NO: 2630 - protein, 472 aa, Moorena sp.
MHVFVLDKDKNPLAPCHPAKARRLLKSGRASVFRRYPFTLILHEIEAKDCVVPETQLNASAPLASTSLSVESERSRGLKIDPGSKTTGLAVVNGNKLVWGAELQHRGDRIKAKLETRRVCRRNRRNRKTRYRKPRFLNRTRPKGWLPPSLNASAPLSVESERSRGLNHRVETTMTWVNRLRKLCPIVSISQELVRFDTQKLQNPEVSGIEYQQGELLGYEVREYLLEKWGRKCAYCSTENVPLEVEHIHPKSKGGSDRLSNLTLACRLCNRSKGNRDVREFLSDKPSVLNRILKQAKTPLKDAAAVNATRWKLCQQLKETGLPVEVGTGGLTKFNRTRLGLPKAHWLDAACVGETPSLHLATETPIAIASKGHSTRFRTLIDRYGFPRAVRKTKAQVNGLQAGDIVRAIVPNGKYRGQWTGAIAGVRKKRPPALRPFGKKQIDLTAKTQIQIVHKQDGYEYNINPCGHSSRR

SEQ ID NO: 2631 - protein, 425 aa, unidentified
  REGION 1..425: note = Human gut metagenome
MENTLKVFVLNMRGQPLMPCSPPKARKLLRAGKAVPVRRTPFVIQLTVPTGETKQPITLGVDAGYKHVGLSATTAKEELLASEVELRQDVTGLLSNRLALRRARRNRKTRYRAPRFDNRVRSKHKGWLAPSVENRIQAHISRIEAVCRVLPITKIVIETASFDIQKIKNPEVEGTDYQQGEQLGFWNVREYVLFRDGHVCQACKGRSKDLILNVHHIESRKTGGDAPGNLITLCEACHKAYHAGKLKQFSPRRGASFRAETFMGIMRWTVLNRLRERHPELPVTNTYGYLTKHKRIVAGLPKTHCADAFCIAGVLDAKRRGEYLFQKQTRRHNRQIHKLTILKGGVRKRHQAPYLVHGFRLFDKVLCKGEVGFIFGRRSSGAFDVRRLDGTKISAGISYKKLSLLEKRKTFLTELRKEDRDSSRV

SEQ ID NO: 2632 - protein, 420 aa, Moorena sp.
MQNYVFVIDTNKQPLNPIPPKKARRLLDKGKAAVFRMYPFTIILKTAINNPVVTNCQLKIDPGSKVTGFALVQNNQVIWGMELEHRGGLIKKKLQSRSAVRRGRRNRHTRYRKPRFLNRKRPEGWLPPSLEHRILTIETWIKRLIKFCPVNEIWVERVKFDTQKMQVPEINGVEYQQGELAGYEVREYLLEKWGRECTYCGKQSVPLQIEHIHPKSKGGSDRVSNLCLACEKCNQRKGNKPIEEFLKKKPSLLQKIKTKAKQPLKDAAAVNATRNKLVKVLWNIKPLITATGAQTKYNRIKLGFPKEHWVDAACVGDIEILELRTNQPLLVTCKGQGGRQKAALNKYGYPIRHNPLKPIKGWCSGDIAKNILTGEFGRVNPRSKSNSFNYTVRGNKAISLHVKNLTRVHKKDGYTYGFCR

SEQ ID NO: 2633 - protein, 443 aa, unidentified
  REGION 1..443: note = Human gut metagenome
LTKDENRPSGRTTGLRAEQAEPAGIRKGDTLKVFVLNMRSKPLMPCSPAKARHMLKAGKAFVVRRTPFTIKLTIATGETKQDVTLGVDAGARHVGISATTEKEEVFASEVALRQDITGLLADRLAFRRARRNRKTRYRAPRFNNRVRSKHKGWLAPSVENRIQAHMSRIEAVCRLLPVTKIVIETASFDIQKIRNPEVEGTGYQQGDQLGFWNVREYVLFRDGHVCQHCHGRSRDKILNVHHLESRKTGGDAPNNLITLCETCHKAYHAGKIKLKVKRGQSFRAEAFMGIMRWTLLDRVRKTHPKLPVENTYGYLTKHKRIALGLPKTHCADAFCIAGNLKALRRGDFLFQQQTRKHNRQIHKCSILKGGVRTLNQAPFLVKGFRLFDKVRIGGQIGFVFGRRVRGTFNIRRLDKTVIGTDINCKKLSLLETRKTFLTELRKE

SEQ ID NO: 2634 - protein, 424 aa, Moorena sp.
MRVFVLDQSKKPLDPCHPARARILLKQGRAKVLKRYPFTIIMQDLSESECVTHNYQIKIDPGAKTTGFAILQDHRVIWGAELTHRGCQIRESLTSRRQLRRSRRNRKTRYRKPRFLNRKRSDGWLAPSLMSRVHNILTWVKKLMRLCPLTGISQELVRFDTQKMENPETSGVEYQQGELYGYEVREYLLEKWSRKCAYCGTADTQLEIEHIKPKSKGGSDRVSNLAIACHHCNQAKGNQKIEQFLTGKPEVLKRVLSQAKKPLADAAAVNATRWRLYNELKFTGLPVKTGSGGLTKYNRCRQNLPKTHWLDAANVGQVDSLHIEDYQPLLIAAKGHGTRQICRTDKFGFPKRHCSRTKIHKGFQTGDIVKAIVTKGKKIGTYTGRVATRQTGSFNISTKPGLVQGISHKYCSIVHRKDGYYYSF

SEQ ID NO: 2635 - protein, 406 aa, unidentified
  REGION 1..406: note = Human gut metagenome
MVYVQDIDGKPMMPTTRHGKVRRLLKDNKAVVVNTCPFTIKLTYKTSDYKQEIVLGVDAGIKHVGLSATTKSKELYSGEVILRNDVVELLSTRRESRRARRNRLRYRKPRFENRVKSKRLGWVAPSVRHKVDAHIRVIDNICSTLPISRIIVEIAQFDTQKIKNPDISGNEYQEGDQLGFWNVREYVLARDGHKCQHCKGKSKDPILNVHHIESRKTGGDSPSNLITLCETCHKEYHKGNIDLKVKRGKSLRDAAVMGIMKWKLYEELKSRYPNVSMTFGYITKYNRIKYGIEKSHTSDAFVISRNFNAKRIERQYLKRLIRRHNRQIHKMKILKGGKKKNNQAPFEVFGFRLFDKVLYNNEICFIYGRRKSGCFDIRDFDGKNSKNVTYKKLKLIRGKRYPIILK

SEQ ID NO: 2636 - protein, 413 aa, unidentified
  REGION 1..413: note = Human gut metagenome
MTSYSFVLDANGKQLAPTKEPKAWFLIRKKRAALVSKYPMVIQLKKKIQENEICKDEIRCGIDDGGLHVGIALVQKCKSKNKVVFKGTIEQRNDVKHLMEVRRNYRRYHRYHKRYRQARFDNRKSSKRKGRIAPSILQKRQATIRVINRLNKWINITNYWLEDVSIDIRVLTDGYKSYSWQYQKSNRLDENIRKATILRDGGKCMECGKSNCRLEVHHIKPRRRNGSNTLDNLITLCESCHQKTEGQEELYMDRYFSLLKSSDNKNLNYAQHVMIGKMWLRKQLSGLGVLYLTSGGDTANKRIDWNIEKSHTNDAVCITDLQPDTCDIKEWAIKPMRRQSKAKTDHVLGIHHRDLVEYTFKNGETHRGYVTALYPDQKAINFQSQTKHCKKVNARKCKLLWNYSKIYWFENAS

SEQ ID NO: 2637 - protein, 442 aa, Moorena sp.
MVTVQQSTHHLPFGRVFIRRNLFMVYVISQDGKPLMPCSDPIARLLLKQGKAKVKKRDPFTIKLTYETTNYTQGLTLGVDTGSGTIGTAVSKDNGDIVYMSEVVVRNDITDKMTQRAKYRRNRRNRKTRYRKARWLNRASSIKKDRFSPTMQSKLHSHVREIEYIQSILPITEMVFETGQFDMQLMKNPSLANPKVRPWGYQKGANYGFENTKAMVLNRDNYTCQCCKGKHKDSKLEVHHIVFRSQGGSDEESNLLTLCHTCHKDLHSGKINPKLSGKVKGNLKYATQMNSIRKQLFRFYPNAIETFGYVTKANRLHLGVDKEHYYDACTIATQGNAFNVKSNLYKKKCVSDGDFQKTKGIRSEEPIVTDKICGFRKFDKVRYFGNDYFIKGRMSTGYAILMDIDGNKIDFSTMPRGYKTPKLSNCKRITARSTVMTQVKVV

SEQ ID NO: 2638 - protein, 427 aa, Methanosarcina sp.
MLVFVINQHKKPLMPCKPSKARKLLQAGKAKVVRNTPFTIKLLFGSSGYTQPVIAGMDTGSKVVGCAAIANGKVLYQSEIYLRENVSKKMEQRKMYRRTRRGRKTRYRPARFANRGNSRREGRLAPSIKSKLEAHFREKMFVESLLPVTGWKVELASFDIHKITNPEVSGIGYQEGDLKGFYNVKAYVLDRDGYTCQHCRGKSKDSRLHCHHIVFRSQKGTDTPENLITLCETCHKALHNGEFKLSGNKSKTKHATEIGILKSQIRKSGWSFAETFGYETKYRREQVLKLLKTHYFDAVAICCRDDQNVEVEDSVLQKRNVSKGDYQQRTGKRSEKKIPTGKLFGLRKFDLVKTSKGIGFVKGKRSSGFFAISDLFGNKISDSVNVKKKCRRLSARSTTLVQMVQMTHSSPTCHFRQAGTVEEGVSC

SEQ ID NO: 2639 - protein, 417 aa, unidentified
  REGION 1..417: note = Human gut metagenome
MPCSPAKARLLLKEKKAIVKRRTPFTIQLTIATGEAKQPVTLGVDSGYKHIGLSATTEKAELYASQVELRQDITDLLSARLALRRSRRSRKTRYRAPRFNNRVASKRKGWLAPSVENRIAAHMSRVEAVMRVLPVTAITVETAAFDTQLLKNPDIAGAAYQQGEQLGFWNVREYVLFRDGHVCQHCRGKSKDPILNVHHIESRRTGGDAPNNLITLCETCHKAFHRGEIELKVRRGKSFKAETFMGIMRWTLFERLKKAHPELRVRNTYGYLTKHKRISHGIAKSHCADAYCIADNLGAKRLSGYLFQKQTRKHNRQLHKLSILKGGLRKKNQAPYEVKGFRLFDKVICKGEEAFIFGRRTSGSFDVRRLDGTRISAGINYKKLRLLEPRTTYLTEFRKEAALPPLHKCRGFCAEFL

SEQ ID NO: 2640 - protein, 423 aa, Moorena sp.
MRVFVLNKNRQPLDPCKPARARILLSTGKAKVYRRYPFTIILTEEIKDPVTHEHQLKIDPGAKTSGLAIVQGTRLIWGAELTHRGFQIREALSSRRQLRRSRRNRKTRYRKPRFLNRTRPKGWLAPSLTSRVQNILTWVKKLIRFCPITGISQELVRFDTQKLQNPEISGIEYQQGTLYGYELREYLLEKWNRKCAYCGATGTQLEIEHIKPKSKGGSNRVSNLTIACHPCNQAKSNQDIELFLSKKPSILKRILSQSLRPLADAASVNSTRWKLYYELKSIGLPVEVGSGGLTKFNRCRQNLPKTHWLDAANVGKVETLIIEVTLPLAITAKGHGTRQLCRTNKYGFPIRHCSRIKFHKGFQTGDIVRAVVTKGKNIGTYVGRVATRKSGSFNISTKSGLVQGISHKYCRFIHRKDGYAYTN

SEQ ID NO: 2641 - protein, 447 aa, Marinobacter sp.
MSVFVLDRRKQPRMPCTEKRARLLLGRRRAVVVRAYPFTIRLKDRAGGITQPVRIKIDPGSKTSGIAVVRESGQKQHVLALMELAHRGRQISKSLEQRRAFRRRRRSQLRYRAPRFLNRTKPRGWLAPSLQHRVDTTKSLVNRLRSLVPVESISQELVRFDTQKMENPEVSGVEYQQGTLLGYEVREYLLEKWGRECAYCTGKDTPLQIEHIDPKANGGSNRISNLTLACRPCNQEKGRQPLADFFASSKRLKNHQARLDRILKQCKKPLRDASAVNSTRWALHQALKQTGLPVEVGTGGRTKFNRRRLNIPKTHALDAACVGEVEIVEGWDVPTLAIKATGRGSYKRTRLTKHGFPRGYLMRQKQVQGFQTGDMVRAIVPTGTKAGTWLGRVAVRKTGSFNIQTSGGAIQGVSYRHCTLTQRADGYGYHIQPNQRKEEGDRENESR

SEQ ID NO: 2642 - protein, 378 aa, Moorena sp.
MQNYVLVIDTNKRPLNPISPKKARRLLDKGKAAVFRMYPFTIILKTAIYNPVVLPCHIKIDPGSKTTGFALVQNNQVIWGMELEHRGELIKKKLEYRKAVRRGRRNRHTRYRKPRFLNRRRKDGWLPPSLEHRILTIHTWVKRLIKFCPVNEIWVERVKFDTQKMPNPEINGIQYQQGELAGYEVREYLLEKWGRECTYCGKQSIPLQIEHIHPKSKGGSNSAKPTLRERVSNLCLACEKCNQRKGNKSIEDFLKKKPNLLQKIKTKAKQPLPDAAAVNTTRNKLVKVLRSIKLVVTGTGAQTKYNRTKLGLPKQHWIDAACVGDIETLVLRTSQPLLVTCKGPGGRQKAALNKYGYPIRHNPLKPIKGACYWGHSQA

SEQ ID NO: 2643 - protein, 424 aa, Microcoleus sp.
MSNYVFVIDTDKNPCDPVHPAKARLLLNQNKAAVLRRYPFTIILKEAQNAKPTPLTVKIDPGSKTTGLAILRGEDVIWGAELSHRGQQIKASLDSRRAIRRGRRYRKTRYRPARFLNRKKPKGWLVPSLQHRVDTTLTWVNKLIRYSPIVGITQELVRFDLQKMKTPEISGVEYQQGELQGYEVREYLLEKWNRQCAYCGGRDIPLQVEHIQPKAKGGTNRISNLCLACEPCNIRKGTHDIRDFLSGQPDLLSRILKQAKSPLRDATAVNSTRWVLFNTLKGTGLPVVTGSGGQTKFNRTRLGLPKTHWLDAASVGKVDSLKLLTSKPLLISAKGHGTRQMCRTDKYGFPSRYVPRYKFVKGFQTGDIVKAIVTRGKKVGEYLGRVAVRSQGSFNITTNQGLIQGISHKYCKHIHKKDGYSYVA

SEQ ID NO: 2644 - protein, 493 aa, unidentified
  REGION 1..493: note = Human gut metagenome
MAAVYVISASGKPLMPTTRCGHIRGLLNAGKARVVEREPFTIQLKYETPDVTQPLYLGIDPGRTNVGSAVVREDGECVFTAQLTTRNKDVPKLMKARKQFRMAHRRLKRRCKRQRRAKAAETLSQKGEFQRLLPGYEEPILCKGIRNKEARFNNRQRPAGWLTPTANHLLLTHLNMVKKLQKLLPITDVVLEVNRFAFMAMENPSIRRWQYQQGPLYGKGSVEDAVYAQQDGHCLFCGKPIAHYHHVVPQHKNGSETLENRVGLCNEHHDLVHKDRAWDAKMKETKAGLNKKYHALSVLNQIIPALTEQLTAMFPQHAFVTTGKDTADFREDYGIAKEHHLDAYCIACSVLAEPTKVAAPTGKPHRLMQFRRHDRQVCHKENIKRVYLSEGKAVATNRHKAIEQKDDSLEEFRKTHTQQEVSALTVKDHQPVYKDMRRFMPGGVFLFNGKVHTLQRSHGRYKGMPFYYIDTDGSKNHAKGCIFLQQNCGLRWV

SEQ ID NO: 2645 - protein, 442 aa, unidentified
  REGION 1..442: note = Human gut metagenome
MVTVQQSTHHLPFGRVFIRRNLFMVYVISQDGKPLMPCSDPIARLLLKQGKAKVKKREPFTIKLTYETTNYTQGLTLGVDTGSGTIGTAVSKDNGDIVYMSEVVVRNDITDKMTQRAKYRRNRRNRKTRYRKARWLNRASSIKKDRFSPTMQSKLHSHVREIEYIQSILPVTEMVFETGQFDMQLMKNPSLANPKVRPWGYQKGANYGFENTKAMVLNRDNYTCQCCKGKHKDSKLEVHHIVFRSQGGSDEESNLLTLCHTCHKDLHSGKINPKLSGKVKGNLKYATQMNSIRKQLFRFYPNAIETFGYVTKVNRLHLGVAKEHYYDACTIATQGNAFNVKSNLYKKKCVSDGDFQKTKGIRSEQPIVTDKICGFRKFDKVRYFGNDYFIKGRMSTGYAILMDIDGNKIDFSTMPRGYKTPKLSNCKRITARSTVMTQVKVV

SEQ ID NO: 2646 - protein, 423 aa, Marinobacter sp.
MSVFVLDRRKQPLMPCSEKRSRLLLGRGRALVVRAYPFTIRLKDRTGGITQPVRIKIDPGSKTSGIAVVRESGQKQHVLVLMELAHRGRQISKSLEQRRAFRRRRRNQLRYRAPRFLNRLRSLVPVVSISQELVRFDTQKMENPEVSGVEYQQGTLLGYEVREYLLEKWGRECAYCTDKDTPLQIEHIDPKVNGGSSRISNLTLACRPCNQEKGRQPLADFFASSKRLKNHQARLDRILKQCKKPLRDASAVNSTRWALHQTLKQTGLPVEVGTGGRTKFNRRRLNIPKTHALDAACVGEVEIVEGWDVPTLAIKATGRGSYKRTRLTKHGFPRGYLMRQKQVQGFQTGDMVRAIVPTGTKAGTWLGRVAVRKTGSFNIQTSGGAIQGVSYRHCTLTQRADGYGYHIQPNQRKEEGDRENESR

SEQ ID NO: 2647 - protein, 420 aa, Moorena sp.
MQNYVFIIDVNKQPLNPIRPKRARTLLMRGKAAVIRMYPFTLILKTVVENPVLRPVELKIDPDSKVTGLALVQDGEVVWGANLEHRGAEIKSDLESRSAVRKSRRNRKTRYRKARFLNRKRTQMWLPPSLMHRVLTIETWVKRLCRYVPVTGIVMELVRFDTQALQNPEITGQEYQQGKLFGYEVKEYLLAKWGRNCVYCGKQDVPLQVEHIHPKSNGGSDRISNLTITCVRCNQKKGSKSIEDFLKKKPDLLRQIKVVRLAPLKDAAAVNSTRWKLYQSLKKISGLNIATSTGGRTKYNRIKNGFDKDHWIDACCVCESGLGVILKTKQAMMIKSTGVGSGRQMTRTNKFGFPCAKPKQRYQHGWKTGDIARFIDGTTTGRIVVQSASRLEIRINKQRIGGQLNKFSKLHSMDGYNYAF

SEQ ID NO: 2648 - protein, 507 aa, unidentified; identical to SEQ ID NO: 2446
  REGION 1..507: note = Human gut metagenome

SEQ ID NO: 2649 - protein, 459 aa, Calothrix sp.
MNFLLVQQDKTMKVLVINFHGQPLMPTSPRRARLLLESGKAKIVGRDPFTIQLIYGSSGYKQEVTLGIDAGYKHVGFSTITDSYELIGGELELLDGVSERITERSKYRRQRRSRLRHRAPRFDNRVRSSGWLAPSIQHKFDAHLKLVELIKSRLPVTKIIIETANFDIQKIKNPKIEGKQYQEGEQLGYYNLACYIRHRDGYKCQNPNCKGKSEILQIHHIGYWKTQPDRSDRPGNLITLCVHEVCPWQKCHTPANHEKGKFLFGWDNKVKSFKAETFMSTIYQKLLDILNAEQAYGYETKYNREKLELPKSHHNDAFVIAGGENQVRVKSLMVEQIRRNKRSIEQFYDAKYIDTRTGKKESGSTLSSGRRTKNKNLNGENLRVYHGQKISLGQRRIKKQRYPYNPNDYVKFENKKYRVIGMQNLGTGVKIANYPGVANKVVSISKVKPIKRRSGICEK

SEQ ID NO: 2650 - protein, 431 aa, unidentified
  REGION 1..431: note = Human gut metagenome
MPNKVYVLDKHGRPLMPCSPAKARHLLDEGKAKIKKRTPFTIQLVYGSSGYTQEVILGVDAGSKTIGVSASTKKEELFAANVIPRNDVVDLLSTRRESRRARRNRKTRYRKPRFDNRVRSKHKGWLAPSVEVKIQEHITSIKRACRILPVSKVVVETAEFDLQLLKAIADGKPVPQGEDYQKGEMYGHYNVRQYVLWRDDYTCQCCGAHATKKKEVRLHVHHLESRKTGGDASGNLVTLCESCHEKLHKGLITEDDFKKRKRKSTRDATFMGIMRATLLQRLRSELPIPVVETRGYITKATREKLLVLPKSHTNDALAIAQGKHGFNVGYLPGIAQIDKIYTIRPVRHHNRQLHKATILKGGIRKSNQAEKYVFGYRLFDKVQFNGQDCFIWGRRTTGIFTIKTINGKMIKDGISFKKLKLVEKSTSYLIA

SEQ ID NO: 2651 - protein, 424 aa, Moorena sp.
MRVFVLDKNKKPLDPCQPARARILLKQGRAKVFRRYPFTIIMRDLEELECVTHNHQIKLDPGSQTTGLAIIQEKVVVWGAELTHRGLQIRDGLTSRRKLRRSRRNRKTRYRQPRFLNRKRPDGWLAPSLMSRVYNILTWVKKLTRFCPITGISQELVRFDTQKMENPEISGTEYQQGTLYGYEVREYLLSKWNRKCAYCGVTDTQLEVEHIKPKSKGGSDRVSNLAIACRKCNQIKGNQEIEQFLSGKPDVLKRILSQAKRPLVDGAAVNSTRWKLYNELKALGLPIETGSGGLTKYNRCRQNLPKTHWLDAANVGEVDTLYIESYQPLLISAKGHGTRQMCRTNKFGFPTRYVPRFKFVKGFQTGDIAKAVVTKGKKIGTYTGRIATRKTGSFNISTKHELVQGISHKYCSIVHRKDGYSYSF

SEQ ID NO: 2652 - protein, 447 aa, Marinobacter sp.
MSVFVLDRRKHPLMPCTERRARLLLDRGRAVVVRAYPFTIRLKSRVGGNTQPVRIKIDPGSKTTGIAVVRENGQKQHVLALMELAHRGRQISKSLEQRRAFRRRRRNQLRYRAPRFLNRTKPKGWLAPSLQHRVDTTKSLLNRLRSLVPVVSISQELVRFDTQRMTNPEISGVEYQQGTLLGYEIREYLLEKWGRECAYCTDKDTPLQIEHIDPKANGGSNRISNLTLACRPCNQEKDRQSLADFFASSKRLKNHQVRLDRILKQCKKPLRDASAVNSTRWALYQTLKQTGLSVEVGTGGRTKFNRCRLRMPKTHALDAACVGEVEIVEGWDVPTLAVKATGRGSYKRTRLTKHGFPRGYLMRQKQVKCFQTGDMVRAVVPTGTKAGTWLGRVAVRKTGSFNIQTNSGAIQGISHRHCVLTQRADGYGYHIQPNQRKEKGNRENESR

SEQ ID NO: 2653 - protein, 423 aa, Microcoleus sp.
MSNHVFVLDTNRKPLTPCKPGVARSLLNAGKASVFRRYPFTIILNKEVDANPEPLELKLDPGSNVTGIALKQGHRIIFAAELQHRGQQIKEALLSRRQLRRSRRNRKTRYRPARFLNRTRPEGWLAPSLQHRVDTLMTWVNRFRRLAPVGQITQELVRFDLQLMENPEISGVEYQQGALQGYEVREYLLEKWGRTCAYCGAKHVPLEVEHIQPRSKGGSDRVSNLTMACRSCNQAKGHGDIRDFLSGQPDVLSRLLGQAKSPLNDAAAVNSTRWALFKALKATGLPVTTGTGGQTKFNRLRLNLPKAHWLDAACVGPVESLEVLTSKPLLILAKGHGTRQMCGTNKYGFPTRHRSRRQIHKGFQTGDIVTATVTAGKKIGSYVGRVLCRASGSFDITTASRRVAGISHKYCKPIHRKDGYAYA

SEQ ID NO: 2654 - protein, 557 aa, unidentified
  REGION 1..557: note = Human gut metagenome
MIYNLISIRERNFMKQKKQKVMVYILNKKGKPLMPTTRCGHVRKLLDSKKAVVVSSNPFTIRLKYDTPNGVQDVFAGIDSGRENIGSGASNEDGDCLYLGELKTSNKSIKMKMTERAGFRKERRSHDRQNKQRKARKDHTEIQNGNADICRTTISCKSVQISYPAAEKSVTHKIIRGKEGKFANRHRDEGWITPSARQLVQMHMNDLKSMCRILPISHVTLERVAFDFQKLENENIKAWEYGKGKLYGYDSPEEYIHDVQGGKCLICGKPHIDYLHHIIPRSKGGSNKVSNLAGLCYDCHYGPMGVHNCQDTQDRLPELKNEANKQYKVSLLNSVMPVLIEEMDKFCKANSIIFSICGGHDTAKVRDMYDLQKDHCIDGFAISLAGRNVKSVDVMPDRIHQKQRYKKKSKNIIQKRNCREYYDGKKLAAVNRHKGTDQKADSLEEYMKTYAETHTADECKKHFESLTVKPARRTYTFHKEGRICPFHIGDKVRYEKKNKIKGNTKVETFICEGIRFPKDENKAKVEHNKTKSKKMKFCRVLEPGCTPYTDYRKLVLI

SEQ ID NO: 2655 - protein, 466 aa, Moorena sp.
MQRRVFVLSKNRKPLMPCSPARARQLLKERKASVYRQEPFTIILQKRTEGDLQKVQLKFDPGSKITGMALVVFFQKGTIVTWAAELEHRGEKIVDLLSKRRAIRRSRRNRKTRYRPPRFSNRTRKKEWIAPSLKSKVDNIFNWTKKLLTYTPIDNLCVETNRFDTQKLQNPEISGVMYQQGTLFGYEIREYLLYKWNHQCAYCDAENVALEIDHIHPRSKGGSNRVSNLTISCRKCNENKGNGDIHDFLSKDNKRLQKIVSYSKKTLRDAASINTTRYVIGNQLKKLGIDVEFASGGKTKANRRHNGFNKQHWIDAACAGKSGENVTISEDLIPLGIQSQGRGSRQMCRVDQFGFPRTTAKSQKRVKDFQTGDIIKAVVTKGKKKGVYVGRVAVRSNGYFNIKTNNSTIQGISYRYCHLIQQVDGYFYFQKGDARLKKPSCSCFAHSRPSGDSSPTYRSRGILATN

SEQ ID NO: 2656 - protein, 518 aa, unidentified
  REGION 1..518: note = Human gut metagenome
MANLKLIDELLEKTEYIYVLGIDGKPQMPTNRKVRVRSLFKSGMAKIVDTVPFTMQLLYENKPVLQPITIAEDPGRTNIGAAVLTQLGDLVFSAVVETRNKSIKKLMSDRKAHRQASRHGERKARQRLAKKYKSMIKAGMIMRKLPQYAADKFVTCKVIKNTEARFCNRKRMPDWLTPTVNHLVQTHINLIKKVEKYLPITDVAIEVNRFAFMQMENPDASGVDFQNGPLKGFDDVKTAIREQQHGKCLMCKNDIEHFHHIIPRSKGGSNTIQNQVGLCKKCHAKVHTDAEFQAKLKDKKEGLIKKYGALSALNQAVPFICKELLKIYGAEHVHFCTGKDTSLIRSSLGYDKTKDNQMHEVDAYCICLAAIGADKTKRPDFNNVFKIKQFRRQDRSIINYQRERTYYLDCKKIATNRKPRFEQKGDALSDWYSEQVKLKGKKYADKLTGRITVKKSTRGYNSKDRVMPGTIFYYCGKRLVLSGQTTRGKYYKAYGDPKTNYPAAKCQIYKHNKGFVFI

SEQ ID NO: 2657 - protein, 442 aa, unidentified
  REGION 1..442: note = Human gut metagenome
MSTSVFVLDKKHRPLMPCRPARARRLLRAGRARVVKRFPFVIRLVDRTVEQSEVQPVLIKLDPGSRETGAAVVRDDEKKRHHALAFFVIKHRGGAIRDALKARSAFRRRRRSQNFRCRSPRFLNRVKPKGWLPPSLRHRVETTLSFVRRMCRYLPVSGIAAELVKFDSQKLQTPEVSGIEYQQGTLFEYEVREYLLEKFGRKCVYCGAEGVPLNIDHVVPRAKGGSNRVSNLVLACVSCNQKKGARSLEDFLKGKPEVLARVRRELKTPLRDAAAVNATRWVLFNELKATGLPVETGSGALTKLNRHAFGVEKEHWLDALCVGRLNGVVTRKGLNVLEIRCMGRGSRQRTRLTKYGFPRGYLMRQKCVHGFATGDMVEANVPKGKKAGLWRGRVAVRVSGSFNIQTPKGVIQGVGWKHCRLISHNDGYGYAWLGHAPHSSPA

SEQ ID NO: 2658 - protein, 419 aa, Moorena sp.
MPKYVFVIDTNKQPLNPIPPKKARRLLDKGKAAVFRMYPFTIILKTAIDNPIVSPCKIKIDPGSQTTGFALVQNNQIIWGMELEHRGGLINKKLESRKAVRHRRRNRHTRYRKPRFFNRKRSEAWLPPSLEHRVSTIETWVKRLTKFCPVNEIWVERVKFDTQKMPNPEINGIQYQQGELAGYEVREYLLDKWGRECTYCGKQSVPLQIEHIHPKSFGGSNRVSNLCLACEKCNKRKGNKPIEEFLKKKPSLLQKIKTKAKQPLLDAAAVNATRNKLVKVLQNIKFVVTGTGAQTKYNRTRLGLPKEHWIDAACVGDIETLVLKTSQPLLVTCKGQGGRQKAALNKYGYPVRHNPLKPIKGWVTGDIAKHQRLGIGKVTPRSKGSFGFTPLGMKGYKSCNPQDISAIHRKDGYTYSFCK

SEQ ID NO: 2659 - protein, 442 aa, unidentified
  REGION 1..442: note = Human gut metagenome
MSTSVFVLDKKHRPLMPCRPARARRLLRAGRARVVKRFPFVIRLVDRTVEQSEVQPVLIKLDPGSRETGAAVVRDDEKKRHHALAFFVIKHRGGAIRDALKARSAFRRRRRSQNLRCRSPRFLNRVKPKGWLPPSLRHRVETTLSFVRRMCRYLPVSGIAAELVKFDSQKLQTPEVSGIEYQQGTLFEYEVREYLLEKFGRKCVYCGAEGVPLNIDHVVPRAKGGSNRVSNLVLACMSCNQKKGARSLEDFLKGKPEVLARVRRELKTPLRDAAAVNATRWVLFNELKATGLPVETGSGALTKLNRHAFGVEKEHWLDALCVGRLNGAVTRKGLNVLEIRCMGRGSRQRTRLTKYGFPRGYLMRQKCVHGFATGDMVEANVPKGKKAGLWRGRVAVRVSGSFNIQTPKGVIQGVGWKHCRLISHNDGYGYAWLGHAPHSSPA

SEQ ID NO: 2660 - protein, 318 aa, Scytonema sp.
MVKPRYARKFPFTIILKESRPDVPVQPLRIKIDPGSKTTGIAVINDSTGEVVFTAELQHRGFAVRVALTSRRQLRRSRRGRKTRYRQPRFNNRKRPDGWLPPSLMSRVYNIQTWVRRLMRLAPITAISQELVKFDTQLIQNPEMSGKEYQQGTLAGYETREYLLEKFGRKCVYCDKQDVPLQIEHIHPRAKGGTNRISNLTLSCEKCNIKKGTKDIKDFLKKDPLHLKKIEAQAKKPLADTAAVNATRFKLLEVLKSTGLLVETGSGGLTKFNRTKLELPKTHYFDAACVGRSAPSGKSKVTHSKVKSKNPINKFRGL

SEQ ID NO: 2661 - protein, 497 aa, Streptomyces sp.
VLHQQLALELDPADTPRDRDETGAERREATGAEHVRGDTPAASPGSGGVTPNQPVGEEPRERHPFVFVLDKHGRPLQPCTPARARKLLKKGRAVVHRHTPFAIRLKDRTIAESEVDGVELGIDPGSKHTGIATFTAQAGERRGRYAVHLDHRGAVIRKKRGQRAAYRRRRRTSNLRYRAPRFNNRTRPDGWLAPSLQHRVTTTVSWVRRLARWAPVRAVHVERVAFDTHAISAGRPLEGAEYQHGTLHGTEIREYLLAKFGRACVYCGIAGVPLNIDHVHPRSRGGSDRISNLVIACIPCNESKSHRPVEEFVRDKSKLAKILAQAKAPLRDAAAVQSTRWALWRALDQMLPTHIASGGRTKWNRTRCGLPKSHTLDALNVGKLDTVTETANPILVAGCSGRGQHQRTSPDRHGFPRRTSPRIKTVHGYATGDLVTASVPKGKYTGTHAGRVMIRTTGRFDIRTPHGRAAGIQHTNIRLLQRGDGYTYTHQPEPTRA

SEQ ID NO: 2662 - protein, 522 aa, Nocardiopsis sp.
MATFRTGQKTHQAVLPQRPALESAPADTPRIRDETGSGHRSGNRSAVPGAEHVRGETGTAPPGGSGVTPEPCGAGEKGREAHTRESDPCVFVLDKHGTPLQPCHPARARKLLAKGRAVVHRHTPLVIRLKDRTIEDSEVDGVELGIDPGSKHTGIAVFTHQAGQRRGRYTIQLDHRGATIRRKLAQRSGYRRRRRTSNLRYRPPRFENRARPRGWLPPSLQHRVDTTTSWVDRLTGWAPVGAVHVERVAFDTHALSVDGPLEGVGYQQGTQHGYEVREYLLAKFGRACVYCGVMNTPLNIDHVRPRSRGGTDRVSNLVLACVPCNQAKADRPVEGFAPKAATRVLARAKAPLRDAAAVNATRWSLWCALDARLPTHVGSGGRTKWNRTRNQLPKSHTLDALCVGKLDTVTQTIRTILVAGCSGRGTYARTRPDKYGFPRLRLPRTKRFFGFATGDLVRAVVPKGKKAGTHTGRVAVRASGSFNITTAHGTVRDVNHKHVQLLQRADGYAYTTQKEDGASSPA

SEQ ID NO: 2663 - protein, 411 aa, unidentified
  REGION 1..411: note = Human gut metagenome
MVYVQDIDGKPMMPTTRHGKVRRLLKDNKAVVVNTCPFTIKLTYKTSDYKQEIVLGVDSGTKHVGLSATTKSKELYASEVILRSDVVDLLSTRRGLRRTRRSRLRYRKQRFNNRVKSKKDGWIAPSVRHKIDSHIRIISFVYSILPVSKLIIEVAQFDTQKIKNPEISGKEYQEGEQLGFWNVREYVLARDGHKCQHCKGKSKDPILNIHHIESRKIGGDSPSNLITLCETCHKEFHKGNIKLKVSRGKSLRDAAVMGIMKWKLYEELKSKYDNVSMTFGYITKYNRINHGIEKSHVSDAFVISRNFNSCRLGYYYKRKLVRRHNRQIHKMKILKGGIRKRNQAPFKVFGFRLFDKVMFQGEEHFIYARRLSGQFNIRDINGENKKDVSCKKLKYVSHGLVSVKTNLFLSQ

SEQ ID NO: 2664 - protein, 438 aa, Nocardiopsis sp.
MATFRTGQKTHQAVLPQRPALESAPADTPRIRDETGRGHHTTDVVPGAEHVRGETGTASPGGSGVTPEPCGAGEKGREAHTRESDPCVFVLDKRGAPLQPCHPARARKLLAKGRAVVHRHTPFVIRLKDRTIEGSEVDGVELGIDPGSRHTGIAVFTHRGGERRGRYAIQLDHRGAAIRKKLAQRSGYRRRRRTSNLRYRPPRFGNRARPRGWLPPSLQHRVDTPVSWVDRLTGWAPVGAVHVERVAFDTHALSVDGPLEGVGYQQGTLHGYEVREYLLAKFGRACAYCGATNAPLNGRTKWNRTRNRLPKSHTLDALCVGKAEEVAQTVSTVLVAGCSGRGTYARTRPDKYGFPRLRLPRTKRFFGFATGDLVRAVVPKGKKAGIHTGRVAVRASGSFNITTAHGTVQGINRRHLRLLQRADGYAYTIREEKGVSRP

SEQ ID NO: 2665 - protein, 432 aa, Scytonema sp.
MEGLMSKVFVIDTEKRPLNPIHPAQARQLLRNKKAGVFRNFPFTIILKESLSDSSVSPLKLKLDPGAKTTGIALVNDITGEVVFAAELKHRGFVIRDALTSRRQLRRSRRNRKTRYRKPRFLNRTRPEGWLAPSLQSRIDNIKTWVKKLCRFAPIEAISQELVRFDMQLMRHPNIEGKEYQQGTLAGYETREFLLEKWNRQCAYCGAKDVPLQIEHIHPRARGGSNSITNLTLSCSKCNTKKGTKDIKDFLKKDPFRLEKILKQAKRPLADTAAVNTTRFALLDVLKATGLPVETGSGGLTKFNRSQQNLAKSHWIDAACVGKLTASLNIKGIKPLLITASGHGSRQSCRTDKYGFPSRYVPRFKFVNGFQTGDIVKAVVTNGKKIGEYVGRIAVRTTGSFNISTKNGLVQGISHKYCKGIHRKDGYSYGAN

SEQ ID NO: 2666 - protein, 475 aa, Streptomyces sp.
MPPSDSHLVSLVFPPEPVWVRAAREAVRTLLAAADRRDLADTALLLTSEAVTNSVNACLRSGCSTPVTLFAEWTAPHVLRVLVQDEAPGLPVPRAPASEDEHGRGLARIAAFTAQAGERRGRYSVQLDHRGAVIRKKLAQRAAYRRRRRTSNLRYRAPRFNNRTRPDGWLAPSPQHRVTTTVSWVTRLSRWAPVRAVHVERVAFDTHAISAGRPLAGAEYQHGTLHGTEAREYLLAKFGRACAYCGITEVPLNIDHVHPRSRGGSDRISNLVTACIPCNETKSNRSVQEFVRDKTKLAKILAQAKAPLRDAAAVQSTRWALWRALDQMLPTHIVSGGRTKWNRTRCGLPKSHTLDALDVGKLDTVTETITPILVAGCSGRGQHQRTSPDRHGFPRRTSPRVKAVHGYATGDLVTASVPKGKYTGTHTGRVMIRTTGRFDIRTAHGLAAGIRHTNIRLLQRGDGYTYTHQPEPTCT

SEQ ID NO: 2667 - protein, 232 aa, Nostoc sp.
MFIPKVDAPDVPFQIEHIFPKARGGSNSITNLTLSCEKCNIKKGVKDIKDFLKTDPSRLEKILKQAKRPLADAAAVNTTRFALLNVLKSTGLPVETGSGGLTKFNRSQQNIPKSHWADAAAVGKSTPELIVKGVKPLLIAANGHGSRQSCRTDKFGFPNRHVPRDKIHFGFQTGDIVRAVVTSGKKIGSYVGKVAIRSSGSFNISTKNGLVQGISHKFCLRIHAKDGYSYAY

SEQ ID NO: 2668 - protein, 412 aa, Moorena sp.
MMCVVYVVNQNGHCLMPCKPSKARKLLRDGRARVKHRSPFTIQLLWDCEEHVQEVVVGIDKGSSITGFACVGNGEILLSGEIVHRKDVKEKMQTRRMHRRSRRNRCWYRPKRILNRASSRRSGRLPPSIKTNVEEVIRVVEHLPLPLAHIVIEDVQVDIARLNDPTLQASRYQDPTRLDENLRIACLMRDGYQCQSCHKRETRLEAHHLVFRQHGGKDTLSNLLTLCESCHHRVHEGKITLAVTGVSGHLDHIAQRSMQGKAHLYATLEQGISLTTLFGYQTAIWRKHLDLPKAHDVDALCIATYGTGEVIPWQQDRFYQVRFRPRRTRRHYHDLPRKGQGRVRYQVNSELEGFRKGDVVRVKGTFVKQINSIYSDGYLAFPRVKGEPSKARPKDCVLLERGTTMLWKRMAG

SEQ ID NO: 2669 - protein, 416 aa, unidentified
  REGION 1..416: note = Human gut metagenome
MENTLKVFVLNMRGQPLMPCSPPKARKLLRAGKAVPVRRTPFVIQLTVPTGETKQPITLGVDAGYKHVGLSATTAKEELLASEVELRQDVTGLLSDRLALRRARRNRKTRYRAPRFDNRVRSKHKGWLAPSVENRIQAHISRIEAVCRVLPITKIVIETASFDIQKIKNPEVEGTDYQQGDQLGFWNVREYVLFRDGHVCQHCRGRSKDPILNVHHLESRKTGGDAPNNLITLCETCHKAYHAGKIKLKTRRGTSFRAEAFMGIMRRTLLDRVRKAHPELSVENTYGYLTKHKRIALGLPKTHCADAFCIAGNLNALRRGDFLYQRQTRKHNRQIHKCSILKGGVRKLHQAPFLVKGFCLFDKVKCTGRIGIIFGRRSTGSFDVRTLDGTRLSAGISSKKLTLLEKRTTFLTQLRK

SEQ ID NO: 2670 - protein, 427 aa, Nostoc sp.
MSKVFVLDTEKRPLDPIHPAQARQLLRNKKAAVFRRFPFTIILKESRADASVSDLRIKLDSGAKITGIALVNDSTGEVVFAAELKHRGFAIRDALISRRQLRRSRRNRKTRYRKPRFLNRTRPEGWLAPSLMSRVHNVETWVNRLRKFAPITAISTELVKFDMQLMRNPEIEGKEYQQGTLAGYETREFLLEKWNRQCAYCGIKNIPLQIEHIHPRSKGGSNSITNLTLSCEKCNVKKGTKDIKDFLKKDPTRLQKILAQAKKPLADAAAVNATRYKLLEVLKSTDLPVECGSGGLTKFNRTNQQLQKTHWLDAACVGQSTPILIIKGIKPLLITANGHGTRQMCRTDKFGFPNRYVPKLKFIKGFQTGDIVKAVVTNGKKIGEYIGRVAVRSTGSFNISAQRGLIQGINYKFCKSIHKKDGYSYSS

SEQ ID NO: 2671 - protein, 415 aa, Bacillus sp.
MRVFVKNLRGEPLMPCSNRKARLLLKQGKAKIIGYTPFTIQLQYATGETVQSVAIGVDSGSKYVGIAITTEDKVLAKGTIELRQDVKENLTLRATLRRSRRQRKTRYRKARFLNRKKREGWLPPSIQSRMHNQIHWIEIFRSLLPSPKVIVEVGKFDAQKLKNSDIQGKEYQQGDAFGFWNTRYYVFTRDHYTCQICKKKGGILHTHHIIERCSGGSDLADNLVTVHEECHQKFHQGTIKHIFKKPKQYKETAFMNILRLQIMNRLGCEITYGSYTTPKRKELRLSKTHYNDAIAITTPTKLQEYEQSGEFRIKQFRKKKRSLHESTARKGRKTKNTTAKRNNKNTPKVHGIYLGDKVKVFGQVGFVTGFTGKMMYVQDIDGHYLQNPSKSYKQVKISDIECIHHNNNWLFLQIS

SEQ ID NO: 2672 - protein, 424 aa, Moorena sp.
MRVFVLDKNKKPLDPCQPARARILLKQGRAKVFRRYPFTIIMRDLEELECVTHNHQIKLDPGSQTTGLAIIQEKVVVWGAELTHRGLQIRDGLTSRRKLRRSRRNRKTRYRQPRFLNRKRPDGWLAPSLMSRVYNILTWVKKLTRFCPITGISQELVRFDTQKMENPEISGTEYQQGTLYGYEVREYLLSKWNRKCAYCGVTDTQLELEHIKPKSKGGSDRVSNLAIACRKCNQIKGNQEIEQFLSGKPDVLKRILSQAKRPLVDAAAVNSTRWKLYNELKALGLPIETGSGGLTKYNRCRQNLPKTHWLDAANVGEVDTLYIESYQPLLISAKGHGTRQMCRTNKFGFPTRYVPRFKFVKGFQTGDIAKAVVTKGKKIGTYTGRIATRKTGSFNISTKHELVQGISHKYCSIVHRKDGYSYSF

SEQ ID NO: 2673 - protein, 418 aa, unidentified
  REGION 1..418: note = Human metagenome
MFVYVISKDGQPLMPTNRFGKVRRLLKNKKAKVVSRCPFTIKLLYEPESLVVQKVVLGQDTGSKHVGTACVADDKVLYQSEVTLRDNIKKKMDNRRAFRKNRRRRKTRYRKPRFLNRANSTKKDRLPPSVRSKVQSHIDEIEFCKKILPISKIVLEVSQFDTHLMKNPSLIFEKIKHWGYQKGFNYEYSSRREAILHRDNYTCQCCGKKHVRLEVHHIVFRSLGGSDDEKNLITLCEKCHKAIHDGILILTKTPKKLNLKYATHMSIIRSQLLKIYPDAIETFGFVTKENRNNFDLQKDHFIDACVVASGGEKFKFNDIIYQKRRVAKGDYQLTKGVRGQQKIPVGKIQGFRKFDKVRYLKQEYFIKGRMSVGLSILMNIFNEKIDFSYLPRGWKIPKLSNLKRISARSSCLCISQRV

SEQ ID NO: 2674 - protein, 415 aa, unidentified
  REGION 1..415: note = Human gut metagenome
MVYVVANDGQPLMPTERHGKVCRMLKSGMAKVVKKCPFTIQLQYESERNVQPVSLGVDAGSKHIGISATTKTKVLYESDVELRDDIVKLLATRRQLRRSRRSRKTRYRPVRFDNRKRKEGWLAPSIRQKIGSHLTVVANACKILPINQIIVETASFDIQKIKDPEIQGIEYQQGEQMDFWNIREYVLFRDGHICQCCKGRSKDKILNVHHIESRKTGGNAPNNLITLCETCHKGYHNGTVILPKNIKHGMQFKDAAFMGIMRWTFYNTLKEQYEPDIPVSMTYGYLTKNTRIEHGLPKEHYIDARCISGNPDAVSDGTYYYQKKVRCHNRQIHKQTILKGGIRKSNQAEYLVKGYRLFDKVRYQGREYFIFGRRKSGFFDIRTLSGEKVNKGSISVKKLTFADTRKNYLIERRTV

SEQ ID NO: 2675 - protein, 518 aa, Nonomuraea sp.
MHKEVTLVATLDTRQQIHFAVLPQRRTLESAPADTPGAGTKRGAEAFGQRSVRHGRGETRHASPDAASVTPARGEAGRETAPRVFALASDGTPLDPCHPARARRLLKAGRAVVARHTPFAIRLKDRSAEQSEIQGVEVSLDPGSRHTGMSLFRAHDGTRYGLFGIRLDHRGGKIRDKLAARTAYRRRRRTANLRYRAPRFANRTRPDGWLPPSLRHRVDTVISWVQRLRRLAPIRALHVETVRFDTHALPAGRPLEGTGYQHGTLHGYETREYLLTKWGRACAYCGTTGTPLNIDHIQPRSRGGSDRISNLTVACMPCNQAKNNMPVTDFLAGRPAVLARILAQAKAPLRDAAAVNTTRWALYTALTATGLPVRCGSGGRTKWNRHRTGAPKSHTLDALHVADLDRVASWPGRVLVIAATGRGSYCRTATDRFGFPRLRLPRTKQIFGYQTGDLVRAIIRKGKHPGSHTGRVVIRTSGSHTVQTASGPIKTSHKHLRLLQRANGYAYTTKKEEHRCAS

SEQ ID NO: 2676 - protein, 511 aa, Streptomyces sp.
LATFRVRQKTDRAVLPQQLALEFESADNPGSRDETGLEDHHRVVPGAGHVREETRTVSPGGAGVTLNCRVGEEGRESHPYVLVLDKHHHPLQPCTPARARKLLKKGRAVVHRHTPFVIRLTDRTIAESEVDGVEVGVDPGSKHTGLAVFTMQAAERRARFAVQLDHRGAIVRKKLGQRAAYRRRRRSKNLRYRAPRFLNRRRPDGWLAPSLRHRVDTTVSWIDRLSRWAPVRAVHVERVAFDTHALSAGRPLEGAEYQQGTLAGYEVREYLLAKWGRCCAYCGASGVPLNIDHIHPRSRGGSDRVSNLCLACVPCNRTKSNQPVEDFLAKKPKLLARIKAQAKSSLQDAAAVQSVRWVLWRALDARLPTHVASGGRTNVNRTRNHLPKSHTLDALNVGKLDVVTEVVSTVLVAGCAGRGTHCRTRTDNHGFPRLRMPRQKRHFGYQTGDLVRAVVPGGKYAGCYTGRVVVRSTGRHQIPTPAGPANTSYKNLTLLQRADGYAYTSRAEGRL

SEQ ID NO: 2677 - protein, 433 aa, Scytonema sp.
MSNFVFVIDTNKQPLDPIPPGQARRLLNQGKAAVYRRYPFTIIFKYAVDNPRRSEHQLKIDPGSKVTGLAIVQGDRVIWGAEIQHRGQQIKNDLEARKAVRRNRRNRQTRYRRPPIKNRGKRQRSARRLAPSLKSRVHNVMTWVNRIKRYVPITGISQELIRFDTQKLVNPEVMGIKYQQGELFGYEVREYLLEKWSRQCAYCGATNTRLEIDHLHPRSKGGSDKISNLVISCHDCNQSKSDRDIQEFLAQKPDTLNRVLAQVKQPLKDAAACNCSRWTLFNELQQTGLPVEVGTGGRTKYNRIRLGFDKQHWLDSACVGIVDQLILMTKQPLLIVAKGWGNRQMCITNKHGFPIRYRERQKTFFGFQTGDMVKAKLPKGKFAGTHVGRLTVRKSGVFEMITHIGKVSPVRHKYCQAMHRNDGYMYRFSTIVQ

SEQ ID NO: 2678 - protein, 378 aa, Scytonema sp.
VVDNPNPKPLTIKLDPGSKTTGIAILDQDKVVWAAELEHRGWQIKNALESRRSLRRSRRNRKTRYRQPRFNNRKRKEGWFAPSLMHRVLTIETWVKRLCLYSSITEIVMELVKFDTQKMQNSEISGVEYQQGELAGYEVREYLLEKWSRKCAYCDKEGVPLQVEHIHPRAKGGSNRVSNLTLSCERCNTKKGTKSIDEFLKRDGSRLEKIKRQAKQPLKDAAAVNATRWELFRTLKNILPTTTGTGGQTKYNRTRFELPKQHWIDAACVGDVETIQLLTQQPLRIKCTGWGTRQMCGTDRYGFPTRHRERSSVHFGFKTGDIVKAVVTTGKKVGEYVGRVLCRKTGSFDIATKSGRVAGISHKFCSLIHQKDGYSYAF

SEQ ID NO: 2679 - protein, 512 aa, Nonomuraea sp.
MTHQAVLPQRPALELGSADNPGIRDETGAEGRRKAAPGAGHVREETLSGSPAAGGVTLDRPVREKGRESHPYVFVLDKRGRPLQPCTSARARQLLKKGRAAVHRRTPFVIRLKDRTIDESEVDGVELGTDPGSRHTGVAVFTAKAGERRARYAIRLDHRGAQIRRKMGQRAAYRRGRRSRNLRYRKPRFANRTRPQGWLPPSLRHRVATTVSWIDRLCRWAPVRAVHLERVAFDTHALSAGRSLDGAEYQHGTLHGAEVREYLLAKWGRRCAYCGLSDVPLNLDHIHPRSLGGSDRVSNLTLACVPCNQAKGNQLVEDFLARKPKLLAAILAQAKVPLRDAAAVQSTRWALWQELDARLPTHVASGGRTKWNRTRNRLPKSHTLDALAVGKLDTVTETVSAVLVAGCAGRGTHTRTRTDRHGFPRLRLPRQKRFFGYATGDLVTALVPTGKKQGTYTGRVAVRASGYFNVTTAHGTVEDLNHRHVRLLQRGDGYAYTFRNESSRPEAVFSPA

SEQ ID NO: 2680 - protein, 447 aa, Scytonema sp.
VSRVIVPTLNIVEANFTRKEYAVMQNYVFVIDQNKQPLNPVSPARARELLTKQKAAVYRVYPFVIILKHVVDNPQSKPLTIKLDPGSRFTGIAILDQDKVVWAAELEHRGWQIKNALESRRSLRRSRRNRKTRYRQPRFNNRKRKEGWLAPSLMHRVLTIETWVKRLCLYSPITQIAMELIKFDTQKMQNPEIDGVEYQQGELAGYEVREYLLEKWGRKCAYCDHAGVPLQVEHIHPRAKGGSNRVSNLTLSCERCNTKKGTKSIGEFLKKNGSRLEKIQRQAKQPLKDAAAVNATRWELFRTLKNILPTTTGTGGQTKYNRTRLELPKQHWIDAACVGEVNNLNLLTQQPLKIKCTGWGTRQMCGTDKYGFPTRHRERKQIHFGFKTGDIAKAVVTFGKKVGTYIGRVLCRKTGSFDIATISGRVAGISHRFCISIHKKDGYSYGF

SEQ ID NO: 2681 - protein, 420 aa, unidentified
  REGION 1..420: note = Human gut metagenome
MQYVYVLNKHGEPLMPCSPGKARLLLKQQKAHVVKRTPFTIKLLYGSTGYKQPITLGVDAGSKHVGLSASTEKRELYCEEFTPRNDVVELLSTRRQSRRSRRNRKTRYRAPRFNNRVHGKHKGWLAPSVEVKIQEHITVIKRICRILPVTLVRVETAEFDTQRLKAMLAGKPLPVGTDYQLGEMYDKYNVRQYVLKRDNYTCQCCGAHTTAKKAVKLRVHHLESRKVGGNAPSNLITLCTTCHNALHKGKVSLDGKERGKPLRDTAFMGIMRKTLMTQLREELPIPVQGTYGYITKMRREQNNIKKSHVNDARCISKHPLAEPCSVCYRTKAIRHHNRQTHKANFSKGGIRKRSQMPYVVEGYRLWDKVLYNGQECFVSGRRASGSFTLKKLDGTRVSKGVTFKKLQLLEPATNYLIERM

SEQ ID NO: 2682 - protein, 318 aa, Scytonema sp.
MVKPRYARKFPFTIILKESRPDVPVQPLRIKIDPGSKTTGIAVINDSTGEVVFTADLKHRGFSVRVALTSRRQLRRSRRARKSRYRQPRFNNRKRPDGWLPPSLMSRVYNIQTWVRRLMRLAPITAISQELVKFDTQLMQNPALCGKEYQQGTLAGYETREYLLEKFGRKCVYCDKQDVPLQIEHIHPRAKGGTNRISNLTLSCEKCNIKKGTKDIKDFLKKDPLHLKKIEAQAKKPLADTAAVNSTRFKLLEVLKSTGLLVETGSGGLTKFNRTKLELPKTHYFDAACVGRSAPSGKSKVTHSKVKSKNPINKFRGL

SEQ ID NO: 2683 - protein, 388 aa, Scytonema sp.
MPKVFLIDTDKKPLDPIHSAQARQLLRNGKAAIFRRFPFTLILKESRPDAPVQPLRLKIDPGAKTTGFALVNDATGEVVFAFSLQHRGFAIRDALTSRRQIRKSARARKTRDRAPRFNNRKRPSYWRTPSLQSRVENIKTWVKRLIKLAGIGAISQELVRFDMQLMLNPDIQGNEYQQGTLAGYETREYLLQKWDRTCVYCGAKDIPLQVEHIHPRAKGGSNRLSNLTLSCEKCNVKKGTKDVKDFLKKDPEKLKRILSQTKKPASDAAAVNTTRFALLECLKQFGLPVETASGGLTKFNRSSQLLDKQHWIDAACVGKSTPTLNIKGVKPLLIKAIGHGNRQMCITNKFGFPIKHRSNIKFHFGFRTGDMVRATLPTGKFAGTHVRG

SEQ ID NO: 2684 - protein, 419 aa, Moorena sp.; identical to SEQ ID NO: 2658

SEQ ID NO: 2685 - protein, 420 aa, unidentified
  REGION 1..420: note = Human gut metagenome
MQYVYVLSKHGEPMMPCSPGKARLLLKQQKACVVRRTPFTIKLLYGSAGYKQPITLGVDAGSKHVGLSASTEKRELYREEFTPRNDVVELLSTRRQNRRSRRNRKTRYRAPRFDNRVHSKHKGWLAPSVEVKIQEHITIIKRICKILPISLVRVETAEFDTQRLKAMLAGKPLPVGTDYQLGEMYDEYNVRQYVLKRDNYTCQCCGAHTTAKKVVKLHVHHLESRKTGGNAPSNLVTLCTTCHKNLHKGRVTLDGKERGKPLRDAAFMGIMRKTLMARLKEELPIPVQGTYGYITKMRREQNDIKKSHTNDARCISKHPLAEPCSVCYRTKAIRHHNRQTHKANFSKKGIRKRSQMPYLVEGFRLWDKVLYKGQECFVSGRRSSGSFALKKLDGTSISKGVTFKKLRLLEPATNYLIERM

SEQ ID NO: 2686 - protein, 426 aa, Scytonema sp.
MSKSNFVFVLDADLNPLTPCSPGVARSLLKSGKASVYRRYPFTLILKKKVDTRPAPITIKLDPGSKTTGIALLQGSKVVFGAELTHRGQTIKASLESRRSLRRGRRNRHTRYRPARFLNRTRPTDWLAPSLQHRVETTMTWVNRFIRLAPVNSIVQELVRFDLQKMENPEISGIEYQQGELAGYEVREYLLNKWDRKCAYCAVENVPLQIEHIQPKAKGGSNRLSNLCLACEKCNLKKGTQDIEQFLAKKPDLLKKIKAQAKRPLKDAAAVNSTRWALYHRLKQTCLSISTGSGGLTKFNRTRLGLAKTHWLDAACVGEVEMLEVLTLKPLKITATGHGTRQMCRTDKFGFPNRYVPRNKFVKGFQTGDIVKAVVTSGKKIGTYVGRVAVRSTGSFNISTANGLIQGIGYKNCVSVHKKDGYNYGF

SEQ ID NO: 2687 - protein, 453 aa, Lactobacillus sp.
MMSEVQKVNYIYVVDSNGTPLMPTSRLGMVRRWLKTGQARWFGNSRKIIQFVRPVTTNTQELTLGVDAGFHLGLAVVGNQREYYASESLRKSEKDRITSRRELRRTRRNRLRHRQSRFDNRRRKDGWLAPSMQHRLDFTIKEIRCLYTFLPITKLVVEVTPFNNQKLVDSNIKPWEYTQGKMHGFKTIKDYLLTRDNYRDALDGKQYPASQLRVHHLVQRRDGGSNQPDNLVLLSDINHSQANHHNGSLAKLRENRQKELDYRGAYFMSILATRLSDYFARYTTTQGYLTANLRQKYQLEKSHLNDAFIIAGGTNTTLRTNNVYSRQKLRNNNRVLQKFYDAKYIDSRDGKQKTGKELSSGRTRRTRELNYANLRQFRQEKVKKGRVSIRRNHYQLRPHDVVLNTKTNKVETVTGVQNNGTVIKFQTGKTCSLKNVVSLYHVNGMLEKKIEDI

SEQ ID NO: 2688 - protein, 428 aa, Scytonema sp.
VSKVLVIDTSLRPLDPIHPAQARQLLRNGKAAIFRRFPFTLILKQARPETSVQPLRIKIDPGAKKTGIAIVNDITGIVVFAAELQHRGFAIRESLTSRRQLRRSRRNRKTRYRQPRFDNRKRSNGWLAPSLMSRIHNIETWVKKLIQLVPITAMSQELVRFDTQLMQNPDIQGKEYQQGTLAGYETREYLLEKFGRKCAYCDKQDLPLQIEHIAPRAKGGSNRISNLALSCEKCNLKKGTKDIKEFLKKDPVRLKKIEAQAKKPLADTAAVNAARFKLLEVLKSTGLPVETGSGGLTKFNRTRQNLEKTHWIDAAVVGKSTPEKLIISCVKPLSIQAVGHGSRQSCRTNKYGFPSRHVPREKIHFGFQTGDIVKAVVKTGKKVGTYVGKVAVRSSGSFNISTKNGLVQGISHKFCKRIHAKHGYSYAV

SEQ ID NO: 2689 - protein, 431 aa, unidentified
  REGION 1..431: note = Human gut metagenome
LNRVFVLGKTGKALMPCHPARARQLLHSKKARVKRLYPFTIQLTQRSEGYIQPVELKFDPGSKQTGIGIVLHGKNRLSAIYAAVLTHRGNEIKSNLDSRRMIRRVRRNRKNRYRQARFLNRVRSKHKGWLAPSVQSRVDNIVEWSKRFMRLSPVGFITVESVKFDMQKMENAAVQGLEYQRGTLFDYEVKEYLLEKYNYSCVYCGAKNVPFEKEHVIPRSRGGSNRISNLVLSCRSCNEKKDNLPIEEFLKDNPALLKKIKAQLKSSLKDAAAVNITRKQIVKELSALNVPVLTGTGAETKYNRVSQGYPKEHYIDALCAGTTGAKLYIPCKLRPLLIKKERRNNRQMCLVDKYGFPRGKAKGSKVVKGFKTGDIVKAVVLKGKKKGTYKGKVAVRSSGSFNINVKQGRVEGIGWKNCVMLHRFDGYSYTY

SEQ ID NO: 2690 - protein, 432 aa, Scytonema sp.
MEGLMSKVFVIDTEKRPLNPIHPAQARQLLRNKKAGVFRNFPFTIILKESLSDSSVSPLKLKLDPGAKTTGIALVNDITGEVVFAAELKHRGFVIRDALTSRRQLRRSRRNRKTRYRKPRFLNRTRPEGWLAPSLQSRIDNIKTWVKKLCRFAPIEAISQELVRFDMQLMRHPNIEGKEYQQGTLAGYETREFLLEKWNRQCAYCGAKDVPLQIEHIHPRARGGSNSITNLTLSCSKCNTKKGTKDIKDFLKKDPSRLEKILKQAKRPLADTAAVNTTRFALLDVLKATGLPVETGSGGLTKFNRSQQNLAKSHWIDAACVGKLTASLNIKGIKPLLITASGHGSRQSCRTDKYGFPSRYVPRFKFVNGFQTGDIVKAVVTNGKKIGEYVGRIAVRTTGSFNISTKNGLVQGISHKYCKGIHRKDGYSYGAN

SEQ ID NO: 2691 - protein, 413 aa, unidentified; identical to SEQ ID NO: 2636
  REGION 1..413: note = Human gut metagenome

SEQ ID NO: 2692 - protein, 257 aa, unidentified
  REGION 1..257: note = Human gut metagenome
MEYGRVIDISRYKASIKQHGKEYQEGDQLEFWNTREYVLARDGHKCQYCKGKSKDSILNVHHIESRKTGGDSPSNLITLCETCHKEYHKGNIDLKIRRGKSLRDAAVMGIMKWRLYEELKSRYDRVFMTFGYITKHNRIKYGIEKSHTSDAFVISKNINAKRIERQYLKRLIRRHNRQIHKMKILKGGKKKNNQAPFEVFGFRLFDKVLYNNKIFFVYGRRKSGSFNIRDFNGENSKDVSRKKFKLIRGKRHPIILK

SEQ ID NO: 2693 - protein, 436 aa, unidentified
  REGION 1..436: note = Human metagenome
MTKTLTKQTTQACVLDQNGKPLMPTKRLGKVYRLLKTKKAHIVSYEPFTIQLDYEPDTHVIQPMTLGVDSGAIHSGYSVANEHSEYYNSEVIARDNISYRISDRHMYRCNRRSRKTRYRKPRFNNRKNKKKGWLPPSLEQKVAVQLNEIDHLHQYFPIETIIVEVAEFDIQKIKNPDISGKDYQQGTLQGYNIRNYLLEKHGRKCFYCDKEVSTFEVEHMIPKAKGGSNRIDNLTLSCHSCNQKKGTLTAEEFIKQTLPVKKVTKKLKQLSKEKQLFKYMAHMNATRWTLYNAINDKYPNVKMTYGYITKYNRIQAGLPKAHHIDAKCITGYSQVPSFDTTVVKTKMRRHNRQLHRATFSKGHVRKAASLPTVMFGFRLYDIVMYNNHRYYIKSRRSTGSFTLVSVEGLKDTNRTYKKLTLLTHTNAYLTNHYVNV

SEQ ID NO: 2694 - protein, 421 aa, unidentified
  REGION 1..421: note = Human gut metagenome
MLVYVLSKNGQPLMPTHRCGFVRRLLNSQKAKVVRRCPFTIQLQYDTDCKTQPVTLGIDAGSKHIGVSATTESKVLYEADIELRNDIVGLLATRRQMRRARRSRKTRYRKARFDNRKRNDKWLAPSIQHKVNCHLEAVRFVHKLLPISKIIVEVASFDIQKIKNPLITSTDYQNGELLDWKNVREYVLFRDSHICQCCKGKSKDPVLQVHHIESRKIGGNAPNNLITLCKTCHNGYHHGTVKLPAKIKRGMKFNDATFMGIMRWGFYNQLKSLYPDVSLTYGYITKDIRISNGLAKTHFIDARCISGNPLATSDNTVYFLKKRRRHNRQIHKFNILKGGRKKRNQAAYLVKGYRLFDKVNYNRKEYFIFGRRASGFFDIRTLSGEKVNKGSISCKKLKLLEASKGYLTERRNAFLSPLNSV

SEQ ID NO: 2695 - protein, 427 aa, Scytonema sp.; identical to SEQ ID NO: 2626

SEQ ID NO: 2696 - protein, 427 aa, Scytonema sp.
MSKVFVIDTDKRPLDPIHPAQARQLLRNKKASVLRRFPFTLILKESRPESPVLPLRLKLDPGAKITGIALVNDATGEVVFAAELKHRGFAIRDALTSRRQLRRSRRNRKTRYRQPRFLNRTRPQGWLAPSLQSRVDNIKTWVEKFVKTAPIKAISQELVRFNMQLMRNPDIQGEEYQQGTLCGYETREYLLEKWERQCAYCGVKDVPFQIEHIQARAKGGSNSITNLTLSCSKCNIKKGTKDIKDFLKKEPSRLENILKQAKRPLADAAAVNTTRFALLEVLKETELSVETGSGGLTKFNRSQQNLPKLHWLDAACVGKSTPTLNIKGIKPLLITANGHGTRQICGTDKFGFPKRHRTNKQIHYGFQTGDIVKAVVTSGKKIGEYVGRVFCRATGNFDIATKSGRVSGISYKYCSAIHKKDGYSYEY

SEQ ID NO: 2697 - protein, 431 aa, unidentified
  REGION 1..431: note = Human gut metagenome
MNRVFVLSKTGKALMPCHPARARLLLHSKKAVVKRLYPFTIQLTQRSEGYIQPVELKFDPGSRQTGIGLVLHGKNRLSAIFGAVLTHRGQEIKGNLDSRRMIRRARRNRKTRYRQARFLNRVRSKHKGWLAPSVQSRVDNIVEWSKRFMRLSPVGFITVESVKFDMQKMENAAVEGLEYQRGTLFDYEVKEYLLEKYNYSCVYCGAKNVPFEKEHVIPRSRGGSNRISNLVLSCRSCNEKKDNLPIEEFLKDNPALLKKIKAQLKSSLKDAAAVNITRKQIVKELSNLNVPVLTGTGAETKYNRVSQKYPKEHYIDALCAGTTGAKVYISKKLKPLLIKKERRNNRQMCLVDKYGFPRGKAKGSKIVQGFKTGDIVKAVVLKGKKKGTYKGKVSVRSSGSFNINVKHGRVEGIGWKNCVMLHRFDGYSYTY

SEQ ID NO: 2698 - protein, 425 aa, Moorena sp.
MENTLKVFVLNMRGQPLMPCSPPKARKLLRAGKAVPVRRTPFVIQLTVPTGETKQPITLGVDAGYKHVGLSATTAKEELLASEVELRQDVTGLLSDRLALRRARRNRKTRYRAPRFDNRVRSKHKGWLAPSVENRIQAHISRIEAVCRVLPITNIVIETASFDIQKIKNPEVEGTDYQQGEQLGFWNVREYVLFRDGHVCQACKGRSKDLILNVHHIESRKTGGDAPGNLITLCEACHKAYHAGKLKQFSPRRGASFRAETFMGIMRWTVLNRLRERHPELPVTNTYGYLTKHKRIVAGLPKTHCADAFCIAGVLDAKRRGEYLFQKQTRRHNRQIHKLTILKGGVRKRHQAPYLVHGFRLFDKVLCKGEVGFIFGRRSSGAFDVRRLNGTKISAGISYKKLSLLEKRKMFLTELRKEGRDSSRV

SEQ ID NO: 2699 - protein, 451 aa, unidentified; identical to SEQ ID NO: 2424
  REGION 1..451: note = Human gut metagenome

SEQ ID NO: 2700 - protein, 515 aa, Actinoplanes sp.
MRQSTHSGVLPQRRTLESVSADKPTRAHETGHGHRDPVAVPGVRHGRGETTAPHAGQWRHPGGQPSGGRGRETPPTHHPVVLVLDKHGRPLQPCTPARARKLLAAGRAVVHRHTPFVIRLKDRTVQDSEIQGVEVGVDPGSKATGVAVFTTRAGARTGLLAIEIRHRGGQIRDKLTARAALRRGRRSRNLRYRAPRFNNRARPQGWLAPSLRHRVDTTMSWVDRLRRWTPVTQVHVETVAFDTQLLQNPTIQSTEYQAGELAGYEVREYLLEKWKRRCAYCNATGIPLNIDHIHPRARGGSDRIANLTLACVPCNQAKGSTPVDVFLTDRPAVLARILRQAKTPLRDAAAASSTRWALWRALTGTGLPVQVATGGRTKWNRHRTGAPKTHTLDALHTGALDTVVRWPNTTLVATSTGRGSYARTRSNRYGFPRLHLPRKKQVHGFATGDLVHAVVPTGVKRGTHTGRVAVRTTGKFNIRTTTRLVQGIHHRHIRLLQRADGWAYTRQPEGQPTHA

SEQ ID NO: 2701 - protein, 457 aa, Scytonema sp.
MITNSVFVESKNGKILKPTTPARARILQSVGKAKKLKLFPFTLILEKEVDEDVEPYLELRIDPGSKFTGISLVDLNKNEVIWAMELEHRGLAIKMEMIKRAGVRRSRRSRRLRYRQKRFDRKRPDGWLAPSLRHRLLTTETWIKRLLKLAPIKSIAIESVKFDLQKMETPDIEGIEYQQGTLWGYTLREALLEHWGRKCVYCGKTDVPLQIEHINARSKGGSDRFSNLTLSCEKCNQKKGNKSVEQFLKAQPEILKKIKSHQKKSLSDAAAVNSTRKAIFEMAHQFGLPVISGNGASTKMIRIKSGLPKAHWIDSACVGTSEIVKLCIYQPLRVTCKGHGTRQVQRMNAKGFPAIASIKKNPITGKKEVKLVAKNQKYTHATAGDYVICNLLKDRKHIKAGIYRARIKTPTQKGVEVLISDHRIAVDRHYIKLIHRSDGYEYSFTTIDQDLLRFSAI

SEQ ID NO: 2702 - protein, 443 aa, Anoxybacillus sp.
MVEENMTCFMQRKGENPMVFVLDTNKRPLAPCHEAVARKLLKQGKAAIYRRFPFTIILKKSVDESEIKATYRLKIDYGSRHTGLAILRGQEVVWLGQLDHRTDIKERIDKRRAFRRARRNRKTRYRKPRFLNRKRKEGWLPPSLESRMQNIKTWVERLRKICPIEHISYENAKFDTQLMRNPEINGVEYQQGTLQGYEVREYLLEKFGRKCCYCGKENVPLEVEHIIPKSRGGTDRIDNLCLACRDCNQRKGSQTAEEFGYPHIQEMVKKTLKDASVVNATRWKVYEVLKQSGCEVECGTGARTKMNRIRLGLPKIHYFDACCVGKSTPLQLHFKTKEVLFIKAKGRGSRSRTNLDRYGFPRGYLARQKYFFGFQTGDMVKANVPKGKYQGVWFGEVACRKTGSFDIKGKDGKRIAQGINYRYVQVIQRFDGYACGKGVAELA

SEQ ID NO: 2703 - protein, 406 aa, unidentified
  REGION 1..406: note = Human gut metagenome
MVYVQDIYGRPLMPTTRHGKVRRLLKSKKATVVNLCPFTIRLLYDTTGYKQEITLGVDTGTKHVGLSATTKSKELYASEVILRSDVVDLLSTRRELRKIRRYRLRYRKPRFMNRIKSKKRGWIAPSIRQKIDSHIRIIGFVYSILPVSKLIIEVAQFDTQKIKNPEISGKEYQEGEQLGFWNVREYVLARDEHKCQHCKGKSKDPVLNVHHIESRKTGGDSPSNLITLCKTCHKEFHKGNIKLKVNRGESLRDAAVMSIMKWELYDELKSLYPNVKMTFGYITKYNRINHGIEKSHVSDAFVISRNFDSERLGYYYKRKLVRRHNRQIHKMKAPKGGNKRMNQSPFKVFGFRLFDKVMFQGKERFIYARRLRGIFNIRDINGENKKDISYKKLEYVSHGLISIVAG

SEQ ID NO: 2704 - protein, 418 aa, Moorena sp.
MQNYVFVIDANKQPLNPIHPRKARRLLDKGKAAVFRMYPFTIILKTAISNPTISPGQIKIDPGSKVTGFALVQNNQVIWGMELEHRGGFIKKKLESRKAVRRGRRNRHTRYRKPRFLNRKRSEGWLPPSLEHRVSTIETWVKRLTKFCPINEIWVERVKFDTQKMQKPEISGVEYQQGELAGYEVREYLLEKWRRECTYCGKQSVPLQIEHIQPKSLGGSNRVSNLCLACEKCNQRKGNKPIEEFLKNKPSLLQKIKTKAKQPLLDAAAVNTTRNKLVKVLQNILLVVTGTGAQTKYNRIKLGLPKQHWIDAACVGDIETLVLKTYQPLLVTCKGQGGRQKAALNKYGYPIRHNPLKPIKGWVTGDIAKHQKLGIGKVTPRSKGSFGFTPLGTKGYKSCKPQDISAIHRKDGYTYRFC

SEQ ID NO: 2705 - protein, 427 aa, unidentified
  REGION 1..427: note = Human gut metagenome
MQYVYVLNKHGEPLMPCSPRKARLLLKQKKACVVKRTPFTIKLLYGSTGYKQPITLGVDAGSKHIGISATTEKHELYREEATPRNDVVDLLSARRAFRRSRRNRKTRYRAPRFNNRVHSKHKGWLAPSVEVKIREHITLIKRVCRILPITLIRVETAEFDTQRLKAMLESKPLPVGTDYQLGEMYDEYNVRQYVLKRDNYTCQCCGAHPTKTKAVKLHVHHIETRRTGGNAPNNLITLCTACHKALHAGKVTLDGKKRGKPLKDTAFMGIMRKTLLERLRKELKIPVQGTYGYITKYLREKHGIPKSHTNDARCISKNPLAIPCDTCYYAKAVRHHNRQLHKATILKGGIRKANQAPYIVKGYRLWDKVSYNGTECFITGRRTSGYFALKKLDGTVISNSISYKKLRLLEVATNYITEKEVKGQFLP

SEQ ID NO: 2706 - protein, 456 aa, unidentified
  REGION 1..456: note = Human gut metagenome
MSTCVCVLSNSGERLMPTIRLGKVRRLLKDGKAKIVKHHPFTIQLLYDSKTNTQPIEICEDVGYNYIGISVKSESHEYVSAQYDTLQDEKACHDSCRKLRRTRRNRLRYRKPRFDNRKRGEGWLAPSLEHKKQLNIRLIERYVSVIPITHATVEVGSFDTMLLQAIQKGKSKPEGVDYQKGPRYNLATLREAVFYRDNYTCQVCGRKTADGAILHMHHMFYWKGRHGYQLDELVTACEKCHTPANHQKCGKLFGFGEDKEFANLSGAAFMNAVRWQIVDALHATYGKEFVTITYGAMTKEKRIILGIEKTHNNDAYAMGDYHPVHRCVFRHYQKRRRNNRVLEKFYDATYIDTRTGNKAKGKELFNGRISRNHKKNSEDLHKYRSKKVSKGRRSIRRQRYAIQPYDTVRLESKTYITSGCHNKGTRLLIPANGKSKSVAISKVQVVCHAGAWIQII

SEQ ID NO: 2707 - protein, 477 aa, Blautia sp.
MIIALDKYKRPLGFLTERRCRILMERKRAVLYRVFPTVVILMDVDARTIPDLPSFRIKIDPGSKYTGIAIIRNDTDEFVYAMQIEHRGDAVRAALNKRKNARRNRRSRETGYRRAKWGNRCLSEKDKRSYDSSREDGWLPPSIRSAADNVISWVRRLGRWINLTECSFEAVRFDTQLMEDPDIEGEEYQHGTLFGLEIKEYLMEKFGHTCQYCGGKSGDPVLEWEHMRPKSRGGSDRVKNALLSCSSCNKDKGNRTPEEWLEQIKARLPREKGKRKELDEERVKLIQKVIDGKPQGSALRYAAWVSSSRRYLEKALFGIFGDVECSSGGRTKYNRTELGYPKEHHYDALCVGTVPEKGYHDRTNGYYLYAKAAGRGTRLRGHLNKCGVIATKWTDRKKGFFGFQTGDIVVAEVPHKTPKPYKYEGRFVGRVMVRATGSFDIKTTDGKLVTVKEQYCRLLQANSGYHYTMKRAIPLGH

SEQ ID NO: 2708 - protein, 417 aa, unidentified
  REGION 1..417: note = gut metagenome
MPCSSAKARLLLKEKKAVVKRRTPFTIQLTIATGETKQSVTLGVDTGYKHVGLSASTEKAELFASEVELRQDITDLLSTRRALRRARRNHKTRYRAPRFDNRIRSKHRGWLAPSVKNRINAHLSRIDAVLRILPVTKIVVETASFDVQRIKNPDIEGEAYQQGEQLGFWNVREYVLWRDGHVCQHCHGKSKDPVLNVHHLESRRTGGNAPNNLVTLCKTCHQALHQGEIKLKAKRGASFKAQTFMGIMRWNVLNRLKAMHPEIEIRNTYGYLTKHSRISHGIAKSHCADAYCIAGHLKAKRLAGYYFQKQTRRHNRQIHKLTILKGGLRKRNQAAYEIKGFRLFDKVKVFGEEGFIFGRRASGYFDVRKLDGKRISAGISSKKLTLLEKRKTYLTEYRKEAALPPLNEFRGFRADVL

SEQ ID NO: 2709 - protein, 465 aa, unidentified
  REGION 1..465: note = Human gut metagenome
MSTCVCVLGNNGERLMPTIRLGKVRHLLKDGKAKIVKHHPFTIQLLYDSETNVQPIEICEDVGYNYIGVSVKSESHEYVSAQYDTLQDEKEHHDDCRMHRRTRRNRLRYRKRRFDNRKRDKGWLAPSLGHKKQLNISLIEQYVSVIPITHATVEVGSFDTMLLQAIQKGEAKPEGVDYQKGPRYNLATLREAVFYRDDYTCQVCGRKITDGAILHMHHMFYWKGRHGNSLSELITVCEKCHTPANHQKGGKLYGFGEDIKFANLSGAAFMNTVRWQIVNVLYAAFGKPFVTFTYGAMTKEKRIALHLEKSHNNDAYAMGSFHPVNRCAFEHYEKVKRNNRILEKFYDSQYIDTRTGELTNGKSLFNGRISRSHKKDSENLHKYRGKRICKGHRALRRKKVALNPGDLVSLNGEILVVYGTHTKKNGSVNVEFKTPSRDGKKSASLKKLKIVKTSNLMHSAWTKVS

SEQ ID NO: 2710 - protein, 418 aa, unidentified
  REGION 1..418: note = Human gut metagenome
MVYVLNKNNEPVMPCSERKARLLLKQGRAVIYRKDVFTIKLINGSYGYKQHITIGIDCGSKHIGISATTNKKELFSANAELRNDIVKLLSDRKSLRRNRRYRKTRYRKPRFDNRRIKEGWIAPSIRQKIDSHVRIVSLIHKLLPVKQVNVEVVAFDMQKIKNPDIKRSEYQMGEQLDSYNVREYVLFRDNHICQHCKGKSKDDVLQVHHIESRKTGGNAPNNLVTLCKTCHEKYHSGEITLNVNRGKSFRDASAMSTMRWFLYEELKSRFSNVNITYGYITKYKRIKLGLSKEHYNDAYCIAGNLNTSRLCNHHLIRFIPRHSRILHVQKFSKGGVRRSASAPYWLNGGKPSKHGIIFTRFDKVKFNSVVCFISGSSNGFASLRDINWNKVHGCKTTVTVNKLVLVSRRRGSMLFGEL

SEQ ID NO: 2711 - protein, 443 aa, Scytonema sp.
MSKVFVLDIYKRPLDPIHPAQARLLLRNKKAAVFKRFPFTIILKKLIVKFPEPLRIKFDPGAKTTGIAIVNDLTGEIVFAAELQHRGFAIRESLTSRRQLRRGRRARKTRYRKPRFVNRKGSDGWLAPSLMSRVENIETWFYKLRALAPIKFVSVELVRFDTQLMQNPEIQGKEYQQGTLAGYETREYLLEKFGRKCAYCDKQNVPLQIEHIHPRSKGGSNRISNLTLSCEKCNVKKGTTNIRDFLKKDPSKLEKILRESKKPLADTAAVNATRWKVYEIFKNSLLPVETGSGGLTKFNRSQQGLEKTHWIDAACVGKSTPEKLTVRLRSPLALSEAEGLIIQGVKPLLITANGHGNRQMCGTDKFGFPSRHRTKKQIHFGFQTGDIIKAVVTSGKKVGKYVGRVSCRATGSFDIATKAGRIAGISYKYCSAIHKKDGYSYGA

SEQ ID NO: 2712 - protein, 457 aa, unidentified
  REGION 1..457: note = Human gut metagenome
MDAVAVISASGKPLMPTNPVRARKLIKKGKAVIYKYRPLFTIRLTERTDGDIQTIEYCCDTGYQHIGLSIKSRKHEYVNEQRDLLPNETERHNDSRKYRKARRRRKLRHRACRRDNRHDNQICKDGYAPSIRNKRDQHISLYRSYTEILPVERAVFEMGQFDTQVLKAIEKGEPLPQGKDYQHGERYGYATLREAVFARDDYTCICCGKNAFKDKRILCIHHLGFRIGDRTNRLANLATVCTKCHTPKNHQPKGKLYNLKPELKDFKGATFMTMVRWDMLDKLKAVSKDIRVDVTYGAATKEARRDLKIKKSHANDAYCMESFHPSHRTDLKRYEKCRRNNRVLSKFYDATYIDIRDGKKKKANALGCNRTKRRESRRSEKNERIYRGEKVSKGRIVLRTKRAVIRPGDIVYVGKKKYIVASSKNLGKQLKLADGSLLTTSKVTKIIHCGGWKTVTL

SEQ ID NO: 2713 - protein, 441 aa, Scytonema sp.
MKMQNYVFVIDAERKPLNPISPARARELLTKQKAVVIRRYPFTIMLKAKIETPTLKPLTLKLDPGSKVTGIAILEGERVIWAANLEHRGQQIKSDLTKRLSIRRTRRSRKTRYRQPRFSNRSRRQGWLAPSLLHRFLSIETWVKRLCKYSPITEIVMELVKFDTQKMQAETIEGVQYQQGTLWGYQVREYLLEKWGRCCAYCNSSGVPLQIDHIKPKSKGGSDRISNLTLACERCNLAKGNKPVEDFLKKDSARLRKIRSMALQPLKDAAAVNSTRWALYSTLKALLPIKSSSGAQTKYNRLRFGLVKEHWIDASCTGDLNHIIFSTQQPLLIKASGWGKREMVTKNKYGFPVLNKEGNQALKTRSPVQYGFRTGDIVRANVPKGKHQGVHLGRVSVRESGAFDVTTPLGKLQSIRHKHCQPIHRKDGYSYSFHPMSTIVQ

SEQ ID NO: 2714 - protein, 439 aa, Scytonema sp.
MSKVFVLDTEKRPLDPIHPAQARQLLRNGKAAVFRKFPFTLILKVTFKTENPVQPLRLKIDPGAKTTGLAIVNDATGEVVFAAELQHRGFQIRESLTSRRQLRRSRRNRKTRYRQPQKHEWFRKGKKKPVPKQRRTWLAPSLMSRVHNINTWVEKLRKLALISEISQELVKFDTQLMRNPEVCGQEYQQGTLAGYETREYLLEKWKRCCAYCGKKDVPLQIEHIHCRAKGGGNSITNLTLSCEKCNTKKGTKDIKDFLKKDPERLEEILAQAKRPLADTAAVNSTRFRLLEVLKATGNPVETGSGGLTKFNRTNQELEKTHWIDAACVGKSTPEKLTIKGVKPLLIKACGHGTRQSCRTNKYGFPIRHCERKKIHFGFQTGDIVKAIVTKGKKVGEYVGRIATRATGSFNISTKDSLVEGISYKYCTTIHKKDGYNYVH

SEQ ID NO: 2715 - protein, 426 aa, Scytonema sp.
MSKSNFVFVLDADLKPLTPCTPGVARSLLKSGKASVYRQYPFTITLKKKVDETPESVTIKLDPGSKTTGIALLQGSKVVFGAELTHRGQTIKASLESRRSLRRGRRSRHTRYRKARFLNRVRPTGWLAPSLQHRVETTMTWVNKFIRLAPVNSIVQELVKFDLQKMENPEISGIEYQQGELVGYEVREYLLNKWDRKCAYCAVENVPLQIEHIQPKAKGGSNRLSNLCLACEKCNLKKGTQDIEQFLVKKPDLLKKIKAQAKRPLKDAAAVNSTRWALKERLKETGLSVSTGSGGLTKFNRTRLGLAKTHWLDAACVGTVEMLEILTDRSLKITATGHGTRQMCRTDKFGFPCRYVPRNKFVKGFQTGDIVKAVVTSGKKIGTYVGRVTVRSTGSFNISTANGLIQGIGYKNCVSVHKKDGYNYGF

SEQ ID NO: 2716 - protein, 456 aa, unidentified
  REGION 1..456: note = Human gut metagenome
MSTCVCVLSNSGERLMPTFRLGKVRRLLKDGKAKIVKHHPFTIQLLYDSKANTQPIEICEDVGYNYIGISVKSQSHEYVSAQYDTLQDEKACHDSCRKLRRTRRNRLRYRKPRFDNRKRGEGWLAPSLRHKKELNVNVVKMYCAVMPITHATIEVGSFDTMLVKAIQEGKAIPEGADYQKGPRYNLATLREAVFYRDNYVCKVCGRKATEGAILHVHHMFYWKGRHGNSLSELITVCEKCHTPANHQKGGKLFGFGEDKEFANLSGAAFMNAVRWQIVNALYATYGKEFVTITYGAMTKEKRIILGIEKTHNNDAYAMGDYHPAHRCVFRHYQKRRRNNRVLEKFYDATYIDARTGNKAKGKELFNGRINRNHKKDSENFHKYRSKKVSKGRRSIRRQRYAIQPYDTVRLEGKTYITSGCHNKGTRLLIPVNGKSKSVAISKVQVVCHAGAWIQII

SEQ ID NO: 2717 - protein, 428 aa, Scytonema sp.; identical to SEQ ID NO: 2688

SEQ ID NO: 2718 - protein, 536 aa, unidentified
  REGION 1..536: note = Human gut metagenome
VLRPRYQYPTRWYPSREQGSGNGCLSGEENTDLEQEVSGTLSKGDHSHPGEQDFCVPAITIQGGPAMSVFVVGLNGCRLMPTSERKARLLLKHGKASVYRKVPFTIKLNYKTGSTTQSGYLGIDTGSQHIGVSVVREDGTVLHKEEIGLRDSMSKRKLMQSRASSRRGRRHRKTRYRHPKWRPKAKRVYCEIPDRKGRHWKKKEITFASKRAKGWLPPSLQSKTDHHIWWIKKLQDLLPEGYRLSIELGRFDPARLKDPEIHGELYQKGPQYDYENVRAYVLNRDRYTCQVCGKKGGKLHVHHILYRSHGATDDPQYMATVCSDCHNTENHQQGGILYQWMQKQKKFTRGLRDATFMNILRKRLIEAFPGATFTYGNITKADRERLRLPKSHGNDATAIAIVKTGIMTVKDKEPVIYIQQVRRKKRSLHEETPRKGRKEPNRKASRYDKNTKAVTVTKRKNKKKITITGCLFDRVELNGKKGWISGFTDKSCYVKDENDQYIRTSPKYKQVSLSKLKILHHCGNWAIGARQSLGKG

SEQ ID NO: 2719 - protein, 427 aa, Moorena sp.
MSKVLVIDTNKRPLDPIHPAQARQLLRNDKAAIFYRFPFTLILKESRPEVSVQPLRFKIDPGAKTTGLALLNDKTGEVVWAAELQHRGFAIRESLISRRQLRRSRRNRKTRYRAPRFNNRTKPKGWLPPSLMSRVYNIETWVKRLCKLAPITGISQELVKFDTQLIQNPEISGKEYQQGTLAGYETREYLLDKWLRQCAYCKIKDVPLQIEHIHPRSLGGSNRISNLCLACEKCNLKKGNKPIELFLKNKPDLLKKILSEAKKPLADTTAVNATRFKLLEVLKATELPVETGSGGLTKFNRTQQGLDKTHWIDAACVGLSTLTLVVKYVKPLLLKATGHGTRQMCGTDKYGFSTRHRERKVLHFGFRTGDIVKAVVESGKKTGKYVGRVLCRKSGSFDISTKSGRVSGISYKCCTHIHKNDGYNYAF

SEQ ID NO: 2720 - protein, 432 aa, Ktedonobacter sp.; identical to SEQ ID NO: 2059

SEQ ID NO: 2721 - protein, 437 aa, Scytonema sp.
MNEANFTRKEYAAMQNYVFVIDQNKQPLNPVSPARARELLTKQKAAVYRLYPFVIILKHVVDNPQSKPLTIKLDPGSRFTGIAILDQDKVVWAAELEHRGWQIKNALESRRSLRRSRRNRKTRYRQPRFNNRKRKEGWLAPSLMHRVLTIETWVKRLCLYSPITQIAMELIKFDTQKMQNPEIDGVEYQQGELAGYEVREYLLEKWGRKCAYCDHAGVPLQVEHIHPRAKGGSNRVSNLTLSCERCNTKKGTKSIGEFLKKDGSRLEKIQCLAKQPLKDAAAVNATRWELFRTLKNILPTTTGTGGQTKYNRTRLELSKQHWIDAACVGEVNNLNLLTQQPLKIKCTGWGTRQMCGTDKYGFPTRHRERKQIHFGFKTGDIVKAVVTSGKKVGTYIGRVLCRKTGSFDIATISGRVAGISHRFCISIHKKDGYSYGF

SEQ ID NO: 2722 - protein, 462 aa, unidentified
  REGION 1..462: note = Human gut metagenome
MSVLVIGRNGRALMPTNPRKARLLLKKKTASVVCRHPFTIQLLYKTGCATQEGCIGIDTGSQHIGVGITCGDRVILKEEHALRSSMEKRSLLATRAVMRRGRRYRKVRYRKPKWRHHTKRMYFEKANRRGQHWRKVKTTTQSPRLKGWLPPSLQSKCDHHFRIIDRYLKYLPDSITRNLVIEAGRFDMARMNDPTIHGEMYQRGPMYDAENLRAYIFARDNYQCACCKAKAGTTRKADGTTVKLVAHHILFRSRGATDNPKYIISVCDHCHTTKAHQPGGILYSWMENNKKVARGLRDATFMNILRKRLFARYPQSAFTYGNITAADRKKLRLPKSHANDAVAISLFGKEASTVKNICQTMHYKQIRKSKRSLHEAIPRKGRKNPNTKAVRNKKNTTQVNGFKLWDSVLANGKKLFICSFTGTSAYLIDKNGCYISQPGKTYKQWPLSKLKRLHPNGNWLMA

SEQ ID NO: 2723 - protein, 445 aa, Scytonema sp.
MSFAQRLPLGEANITCKKDAAMQNYVFVIDQNKQPLNPIPPARARELLTKQKAAVFRMYPFTLILKHVVDNLAPRPLVIKLDPGSRFTGIAVLDQDKVIWAAELEHRGWQIKDSLESRRSLRRSRRNRKTRYRQPRFDNRKRPQGWLPPSLMHRVLTVETWVKRLCLYSPIIQIAMELVKFDTHKMQNPEVDGVEYQQGELTGYEVREYLLQKWGRKCAYCDKENAPLQVEHIHPRSKGGSNRVSNLTLSCERCNAKKGVKLVDEFLKKDPVRLERIKRQAKQPLKDAAAVNATRWELFRTLKNILPTTTGTGGQTKFNRTRSCLEKQHWIDAACVGNIETIKLLTQQPLRIKCTGWGTRQMCGTDSYGFPTRHRERKQVHFGFKTGDIIKAVVLSGKKVGEYVGRVLCRKTGSFDIVTKAGRIAGISYRFCTPIQQKDGYSYGF

SEQ ID NO: 2724 - protein, 318 aa, Scytonema sp.
MVKPRYARKFPFTIILKESRPDVPVQPLRIKIDPGSKTTGIAVINDSTGEVVFTAELQHRGFAVRVALTSRRQLRRSRRGRKTRYRQPRFNNRKRPDGWLPPSLMSRVYNIQTWVRRLMRLAPITAISQELVKFDTQLMQNPALCGKEYQQGTLAGYETREYLLEKFGRKCVYCDKQDVPLQIEHIHPRAKGGTNRISNLTLSCEKCNIKKGAKDIKDFLKKHPLHLKKIEAQAKKPLADTAAVNATRFKLLEVLKSTGLLVETGSGGLTKFNRTKLELPKTHYFDAACVGRSAPSGKSKVTHSKVKSKNPINKFRGL

SEQ ID NO: 2725 - protein, 441 aa, Scytonema sp.
MSKVFVLNSEKKPLNPIHPAQARQLLKNGKAAVFRKFPFTIILKVTFKTEEEKPVQPLRLKIDPGAQTTGLALVNDTTGEVVFAAELQHRGFAIKKSLISRRQLRRGRRNRKTRYRQPPKHEWSRKGNKKPVPKQRRTWIAPSLMSRVHNINTWVERLKKLAPISDISQELVKFDTQLMRNPDIQGKEYQQGTLAGYETREYLLEKWNRQCAYCGKKDVPLQIEHIYCRAKGGSNSITNLALSCEKCNKKKGTKDIKDFLKKEPTKLKEILAQAKRPLADTAVVNSTRFKLLEVLKATNLPVETGSGGLTKFNRTNQELEKTHWIDAACVGKSTPEKLIIKGVKPLLITANGHGTRQMCGTDKHGFPIRHRSRKQIHFGFQTGDIVKAVVTKGKKVGEHIGRVLCRATGSFDITTDTGRVAGISHKYCKHIHKKDGYSYAF

SEQ ID NO: 2726 - protein, 480 aa, unidentified
  REGION 1..480: note = Human gut metagenome
MKGENMVIALDRNKRPLGFMGERRCRILLERKRAVLYRYFPTIVILKDVDARKLSGLSSYRIKIDPGAKYTGIAIVRDDTNEFMYAMQIEHRGEQIKKNLDTRRNARGDRRSRETGYRRPKWGNQCTAKEQRQSYDSRRDENWLPPSVKSTADNIISWVRRLSRWINITNCSFESVRFDTQLMENPEIEGVEYQQGTLYGYEVKEYLLEKYGHTCQYCGGKSSDPILEWEHMIPRSRGGSDRLKNATLACHNCNQDKGNHTLEEWQTILQDRLPKERGKQKELDQMRQKYVQQVMEGKAPLKGLRYAAWVNSSRRYSQRHLYLRFPELECSSGGRTKYNRNALGYPKEHHYDALCVGKIPEDGFVDWTHGYYLYAKATGRGTRLRGQLNGCGVIISKWKNRSKTAFGFQTGDLVVANVPKDTKYKYKGRFVGRVMIRKSGSFDIRTLSGELVTVNAKFCRLLQNNSGYQMMIKRAIPLGD

SEQ ID NO: 2727 - protein, 379 aa, Arthrospira sp.
MPNYQNYVFVVDTLGQPLSPTHPARARKPLKQGLAAVFRTYPFTIILKKTVENPGNEPLRVKLDPGASVTGIALVSQKTGTVIWGAELAHRGDRIRAKLAARRLVRRHRRCRKTRYRQARFNNRKRPDGWLAPSLKHRVETTLTWVNRLISSCPITDISMELVRFDTQKLLNPEISGVEYQQGVLFGYELREYLLTKWQHQCAYCGAKNIPLEIEHIQPKSQGGSDRVSNLAIACHKCHQKKGSQSAREFLDTKPEILKLLLVQAKAPLKNAAAVNSTRWALFNGLKLTGLPIEIGTGGLTKYNRTVQGLPKTHWLDAACVGKSTPTRLKIKTHQPLLITCFGRGGRQKAAPNKRLPIRHNPLKPIKGWLTGDIAKHKT

SEQ ID NO: 2728 - protein, 457 aa, Scytonema sp.
MMTNSVFVLSKNGKILKPTTPVRARILQSQGRAKKQKLFPFTLILDKDVDENVEPYLELRIDPGSRFTGIALVDFQKNEVIWAMELEHRGLAIKMELIKRAGVRHSRRSRRLRYRQKRFDRQKPQGWLAPSLRHRLLTTTTWIKRLLKVAPIKSIAIESVKFDLQKLEKSDIEGVEYQQGTLWGYTLREALLEHWGRECAYCRKTDVPLQIEHIHCRSKGGSERFSNLTLSCEKCNQKKGNKPVEQFLKDRPEILKKIQAHQKKSLSHAAAVNSTRQAIFQMAHQFGLQVISGDGASTKMIRIQSQLPKAHYIDAACVGTDQIVKLRICQPLRVTCKGHGTRQVQRVNALGFPAIASIKKNSITGKKEVKLVAKNQKYTHATAGEYVICNFLKDRKHIQAGTYRARVKTPTPKGVEVLISGHRISLGQQYVKLIHRADGYEYSFTTIDSSLLRFNAI

SEQ ID NO: 2729 - protein, 426 aa, Scytonema sp.
MSKVFVINTNKRPLDPIHPAQARQLLKNGKAAIFRKFPFTIILKEARLESSVHPLRIKIDPGAKTTGIAVINDSTGEVVFAAELQHKGFAIRESLISRRQLRRGRRNRKTRYRQARFNNRKRPNGWLPPSLMSRVHNIETWVNKLIKLAPITAISQELVRFDTQLMQNPDIQGKEYQQGTLAGYETREYLLEKFARKCAYCDKQDIPLQVEHIYPRSKGGSNRISNLTLSCEKCNTKKGTKDIKEFLKKDPVRLKKIEAQAKKPLADTAAVNATRFKLLEVLKATQLPVETGSGGLTKFNRTQQNLEKTHWIDAACVGMSTPILNIKGIKPLFVQAVGHGSRQSCRTDKYGFPTRHVPRNKIHFGFQTGDIVKAIVKTGKKVGTYVGKVAIRSSGSFNISTKNGLVQGISYKYCKHIHKKDGYSYA

SEQ ID NO: 2730 - protein, 427 aa, Methanosarcina sp.
MLVFVINQNKKPLMPCKPSKARKLLQAGKAKVVQNTPFTIKLLFGSSGYTQPVIAGMDTGSKVVGCAAIANGKVLYQSEIYLRENVSKKMEQRKMYRRTRRGRKTRYRPARFDNRGNSRREGRLAPSIKSKLEAHFREKRFVESLLPVTGWKVELASFDIHKITNPEVSGVGYQEGDLKGFYNVKAYVLDRDGYTCQHCMGKSKDFRLHCHHIVFRSQKGSDAPENLITLCETCHKALHNGEFKLSGNKSKTKHATEIGILKSQIRKSGWSFAETFGYETKYRREQVLKLLKTHYFDAVAICCRDDQNVEVEDSVFLKRNVPAGDYQQRRGKRSEKKIPTGKLFGLRKFDLVKTENGIGFIRGKRSSGYFSISDIFGNKISDSVNVKKKCRRLSARSTTLVQMVQMTHSSPTCHFRQAGNVEEGVSC

SEQ ID NO: 2731 - protein, 349 aa, unidentified
  REGION 1..349: note = Human gut metagenome
MPRNDVVENLSTRREFRRARRNRTTRYRKPRFNNRVHSKNNGWLAPSVEVKIQEHITSIKRVCAILPISKIVVETAEFDLQLLKAVQDGKPVPEGEDYQKGEMYGSYDVRQYVLWRDNYTCTCCGVKGTDKKPVKLHVHHFESRKHGGNAPDNYGTLCEDCHKKLHLGIITDISLKTRKRPSTRGAAFMGIMRKTLMQRLITGLSIPIAETKGYITKAAREEILKLPKTHTNDALAIAQGRHGFGIREQAYVKPTNRIYTVRPVRHHNRQLHKATMLKGGIRKLNQASKYIFGFRLYDKVLYQGGECFVWGRRRSGSFLLRTIDGTKVKDGVGYRNLTLLERSTNYLIA

SEQ ID NO: 2732 - protein, 333 aa, Methanosarcina sp.
MYRRTRRSRKTRYRPARFDNQGNSRREGRLTPSIKSKLESHFREKRFVEALLPVTKWKVELASFDIHKIKNPEVSGIGCQEGDLKGFYNVKAYVLHRDSYTCQHCKGKSKDSRLHCHHIVFRSNQGSDAPKNLITLCETCHKALHNGEFKLSGNKSKTKHATEIGIIKSLIKKSGWNFAETFGYETKFRREQVLGLEKTHYFDAVAICCGDDQKVEVEDSVFLKRNVPAGDYQQRRGKRSETKIPTGKLFGLRKFDLVKTDTGIGVVWGKRSYGYFLISDIFGNKISDSVNVKKKCRRLSARSTTLVQTIQLTHSSPTCHFRQAGTVEEGISC

SEQ ID NO: 2733 - protein, 292 aa, unidentified
  REGION 1..292: note = Human gut metagenome
LSRIEAVLRLLPITKITVETASFDMQRLKNPDISGKEYQEGEQLGFWNVREYVLFRDGHVCRHCHGRSKDPVLNVHHLESRRTGSDSPDNLITLCETCHKALHRGEITLKAKRGQSFRAQAFMGIMRREVLNRLKASYPELKVHETYGYLTKHARIANGIVKSHGADAFCIAGNLGAERLGEFFFQKQTRRNNRQIHKLSILKGGIRKRNQAPFEAKGFRLFDKVACQGEEGFIFGRRSSGSFDVRKLDGTRISAGISCKKLRLLEKRRTYLTEIRKEEALPPLPEGRGLRA

SEQ ID NO: 2734 - protein, 423 aa, Nostoc sp.
MSNFVFVLDTDRRPLNLTHPGAARHLLNTGKAAVFRRYPFTIILKEACPDVPVQDLELKLDPGSKVTGIAIKQGNKVIFGAELQHRGQQIKNALLSRRQLRQSRRNRKTRYRQARFLNRTRPDGWLAPSLQHRVDTILTWVNRLRKLAPISSITQELVRFDPQLMQNPEISGVQYQQGEFQGYEVREYLLEKWNRRCAYCSIENVPFEIEHIQPKSRGGSDRVSNLTIACHACNQSKGNQEIRDFLFCKPDLLNRILKQAKSPLKDAAAVNSTRWALFHALKETGLLVTTGTGGQTKFNRTRLYLPKSHWLDAACVGQVESLEVLTSNPLLITAKGHGTRQMCGTDKFGFPNRHRTNQKSWFGFQTGDLVSAVVASGKFAGRWVGRISVRSRPSFKLASSKIFDVHPRYLQVIHRADGYSYTA

SEQ ID NO: 2735 - protein, 457 aa, Scytonema sp.
MITNSVFVESKNGKILKPTTPARARILQTQGKAKKLKLFPFTLVLDKEIDENVEPYLELRIDPGSRFSGVSLVDLIKNEVIWAMELEHRGLAIRMELIKRAGVRRSRRSRRLRYRQKRFDRKKPDGWLPPSLRHRLLTTETWIKRLLKVAPIKSIAIESVKFDLQKLETADIEGIEYQQGTLFGYTLREALLEHWGRECVYCGKTDVPLQIEHINARSKGGSDRFSNLTLSCDSCNQKKGNKPVEQFLQNKGETLKKIKSHQKKSLSDASAVNSTRKAIFEMTHKFELPVISGDGASTKMIRIKSGLPKAHWIDSACVGTDQIVKLRICQPLRVTCTGHGTRQVQRVNAKGFPAIARIKKNLVTGKKEVKLVSKNQKYTHATTGDYVIFNLLKDRKHIKAGIYRARVKTPTQKGVEVLISGHRIAVDRQYVKLIHQSDGYEYSFTTIDPDLLRFNAI

SEQ ID NO: 2736 - protein, 456 aa, unidentified
  REGION 1..456: note = Marine metagenome
MAVFVLDKKKQPLMPCSEKRARLLLARGRAVVHKRYPFTIRLKNRVGGEAQPLRLGIDPGSKTTGLALMHEPDSQQRHVLCLFELIHRGFQIKKALQQRAAFRRRRRSANLRYRAPRFNNRIKPKGWLAPSLQHRVDTVMAWVNRLSKSAPITGISQELVRFDTQKLESPEISGVEYQQGTLLGYEVREYLLEKWGRECAYCGTADTPLEIEHVVPRSRGGSNRVSNLTLSCHPCNAEKDSQTLTDFFATNKGLKKRLKANGLSADAQLERVQRQLKQPMRDASAVNATRWALFSALKTTDLPVAVSSGGRTKYNRQRLNIPKTHALDAACVGAFGKLYDWTVPTLTIKAMGRGSYQRTRLTKHGFPRGFLMRQKQVHGFQTGDMVRAIVPTGKKAGTHTGRVAIRKTGSFNIQAEYGAVQGISHKYCTLIQRSDGYGYYVTLFSNLTGEAGRAVA

SEQ ID NO: 2737 - protein, 512 aa, unidentified
  REGION 1..512: note = Human gut metagenome
MSTVYVLNKDGKPLMPTTRGGHVRHLLKEQKARVVRTNPFTIQLLYETDNLVQPLYLGIDPGRTNIGVAVVKTDGTAVFTAHLETRNKEIPKLMQGRKKARRARRTNGRRCRRQRRAKANGTISKKCVKQATAQNGSVSKRANEIGVIKRHLPGCEKEVFCIGIKNKEAKFSNRTRPEGWLTPTANQLLQTHINLVKKIQKFLPISDVVLEINKFAFMRLDNPNVQKWQYQQGPLYQKASLEEAVSEMQEHHCLFCKNTIDHYHHVVPQHKNGSNTIGNIVGLCAKHHDLVHKDTSWQEKLAKKKTGLNKRYGALSVLNQIIPALTKELSSLFPKHFFATNGKSTYDYRAAHGVSKDHWLDAYCIAGSVLPNDACDNNINNRVPYELKQFRRHDRRALHKENMSRVYTLNGKKVATNRHKAVEQATDSLEEFCQNHPDDVCKLKVKEHHPEYRNPKRNFPGCVFLVGKHTHVMQGTSGSHNGKADGYYDTNGNSYSSGKCKFVVKNEGIVFT

SEQ ID NO: 2738 - protein, 421 aa, unidentified
  REGION 1..421: note = Human gut metagenome
MVYVLDITGQPLMPTDRHGKVKHLLKDGKVKVVKRCPFTIQLLYTTTTYTQEITLGVDAGSKVIGLSASTPRRELYSSEVTLRNDIVKLLSLRREYRRSRRNRTTRYRAARFNNRVHSKNKGWLAPSIENKINTHIKVVADIHKILPISKIVVETASFDIQKIKNPNISGEEYQQGEQLDFWNVRQYVLFRDNYTCQCCKGKSKDNRLAVHHIESRQTGGNAPNNLITLCITCHKKYHKGKIKLPNTIKRDKIFKDAVFMGIMRWAFYERLKNIYPNIRMTYGYITKNTRIQHNLSKTHYTDALCISGNPLAKPLEVLYIQKAIRTRNRQIHKATISKGGIRKLNQAPKYVFGFQLYDKVLYKGKECFIFGRRSSGSFDIRTLDGTKISPGVSHKKLKLLEKRKTILTERVIKNQEGGKRG

SEQ ID NO: 2739 - protein, 433 aa, Scytonema sp.
MSKVFVIDTNKRPLDPIHPAQARQLLRNKKAAVFKRFPFTIILKESRPDSPVKALRIKIDPGSKGTGLALVNDITGVVVFAAELQHRGFAIRESLTSRRQVRRGRRARKTRYRQPRFNNRKRSDRWLAPSLMSRVYNIKTWVKRLMKLAPITAISQELVRFDTQLMQNPEISGKEYQQGTLAGYETREYLLEKFGRKCVYCDKQDLPLQIEHIHPRAKGGSNRISNLTLSCEKCNIKKGTKNIKDFLKKDPERLKKIEVQAKKALADVAAVNVTRFKLLETLKSTGLPVETGSGGLTKFNRTRLDLDKTHYFDAVCIGQSTPEKVIVKGLKPLIIKTCGHGNRQMCVTNKFGFPKSHKTNIKFHFGFRTGDIVKAVVPSGKNAGTHTGRVSTRKTGQFDISTGTKKLQIINHKYCKLLHKQDGYLYSLSTVVH

SEQ ID NO: 2740 - protein, 423 aa, Scytonema sp.
MSNYVFLIDQNKTPLNPVHPTQARKLLNSGKAAVFRRYPFTLILKRAIENPNVYPLTLKIDPGSKFTGIALVTNRGDVIWGMELQHRGQQIKDSLEHRRAVRRGRRNRNTRYREARFFNRKRPNGWLAPSLRHRVLTTETWVKRLQKFTPIDSIVQELVKFDTQAIQNPEISGTQYQQGTFHGYECREYLLEKWNRQCAYCPVKDVPLEIEHIQPKSKGGSDRISNLCLACHKCNQRKGNKNIKDFLKGKPDVLNRVLRQASSPLKDAASVNSTRWALFNAFKSFGLPIKTGTGGQTKFNRIRFGLPKAHWIDAACVGSFEIVKLITTKILRVKATGFGGRQRCQTDKFGYPQKHRPLRPILGFCTGDIVRASVPKGKYAGTFTARVCPMSHGYGEFVIDKKRRSIKLEYLTPVHRKDGYDYA

SEQ ID NO: 2741 - protein, 423 aa, unidentified
  REGION 1..423: note = Human gut metagenome
VWNKRRKPLMPCSPAKARHLLKEKKAAVVRRTPFTIQLTIATGESKQPVTLGVDAGYKHVGLSASTEKAELYASEVELRQDVSDLLSARRALRQSRRNRKTRYRAPRFDNRIRTKRKSWLAPSVENRINAHLSRIEAVLRLLPVTKITVETASFDMQLLKNPDISGKEYQEGEQLGFWNVREYVLFRDGHVCQHCHGRSKDPVLNVHHLESRRTGGDSPGNLITLCETCHKALHRSEITLKTKRGQSFRAEAYMGLMRWEVLNRLKTSHPGLEVHNTYGYRTKYTRIVNGIDKSHCADAFCIAGNLGAERLGEFFFQKQTRRNNRQIHKLSILKGDIRKRNQAPFEVNGFRLFDKVACKGEEGFIFGRRSSGFFEVRKLDGTCISAGISYKKLHLLEKRRTYLTEIRKEEALPPLPEGSGLRA

SEQ ID NO: 2742 - protein, 427 aa, Methanosarcina sp.
MLVFVINQNKKPLMPCKPSKARKLLQAGKAKVVRNTPFTIKLLFGSSGYTQPVIAGMDTGSKVVGCAAIANGKVLYQSEIYLRENVSKKMEQRKMYRRTRRGRKTRYRPSRFANRGNSRREGRLAPSIRSKLEAHFREKRFVESLLPVTEWKVELASFDIHKITNPEVSGIGYQEGDLKGFYNVKAYVLDRDGYTCQHCRGKSKDSRLHCHHIVFRSQKGTDAPENVITLCETCHKALHNGEFKLSGNKSKTKHATEIGILKSQIRKSGWSFAETFGYETKYRREQVLKLLKTHYFDAVAICCRDDQNVEVEDSVLLKRNVSRGDYQQRTGKRSEKKIPTGKLFGLRKFDLVKTSKGIGFVKGKRSSGFFAISDLFGNKISDSVNVKKKCRRLSARSTTLVQMVQMTHSSPTCHFRQAGTVEEGVSC

SEQ ID NO: 2743 - protein, 428 aa, unidentified
  REGION 1..428: note = Ga0315294_10064267
MLNKEETLSALDKVLACNNPEVNLARKSEHSLLVFMLNKNRKPLMPCSFKKSKQLVREGKARVIKRFPFTIQMNYGCSGYKQKINLGIDTGYGTIGFSARTSKEELISGVLKLDGRTKERLDEKRMYRRVRRNKLWYREPRWLNRVKKENRLPPSIERKYQTHLSLIKRIKHLLPINRVVVEVAKFDLQKLENPEIRGKEYQQGDLYEYQNVRSYLLSREKGLCEYCKKDFKNSSSHIHHRKPKSKDGSNRLSNLMLLHKSCHNKIHKSTELLKKYKKESIKEYKQSTFMSIINKKFFNDIKDLEVTYGNITFVNRNKLKLEKTHYNDAFVISGGTNQVRTKPFEIIQKHRNNRVLQTNRKGFKPSIRKKRSIIQPLDLFWVDQVKYSCKTMFGYGRYIMYGDMKKKEYFNTKRIEKYFSNGSLVWSI

SEQ ID NO: 2744 - protein, 415 aa, unidentified
  REGION 1..415: note = Human gut metagenome
MVYVLANDGQPLMPTERHGKVCRMLKSGIAKVVKKCPFTIQLQYESERNVQPVALGIDAGSKHVGVSATTKAKVLYESDVELRDDIVKLLATRRQLRRRRRSRKTRYRPARFDNRRRKEGWLAPSIRQKIESHLTVVANVCKILPVSQIIVETASFDIQKIKNPDIQGIEYQQGEQMDFWNIREYVLFRDGHTCQCCKGKSKDKVLNVHHIESRKTGGNAPNNLITLCETCHKGYHNGTVTLPKNIKRGMKFKDAAFMGIMRWTFYNTLKEQYEPDIPVHYTYGYITKNTRINHNLPKGHCIDARCISGNPDAVSDGTYYYQKKVRCHNRQIHKQTILKGGIRKSNQAEYLVRGFRLFDKVRYQGREYFIFGRRKSGFFDIRTLSGEKVNKGSINVKRLTFVDTRKNYLTERRTV

SEQ ID NO: 2745 - protein, 512 aa, unidentified
  REGION 1..512: note = Human gut metagenome
MSTVYVLNKDGKPLMPTTRCGHVRRLLKEQKAQVVTSKPFTIQLLYETDDVVQPLYLGIDPGRTNIGVAVVKIDGTAVFTAHLETRNKEIPKLMQGRKKARRARRTNGRRCRRQRRAKANGTISKKCVKQTTAQNGSVSKRAKKIGVIKRHLPGCEKEVLCIGIKNKEAKFSNRTRPEGWLTPTANQLLQTHINLVKKIQKFLPISDVVLEINKFAFMRLDNPNVQKWQYQQGPLYQKASLEEAVSEMQEHHCLFCKNTIDHYHHVVPQHKNGSNTIGNIVGLCAKHHDLVHKDTSWQEKLAKKKTGLNKRYGALSVLNQIIPALTKELSSLFPKHFFATNGKSTYDYRAAHGVSKDHWLDAYCIAGSVLPNDACDNNINSHVPYELKQFRRHDRRALHKENMSRVYTLNGKSVATNRHKAIKQTTDSLEEFRQRQPNDVCKLKVKEHHPEYRNPKRSFPGCVFLVGKQTHVMQGTSGSHNGKADGYYDTNGNSYSSGKCKFVAKNEGIVFA

SEQ ID NO: 2746 - protein, 431 aa, unidentified
  REGION 1..431: note = Human gut metagenome
MPDKVYVISRLGHPLMPCSPAKARHLLDDKKAKVVKRMPFTIRLLYGSTKYIQPIILGVDAGSKTIGLSASTAKEEVFAAEVMPRNDVVENLSTRREFHRARRNRTTRYRKPRSDNRVRSNHERWLAPSVKVKIQEHITSIKRVCTILPISKVVIETAEFDLQLLKAIQEGKPIPEGEDYQKGEMYGSYNVCQYVLWRDNYTCICCGVRGTPKNPVRLHVHHFESRKYGGNAPDNHGTLCDDCHKKFHLGIITDVKLKTRRRQSTRDAAFMGIMRKTLMWRLRTELFIPVAETKGYITKATREKLLVLPKSHTRDALAIAQGRHGFGIKEYAYVEPANHIYTVRPVRHHNRQLHKASILKGGIRKRNQASKYVFGFRLYDKVLYQGKACFVWGRRTRGTFLLRTIDGIKVKDGVSYRNLTLLERSSNYLIA

SEQ ID NO: 2747 - protein, 424 aa, Scytonema sp.
MQNYVFVIDKNKQPLNPIPPARARVLLTKGKAAVLRIYPFTLILKHVVDNSAPRPLVIKLDPGSRFTGIAILDQDKVIWAAELEHRGWQIKDSLESRRSLRCSRRNRKTRYRQPRFDNRKRPQGWLPPSLMHRVLTIETWVKRLCLYSPISQIAMELVKFDTQKMQNPEVDGVEYQQGELAGYEVREYLLEKWRRKCAYCDKEGVPLQIEHIHPRSKGGSNRVSNLTLSCERCNTKKGAKSIDEFLKKDPSRLEKIKRQVKQPLKDAAIVNATRLCVFRTLKSILLTTTGTGGQTKYNRTRLGLNKSHWIDAACVGDIETIQLLTQQPLRIKCTGWGTRQMCGTDRYGFATRHRERKQLHFGFKTGDIIKAVVTSGKKVGEYVGRVLCRKAGSFDITTSSGRVAGISYRFCIPIHKKDGYAYGF

SEQ ID NO: 2748 - protein, 470 aa, Sulfobacillus sp.
MAVLVLDKRKKPLMPCSEKRARLLLERGRARVHRMVPFTIRLVDRLQENSTLQPVRLKLDPGSKTTGMALVRETEMVDAETGEISRKAALLMLLELQHRGHAIRDALTQRRAFRRRRRGNLRYRPTRFDNRSKPEGWLAPSLQHRVDTTMAWVRRLLRWSPVTTLSQELVRFDTQALQNPEINGAEYLRGELFGYEVREYLLEKWGRKCAYCDAEHVPLTIDHIHPRSAGGSDRVSNLTLGCFPCNQRKSNRDVAEFLAHDPQRLARIGAQRKAPLKDAAAVNSTRWALWRQLVATGLDVEVGTGGRTKYNRHRLQVPKAHCLDAACVGHVDVLESWQQPVLAIKATGRGSYQRTRLNRYGFPRGYLTRSKSAFGFQTGDLVKAVVTKGKKVGTYMGRVAIRARGSFNIQGGNGLIQGIHHRFCALLQRADGYGYFWTKIALDKGEAGMGRSSTAALSLPGVNAGVSRAT

SEQ ID NO: 2749 - protein, 427 aa, Methanosarcina sp.
MLVFVINQNKKSLMPCKPSKARKLLQAGKAKVVRNTPFTIKLLFGSSGYTQPVIAGMDTGSKVVGCAAIANGKVLYQSEIYLRENVSKKMDQRKMYRRTRRGRKTRYRPARFDNRGNSRREGRLAPSIKSKLEAHFREKRFLESLLPVTGWKVELASFDIHKITNSEVSGVGYQEGDLKGFYNVKAYVLDRDDYTCQHCREKSKDSRLHCHHIVFRSNQGSDAPENLITLCETCHKALHNGEFKLSGSKSKTKHATEIGILKSQIRKSGWNFAETFGYETKFRREQVLGLEKTHYFDAVAICCRDDQKVEVEDSVFLKRNVPAGDYQQRRGKRSEKKMPTGKLFGLRKFDLVKTENGIGFIRGKRSSGYFSISDIFGNKISDSVNVKKKCRRLSARSTTLVQMVQMTHSSPTCHFRQAENGEEGVSC

SEQ ID NO: 2750 - protein, 296 aa, Scytonema sp.
MHCRIDNIKTWINRLRRFAPNEAISQELVRFDMQLMRNPDIQGKEYQQGTLTGYETREFLLEKWDRQCAYCGIKDVPLQIEHIHPRAQGGSNSITNLTLSCSKCNTKKGTKDIKEFLKKEPLRLERILKQAKRPLADAAAVNTTRFALLEVLKATGLPVETGSGGLTKFNRNQQNLEKTHWLDAACVGKSTPILNIEGVKPLLITANGHGTRQLCRTDKFGIPNRHCSRTKFHFGFQTGDIVKAVVTTGKKIGEYIGRIAVRSTGSFNISTSNGLIQGISYKYCKSIHKKDGYSYA

SEQ ID NO: 2751 - protein, 518 aa, unidentified
  REGION 1..518: note = Human gut metagenome
MTPKKRKEASRMSEYIYVLGMDGDPQMPTKRKRHVEKLLQAGRARVFRQIPFTIQLTYENKPVLQPVTIAEDPGRSNIGMAVVSLSGELLSAAVVQTRNKEIVKLMEKRKQHRRASRNGERKARQRLAKKCHTMIKTGFLMRKLPMYGKDKRVRCNVIKNTEAKFCNRKREDGWLTPSAEHLVRTHINLIHKMQKFLPITDVAIEINRFAFLSLEDPSISGVDFQNGPLKGYDDLNVAIEDLQDGHCLMCNSPIEHRHHIVPRSMQGSNTIGNIAGLCCKCHERVHKDARFEDRLKKKKAGLNKRYAAVSVLNQAIPFICKRLEQEFGKEHVHYCSGRDTSMVRRSLGYHKTKEEQLHEVDAWCIAVLALQHVPEKAPEFDHVHEILQFRRQDRSRIKAQTSRAYYHEGKKIAKNRKKAEGQKDDSLQGWRKRQVERYGEEQTRKMISQLKVKKSIRRYNRLDRLMPGAVFYYQGVRYVMRGQHSNGQYLQAVGMRDKDFPAKKCKIVVHNQGLVFVS

SEQ ID NO: 2752 - protein, 406 aa, unidentified
  REGION 1..406: note = Human gut metagenome
MVYVQDIDGKPMMPTTRHGKVRRLLKANKATVVNLCPFTIQLTYKSTDHKQPVTLGIDAGAKHIGFSATTEKEELFACETILRTDIVDLLSTRSQNRRTRRSRLRYRKPKFNNRVFSKKKGWVAPSVKQRIDSHLNEVNEIHKILPITKIVIEAAQFDTHKMKNPNISGIDYQNGEQLGFWNVREYVLFRDGHKCSYCKGKSKDLILNIHHIESRKTGGDSPSNLITLCETCHKEYHKGNIDLKVRRGKSLCGAAIMGIMKWRLYDELKSRYSNVSMTFGYITKYNRIKYGIEKSHTSDAFVISKNFNAKRIEYQYLKRLVRRHNRQIHKMKILKGGKKKNNQAPFEVFGFRLFDKVLYNNEINFIYGRRKSGNFNIRDFNGENPKDVSYKKLKLIRGKRHPIILK

SEQ ID NO: 2753 - protein, 526 aa, unidentified
  REGION 1..526: note = Human gut metagenome
LLRQGRLIVKEVAYMSTVYVLNKDGKPLMPTTRCGHVRHLLKEQKARVVASKPFTIQLLYKTNDVVQPLYLGIDPGRTNIGVAVVKADGTAVFTAHLETRNKEIPKLMKKRKDSRRARRTNGRRCRRQRRAKANGTISKKCVKHDTAQNGSVSKRAKEIGVIKRHLPGCEKDILCIGIKNKEAKFSNRTRPEGWLTPTANQLLQTHINLVKKIRKFLPISDAVLEINKFAFMQLDNPNIQKWQYQQGPLYQKANLEEAVSEMQEHHCLFCKKPIAHYHHVVPQSENGSDTIGNIVGLCTKHHDLVHKDTAWQKKLAKKKTGLNKKYGALSVLNQIIPALTKELSSLFPKHFFATNGKSTYDYRSAHGVSKDHWLDAYCIACSVLPNDVCDSGINNRVPYELKQFRRHDRRALNNENMSRVYTLNDNVVATNRHKATKQTTDSLEEFRQNHPDDVCKLKVKEHHPTYKNMNRNYPGSVFLIGKQVHVMQGIAGSKDGEATTYKDTNANSIAAGKCKFVAKNSGILFV

SEQ ID NO: 2754 - protein, 431 aa, Calothrix sp.
MEGLMSKIFLLDTNKKPLNPIHPAQARQLLKNKKAAILKRFPFTLILKDASSHAEVQPLRIKIDPGAKTTGFVLVNDATGEVIFAAELQHRGFQIRDALTSRRQLRRGRRNRKTRYRAPRFNNRKRNEGWIPPSLQSRVENILTWVKRLQKLSLIDSISQELVKFDMQIMQNPDIQGKEYQQGTLAGYETREYLLEKWDRQCAYCGIKDVPLQVEHINPRSKGGSNSISNLTLSCEKCNLKKGTQDIKDFLKKDTKKLESILKQAKKPLESAAAVNTTRFTLLNALKATNLPVETGSGGLTKFNRIQQGLEKTHWIDAACVGLGTPILNIKGVKPLLIAAKGHGTRQMCRTDKHGFPTRYVPRIKFVHGFQTGDIVKAVVKTGKKVGVYIGRIATRYTGSFNISTKTGLVQGISYKHCKTVHKKDGYSYSK

SEQ ID NO: 2755 - protein, 426 aa, Moorena sp.
MQNYVFVIDTNKQPLNPIPPKKARRLLNKGKAAVFRMYPFTIILKTAIRQSRRCANNNPTISPSQIKIDPGSKVTGFALVQNNQVIWGMELEHRGGLIKKKLESRGAVRRGRRNRNTRYRKPRFLNRKRPEGWLPPSLEHRILTIQTWVKRLIKFCPVNEIWVERVKFDTQKMQNPEISGIQYQQGELAGYEVREYLLEKWGRECTYCGKQSVPLQIEHIHPRSLGGSDRVSNLCLACEKCNQRKGNKPIEDFLKKKPSLLQKIKSKAKQPLKDATAVNATRNKLVKVLQLIKVVVTGTGAQTKYNRTRLELPKQHWIDAACVGDIETLVLRTSQPLLVTCKGQGGRQKAALNKYGYPIRHNPLKPIKGWVTGDIAKHQKLGIGKVTPRSKGSFGFTPLGIKGYKSCKPQDISAVHRKDGYTYSFC

SEQ ID NO: 2756 - protein, 414 aa, unidentified
  REGION 1..414: note = Human gut metagenome
MPCSPAKARLLLKEKKAIVVRRTPFTIQLTIATGESKQPVSLGVDAGYKHVGLSASTEKAELYASEVELRQDITDLLSARRALRQSRRNRKTRYRAPRFDNRIRTKRKGWLAPSVENRINAHLSRIEAVLRLLPITKITVETASFDMQRLKNPDISGKEYQEGEQLGFWNVREYVLFRDGHVCRHCHGRSKAPVLNVHHLESRRTGSDSPDNLITLCETCHKALHRGEITLKAKRGQSFRAQAFMGIMRREVLNRLKASYPELKVHETYGYLTKHARIANGSVKSHGADAFCIAGNLGAERLGEFFFQKQTRRNNRQIHKLSILKGGIRKRNQAPFEAKGFRLFDKVACQGEEGFIFGRRSSGSFDVRKLDGTRISAGISCKKLRLLEKRRTYLTEIRKEEALPPLPEGRGLRA

SEQ ID NO: 2757 - protein, 425 aa, Moorena sp.
MENTLKVFVLNMRGQPLMPCSPPKARKLLRAGKAVPVRRTPFVIQLTVPTGETKQPITLGVDAGYKHVGLSATTAKEELLASEVELRQDVTGLLSNRLTLRRARRNRKTRCCAPRFDNRVRSKHKGWLAPSVENRIQAHISRIEAVCRVLPITKIVIETASFDIQKIKNPEVEGTDYQQGEQLGFWNVREYVLFRDGHVCQACKGRSKDLILNVHHIESRKTGGDAPGNLITLCEACHKAYHAGKLKQFSPRRGASFRAETFMGIMRWTVLNRLRERHPELPVTNTYGYLTKHKRIVEGLPKTHCAGGFCIAGVLDAKRRGEYLFQKQTRRHNRKIHKQTILKGGVRKRHQAPYLVHGFRLFDKVLCKGEGGFIFGRRSSGAFDVRYLDGTKISAGISYKKLSLLEKRKMFLTELRKEGRDSSRV

SEQ ID NO: 2758 - protein, 417 aa, unidentified
  REGION 1..417: note = Human gut metagenome
MVYVINKQGQALMPTERFGKVRRLLKNSLAHVVCRIPFTIQLDYDTTDYTQPVSLGVDAGSKHIGISATTSDKELYAADVELRNDIVDKLSTRREQRRTRRSRLRYRKARFNNRVSSKRKGWLAPSVENKIQTHLTVVEKIHKFLPITNIVVETASFDIQKINNPSISGSEYQQGEQLDFFNVREYVLFRDNHTCQHCKGKSKDEVLNVHHIESRKTGGNSPKNLITLCETCHKAYHRGEFELNVKRGKSFRDAAFMGIMRWSFYDRLKNIYPDVSMTFGYITKNTRITNNLPKDHYVDARCISGNPVAKPLGYYFYQKKVRCQNRQIHKANFLKGGRKKLNQAPFLVKGFRLFDLVEYKKELYYIFGRRSNGSFDIRKLDGTKVNKGSINCKHLRLIDKRRSILTEKRTQGAYPCE

SEQ ID NO: 2759 - protein, 323 aa, Ktedonobacter sp.
MEQGSILYLSEVEVRNDIATTMKERATHRRDRRNRKTRYRPARWLHRRNSIKTGRFSPTMRSKIDAHLREIHFAHSLLPISSIVLETGTFDTHALKNPEVVRKKWLYQKGINYGFANTKAYVLTRDGYTCQHCQGKSKDQRLEVHHIIFRSQHGSDEESKLLTLCKTCHDALHAGTIPLKRTGKKKGDLLHATQMNSIRVQLLKLVEAEETWGFVTKEHRLLAGLPKEHCFDAAMIATRGNRPVFQIQTVFVKKCIPDGEYQQTKGKRSEQRIPTGKIQGCAQMRQSALSRSGILYQRAYVYWLCYFDDDRREKGRFETHSQV

SEQ ID NO: 2760 - protein, 468 aa, Moorena sp.
LAVFVLDRSGKALMPCSEKRARLLLARGRARVHRLMPFAIRLVDRELRSSAAQPLRIKLDPGSETTGLALVRDIEQLDASTGEIRRGAVVLNLFELVHRGRQISEALTARRAMRRRRRGTLRYRAPRFLNRTRPAGWLAPSPQHRVDTTLAWVKRLQRWAPITAASTELVRFDMQALDNPEVTGVEYQQGILLGYELREYLLEKWMRMCCYCDVQNVPLNIEHLVPRARGGSNRVSNLVIACVPCNIRKAAQPLDVFVKDKARLARITAQARRPLKDASAVNATRWALVNALRATGLPVETASGGRTKYNRSQLGIPKTHALDAVCVGEVSAVLAWRKPTLQVKCTGRGSYQRTRQDRYGFPRGYLMRAKRVHGFGTGDHVQADVPSGRKAGTHRGRVAVRATGSFNIQTHGQVVQGVAHRYCRVLQRADGYGYSRMATEKGEAGAGAAAQPVPSLPGLKAEVSRAEG

SEQ ID NO: 2761 - protein, 434 aa, Moorena sp.
MQNYVFIIDQNQNPLNPVRPKRARQLLEQGKASVFRRYPFTLILKRAINQPNIHPLTIKIDPGSRYTGFALLDGSNVIWLGELEHRAQKIKSELDKRRAVRRSRRYRKTRYRKARFLNRKRPEGWLAPSLNHRVLTVETWLNRLIRFAPVKGIAIESVKFDMQKMVNPDISSEEYQQGTLHGYEVKEYLLEKWSRKCTYCGKKDIPLQIEHIKPKSRGGTNRISNLCLACQKCNHKKGNKPIEDYLKNQPSLLLKIKAQAQKPLKDAAAVNATRKAIVKMAQTLNCQGQPLCQIEVTTATGGQTKYHRCRLGLPKQHSIDAACVGDLEKLEFRTSQALLIKSTGQITKRMCRMNKFGFPCSQPRRRYNHDWKTGDIGKTVKNGITYVGKIVVQNQRRFEIRIGKQRIGNTFECLVRLHKQDGYQYSFSPNYSLL

SEQ ID NO: 2762 - protein, 419 aa, unidentified
  REGION 1..419: note = Human gut metagenome
MVYVLDINGQPLMPTARHGKVRRLLNSHLAKVVKRCPFTIQLLYQSTKEIQPVSLGVDAGSKHIGLAATTEKKVVYQEELIPRNDVVKLLSARRTLRRTRRNRKTRYRKPRFNNRVRSKHKGWLAPSIEVKIQEHITAIKNVCKILPVSEIHVETAEFDLQRLKAMEEGKPLPVGTDYQLGEQYDFYNTRQYVLHRDGYTCQCCGTHDNNIKLHVHHIESRQTGGNAPNNLIVLCEHCHKALHEGKIELPENKKRGKSYRDAAFMGIMRSTLLERLKKEVNVPVMMTYGYITKYWREKVGLEKSHINDAICISKHPYAKPLDTYYLTKAVRHHNRQIYKANFSKGGIRKRNQAPYLVKGYRLFDKVLYQGKECFIFGRRISGGMDVRLLDGTHINAFVGYKKLKLLELRKAYLIERRTC

SEQ ID NO: 2763 - protein, 451 aa, Scytonema sp.
MSNYVFLIDQNKTPLNPVHPAQARKLLDSGKAAVFRRYPFTLILKRIIENPNVYPLTLKIDPGSKFTGIVLVTNQGNVIWGMELQHRGQQIKDALEHRRAVRRGRRNRNTRYRKARFLNRKLNHGRLNAPSLRHRVLTTETWVKRLQKFAPIGSIVQELVKFDTQVIQNPEISGTEYQQGTLHGYECREYLLEKWNRQCAYCGVKDVPLEIEHIQPKSKGGSDRISNLCLACHKCNQRKGNKDIKDFLKGKPEVLNRILKQAKAPLKDAASVNSTRWVLFNILKSFGLPVRTGTGGQTKFNRIQFDLPKAHWIDAACVGQCSAVDGKASAGNCRWRSLSGGDTRKGVVETIKLATTKILRVKATGFGGRQRCQTDKFGYPQKHRPLRPILGFCTGDIVRADVLKGKYAGTFTARVCPMSHGYGEFVIDKKRRSIKLDYLTPVHRKDGYDYA

SEQ ID NO: 2764 - protein, 415 aa, unidentified
  REGION 1..415: note = Human gut metagenome
MIYVRSKEGKALMPSERGGRIGYLLRHGKAHVVSRVPFIVQLDYESTIYTQEVSLGIDAGSKHIGVSASSEKRELLAAQVELRSDVVNLLSTRRELRRTRRNRKTRYRKVRFDNRKKKDGWLAPSIEQKVESHLKVIRLVHKLLPITKTTIEVAQFDAQKIKNPDIKGEEYQQGEQMGFWNVREYVLARDGHKCIHCKGKSRDPILNVHHLESRKTGGNSPSNLVTLCETCHKAYHRGEFELKIKRGTTLRDAAVMNIMRWAVYEQAKEEFRNVHMTYGYVTKHTRIENGIAKTHAADAFCIAKNVHARRSKSFFMCRCVPRHTRALHVANPKKGGIRRGTIASHKIGKSRFQRFDMVRWKGKECFIFGSTHGRPILRDVEGKQIAGQPSVNIKTIKFLNRLRNNILVEERTSES

SEQ ID NO: 2765 - protein, 424 aa, Scytonema sp.
MQNYVFVIDQNKQPLNPISPARARELLTKQKAAVYRVYPFVIILKHAVDNPDPKPLTIKLDPGSKTTGIAILDQDKVIWVAELEHRGWQIKDALESRRSLRRSRRNRKTRYRQPRFNNRKRKEGWLAPSLMHRVLTIETWVKRLCRYAPITQISMELVNFDTQKMQNPDIDGIEYQQGTLWGYEVREYLLEKWGRKCAYCDKQGVPLQVEHIHPRAKRGSNRISNLTLSCERCNIKKGTKSIDEFLKKDGSRLEKIKRQAKQPLKDAAAVNATRWELFHTLKNILPTTTGTGGQTKYNRTRLELPKQHWIDAACVGDVETIQLLTQQPLRIKCTGWGTRQMCGTDRYGFPTRHRERKQVHFGFKTGDIVKAVVTTGKKVGEYLGRVLCRKTGSFDIATKSGRIAGISHRFCSPIHQKDGYSYAF

SEQ ID NO: 2766 - protein, 426 aa, Scytonema sp.
MSKSNFVFVLDADLKPLTPCTPGMARSLLKSGKASVYRRYPFTLILKKKVDTTPAPITIKLDPGSKTTGIALLQGSKVIFAAELTHRGQTIKASLESRRSLRRGRRTRHTRYRQARFLNRTRPKGWLAPSLQHRVETTMTWVKKFIRLTPLKSIIQELVRFDLQQLENPEISGVEYQQGELRGYEVREYLLNKWDRKCTYCGAENIPLQVEHIHPRAKGGSNRIYNLSLACEKCNLKKGTQDIEQFLAKKPDLLKKIKAQAKQPLKDAAAVNSTRWALFNRLKETGLSISTSSGGLTKFNRTRLGLAKTHWLDAACVGQVETLSILTEKPLLIKATGHGTRQMCRTDKFGFPSRYVPQNKFVHGFQTGDIVKAVVTTGKKIGTYVGRVAVRSTGSFNISTANGLIQGIGYKNCVSVHKKDGYNYGF

SEQ ID NO: 2767 - protein, 424 aa, Scytonema sp.
VLVIDSEKRQLNPIHPAQARQLLRNKKAAVYRRFPFTLILKESRSDSPVSPLRLKIEPGAKTTGLALVNDITGVVIFAAELKHRGFTIRDALTSRRQLRRSRRNRKTRYRKPRFLNRTRPQGWLAPSLQSRVDNIKIWVEKLRKFAPIEAISQELVRFDMQLMRNPDIQAKEYQQGTLAGYETREYLLEKWDRQCAYCGVKDVPLQIEHIHPRAKGGSNSITNLTLSCEKCNTKKGTKDIKEFLKKDPSRLEKIQSLAKRPLADAAAVNTTRFALLSVLKATGLPVETDSGGLTKFNRNQQNLKKSHWLDAACVGKSTPLLNIKGVKPLLITANGHGTRQSCRTDKFGFPNRHCSRTKFHFGFQTGDIVKAVVTSGKKVGEYVGRIATRATGSFNISTKNGLVQGISYKHCKHIHKKDGYSYAF

SEQ ID NO: 2768 - protein, 305 aa, unidentified
  REGION 1..305: note = Human gut metagenome
MSTCVCVLSNSGERLMPTFRLGKVRRLLKDGKAKIVKHHPFTIQLLYDSKANTQPIEICEDVGYNYIGISVKSQSHEYASAQYDTLQDEKACHDSCRKLRRTRRNRLRYRKPRFDNRKRGEGWLAPSLRHKKELNVNVVKMYCAVMPITHATIEVGSFDTMLVKAIQEGKAIPEGADYQKGPRYNLATLREAVFYRDNYVCKVCGRKATEGAILHVHHMFYWKGRHGNSLSELITVCEKCHTSANHQKGGKLFGFGEDKEFANLSGAAFMNAVRWQIVNALYATYGKEFVTITYGAMTKEKRIIL

SEQ ID NO: 2769 - protein, 431 aa, unidentified
  REGION 1..431: note = Human gut metagenome
MPNKVYVINKHGRPLMPCSPAKARHLLDDGKAKVKKRAPFTIQLVYGSSGYTQEVILGVDAGSKTIGMSASTTKEELLSAEVKPRNDVVDLLSTRREFRRARRNRKTRYRKPRFDNRVRSKHKGWLAPSVEVKIQEHITSIKRVCRILPVSKVVIETAEFDLQLLKAIEEGKPVPQGEDYQQGEMYGHYNVRQYVLWRDGYTCQCCGAHATKKKEVRLHVHHLESRKVDGDAPDNQVTLCESCHEKLHKGLIAEKDFKKRKRKSTRDATFMGIMRKTLMQRLCSELPIPVIETRGYITKATREKLLVLPKSHTNDALAIAQGKQGFNVGYLPGIVQINKIYTIRPVRHHNRQLHKATILKGGIRKSNQTEKYVFGYRLFDKVQFNGQDCFIWGRRTTGIFTIKTINGKMIKDGISFKKLKLVEKSTSYLIA

SEQ ID NO: 2770 - protein, 424 aa, Moorena sp.
MFVFVLNSSRKPLNPTHPARARKLLKTGKAAVFKRYPFTIILKEEVAEPNNQQLRIKIDPGAKTTGIAILRNESVLWGAELTHRGGQIRSALTSRRQLRRSRRNRKTRYRQPRFNNRCREEGWLPPSLISRVENILTWVKRLWRLSPIAHISTELVRFDTQLIQNPEISGIEYQQGTLAGYELREYMLEKWHRRCVYCGATDTKLEIEHIVAKSKGGSNRVSNLTLSCQKCNEKKGNKPIEQFLENNPLLLKSILSQAKISLADTAAVNATRWKLFNGLKELGIPVETGTGGRTKYNRCRQNLPKTHWLDAANVGHSTPDTLKILVSRPMRIKATGHGNRKMCGTNAFGFPIRHRSNTKKHFGFQTGDIVKAVVTKGKKVGSYIGRVLCRATGSFDITTATGRVAGISHKYCSFVHRSDGYSYQ

SEQ ID NO: 2771 - protein, 424 aa, Scytonema sp.; identical to SEQ ID NO: 2765

SEQ ID NO: 2772 - protein, 424 aa, Moorena sp.
MRVFVLDKNKKPLDPCQPARARILLKQGRAKVFRRYPFTIIMGDLEELECVTHNHQIKLDPGSQTTGLAIIQEKVVVWGAELTHRGLQIRDGLTSRRQLRRSRRNRKTRYRQPRFLNRKRPDGWLAPSLMSRVYNIITWVKKLTRFCPITGISQELVRFDTQKMENPEISGTEYQQGTLYGYEVREYLLSKWNRKCAYCGVTDTPLEVEHIKPKSKGGSDRVSNLAIACRKCNQTKGNQEIEQFLSGKPDVIKRILSQAKRPLVDGAAVNSTRWKLYNELKALGLPIETGSGGLTKYNRCRQNLPKTHWLDAANVGKVDTLYIEVYQPLLISAKGHGTRKMCRTNKFGFPTRYVPRWKFVKGFQTGDIAKAVVTKGKKVGTYTGRIATRKTGSFNISTKHGLVQGISHKYCSIVHRKDGYAYSF

SEQ ID NO: 2773 - protein, 456 aa, Idiomarina sp.
MAIFVLDKKKQPLMPCSEKRARLLLQRGRAVVHKRYPFTIRLKDRVGGSTQPLSLGIDPGSKTTGLALIREPDSQQRHVLCLFELIHRGYQIKKALQQRAAFRRRRRSANLRYRAPRFNNRTKPKGWLAPSLQHRVDTVTAWVNRLNRLAPVTAISQELVRFDTQKLDNPEINGVEYQQGTLLGYEVREYLLEKWGRECAYCGTADTPLEIEHVIPRSRGGSNRVSNLTLSCHPCNQSKDALSLVDFFATDKGLKKRLKANGHTANARLERVQRQLKQPLRDASAINATRWALFNALKATSLPVAVGTGGRTKYNRQRLGIPKTHALDAACVGAFDALHAWQVPTLTIKAMGRGSYQRTRLTKHGFPRGYLMRQKQVHGFQTGDMVRAMVPTGKKAGTHTGRVAVRKTGSFNIQTEQGAVQGISHKYCTLIQRGDGYGYHFTPFTHLTGGAGQAVA

SEQ ID NO: 2774 - protein, 400 aa, unidentified
  REGION 1..400: note = Human gut metagenome
MPCSPAKARLLLKEKKAIVKRRTPFTIQLTIATGETKQPVGLGVDAGYKHVGLSASTDKAELYASQVELRQDITDLLSARRALRRARRNRKTRYRAPRFNNRIRTKRKGWLAPSVENRINAHLSRIEAVLRLLPVTKITVETASFDMLLLKNPDIAGKEYQEGEQLGFWNVREYVLFRDGHVCQHCYGRSKDPVLNVHHLESRRTGGDSPGNLITLCETCHEALHRGEIALKTKRGHSFRAEAFMGMMRWEVLNRLKASHSELEVNNTYGYRTKHARIVNGIDKSHCADAFCIAGNLGAERLCEFFFQKQTRRNNRQIHKLSILKGFRLFDKVACKGEESFIFGRRSSGYFDVRKLDGTRISAGISYKKLRLLEKRRTYLTEIRKEEALPPLPEGRGLRA

SEQ ID NO: 2775 - protein, 439 aa, Calothrix sp.
VTAEMQTNYVFLLNADKTFLNMVHPARARELQNKGKVSVFRVYPYVLILKNQVLNPLLHPCILKIDTGSKHTGFAIQSGDTILFRMELEHRGETIKSDLSKRAGFRNGRRSRNTRYRKARFDRKKPEGWLAPSIKHRLLTTETWIKRFMRYCPIETIEIEQVRFDTQKMLKPEIDGVEYQQGTLFGYEVREYLLEKWGRQCVYCGEDKIALEVEHIQPKSNGGTDRVSNLTLACHECNQQKGNQDIKDFLSGKPDLLKRILAEAKQPLKDAAAVNSTRFAIVKSAKKLCNSVKCWTGGRTKFNRCSQGLPKSHSIDAACVGESGEKIVIKTDQALIIKCKGHGNRQARRANAQGFPAVKNAKETYKHITAGDIVKVDIKKDRKNIKAGLYTARVKTPTKKGFEVLIDGFRVSVSTMKDVHFVHRNDGYGYEFQKTTICS

SEQ ID NO: 2776 - protein, 426 aa, unidentified
  REGION 1..426: note = Bioreactor metagenome
MVFVLDANKKPLSPCHEAVARKLLKQGKATIFRRYPFTIILKKAVDDTDNKQEYRLKIDYGSKHTGLAILQNNNVIWLAQIDHRTDIKKKLDERRSYRRRRRNKNLRYRQPKFLNRRRKEGWIPPSLESRINNIKTWVKRLQKLVPLTHISYENVKFDTQLMRNPEISGIEYKQGTLQGYEVKEYLLEKYNRKCCYCGKENVPLEVEHIIPKSRGGTNRIDNLCLSCHECNQKKGNLTAEEFGYPEVQRQVKETLKDTSVVNSTRWKVYDVLLRTSLPVECVTGALTKMNRIKLGLPKEHYFDACCVGQSTPDKLYFKTKDVLYIKAKGRGSHCRTNLDKYGFPRGYLARQKYFFGFQTGDMVKAEIPKGKYKGIWYGEVACRKSGSFDIKDKEGQRVVQGVNHKYFSVVQRFDGYSYRKEVANLM

SEQ ID NO: 2777 - protein, 427 aa, Methanosarcina sp.
MLVFVINQNKKPLMPCKPSKARKLLQAGKAKVVQNTPFTIKLLFGSSGYTQPVIAGMDTGSKVVGCAAIANGKVLYQSEIYLRENVSKKMEQRKMYRRTRRGRKTRYRPARFDNRGNSRREGRLAPSIKSKLEAHFREKMFVESLLPVTGWKVELASFDIHKITNPEVSGIGYQEGDLKGFYNVKAYVLDRDGYTCQHCRGKSKDSRLHCHHIVFRSQKGSDAPENLITLCETCHKALHNGEFKLSGNKSKTKHATEIGILKSQIRKSGWSFAETFGYETKYRREQILKLIKTHYFDAVAICCRDDQKVEVEDSVFLKRNVSAGDYQQTKGKRSEKKIPTGKLFGLRKFDLVKTENGIGFIRGKRSSGYFSISDIFGNKISDSVNVKKKCRRLSARSTTLVQMVQMTHSSPTCHFRQAGNVEEGVSC

SEQ ID NO: 2778 - protein, 451 aa, unidentified
  REGION 1..451: note = Human gut metagenome
LMPTIRLGKVRRLLKDGKAKIIKHHPFTIQLLYDSKANTQPIEICEDVGYNYIGISVKSQSHEYVSAQYDTLQDEKACHDSCRKLRRTRRNRLRYRKPRFDNRKRGEGWLAPSLEHKKQLNIRLIERYVSVIPITHATVEVGSFDTMLVKAIEEGKATPESADYQKGPRYNLATLREAVFYRDNYICKVCGRKATEGAILHMHHMFYWKGRHGNSLSELITVCEKCHTPANHQKSGKLYGFGENVKFADLSGAAFMNTVRWQIVNELYAAFGKDFVTVTYGAMTKEKRIALHLEKSHNNDAYAMGSFHPVNRCAFEHYEKVKRNNRILEKFYDSQYIDTRTGELTNGKSLFNGRISRSHKKDSENLHKYRGKRICKGHRALRRKKLALNPGDLVSLNEEILVVHGTHTKKNGSVNVEFKTPSRGGKKSASLKKLKIVKTSNLMHSAWTKVS

SEQ ID NO: 2779 - protein, 378 aa, Scytonema sp.
VVDNPNPKPLTIKLDPGSKTTGIAILDQDKVVWAAELEHRGWQIKNALESRRSLRRSRRNRKTRYRQPRFNNRKRKEGWFAPSLMHRVLTIEIWVKRLCLYSSITEIVMELVKFDTQKMQNSEISGVEYQQGELAGYEVREYLLEKWSRKCAYCDKEGVPLQVEHIHPRAKGGSNRVSNLTLSCERCNTKKGTKSIDEFLKRDGSRLEKIKRQAKQPLKDAAAVNATRWELFRTLKNILPTTTGTGGQTKYNRTRFELPKQHWIDAACVGDVETIQLLTQQPLRIKCTGWGTRQMCGTDRYGFPTRHRERSSVHFGFKTGDIVKAVVTTGKKVGEYVGRVLCRKTGSFDIATKSGRVAGISHKFCSLIHQKDGYSYAF

SEQ ID NO: 2780 - protein, 490 aa, unidentified
  REGION 1..490: note = Human oral metagenome
MYVVYVLDRQGKPLMPTKRFGHVRRMLKTNKAKAISTKPFVIQLQYESTDFVQPLYGGTDPGRTNIGEAVLNNKGEVVYAAHVLTRNKEIPKLMADRAAHRKASCRGERLRRKRRAKANGTMTCFPEGRKLPGYKDGVLELKDIINTESRFNNRKRPAGWLTPTARQCIQTHLNMVQNICKILPVTNWTLEYNRFAFMQLEDGSVRGWDFQNGRLKGYASKEDYVYALQGGVCVCCGASIEHYHHIKPRHKGGSNTHENLVGLCSVCHAEIHIGKRNLDKIGKYKKYAGTSIVNIAIPFIWDGIVKMFGDKAHICEGQETAELRRANNIPKEHFADAVCIAGIGYGITPQYDDNQPFKLRQFRCHDRSRINAQVERTYLDGKTIVAKNRKPRFEQKGDALSDLQSKIAKEHGELAARRAVSKLVVKKSYRRYNVPERIKPSAVFMFNNKKYLLRGQLTNGMYYRAFGEGTKNFPSRNCEVVSSGCSLTYM

SEQ ID NO: 2781 - protein, 518 aa, Nonomuraea sp.; identical to SEQ ID NO: 2675

SEQ ID NO: 2782 - protein, 377 aa, unidentified
  REGION 1..377: note = Human gut metagenome
MQYVYVLNKHGEPLMPCSPRKARLLLKQKKACVVKRTSFTIKLLYGSTGYKQPITLGVDAGSKHIGISATTEKHELYREEATPRNDVVDLLSARRAFRRSRRNRKTRYRAPRFNNRVHSKHKGWLAPSVEVKIQEHITVIKRICRILPVTLVRVETAEFDTQRLKAMLAGKPLPVGTDYQLGEMYDEYNVRQYVLKRDNYTCQCCGAHSTKTKDVKLHVHHIETRRTGGNAPNNLITLCTDCHKALHAGKVTLDGKKRGKPLKDAAFMGVMRKTLMERLHKKLKIPVQGTYGYITKYLREKNGIPKSHTNDARCISKNSLAIPCDTCYYTKAVRHHNRQLHKATILKGGIRKANQAPYIVKGFRLWDKVLYNGQECF

SEQ ID NO: 2783 - protein, 445 aa, Moorena sp.
MPLMPCSEKRARLLLARGRARVHKVVPFVIRLTDRLTEDSEFQLLRLKLDPGSKTTGLALVLDKADTTVGVLNLFELVHRGRQISEALMQRRRFRHRRRGANLRYRAPRFYNRARQTGWLAPSLRHRVETTMSWVRRVLRWAAVSAISMELVRFDMQALQSQDIAGVEYQQGALFGYEVREYLLEKWGRRCAYCDAQDVPLQIEHVLAKARGGSNRVSNLTLGCGPCNLKKGGRDVRGFVKDKARLARILARAKTPLRDAAAVNATRWVLLNALRTTDLNVEIGSGGRTKWNRTRLGLPKTHALDAACVGTVHAIFGWQRPTLELKCSGRGSYQRTRLTAYGFPRGYLTRQKRIHGFQTGDRVRATVLTGKKAGTHVGRVAVRAKGNFNIQTPQGVVQGIAHRHCTMMQRADGYAYATVPLKRGKDQGPAQQQGAYRASCCPSPA

SEQ ID NO: 2784 - protein, 462 aa, unidentified
  REGION 1..462: note = Ga0315294_10076910
MQQLRGKFKNVPRSTTLAPCSTTSILNREKTPYPLIGARCIEEQRTRNDGEVNHQQHRAGQNLRVSGIVYVLNLRGQPLMPCRQQKSKKLLKEGKAKVIKRSPFTIQLLIPTGETKQEINLGIDTGFGNIGFSATTKKQELISGTLILDGKTKERLEEKLMYRRGRRNRHHWYREPRFDNRTRKDGWLPPSIERRYLTHLNLILKIHQILPITNIILEVAKFDIAKIENPEISGIGYQQGNLYDYQNMRSYLMSREHGKCQFCGNDFKGQSSHIHHIKPRSKGGNDRSNNLVLLHETCHKEIHDQHLEKKLKSNSKDYKHSTFMNIINKKFRQDIPELKITYGNITWVKRNNLNLEKNHINDAFVISNGTNQIRIKSVEIKQVHRNNRVLQLNRKGFKPSIKREKSKVNPGDLFWIGGKQYICKTMFNKGNYIRYGDVKMKEYFNFSKVTKIFKYGSFIWSI

SEQ ID NO: 2785 - protein, 423 aa, Arthrospira sp.
MSNHIFVLDTNRKPLTPCKPGVARSLLKAGKASVFRRYPFTIILNKEVDANPEPLELKLDPGSKVTGIALKQGNHIIFAAELQHRGQQIKEALLSRRQLRRSRRNRKTRYRPARFLNRTRSKGWLAPSWQHRVDTLMTWVQRFRRLAPVGRIAQELVRFDLQLMENPEISGVEYQQGALQGYEVREYLLEKWGRTCAYCGAQNVPLEVEHIQPRSKGGSDRVSNLTMACHSCNQAQGNGDIRDFLSGQPDVLSRLLRQAKSPLKDAAAFTSPRWALFKVLKAPGLPVTTGTGGQTKFNRLRLNLPKAHWLDAACVGPVESLEVLTSKPLLILAKGHGTRQMCGTNKYGFPNRHRSRRQIHKGFQTGDMVTATVTAGKKIGSYLGRVLCRASGSFDITTASVRVAGISHKYCQPIHRKDGYAYA

SEQ ID NO: 2786 - protein, 419 aa, Moorena sp.
MPNYVFVIDTNKQPLNPIPPKKARRLLDKGKAAVFRMYPFTIILKTAIDNPIVSPCQIKIDPGSKTTGFALVQNNQIIWGMELEHRGGLIKKKLESRKAVRHRRRNRHTRYRKPRFFNRKRSEGWLPPSLEHRVSTIETWVKRLTKFCPVNEIWVERVKFDTQKMQNPEMNGIQYQQGELAGYEVREYLLEKWGRECTYCGKQSVPLQIEHIHPKSFGGSNRVNNLCLACEKCNQRKGNKPIEEFLKKKPSLLQKIKTKAKQPLKDAAAVNATRNKLVKVLQNIKFVVTGTGAQTKYNRTRLGLPKEHWIDAACVGDIGTLVLKTSQPLLVTCKGQGGRQKAALNKYGYPVRHNPLKPIKGWVTGDIAKHQRLGIGKVTPRSKGSFGFTPLGMKGYKSCNPQDISAIHRKDGYTYSFCK

SEQ ID NO: 2787 - protein, 456 aa, unidentified
  REGION 1..456: note = Marine metagenome
MQRVFVLGKNKERLSPCTPARARKLLSKNKAAVFRQFPFTIILKERETGNTQPLYFKIDQGSKTTGISLVSINKNSNKVIYACNLVHRGHAISESLTKRRAIRSSRRSRKTRYRKPKWTNTMSKKQFEHINKRPKGWLAPSIKSRLDNTVNLFNKLNKLTPITNVSIENVRFDMQKINNPTISEIGYQQGDLFGFEVKEYLLYQHKHTCAYCHGLSKDPILEIEHILCKSKGGTNRLSNLSLACRKCNQDKGSLLPEEWLQKLSKSKSALNKKRFTLFSKVLKGVKPSLKDAAAVNSIRNALVNSFNLPIELGSGGLTKYNRKQNNYPKEHWIDAACVGLSGEEIHIPTSLIPVEIKANGRGSRQMCRVDKNGFPRTSAKKASNKFNFKTGDIVIAKVKKGKKQGTYLGRVAVRESGYFNITKKSGVVQGISYQYCRLLHKNDGYSYSNLVNLITT

SEQ ID NO: 2788 - protein, 466 aa, Moorena sp.
MQRRVFVLSKNRKPLMPCSPARARQLLKERKASVYRQEPFTIILQKRTEGDLQKVQLKFDPGSKITGMALVVFFQKGTIVTWAAELEHRGEKIVDLLSKRRAIRRSRRNRKTRYRPPRFCNRTRKKGWIAPSLKSKVDNIFNWTKKLLTYTPIDNLCVETNRFDTQKLQNPEISGVKYQQGTLFGYEIREYLLYKWNHQCAYCDAKNVALEIDHIHPRSKGGSNRVSNLTISCRKCNENKGNGDIHEFLSKDNKRLQKIVSYSKKTLRDAASINTTRYVIGNQLKKLGMDVEFASGGKTKANRRHNGFNKQHWIDAACAGESGENVTISQDLIPLGIQSQGRGSRQMCRVDQFGFPRTTAKSQKRAKDFQTGDIVKAVVTKGKKKGVYVGRVAVRSNGYFNIKTNNSTVQGISYRYCQLIQQVDGYFYFQKGDARLKKASCSCFAHSRPSGDSSPTYRSRGILATN

SEQ ID NO: 2789 - protein, 497 aa, Streptomyces sp.
VLHQQLALELDPADNPRDRDETGAERREATGVEHVRGEIPAASPGGGGVTPNQPVGEEPRERHPFVFVLDKHGQPLQPCTPASARKLLKKGRAVVHRHTPFVIRLKDRTIAESEVDGVELGIDPGSRHTGIAAFTARAGERRGRYAVQLDHRGAVIRKRMGQRAAYRRRRRTSHLRYRAPRFNNRARPDGWLAPSLRHRVATAVSWVTRLSRWAPVRAVHVERVAFDTHAISAGRPLEGAEYQHGTLHGTEIREYLLAKFGRACVYCNISGVPLNIDHVHPRSRGGSDRISNLVTACIPCNETKSNRPVEEFVRDKTKLAKMLSRAKAPLRDAAAVQSTRWALWRALDQMLPPHIASGGRTKWNRTRCGLPKSHTLDALNVGKLDTVTETVTPILVAGCSGRGQHQRTSPDRHGFPRRTSPRIKTVHGYATGDLVTASVPKGKYTGTHTGRVMIRTTGKFDIRTPHGRAAGIRHTNIRLLQRGDGYTYTHQPEQACA

SEQ ID NO: 2790 - protein, 396 aa, Moorena sp.
MVYVLSKTGQPLMPTENHAKVRILLKQGKAKVVHRCPFTIQLLYSSTNYTQKVTLGVDSGSKHIGLSATTKDKVLFESDVELRNDIVDLLSTRRELRRSRRSRKLRHRKPRFDNRRRSDRWLAPSVKQKVDSHITMIAKMHKILPITNIIVEVASFDIQKIKNPTISGVDYQQGEQLGFWNVREYVLFRDGHTCQCCKGKSKDKILNVHHIESRKTGGNAPNNLITLCETCHTGYHKGTVKLPKTIHRGMSFKDATFMGIMRWALFGKLKTIYPDVKLTYGYITKNTRIKNSLPKDHYIDARCISGNPNAISNGDVYYYKKVRCHNRQIHKNTILKGGYRKRNQAAYEVKGFRLYDQVLWKGQKCFIFGRRATGRMDLRLLDGTHVNPVGFPAKYL

SEQ ID NO: 2791 - protein, 427 aa, Moorena sp.
MQNYVFVIDANKQPLNPIAPKKARRLLDKGKAAVFRMYPFTIILKTAIRQSRRCANEYPIVSPCQVKIDPGSKMTGFALVQNGQVIWGMELEHRGGLIKKKLESRRAVRRGRRNRNTRYRKPRFLNRRRPQGWLAPSLEHRIMTTQTWVKRLIKFCPVNEIWVERVKFDTQKMQNPEISGVEYQQGELAGYEVREYLLEKWGRECTYCGQQNTPLQIEHIHPRSKGGSNRVSNLCLACEKCNQRKGDKSIEDFLKKKQDLLKKIKSKAKQPLKDAAVVNATRNKLVKVLRTLKPVVTGTGAQTKYNRTKLRLPKQHWIDAACVGGIETLILKISQPLLVTCKGQGGRQKAALNKYGYPTRHNPLKPIKGWTTGDLAKHQKLGIGKVTPRSKGSFGFTPLGTKGYKSCKPQDISAIHRKDGYIYGFCR

SEQ ID NO: 2792 - protein, 512 aa, unidentified
  REGION 1..512: note = Human gut metagenome
MPTVYVLNKDGKPLMPTTRCMHVRHLLKNGKARVVKSKPFTIQLLYETDDVVQPLYLGIDPGRTNIGVAVVKTDGAAVFTAHLETRNKEVPKLMKKRKESRCARRTNGRRCRRQRRAKTNGTISKKCVKQTTAQNGSVSKRAKEIGVIKRHLPGCEKDVLCIGIKNKEAKFTNRARPEGWLTPTANQLLQTHINLVKKIQKFLPISDVVLEVNKFAFMQLDNPNIQKWQYQQGPLYQKGSLENAVSEMQEHHCLFCEKPIEHYHHVVPKSENGSNTIANIVGLCTEHHNLVHKDATWQKKLAKEKVGLVKKYGALSVLNQIIPALTKEMNSLFPKHFFVTNGKSTYDYRTAHGVSKDHWLDAYCIACSVLPNDVCDSNINSHVPYELKQFRRHDRRVLHKANMSRVYTLNGKTVATNRHKAIKQTTDSLEEFRQSHPGDVCKLKVKEHHPAYRNLNRNYPGSVFLVDGQVHVMQGVSGSHNGKADGYYNTNGNAYPYYKCKFVVKNEGIVFA

SEQ ID NO: 2793 - protein, 516 aa, unidentified
  REGION 1..516: note = activated sludge metagenome
VLPQPQALESVPVDNPGVGTKRGTDTAVMVVAGVQHGRGETTREGGVTNHQRETAGGSGSRVVPATTQQRVFVLDRHGRPLQPCRPARARKLLRQGRARVHRMVPFVVRLIDREVETSVVDGVTVKVDPGSRTTGLAVVEQRDTLNPATGETTTVKGLWLGELVLRGLQIKRAMHSRAALRRGRRSRNLRYRQPRFNNRTRPEGWLPPSLQHRVDVTLSWVRRLSRWAPVIAVAYELVRFDTQAIENPDISGVEYQQGALAGWEVREYLYAKWGYRCAYCDAPGAGVQINIDHVVPRSRGGSSRVSNLVPACRPCNELKDTRLVEDFLAHDPARLARITAGLKRPLRDAAAVNTTRWVLWRQLTALGYQVTTGTGGQTRWNRYRHRIPKSHALDALCVGAVDAVASYTAVTNQIMATGRGSYARTRSNKYGFPRLRLTRTKRHYGFATGDLVRAVVPAGKNTGTHIGKIAVRASGSFNITTTTGVAQGIHHRHVTLIQRGDGYTYKTQPTPTKGMT

SEQ ID NO: 2794 - protein, 482 aa, unidentified
  REGION 1..482: note = Human gut metagenome
KARVVRAKPFTIQLLYETDDAVQLLYLGIDPGRTNIGVAVVKANGTAVFTAHLESRNKEILKLMQDRKKARRARRTNGRRHRRQRRAKANGTISKKCVKQDTAQSKNPSKRAKDIGVIKRHLPGCEKEVLCIGIKNKEAKFSNRVRPEGWLTPTANQLLQTHINLVKKIQKFLPISDVVLEINKFAFMRLDNPNVQKWQYQQGPLYQKVSLEEAVSEMQEHHCLFCKKPIAHYHHVVPQSENGSDTIGNIVGLCTKHHDLVHKDTAWQKKLAKKKTGLNKKYGALSVLNQIIPALTKELSFLFPKHFFATNGKSTYDYRAAHGVGKDHWLDAYCIAGSVLPNDVCDNNINNHVPYKLKQFRRHDRRALHKENMSRVYTLNGKAVATNRHKAIKQTTDSLEEFRQSHPGDVCKLKVKEHHPAYRNLNRNHPGSVFFVGEQAHVMQSIVASKDGKATRYKDTNVNKIAAGQCRFVAKNEGIVFT

SEQ ID NO: 2795 - protein, 428 aa, Calothrix sp.
LSKVFVLDTKKRPLDPIHSAQARQLLRNKKAAIFRRFPFTIILKESSVVDAPVSNIRIKLDPGAKITGISLVNDSTGEVIFAAELKHRGFTIRDALNSRRQLRRGRRNRKTRYRKPRFLNRTRPDGWLSPSLMSRIHNVETWVNRLRKLAPIAAISTELVKFDMQLMHNPEIEGKEYQQGTLAGYETREYLLEKWNRQCVYCGVKNVPLQVEHIHPRSKGGSNSITNLTLSCEKCNIKKATKDIKEFLKKDSAKLQKILAQAKKPLANAAAVNATRYKLLEVLKSTSLPVECGSGGLTKFNRTSQQLTKTHWIDAACVGKSTPTLNIKGIKPLLITSNGHGTRQLCRTDKFGFPNRYVPRFKFVNGFQTGDIVKAIVTNGKKIGEYIGRVAVRSTGSFNISAKQGLIQGINHKYCSTIHRKDGYSYGF

SEQ ID NO: 2796 - protein, 442 aa, Lactobacillus sp.
VVTEVVQNRIFVLNQDGQALMPCRPSKCRHLLHCNRAIIVSHTPFTIQLKYQSGSCLQDVSIGVDSGQRHIGLAVTSNEKVLWQGEVTLRQNVKSLLDTRHMYRHTRRQRHTRYRMVRFSNRKPRDIRLGVWLPPSVRQKCEHNIQWINRVRNVLPQADISIEVAKFDVQKLKDPTIHGIGYQQGDAFGYENVKQYVLERDEHTCQLCKRKIDTETKKTLKLHIHHIVYRSKGGTNAATNLLTVCTKCHTDRNHRAGGPLYALFEQKKTIPPLKNATFMNMLRNRLLTAFPEAHFTYGYITTVQRKKLGLAKAHYRDAVAISGIQQIIEEPKSVVMFDQFRTKKRSLHEATARRGRKQKNVTQKRVKKNTKKVKGWCLNDYVRISDGRCGFITGFSGLWMAHIRDRQGGLVKKLVSLTKLAFLHHTGTWRCTTLPTDVYDMQ

SEQ ID NO: 2797 - protein, 426 aa, unidentified
  REGION 1..426: note = Human gut metagenome
MVYVQNRLGQPLMPTKDHRKVRLLLDSGAAVVVKRTPFTIRLTTKAKSYVQPIILGVDAGSKTIGLSASTETEELFAAEVTPRNDVVDNLSTRREFRRSRRNRKTRYREPRFNNRVRSKHKGWLAPSVEVKIQEHITAVKRVCALLPVGKIVVETAEFDLQLLKAVEAGLPVPRGEDYQKGEMLGHYNIRQYVLWRDGYTCRCCGTHGKGVKFHVHHLESRKTGGNAPDNLVTLCDGCHKKFHKGIITPDILKKRKCRSTRDAAFMGIMRKTLMERLRAELAIQVVETKGYITKYTRVELLKLDKTHTNDALAIAQGRRGFGVEELTTIPQSDYIYRIRPVRHHNRQLHKATILPGGIRKSNQAPRYVRGFRLFDKVSYLGEDCFIWGRRSSGSFLLKLLDGTKVKDGVGYKRISLLERSASYLIS

SEQ ID NO: 2798 - protein, 453 aa, unidentified
  REGION 1..453: note = Human gut metagenome
MSVAVVSKTGMLLMPTSEYRARKLLKSKKAIIHGYHPFTIQLTERETGYIQPVELCMDTGYIHIGTSVKSEKHEYLGEQIDTLTDERQKHDACRMYRRQRRNRKRYRQPRFNNRERDDGWIAPSLEHKKTIHIQAISRICKVMPVTDITLEMGNFDTQVLKAREEGKPLPQGLDYQHGERYSVTTLREAVFLRDGYTCQCCGRTIKDGAILHAHHVIYRSQGGTNRISNLITVCDKCHTPANHKPGGKLYGWKPKVASFKGATYMTTIRWKLYNEIKALFPDIDIHITYGAETKERRRAFDITKSHVNDAFVMGQFHPKHRSKPVCYKKKRRNNRCLEKFYDAKYIDSRNGKTRTGQELFNGRISRNHKKDSENLHQYRQQKISTGKRTIRKQHYAIQPHDIVIFNGEKFETSGCHNNGTRVILLPQKKSVAIKKLNIYRYAGGYFKSAFNQK

SEQ ID NO: 2799 - protein, 427 aa, Nostoc sp.
MSKVFVLDTEKRPLDPIHSAQARQLLRNKKAAVFRRFPFTIILKESRADASVSDLRIKLDPGAKITGIALVNDSTGEVVFAADLKHRGFAIRDALISRRQLRRTRRNRKTRYRKPRFLNRTRSEGWLAPSLMSRVHNVETWVNRLRKFAPITAISTELVKFDMQLMRNPEIEGKEYQQGTLAGYETREFLLEKWNRQCAYCGIKDIPLQIEHIHSRSKGGSNSITNLTLSCEKCNVKKGTKDIKDFLKKDPTRLQKILAQAKKPLADAAAVNATRYKLLEVLKSTDLPVECGSGGLTKFNRTNQQLQKTHWLDAACVGQSTPILIIKGIKPLLITANGHGTRQMCRTDKFGFPNRYVPKLKFIKGFQTGDIVKAVVTNGKKIGEYIGRVAVRSTGSFNISAQRGLIQGINYKFCKSIHKKDGYSYSS

SEQ ID NO: 2800 - protein, 443 aa, Anoxybacillus sp.
MVEENMTCFMQRKGENPMVFVLDTNKRPLAPCHEAVARKLLKQGKAAIYKRYPFTIILKEIVDNFRPKTPYRLKIDYGSKHTGLAIVRGQEVVWLGQLDHRTDIKERLDKRRAFRRARRKRKTRYRKPRFLNRRRKDGWLPPSLESRVQNIQTWVERLRKICPIEHISYENAKFDTQLMRNPEINGVEYQQGTLQGYEVREYLLEKFGRKCCYCGKEGVPLEIEHIIPKSRGGTDRVDNLCLACHDCNQRKGSKTAEEFGYPHIQEMVKKTLKDASVVNATRWKVYEVLKQSGCEVECGTGARTKMNRIRLGLPKIHYFDACCVGESTPLQLHFKTKEALFIKAKGRGSRSRTNLDKYGFPRGFLARQKYFFCFQTGDIVKANVPKGKYQGVWFGEVACRKNGSFDMKDKDGKRIAQGISYKYFNIIQRFDGYTYRREGMNIA

SEQ ID NO: 2801 - protein, 516 aa, Nocardiopsis sp.
VTRLATFRAGQKTHQAVLPQQPALESESADTPRIGHETGPGPRPTAEPGADHVRGETTRISPDAGGVTPNSVGEKPRERHPSVFVLDKDHTPLQPCHPARARKLLAKDRAVVARHTPFTIRIKDRSVQASEVDGVQVGIDPGSRHTGIAVFTAQGGERRGRYSIQLDHRGAQIRKKLGQRSAYRRRRRSANLRHRAPRFSNRTRPRGWLAPSLEHRVQTTTAWVARIARWAPVTAVHVERVVFDTHVLSARTPLEGVEYQQGTLAGYEVREYLLAEFDRACVYCAATDTPLNIDHVHPRARGGSDRVSNLVLACMPCNRAKSDRPVEEFITDTRTLARILARAKASLRDAAAVQSTRWALWRALDERLPTRVASGGRTKWNRTRNHLPKSHTLDALAVGKADTLTRTVSRVRVAGCAGRGSYARTRTDKHGFARLRLPRTKGFFGFSTGDLVRAVVPKGKKAGTRTGRVAVRASGSFNITTSQGTVQGINRKYVRLLQRADGYGYAWKGEGVSSRP

SEQ ID NO: 2802 - protein, 509 aa, Streptomyces sp.
VLPQRAALEFESADTPRIGDETGLEHRTRAVTDVEHVRGETADASPGIDGVTPNREVGEKAREGHPAVFVLDKHGHPLQPTTPARARKLLHQGRAVMARHTPFAIRLKDRTVSESQVDGVELGIDPGSKHTGIAVFTVKDGERRGLYAVELTHRGSAIRHKLTARSAYRRRRRTGNLRYRAPRFSNRTRSKGWLAPSLRHRVDTTMSWATRLARSAPIRTVHVERVAFDTHAMSHGGPLEGTEYQHGTLHGTLHGTEAREYLLAKWERACAYCGITGVLLNIDHIHPRSRGGSDRISNLCTACIPCNQKKSNQQVEEFLKGSPRKLARILTQAKASLRDAAAVNATRWALWRALDSGFPTVHTASGGRTKWNRQRTGLPKTHTLDALCVGHLDTVTRTPARILTVTATGRGTYTRTRTRTDRYGFPRQRLPRQKTFFGHQTGDFARAVVLKGKKAGTHIGRVAVRATGSFDIKTTQGLVQGIGHKHFRLLQRADGYAYTTRPEGPTGTT

SEQ ID NO: 2803 - protein, 431 aa, Calothrix sp.; identical to SEQ ID NO: 2754

SEQ ID NO: 2804 - protein, 427 aa, Methanosarcina sp.
MLVFVINQNKKPLMPCKPSKARKLLQAGKAKVIRNTPFTIKLLFGSSGYTQPVIAGMDTGSKVVGCAAIANGKVLYQSEIYLRENVSKKMEQRKMYRRTRRGRKTRYRPSRFANRGNSTKEGRLAPSIRSKLEAHFREKRLVESLLPVTGWKVELASFDIHKITNPEVSGIGYQEGDLKGFYNVKAYVLDRDGYTCQHCRGKSKDSRLHCHHIVFRSQKGTDAPENLITLCETCHKALHNGEFKLSGNKSKTKHATEIGILKSQIRKSGWSFAETFGYETKYRREQVLKLLKTHYFDAVAICCRDDQNVEVEDSVLLKRNVSKGDYQQRTGKRSEKKIPTGKLFGLRKFDLVKTSKGIGFVKGKRSSGFFAISDLFGNKISDSVNVKKKCRRLSARSTTLVQMVQMTHSSPTCHFRQAGTVEEGVSC

SEQ ID NO: 2805 - protein, 431 aa, unidentified
  REGION 1..431: note = Human gut metagenome
MPNKVYVINKHGRPLMPCSPAKARHLLDAGKAKVKKRTPFTIQLVYGSSGYTQEVILGVDAGSKTIGMSASTTKEELLSAEVKPRNDVVDLLSTRREFRRARRNRKIRYRKPRFDNRVRSKHKGWLAPSVEVKIQEHITSIKRVCRILPVSKVVIETAEFDLQLLKAIADGKPVPQGEDYQKGEMYGHYNVRQYVLWRDDYTCQCCGAHATKKKEVRLHVHHLESRKVGGDAPDNQVTLCESCHEKLHKGLIAEKDFKKRKRRSTRDATFMGIMRKTLMQRLCSELPIPVVKTRGYITKATREKLLVLPKSHTNDALAIAQGKRGFNVGYLPEIAQIDKIYTIRPVRHHNRQLHKAAILKGGIRKSNQAGKYVFGYRLFDKVQFNGQDCFIWGRRTTGIFTIKTINGKMIKDGISFKKLKLVEKSTSYLIA

SEQ ID NO: 2806 - protein, 456 aa, unidentified
  REGION 1..456: note = Human gut metagenome
MAYTYVLDMNKNPLMPCHNGGFIRTLLKEKKAKVVRNKPFTVQLLFEVRNKYKQDMTLGIDAGYKHIGFSVSISKSEVFSAELEQECGMVERNKERRMYRRQRRSRLRYRKPRFNNRIASKQKGWIAPSLKRKKNTHLRFIMMLKSIMPITKITVEIGLFDPALMKAIAEGRTLEREDYQHGEAEGFENMKSYIRYRDGYTCQNPDCKCHKMSVSDREKLRLAVHHIGYYRNDRSNRPGNLITLCELSHTPENHQPGHLLYGWKPKIKSLKETAFMNIIRKEIVDTLKVIYPTTEIRYTYGYRTNMTRNEWHIEKSHHDDAFCIAGNYSKNRCNTLYFHQKRRNNRSLEIFYDAKYIDGRDRKRKSGKELFYGRTTRNKNYAGENLHKYRIKKISKGKRSIRRQHYFYQPKDIILFEGIKHVIKGSHCNGSRLILDTGKSVSVKKVRIHKFSGGIY

SEQ ID NO: 2807 - protein, 442 aa, unidentified
  REGION 1..442: note = Human gut metagenome
MVTVQQSTHHLPFGRVFIRRNLFMVYVISQDSKPLMPCSNPIARLLLKQGKAKVKRREPFTIKLIYETTDYTQDLTLGVDTGSGTIGAAVSKDNGDIVYMSEVVVRNDITDKMTQRAKYRRNRRNRKTRYRKARWLNRSNSIKKDRFSPTMQSKLHSHVKEIEYIQSILPITEMVFETGQFDMHLMKDPSLANPKVRPWGYQKGTNYGFENTKAMVLNRDNYTCQCCKGKHKDSKLEVHHIVFRSQGGSDEESNLITLCHTCHKDLHSGKINLKLSGKVKGNLKYATQMNSIRKQLFRLYPNAIETFGYVTKANRLHLGVDKEHYYDACTIATQGNTFNVKSNLYKKKCVSDGDFQKTKGICSEQPIVTDKICGFRKFDKVRYFGKDYFIKGRMSTGYAILMDIDGNKIDFSTMPRGYKTPKLSNCKRITARSTVMTQVKVV

SEQ ID NO: 2808 - protein, 473 aa, Actinoplanes sp.
VGGDTRTSHPVVFVLDRSGRPLQPTHPARARELLRKGRAVVHRHTPFVIRLKDRTATDSTIDGVEVGIDPGSCKTGIAVFTTTPGSEQGPGASDREATEAETVTQSTRADTEGPARRGMFAVEIMHRGGVIRDRLAARAGYRRRRRSKNLRYRKPRFDNRTRPAGWLGPSLQHRVDGTMSMIGRLRRWAPITAVHVERVAFDAHLLQNPDVSGIGYQHGTLHGYETREYLLGKWRHRCAYCSASGVPLNIDHIHPRSRGGSDRISNLTLACIACNQIKGNQPIEVFLAERPKVLATVLADAKRPLHNAAAVSTTRWALWRALTGTGLPVHVGSGGRTKWNRHRTAAPKSHTIDALHVGRLGTVTGWPHRILAAAATGRGAYSRTRTDRYGFPRLRLPRTKHVHGYATGDLVRAVVSTGLKRGTHLGRVAVRTTGSFNIRTRYGLVQGIHHRHCRLLQRGDGWAYTTLLETSCV

SEQ ID NO: 2809 - protein, 466 aa, unidentified
  REGION 1..466: note = Human gut metagenome
MSTCACVLSKNGERLMPTIRLGKVRHLLKDGKAKIIKHHPFTIQLLYDSKTDTQPIEICEDVGYNYIGISMKSESHEYVSVQYDTLQDEKDCHDSCRKMRRIRRNRLRYRKPRFDNRKRNKDWLAPSLEHKKELNVNVIKMYCEVVPITHVTVEVGSFDTMLVKAIQEGKAIPEGADYQKGPRYNLATLREAVFYRDNYTCKVCGRKAKNDSAILHVHHMFYWKGRHGNSLNELLTVCEKCHTPANHQKGSKLYGFGENIKFANLSGAAFMNTVRWQIVNELYATFGKLFVTFTYGAMTKEKRIALHLEKCHNNDAYAMGNFHPVDRCAFEHYKKVKRNNRILEKFHDSQYIDIRTGKVANGRSLFNGRINRSHKKDSENLHKYRGKRTRKGYRALRRKKVALNPGDLVSLNGEILVVHSTHAGKNGYVGVEFKTPSKSGKKSASLKKLKIVKTSNSMHSAWTKVS

SEQ ID NO: 2810 - protein, 427 aa, Moorena sp.
MQNYVFVIDTNKQPLNPISPKKARRLLDKEKAAVFRMYPFTIILKTAISAPTISPCQIKIDPGSKTTGFALVQNAQVIWAMELEHRGSLIKKKLKSRSAVRRGRRNRNTRYRKPRFLNHRRYEGWIAPSLEHRVKTTETWVKRLIKFCPVDEIWIERVKFDTQKMQNPEVSGVEYQQGDLAGYEVREYLQEIWGRECAYCGKQNTPLQIEHIHPKSKGGSDRVSNLCLACEKCNQKKGNKPIEEFLTKKPDLLRKILARAKQPLTDAAAMNTTRNKILKALKAIKPVATGTGAQTKYNRTRLRLPKQHWIDAACVGNIKTLILRTSQPLLVTCKGHGGRQKAALNKYGYPIRHNPLRPIKGWITGDIAKHQKLGIGKVTPRSRGSFGFTPLGEKGYKSCKPQDISAVHRKDGYTYRFCENLPGFAWK

SEQ ID NO: 2811 - protein, 434 aa, unidentified
  REGION 1..434: note = Human gut metagenome
SALMVYVLDINGQPLMPTARHGKVRRLLNSHLAKVVKRCPFTIQLLCQSTKEIQPVPLGVDAGSKHIGLAATTDQKVVYQEELIPRNDVVKLLSARRTLRRSRRNRKTRYRKVRFNNRVHSKHKGWLAPSVEVKIQEHITVIKNVCKILPISEIHVETAEFDLQRLKAMEEGKPLPVGTDYQLGEQYDFYNTRQYVLHRDGYTCQCCGTRDKDVKLHVHHIESRQTGGNAPNNLITLCEHCHSALHEGKLKLPKGKKRGKSYRDTAFMGIMRKTLLERLRKEIDIPVTETYGYITKYWREKVGLEKGHINDAVCISKHPYAEPLDIYYLTKAVRHHNRQIHKTKFSKGGIRKRNQAPYLVKGFRLFDKVLYQNREYFIFGRRATGYFDIRTLDGTKVNKGSISYKKLRIQDTANAYLKEVKAIPHMNKFTCVLA

SEQ ID NO: 2812 - protein, 420 aa, unidentified
  REGION 1..420: note = Human gut metagenome
MQYVYVLNKHGEPLMPCSPGKARILLKQQKACVVKRTPFTIKLLYGSAGYKQPITLGVDAGSKHVGLSASTEKRELYSEEFTPRNDVVELLSTRRQNRRSRRNRKTRYRAPRFNNRIHSKHKGWLAPSVEVKIQEHITVIKRICRILPITLVRVETAEFDTQRLKAMLSGKPLPVGTDYQLGEMYDEYNARQYVLRRDNYTCQRCGAHTTKKKTVKLHVHHLESRKTGGNAPSNLITLCVDCHKAFHAGKVKLDGKKRGKSLKDAAFMGAMRNTLLTRLRNELNIPVQNTYGYITKLLREQNDIKKSHVNDARCISKHPLAEPCSVCYRTKAIRHHNRQTHKANFSKKGIRKRSQMPYLVEGFRLWDKVLYKGQECFVSGRRSSGSFALKKLDGTSISKGVTFKKLRLLEPATNYLIERM

SEQ ID NO: 2813 - protein, 511 aa, unidentified
  REGION 1..511: note = Human gut metagenome
MHTGLQQCEGVTMRYVYVLDMDGKPLMPTCRFGKVRRMLRSGQAKAVDTLPFTIQLTYKPKTRILQPVTIGQDPGRTNIGMAAVRSDGTELYRARIETRNKEIVSLMNERRSFRQASRRGERLARKRLAKRLHTTAKHLNGRILPGCKEPLAVKDIINTESRFNNRLRPEGWLTPTATQLLRTHLEAIRKLSGILPVTEVVLEVNRFAFLQLDNPEMRKKDIDFCHGPLYGTGGVKAAVSLQQDGYCLLCRKQDIGHYHHIVPRSRRGSNTIQNIAGLCPKCHELVHKDADAAQKLATIKTGLTKKYGGTSVLNQIIPFLTRELAALYPRHTHVTNGWNTREFREKHGLGKDHDIDAYCIAASILEDMQPVMQTETYKIKQFRRHDRALINHQTERTYRYDGKIIAKNRKKRMDQKTDSLEDWFTDMAKQHGHATASRMLSRVTLQKSTRYYNAKCRIMPGAIFIYRKKRFVMTGQLTGGAYYRAYGQGMKNFPAKAVQVIRENAGLVYVA

SEQ ID NO: 2814 - protein, 459 aa, Calothrix sp.; identical to SEQ ID NO: 2649

SEQ ID NO: 2815 - protein, 413 aa, unidentified
  REGION 1..413: note = Human gut metagenome
MTNYVFVLDANGKHLSPTKEQKAWFFIRKKRATLVSKYPMVIQLNKEIPDDKICKDEIRCGIDDGGLHTGIALVQKCQTKNKVLFKGVIEQRNDVKHLMDVRRGYRRYHRYHKRYRPARFNNRSSSKKEGKIAPSILQKRQATIRAVAQLNKWINITDYWLEDVAIDIRALTDGFKPYKWQYQKSNRLDENIRKAVILRDGCQCVECGRTNCKLEVHHIKPRRSNGSNALSNLITLCERCHQNTEGREELFMDKYFALLNSSDNKYLNYAQHVMIGKKWLREQLSSLGILHLTNGGDTANKRIDWNIEKFHSNDAICITNLQPDTCDVKEWTIKPMRRQSKAKADNVLGIKHRDLVEYTFKSGETHRGYVTALYPKQNAINFQSPTKHCKKVSAKKCRLLWKFNKIYWLDDVS

SEQ ID NO: 2816 - protein, 418 aa, unidentified
  REGION 1..418: note = Human gut metagenome
MVYVIGKEGQALMPTERFGKVRRLLKNGLAHVVCRIPFTIQLDYETTYFVQPISLGVDAGSKHIGISATTSEKELYAADVELRNDIVEKLSTRREQRRTRRNRLRYRKVRFNNRVSSKRKGWLAPSVENKIQTHLTVVEKIHKFLPITNIVVETASFNIQKIKNPSMSSEEYQKGEQLGFWNVREYVLFRDNHTCQHCKGKSKDHILNVHHIESRKIGGNSPSNLITLCESCHKAYHNGKIDIKVKRGASFRDAAFMGITRWTTYERLKNIYPNVNMTFGYITKNNRITNGLPKDHYVDARCISGNSKAKPLGYYFYQKKVRCQNRQIHKVNFLKGGRKKLNQAPFLVKGYRLFDLVEYQNDLYYIFGRRDSGFFDIRKLDGTKVNKGSISCKYIRLVDIRRSVLTERRKSCSIPPTN

SEQ ID NO: 2817 - protein, 438 aa, Methanosarcina sp.
MIFVLNKNKQPLSPCHSAVARKLLKTGKAVIHKKYPFTIRLKELKNSENKAEFRLKIDYGSRHTGLAILNGSKVIGLAQIHHKTSIKSNMDSRRAMRRTRRNRTTRYRKPRFNNRKRKEGWLPPSLQSRVDNIQNWVNRLQKLCPLTQISYENVKFDTQLMQNPEISGIEYQQGELQGYEVREYLLEKWNRKCAYCGAENVPLEIEHIIPKARHGMSRVSNLTLACRTCNEAKGTKTAEEFGYPDIQKQARIPLRDATLVTATRWKVYNVLSKTALNIECGTGARTKMNRIRLNLQKDHHLDAVCVGASTPNKIIFKTNSVLHIKAKGRGSHCRTNLDKYGFPRGYLSRQKSFFGFQTGDIVKAVVPKGKYKGIHFGAVACRKTGYFDIKNKEGVRIGQGINHKYCNILSRADGYEYATEHLEVDGIPPTTKVIGILP

SEQ ID NO: 2818 - protein, 436 aa, unidentified
  REGION 1..436: note = Human oral metagenome
MTKTFTTQTTQACVLNQHGKPLMPTTRLGKVYRLLKAKKAHIVSYEPFTIQLDYEPDTHVIQPMTLGVDSGAIHSGYSLANEHREYYSAEVIARNDISNRLSERHMYRQNRRSRKTRHRKPRFNNRKNKKKGWLPPSLEQKVAVQVNEIEHLHRYFPIETIIVETAEFDIQKIKNPDISGIEYQQGTLQGYNIRNYLLEKHGRKCFYCGKTVSGFEVEHMFPKSKGGSNRIDNLTLSCHDCNETKGTLTAEEFIRQTLSAKKAASKLKQLPNEKRLFEYMAYMNATRWTLYNAIKEKYPNVKMTYGYVTKYNRIQAGLPKAHHIDAKCITGFTTVPSIDQTVVKAKMRRHNRQLHRATFSKGHVRKVASLPTVTFGFQLYDLVLFDNHRYYIKGRRSSGSFDLVSVEGLKNEERTYKKLTLLAHTNAYLTNHYVNA

SEQ ID NO: 2819 - protein, 438 aa, Methanosarcina sp.
MIFVLNKNKQPLSPCHSAVARKLLKTGKAVIHKKYPFTIRLKELKNSENKAEFRLKIDYGSRHTGLAILNGSKVIGLAQIHHKTSIKSNMDSRRAMRRTRRNRTTRYRKPRFNNRKRKEGWLPPSLQSRVDNIQNWVAKLQKLCPLTHISYENAKFDTQLMQNPEISGVEYQQGELQGYEVREYLLEKWNRKCAYCGAENVPLEIEHIIPRARKGTDRVSNLTLACRTCNEAKGTMTAEEFGYPEIQKQARIPLRDATLVTATRWKVYNTLTEKGLEVECGTGARTKMNRIRLNLPKYHHFDAICVGASTPDKITFKTNHVLHIKAKGRGSHCRTNLDKYGFPRGYLSRQKSFFGFQTGDIVKAVVPKGKYKGILFGAVACRKTGYFDIKNKEGVRIGQGINHKYCNILSRADGYEYATENLEVDGIPPTTEVIGILP

SEQ ID NO: 2820 - protein, 447 aa, unidentified
  REGION 1..447: note = Human gut metagenome
VPAYRIKHITKKEAPYMVYVLDIDGQPLMPTSRHRKVRKLLNSHLAKVVKRCPFTIQLLYQSTKETQPVSLGVDAGSRHIGLAATTEQKVVYQEELVPRNDVVKLLSARRALRSSRRSRKTRYRKPRFNNRVHSKHKGWLAPSVEVKIQEHITAIKRICQILPISDIHVETAEFDLQRLKAMEEGRPLPVGTDYQLGEQYDFYNTRQYVLHRDEYTCQCCGTHDNNVKLHVHHIESRQTGGDAPNNLITLCEHCHKLLHAGKTILPKGKKRGKSYRDATFMGIMRKTLLERLKKEIDVPVEGTYGYITKYWRERAGLEKSHINDAICISKHPYARPLETYYLTKAVRHRNRQIHKTKFSKGGIRKRNQAPYLVKGFRLFDKVLYQGESYFIFGRRITGYFDIRTLDGTKVNKGSTSYKKLRIQDTAEAYLTEVRAIPHMNEFTCVLA

SEQ ID NO: 2821 - protein, 515 aa, Actinoplanes sp.
MRQSTHSGVLPQRRTLESVSADKPTRAHETGHGHRDTVAVPGVQHGRGETTAPIPGQWRHPNGQPSGDRGRKTPPTHHPVVLVLDKHARPLQPCTPARARKLLTAGRAVVHRHTPFVIRLKDRTAQESEILGVEVGVDPGSKATGVAVFTTRAGARTGLLCIEVRHRGGLIRDKLTARAARRRGRRSRNLRHRQPRFSNRARPKGWLAPSLRHRVETTMSWVERLRRWAPITRLHVERVAFDTQLLQNPAIAGVQYQAGELAGYEVREYLLEKWKRRCAYCGATGIPLNIDHIRPKARGGSDRMVNLTLACVPCNQAKGSTLVEVFLTGRPVVLARILRQAKTPLRDAAAASSTRWALWRALTCTGLPVQVATGGRTKWNRHRTGAPKTHTLDALHVGALDAVTRWPNTTLVATSTGRGSYARTRSNRYGFPRLHLPRTKQVHGFATGDLVHAVVPTGAKRGTHTGRVAVRTTGSFNIRTTTGLIQGIHHRHIRLLQRADGWAYTRQPEGPSTHA

SEQ ID NO: 2822 - protein, 489 aa, Calothrix sp.
VTKTLNIVEANFTPKERRNCQKNKMLTNHVFVLNADKSFLNMVHPARARKLLTQEKAAVFRTYPFVIILKKQVFNPTAKEYFLKIDPGSKWTGFAIQCGSDIVFRMELLHRGMQIRSDLLTRAGFRRGRRSRNLRHRKKRFNKRKPNGWLAPSLMHRVFTVETWIKRFCKFCPIVVIEIEQVKFDMQKLANPEISGIEYQQGELMGYEIREYLLEKWGRECVYCGVKDVQLEIEHIAPKSKGGSDKVSNLTLACNDCNQRKGNMDISDFLDDRQKLEQILSQAKSPLTDAAAVNSTRFAISNMADKYNNIKNWTGGRTKMNRVKQSLEKGHSIDAACVGESGSNIKILTQQPLKVISKGHGNRQSRKTNDKGFPALITETCQKTLKKIVKRNPDETVKTIAPKKEYSHIHTGDIVRFKLDKPCMTKGNKKKGIEKKVKVPCGSYTARVKTPTPKGFEVLINKERVSVPTMNGVSFAYRADGYDYKFAHS

SEQ ID NO: 2823 - protein, 462 aa, unidentified
  REGION 1..462: note = Human gut metagenome
MSVLVIGRNGRALMPTNPRKARLLLKKKTASVVCRHPFTIQLLYKTGCATQEGCIGIDTGSQHIGVGITCGDRVILKDEHALRSSMEKRSLLATRTVMRRGRRYRKVRYRKPKWRHHTKRMYFEKANRRGQHWRKVKTTTQSPRLKGWLPPSLQSKCDHHFRIIDRYLKYLPDPITRNLVIEAGRFDMARMNDPTIHGEMYQRGPMYDAENLRAYIFARDNYQCACCKAKAGTTRKADGTTVKLVAHHILFRSRGATDNPKYIISVCDHCHTTKAHQPGGILYSWMENNKKVARGLRDATFMNILRKRLFARYPQAAFTYGNITAADRKQLRLPKSHANDAVAISLFGKEASTVKNICQTMHYKQIRKSKRSLHEAIPRKGRKNPNTKAVRNKKNTTQANGFKLWDSVLADGKKLFICSFTGTSAYLIDKNGCYISQPGKTYKQWPLSKLKRLHPNGNWLMA

SEQ ID NO: 2824 - protein, 464 aa, Ktedonobacter sp.
LLDVPPDNLIEATITRAIGGSERSKHMSHVFVIDANKQPLNPVHPARARVLLSQGKAAVLKRFPFTIILNVAIDAPVVEELRIKIDPGSKTTGIALVNDQSGEVVFAAELHHRGAKIKEALDDRRAVRHSRRRRHTRYRKARWQNRRRREGWLPPSLTSRISNVLTWVKRLRNLCPITAMSMELVKFDMQAMENPDIQGWEYQQGTLAGYELREYLLEKWNRMCAYCGKGNVPLQVEHIVPRANKGTHRVSNLTLACEKCNQAKGTQDIKDFLKKKPAMLKHILAQAKAPLNDAAAVNATRWELFRGLQALGLPIECGSGGLTKYNRTTRELPKTHWIDAACVGQSTPEYLNTTGISSLLITATGYGKRQLCGVDKHGFPQRHRQRKKVHHGYQMGDLVRAVVPEGFAAAGRHVGRVLARATGSFDLRTARGRIEGVPVRYCRPLHRNDGYSYHSTRGGNSSPL

SEQ ID NO: 2825 - protein, 470 aa, unidentified
  REGION 1..470: note = Human gut metagenome
MSVFVVGLNGCRLMPTSERKARLLLKQGKAFVEQKVPFTIRLNYKTGSTTQLGYLGIDTGSQHIGVSVVREDGTVLHKEEIGLRDSMSKRKLLEAKASLRRGRRYRKTRYRHPKWRPKTKRVYCEVPDRKGRHWQKKKITFTSKRPKGWLPPSLQSKTDHHIRWIKKLQDLLPEGYRLSIELGRFDPARMKNPEIHGDLYQKGPQYDYENVRAYVLDRDRYTCQICKKKGGKLHVHHILYRSHGATDDPQYMVTVCSDCHSAQNHLPGGILYQWMQEQKRFSRGLRDATFMNILRKRLIRAFPEAVFTYGNVTKVDREKLKLPKSHGNDATAIALVKTGITAVKDKESVICIQQVRRKKRSLHEETPRKGRKEPNRTAARNNKNTKAVTVTKRQNKKKVSMTGCLFDRVELNGKKGWISGFTGKSCYVKDADDQYLSTSPKYKQVSLSKLRILHHCGNWIIGAKKTLGKG

SEQ ID NO: 2826 - protein, 425 aa, Moorena sp.
MSNFVLVLDTNKKPLTPIHPGDARFLLNQQKAAVFRRFPFTIILKEPKSDVPTQPIELKIDPGSKTTGFALVQNNKVIWGMELQHRGLAIKESLETRKGVRRGRRSRHTRYRQARFLNRTKPQGWLAPSLSHRVLTINTWVKRLCNFAPITDIVQELARFDLQQLENPEISGFEYQQGELQGYEVREYLLNKWNRKCAYCTAENVPLQVEHIKPKAKGGTNRISNLCLACEKCNIKKGTQDIEKFLGKKPELLKQILSQAKRTLKDASAVNSTRWALFNKLKETGLPITTGSGGLTKFNRTRLGLPKTHWIDAACVGKVETLKILTTKILTVKSTGHGCRRFCRINKFGFPCTEPKKIFTHVSTGDFVKATLHKDRKNITSGRYVSRVKTPTKNGCEIVINGFRVEFSTMKDITKVHCSDGYSYV

SEQ ID NO: 2827 - protein, 419 aa, unidentified
  REGION 1..419: note = Human gut metagenome
MYVYVINKHGEPLMPCSSRKARTLLNNKKACVVKRTPFTIKLLYGSAGYKQPITLGVDAGSRHVGLSASTETHEFYREEFTPRNDVVDLLSTRREFRHARRNRKTRYRAPRFNNRVHSKHKGWLAPSVEVKIQEHITAVKHVCKIMPISLVRVETAEFDTQRLKAMLEGKPLPVGTDYQLGEMYDEYNVRQYVLKRDNYTCQCCGAHATKTKQVKLHVHHLESRKVGENAPNNLITLCPTCHKAIHEGKKTLGNKKRGRQFRDAAFMGIMRKTLLARLRKELSVPVQQTYGYITKMLREKNNLLKSHMNDALCIAKHPEAAPCENCYRSKAVRHHNRQIHKATILKGGIRKNNQAPYIVKGFRLWDKVRYNGQECFISGRRVTGYFALKRLDGTFATNSASYKKLRLLETAKNYLRERI

SEQ ID NO: 2828 - protein, 419 aa, Moorena sp.
MQNYVFVIDVNKQPLNPIHPKKARRLLEKGKAAVFRMYPFTIILKTAIANPVISPCQIKIDPGSKTTGFALVRDGQVIWGMELEHRGGLIKKKLESRRAVRRGRRNRNTRYRKPRFLNRKRPQGWLPPSLEHRILTTETWVKRLIKFCPVCEIWIERVKFDTQKMLNPEISGVEYQQGELAGYEVREYLLEKWGRECTYCGRQNVPLQIEHIHPRSKGGSNRVSNLCLACEKCNQRKGNKPIEEFLKKKPSLLQKIKTKAKQPLLDAAAVNATRNKLVKVLKDTKVVVTGTGAQTKYNRTWLGLPKQHWIDAACVGNIENLDLKTLQPLFVTCKGQGGRQKAALNKYGYPIRHNPLKPVKGWMTGDIARHQKLGIGKVTPRSKGSFGFNPLGMKGYKSCKPQDISAIHRKDGYIYGFCK

SEQ ID NO: 2829 - protein, 439 aa, Calothrix sp.; identical to SEQ ID NO: 2775

SEQ ID NO: 2830 - protein, 430 aa, unidentified
  REGION 1..430: note = Human gut metagenome
MPKVYVLNRHGRPLMPCTPAKARHLLDAGKAKVRHRTPFTIQLLYGSTGYTQEVILGVDAGSKTIGLSAATETEELFSAEVKPRNDVVELMSARRQFRRARRNRTTRYRKPRFDNRVRSKHKGWLAPSVEVKIQEHITAIRRACAILPVSKVVVETAEFDLQLLKAVAEGKPVPQGEDYQKGEMYGHYNVRQYVLWRDSYTCCICGVHGSVRKGVPLHVHHLESRRVGGDAPDNLVTLCTACHDKLHKGIIMAADIKKRKRRSTRDATFMGIMRMTLLRRLREQLPVPVVETRGYITKATRENLLVLPKSHTNDALAIAHGPQGFRAEYLPNIRQADRLYTIRPVRHHNRQLHKATILKGGVRKANQAEKYICGFRLYDKVLYNGIECFVWGRRTSGSFLLRQLNGEKVKDSVSYKHLKLLERSQSYLVA

SEQ ID NO: 2831 - protein, 431 aa, Moorena sp.
MRVFVLDKDFKPLDPCRPARARLLLKQGRAKVFRRYPFTIILKDLEVGNCTTHNHQLKIDPGAKTTGLAILQDNTVIWGAEIMHRGFKIRDALTSRRQLRRSRRNRKTRYRKPRFLNRKRPLEWLAPSLMSRVHNILTWVKKLIRFCPMTGISQELVRFDTQKMENPEISGTEYQQGTLYGYEIREYLLEKWNRKCAYCGATDTRLEVEHIKPRSNGGSDRVSNLAIACHDCNQAKGNQDIKQFLSRKPDVLKRVLSQSKRSLADTAAVNSTRWKLYKELKSTGLPVETGSGGQTKYNRRRFNLVKTHWLDAACVGKVEAIYVENCQFLLIMAKGHGTRQICRTDKFGFPKRYCSRTKIHKGFQTGDIVKAIVTKGKKIGTYVGRVATRKTGSFNISTANGLIQGISYKYCTPIHKKDGYSYQINTLSSLS

SEQ ID NO: 2832 - protein, 424 aa, Moorena sp.
MCNYVFVLDASHKPLNPCRPVTARKLLTAGKAAVYRRYPFTIILKKQVEAEPKPMSLKIDPGSKITGLAIVYGNQVVWSAEIEHRGSKIKSALDSRRASRSRRNRKCRYRKPRFNNRKRPEGWLAPSLQHRVATTMTWVLKLMKLTPIGGISQELVRFDTQKLQNPEISGIEYQQGELMGYEVREYLYQKWGRQCVYCGANSVKLEVEHIVPKSKGGTNRVNNLTLACHGCNQAKGNLDARDFLSGKPDVLKQILGRAKQPLLDAAAVNSTRWQLYQSLKETGLSVAVGTGGRTQYNRIKLGLPKGHWVDAACVGEVATLKIVTRQPLLIKAMGHGCRQVIQMDKYGFPRKGYKPKHPVKGWKTGDIVNVVAGKNAGLKGVRIKSVRAKGNFDLIGPFNGASKQILSADTQLHSMCPSPRWVFL

SEQ ID NO: 2833 - protein, 497 aa, Methanosarcina sp.
MIFVLNKNKQPLSPCHSAVARKLLRTGKAVIHKKYPFTIRLKELKSSENKAEYRLKIDYGSRHTGLAILNGSKVIGLAQIHHKTSIKSNMDSRRAMRKTRRNRTTRYRKPRFNNRKRKERWLPPSLQSRVDNIQNWVNRLQKLCPLTHISYENVKFDTQLMQNPEISGIEYQQGELQGYEVREYLLEKWNRKCAYCGAENVPLEIEHIIPKARHGTSRVSNLTLACRTCNEAKGTKTAEEFGYPDIQKQARIPLKDATIVTATRWKIYNVLSKTSLNIECGTGARTKMNRIRLNLPKDHHLDAVCIGVSTPENVVFKTNQVLHIKAKGRGSHCRTNLDKCGFPRGYLSRQKSFFGFQTGDIVKAVVPKGKYKGIHFGAVACRKTGYFDIKNKEGIRIVQGINHKYCNILSRVDGYEYATEHLEVDGIPPTTKQAVRQLPRIIRVSCLSIYTNNFILVVGIVDLWFSSNLQKMKSGLYPQTFEILFLQIISVIWLRLL

SEQ ID NO: 2834 - protein, 442 aa, unidentified
  REGION 1..442: note = Human gut metagenome
MSTTVFVLDKKHRPLMPCRPARARRLLRAGRARVVKRFPFVIRLVDRTVEQSEVQPALIKLDPGSRETGAAVVRDDGKKRHHALAFFVIEHRGGAIRDALKARSAFRRRRRSQNLRCRSPRFLNRVKPKGWLPPSLRHRVETTLSFVRRMCRYLPVSGIATELVKFDSQKLQNPEVSGVEYQQGTLFEYEVREYLLEKFGRKCVYCGAEGVPLNIDHVVPRAKGGSNRVSNLVLACMSCNQKKGARSLEDFLKGKPKVLARVRRELKTPLRDAAAVNATRWVLFNELKATGLPVETGSGALTKLNRHAFGVEKEHWLDALCVGRLNGVVTRKGLNVLEIRCMGRGSRQRTRLTKYGFPRGYLMRQKCVHGFATGDMVEANVPKGKKAGLWRGRVAVRVSGSFNIQTPKGVIQGVGWKHCRLISHNDGYGYAWLGHAPHSSPA

SEQ ID NO: 2835 - protein, 431 aa, unidentified
  REGION 1..431: note = Human gut metagenome
MPNKVYVINKHGRPLMPCSPAKARHLLDEGKAKIKKRTPFTIQLVYGSSGYTQEVILGVDAGSKTIGLSASAETEELLSAEVKPRNDVVDLQSTRREFRRARRNRKTRYRKPRFDNRVRSKHKGWLAPSVEVKIQEHITSIKMVCRILPVSKVVIETAEFDLQLLKAIADGKPVPQGEDYQKGEMYGHYNVRQYVLWRDDYTCQCCGAHATKKKEVRLHVHHLESRKVGGDAPDNQVTLCESCHEKLHKGLITEGDFKKRKRRSTRDATFMGIMRKTLMQRLCSELPIPVVKTRDYITKATREKLLVLPKSHTNDALAIAQGKQGFNVGYLPGILQIDKIYTIRPVRHHNRQLHKAAILKGGIRKSNQAGKYVFGYRLFDKVQFNGQDCFVWRRRTTGIFTIKTINGKMIKDGISFKKLKLVEKSTGYLIA

SEQ ID NO: 2836 - protein, 442 aa, Moorena sp.
MRVFVLDKNLKPLDPCRPARARLLLKQGRAKVFRRYPFTIILPDLEVENCTTHNHQLKIDPGAKTTGVSYLQGNTVIWGAEITHRGFQIRDALTSRRQLRSFRRNRKTRYRKARFLNRKRSERWLAPSLMSRVHNILTWVKKLVRFCPMTGISQELVRFDTQKMENPDISGTEYQQGTLYGYEIREYLLEKWNRKCAYCGTTNVQLEIEHIKPKSLGGSDRVSNLAIACRDCNQAKGNQEIKQFLSGKPDILKRILSQAKRLAVGHATRTLADAAAVNSTRWKLYNELKLTGLPVKTGSGGQTKYNRRRFSLPKTHWLDAACVGDVQSIFVEDYQILSIVAKGHGTRQICRTDKFGFPKRYCSRTKIHKGFQTGDIVKAVVTKGKKIGTYVGRVATRKTGSFNILTTNGLIQGISHKYCIPIHKKDGYAYQINTLSSLSSHR

SEQ ID NO: 2837 - protein, 424 aa, Moorena sp.; identical to SEQ ID NO: 2614

SEQ ID NO: 2838 - protein, 427 aa, Methanosarcina sp.
MLVFVINQNKKPLMPCKSSKARKLLQAGKAKVVRNTPFTIKLLFGSSGYTQPVIAGMDTGSKVVGCAAIANGKVLYQSEIYLRENVSKKMEQRKMYRRNRRGRKTRYRPARFDNRGNSRREGRLAPSIKSKLESHFREKRFVESLLPVTRWKVELASFDIHKITNPEVSGIGYQEGDLKGFYNVKAYVLDRDGYTCQHCRGKSKDSRLHCHHIVFRSQKGTDAPENLITLCETCHKALHNGEFKLSGKKSKTKHATEIGILKSQIRKSGWSFAETFGYETKYRREQILKLIKTHYFDAVAICCRDDQKVEVEDSVLLKRNVSKGDYQQRTGKRSEKKIPTGKLFGLRKFDLVKTSKGIGFVKGKRSSGFFAISDLFGNKISDSVNVKKKCRRLSARSTTLVQMVQMTHSSPTCHFRQAGTVEEGVSC

SEQ ID NO: 2839 - protein, 419 aa, Geobacillus sp.
LFVYIINKHGKPLMPCSPRKARLLLKQKKAKVVRRTPFTIQLLYGSSGYKQPVSLGVDMGTRHVGISATTKKDVLFEAEAQLRTDIVELLAIRRQFRRSRRNRKTRYREARFLNRRKPEGWLPPSIQHKINSHIKLIDLVYNILPVTSVTIEVAAFDTQKLKNLNIRGVEYQQGEQMGFWNVREYVLYRDNHTCQYCKGKKKDPVLQVHHIESRKTGGDSPDNLITLCKTCHHEIHEKGLEHIFQRKRPPMRDASQMTAMRWAMFSRIREKYSHANITYGYITKCIRIANGLSKSHMVDARCISGNPLAKPSGTVYLLKFVRKNNRQLHKATILKGGKRKSNKAPRFVKGFQLFDKVVYERKECFIFGRRSSGYFDLRLLDGTKVHASASWKKLKRVEHASTLLIERRKGDSSPTFALA

SEQ ID NO: 2840 - protein, 423 aa, Moorena sp.
MRVFVLNKNRQPLDPCKPARARILLSTGKAKVYRRYPFTIILTEEIEEPITHTHQLKIDPGAKTSGLAIVQNSRVVWGGELNHRGFQIRDALTSRRQLRRARRNRKTRYRKPRFLNRPWSEGWLAPSLMSRVYNILTWVKKLTRLCPITGISQELVRFDTQKLQNPEISGIEYQQGTLYGYELREYLLEKWNRKCAYCGTTDTQLEIEHIKPKSKGGSDRISNLAIACHSCNQAKSNQEVEHFLSGKPDVLRRVKAQAKRPLADAAAVNATRWKLYHELKSIGLPVEVGSGGLTKFNRCRQNLPKTHWLDAANVGKIETLVIEVTHPLIITAKGHGTRQLCRTNKYGFPIRYCSRTKVHKGFQTGDIVRAVVTKGKKIGTYVGRVATRKSGSFNISTKSGLVQGISHKYCQFIHRKDGYAYTI

SEQ ID NO: 2841 - protein, 507 aa, unidentified
  REGION 1..507: note = Human gut metagenome
MSEYIYVLGVDGDPQMPTKRKRHVEKLLQTGRARVFRQVPFTIQLTYENKPVLQPITIAEDPGRSNIGMAVVSLSGELLSAAVVQTRNKEIVKLMEKRKQHRRASRNGERRARQRLAKKCHTMIKAGSLMRKLPMYGKDKRVQCNVIRNTEARFCNRKREDGWLTPSAEHLVRTHINLIHKMQKFLPITDVAIEINRFAFLSLEDPSISGVDFQNGPLKGYDDLNAAVEDLQDGHCLMCNRPIEHRHHIVPRSMQGSNTIGNIAGLCCKCHERVHKDSAFEDSLKKKKAGLNKRYAAVSALNQAIPFICKRLEQEFGKEHVHYCSGRDTSIVRRSLGYHKTKEEQLHEVDAWCIAVLSLQHVPEKAPEFDHVHEILQFRKQDRSIIDAQTSRRYYHEGKKVAKNRKKAEGQKDDSLQEWREQQVERYGEEQTRKMISQLEIKKSSRRYNRLDRLMPGAVFYYQGVRYVMRGQHCEGTYLQAVGIGSKDFPAKKCKIVAHNEGLVFVS

SEQ ID NO: 2842 - protein, 462 aa, Moorena sp.
MSAFVLDRNGRPLMPCSEKRARHLLARGRARVHRVMPFVIRLVDRMADSCALQPLRIKLDPGSKVTGVALVREADSGIAVINLFELIHRGRQISEALTARRGLRRRRRGANLRYRAPRFLNREKPEGWLPPALQHRVDTTMAWVQRIRRWVPITALSSELVRFDLQQLENPEISGLEYQQGTLAGYEVREYLLEKWKRTCIYCDAKDRPLQIEHLTARARQGSNRVGNLGLACGDCNQDKGALDVRAYVKDSKRLARILATASHPLRDAAAVNTTRWALTDTLRATGLPLEVASGGRTKFSRITHDLPKTHALDAVCVGRVDAINDWKRPSLSIKASGRGSYQRTRLTRHGFPRGYLMRQKQVQGFQTGDHVRADVPNGKKAGMHVGRVAVRATGYFNIQTASTVVQGINHRHCRLIQRGDGYAYSLQSTDSYRQGDAGVWRAAHAALSLPGLNPEVSRAFG

SEQ ID NO: 2843 - protein, 423 aa, Moorena sp.
MRVFVLNKNRQPLDPCRPARARILLSTSKAKVYRRYPFTIILTEEIKEPITHGSQIKIDPGAKTSGLAIVQGNRVVWGAELTHRGFQIRDALTSRRQLRRSRRNRKTRYRKPRFLNRTRSKGWLAPSLMSRVKNILTWVEKLTRVCPVTGISQELVRFDTQKLQNPEISGIEYQQGTLYGYELREYLLQKWNRKCAYCGATGTQLEIEHIKPKSKGGSDRVSNLAIACHPCNQAKSNQDIEIFLSLKPSVLKRVLSQARRPLADAASVNTTRWRLYHDLKSTGIPVEVGSGGLTKFNRCRQNLPKTHWLDAANVGKVETLIIEVTHPLLITAKGHGTRQLCRTNKYGFPVRHCSRTKIHKGFQTGDIVRAVVTKGKKIGTYVGRVATRKSGSFNISTKSGLVQGISHKYCQLIHRKDGYAYTN

SEQ ID NO: 2844 - protein, 416 aa, unidentified
  REGION 1..416: note = Human gut metagenome
MVYVLDKNGQPLMPTDRHRKVRLMLQSGQAKVIKRCPFTIQLNYDSGHQTQEISLGIDAGSKHIGVSATTKIKVLYEVDVELRNDIVDLLSSRRELRRGRRNRKTRYRQAKFNNRRLGNGWLPPSIRQKIGTHLTVVENICKILPISRIMVETASFDIQKIKNPDIQGAEYQQGDQLGFWNVREYVLFRDGHTCQCCKGKSKDKILNVHHIGSRKTGGNAPNNLITLCETCHTGYHKGTVQLPKAIKRGIRFKDAAFMGIMRWVFYEALKQQYEPVGTPVHNTYGYITKHTRIAYDLPKEHYVDARCISGNPEASSNGEYYYQKKVRCHNRQIHKLTVLKGGIRKQNQATYLVKGYRLFDKVSYQGKGYFVFGRRQSGFFDIRTLSGEKVNKGSLSCKKLKFIATRTYYLTERRAV

SEQ ID NO: 2845 - protein, 423 aa, Moorena sp.
MRVFVLNKNLQPLDPCKPARARILLSTGKAKVYRRYPFTIVLREEIKEPITHEHQLKIDPGAKTSGLAIVHGERVIWGAELTHRGFQIRDALNFRRQLRSSRRNRKTRYRKPRFLNRTRPEGWLPPSLMSRVQNILTWVKKLTRLCPVAGISQELVRFDTQKLQNPEISGIEYQQGTLYGYELREYLLEKWNRKCAYCGATGIQLEIEHIKPLSKGGSDRASNLTIACHPCNQAKSNQDIELFLSLKPSILKRILSQAKRPLVDAASVNSTRWKLYHELKSIGLPVEVGSGGLTKFNRCRQNLPKTHWLDAANVGKVETLIVEVTHPLIITAKGHGTRQLCRTNKYGFPIRHCSRIKFHKGFQTGDIVRAVVTKGKKVGTYVGRVATRKSGSFNISTKLGLVQGISHKYCQFIHRKDGYAYTN

SEQ ID NO: 2846 - protein, 421 aa, unidentified
  REGION 1..421: note = Human gut metagenome
MIYVRSKDGKALMPSERGGRIGYLLRHGKAHVVSRVPFVVQLDYESTIYTQEVSLGIDAGSKHIGVSASSEKKELLTAQVELRSDVVNLLSTRKELRRTRRNRKTRYRKVRFDNRKKKDGWLAPSVEQKVESHLKVIRLVRKLLPITKTTIEVAPFDAQKIKNPDIKGDEYQQGEQMGFWNVREYVLARDGHKCVHCKGKSRDPILNVHHLESRKTGGNSPSNLVTLCETCHKAYHRGEFDLKIKRGTTLRDAAVMNIMRWSVYERAKAEFGNVYLTYGYITKHTRIENDIEKTHAADAFCIAKNVHARRSRTFFMCRCVPRHTRALHVANPKKGGIRRSCIASHKIGKSRFQRFDMVWWKGKECFIFGSTHGRPILRDVEGKQIAGQPSVNIKTIKFLKRLRNNILVEERTSESWIENES

SEQ ID NO: 2847 - protein, 421 aa, Moorena sp.
MQNRVFVIDVNKQPLNPIHPGRARKLLKQGKAAVFRTYPFTIILKKTVRDPVNEPHRIKLDPGAKVTGMALVNQRTDAVVWAAELTHRGDMIRQKLADRRRVRRNRRHRKTRYRPARFDHRKRPDGWLAPSLQHRVETTMTWVERLGKCCSITDLSMEFVRFDTQKLQNPEISGVQYQQGVLFGYELREYLLTKWRHECAYCGAQKVPLEIEHIHPKSKGGSDRVSNLAIACHQCNQKKGNKPVEQFLKKKPEVLKRLLAQANAPLKDAAAVNSTRWALFNRLQETGLAIEIGTGGLTKYNRTLQGLPKTHWLDAACVGKSTPMLNIATSQPLLITCTGRGGRQKAAINKYGYPIRHNPLKPIKGWQTGDIAKHRVHGIGRITPRSRGSFVLSKPDKTKKSVKPIDLKPVFRRDGYSYKWA

SEQ ID NO: 2848 - protein, 408 aa, unidentified
  REGION 1..408: note = Human gut metagenome
MVYVQDIDGSPLMPTTRHGKVRRLLKSKKATVVNLCPFTIRLLYDTTGYKQEITLGVDAGTKHVGLSATTKSKELYASEVILRSDVVDLLSTRRELRRARRYRLRYRKPRFNNRVKYKKDKWIAPSIRQKIDSHIRIIGFVYSILPVSKLIIEVAQFDTQKIKNPEISGKEYQEGEQLGFWNIREYILARDGHKCQYCKGKSKDPILNIHHIESRKTGGDSPSNLITLCETCHKEFHKGNIKLKVSRGKSLRDAAVMGIMKWKLYEELRSRYDNVSMTFGYITKYNRIKYGIEKSHISDAFVISKNFNALMLEYHYKVRLIRRHNRQIHKQKVLKGGVKKPNQSSFEVFGFRLFDRVMFEGNYYFIFGRRKSGSFNIRDIDGGNQRDITYKKLKLLRCKRFMIQKETN

SEQ ID NO: 2849 - protein, 450 aa, unidentified
  REGION 1..450: note = Human gut metagenome
MKVQSNIEQQLNSNDSRKKMVYVLSNKNVPLMPCTCVIARILLRDKKAKALKTTPFTIKLLNETTEYIQKLTLAVDTGTGGVGYSVINNKNEVLYMSEVEARNDISDKMDRRRKYRRSRRTRKIRYRKCRFQNRTNSKRKDRFSPTMQSKLRSHVKEIEFIKKIMPIPAMTFEVGNFDPHLMKNPALASAKVRPWGYQKGPNYGFENTKAMVLTRDEYTCQLCKGKHKDSKLEVHHIIYRRNGGSDEADNLVTLCHTCHTKLHADDSGKLDKKLLKLQPGKAKGNLKYATQMNSIRIQLMKLYPETNVTYGYITKANRLALGVEKEHHLDACVIASQGNSFTIKCSLLKKKCVAKGDFQKTKGVRSEQPITTGKIQGLRKYDKVEYFGKEYFIKGRMSSGYAILMDIEGKKIDFSYMPKGFKTPKLTNLKRVGARNSWMVIEETVMQSLR

SEQ ID NO: 2850 - protein, 414 aa, Parasutterella sp.
MPCSPAKARLLLKEKKAIVKRRTPFTIQLTIATGETKQPGSLGVDTGYEHVGLSASTEKAELYASEVELRQDITDLLSARRALRQSRRNRKTRYRAPRFNNRLCTKRKGWLAPSVENRINAHLSRIKAVLRLLPVTKITVETASFDLQLLKNPDISGKEYQEGEQLGFWNIREYVLCRDGHVCQHCYGRSKDPVLNVHHLKSRRMGGDSPGNLITLCETCHKALHRGEITLKAKRGQSFRAEAFMGIMRWEVHNRLRALHPGIEVSNTYGYRTKHARIANGIAKSHCADAFCIAGNLGAERLCEFFFQKQTRRNNRQIHKLSILKGGIRKRNQAPFEVKGFRLFDKVACQGEEGFIFGRRSSGFFDVRKLDGTRISAGISCKKLHLLEKRRTYLTEIRKEEALPPLPEGRGLRA

SEQ ID NO: 2851 - protein, 424 aa, Moorena sp.
MRVFVLDKNKKSLDPCKPARAIILLKEGRAKVFRRYPFTIIMRDLEELECVTHNHQIKLDPGSQTTGLAIVQEKVVVWGAELTHRGLQIRDALTSRRQLRRSRRNRKTRYRQPRFLNRKRPDCWLAPSLMSRVYNIITWVKKLTRFCPITGISQELVRFDTQKMENPEISGTEYQQGTLYGYEVREYLLSKWNRKCAYCGVTDTPLEVEHIKPKSKGGSDRVSNLAIACRKCNQTKGNQEIEQFLSGKPDVIKRILSQAKRPLVDAAAVNSTRWKLYNELKALGLPIETGSGGLTKYNRCRQNLPKTHWLDAANVGKVDTLYIEVDQPLLISAKGHGTRQMCRTNKFGFPTRYVPRLKFVKGFQTGDIAKAVVTKGKKVGTYTGRIATRKTGSFNISTKHGLVQGISHQYCSIVHRKDGYAYSF

SEQ ID NO: 2852 - protein, 457 aa, unidentified
  REGION 1..457: note = Ga0315284_10157738
MSKKTLQVKLKNTLRDAPLVPDSVRPTLNKEETPSAQDKVRTCNNPEVDLLQHAGGQASRVPDDMRVFVLNMRKEPLMMTSSRKARLLLKRGEAVVVRRSPFTIQLKYASGERKQEISCGVDSGYSHIGFSCVTERQELVRGEVAVDNFTVKHLIEKSMYRKNRRNKLRYREPRYLNRKRSDGWLPPSVERRYQTHIHLITLLKKLLPISDIIVETASFDIQKLNNPEITSEGYQQGSLYKSNVRAFILAREKNTCQLCKEGYSKTDHWHKHHIIPRSQGGTDKPDNIALLHEKCHDKLHAKGLYKQLEKNKQYKEPTFMNIVKGKFKEDLNCKTVFGYETFVKRNELQLKKSHSNDAFVIAGGSTQNRCFEYMVKQKRRNNRSLQLNRKGSKPSIRRQRHKLQPYDLIRIGNNKIYEVKATHCRGTRVQIKNRKDTAIKNISWFFNSKSLIFKIFK

SEQ ID NO: 2853 - protein, 489 aa, Calothrix sp.; identical to SEQ ID NO: 2822

SEQ ID NO: 2854 - protein, 470 aa, unidentified; identical to SEQ ID NO: 2825
  REGION 1..470: note = Human gut metagenome

SEQ ID NO: 2855 - protein, 397 aa, unidentified
  REGION 1..397: note = Human gut metagenome
IVKRRTPFTIQLTIATGETKQPGSLGVDAGYKHVGLSASTEKAELYASEVELRQDITDLLSARRALRQSRRNRKTRYRAPRFNNRLCTKRKGWLAPSVENRINAHLSRIEAVLRLLPVTKITVETASFDLQLLKNPDISGKEYQEGEQLGFWNIREYVLCRDGHVCQHCYGRSKDPVLNVHHLESRRTGGDSPGNLITLCETCHKALHRGEITLKAKRGQSFRAEAFVGIMRWEVHNRLRALHPGIEVSNTYGYRTKHARIANGIAKSHCADAFCIAGNLGAERLCEFFFQKQTRRNNRQIHKLSILKGGIRKRNQAPFEVKGFRLFDKVACQGEEGFIFGRRSSGFFDVRKLDGTRISAGISCKKLHLLEKRRTYLTEIRKEEALPPLPEGRGLRA

SEQ ID NO: 2856 - protein, 414 aa, unidentified
  REGION 1..414: note = Human gut metagenome
MVYVINKQGQALMPTERFGKVRRLLKNSLAHVVCRIPFTIQLDYDTTDYTQPVSLGVDAGSKHIGISATTSEKEMYAADVELRNDIVDKLSTRREQRRTRRSRLRYRKARFNNRVSSKRKGWLAPSVENKIQTHLTVVEKIHKFLPITNIVVETASFDIQKINNPSISGSEYQQGEQLDFFNVREYVLFRDNHTCQHCKGKSKDKVLNVHHIESRKTGGDSPNNLITLCETCHKAYHRGEFKLNVKRGKSFRDAVFMGIMRWSFYDMLKNIYPNVSMTFGYITKNTRITNNLPKDHYVDARCISGNPVAKPLGYYFYQKKVRCQNRQIHKANFLKGGRKKLNQAPFLVKGFRLFDLVEYQKDLYYIFGRRDSGFFDIRKLDGTKVNKGSINCKYLRLVDKRKSILIEKRMQVNL

SEQ ID NO: 2857 - protein, 423 aa, Arthrospira sp.
MSNHIFVLDTNRKPLTPCKPGVARSLLKAGKASVFRRYPFTIILNKEVDANPEPLELKLDPGSKVTGIALKQGNHIIFAAELQHRGQQIKEALLSRRQLRRSRRNRKTRYRPARFLNRTRPEGWLAPSWQHRVDTLMTWVHRFRRLAPVGRITQELVRFDLQLMENPEISGVEYQQGELQGYEVREYLLEKWGRTCAYCGAQNVPLEVEHIQPRSKGGSDRVSNLTMACHSCNQAKGNGDIRDFLSSQPDVLSRLLRQVKSPLKDAAAVNSTRWALFNALKATGLPVTTGTGGQTKFNRLRLNLPKAHWLDTACVGPVESLEVLTSKPLLILAKGHGTRQMCGTNKYGFPNRHRSRRQIHKGFQTGDMVTALVTAGKKIGSYLGRVLCRASGSFDITTASVRVAGISHKYCQPIHRKDGYAYA

SEQ ID NO: 2858 - protein, 413 aa, unidentified
  REGION 1..413: note = Human gut metagenome
MTNYAFVLDADGKQLAPTKEQKAWFLIRKKRAILVSKYPMVIQLKKEIPDKEICKNEIRCGIDDGGLHIGVALVQKCQIRNKVIFKGVIEQRNDVKHLMDVRRGYRRYHRYHKRYRPARFNNRKSSKREGRIAPSILQKRQATIRIINQLNKWINITNYWLEDVAIDIRALTDGYKPYRWQYQKSNRLDENIRKAVILRDGCKCMECGKSNCRLEVHHIKPRRLKGSSTLDNLITLCTKCHQKTEGVEELYMDRYFALLNSSDNKSLNYAQHVMIGKKWLREQLSNLGILYLTNGGDTANKRIDWDIAKSHSNDAICITDLRPDTCEIKELTIKPMRRQSKAKTDNVLGIKHRDLVEYTFRNGETHRGYVTALYPEQNALNFQSPTKHCKKVNASKCRLLWKYSKIYWLDNVS

SEQ ID NO: 2859 - protein, 469 aa, Desulfobacter sp.; identical to SEQ ID NO: 2403

SEQ ID NO: 2860 - protein, 461 aa, Moorena sp.
MSKVFVIDSEKRPLNPIHSAQARQLLRNKKAAVFKRFPFTIILSNLPQKNEAGFNKDNSLGQSDKPETSPPHFSRSGSVKESQSSPVQPLRLKLDPGAKVTGIALVNDTTGEVVFAAELKHRGFAIRDALISRRQLRRSRRNRKTRYRKPRFLNRTRPKGWLAPCLKSRVDHIKTWIERLRKLAPIQAISQELVRFDMQLMRNPEIQGKEYQQGTLAGYETREYLLEKWGRQCAYCGVKDVPLQIEHIHPRAKGGSNSITNLTLSCEKCNTKKGTKEIKEFLKKDPTKLHKILAQALIPLADAAAVNTTRYALLNTLKETGLPVETGSGGLTKFNRSQQNLPKNHWLDAACVGKSTPILKVKGIKLLLITANGHGTRQMAGTDKFGFPIRHRSNKQIHYGFSTGDIVKAVVTNGKKVGEYLGRVLCRATGSFDIATKIGRIAGISYKYCSPIHKKDGYSYS

SEQ ID NO: 2861 - protein, 419 aa, Moorena sp.
MQNYVFVIDTNKQPLNPIPPKKARRLLDKGKAAVFRMYPFTIILKTAVDNPRVSPCQIKIDPGSKTTGFALVQNNQVIWGMELEHRGGFIKKKLESRKAVRRGRRNRHTRYRKPRFLNRKRLEGWLPPSLEHRVSTIETWVKRLTKFCPINEIWVERVKFDTQKMQKPEISGVEYQQGELAGYEVREYLLEKWGRECTYCGKQSVPLQIEHIQPKSFGGSNRVSNLCLACEKCNQRKGNKPIEEFLKNKPSLLQKIKTKTKQPLLDAAAVNTTRNKLVKVLQNILLVVTGTGAQTKYNRIKLGLPKQHWIDAACVGDIETLVLKTSQPLLVTCKGQGGRQKAALNKYGYPIRHNPLKPIKGWVTGDIAKHQKLGIGKVTPRSKGSFGFTPLGMKGYKSCKPQDISAIHRKDGYTYGFCQ

SEQ ID NO: 2862 - protein, 424 aa, unidentified
  REGION 1..424: note = Human gut metagenome
MVYVLSKEGTPLMPTNRHGRVRHLLDAGEAKAVKRCPFTIQLLYQSTTYTQEITLGVDAGSKTIGLSASTEKKELYASETRLRMDITDLLSVRRQFRRTRRNRKTRYRKARFNNRVHAKHKGWLAPGIEAKIGTHFRAVRDVCRILPVTEIIVETASFNLQKIKALEKGEPVPEGTDYQKGDQLGFWNVREYVLWRDGYKCRCCNGKSKDQVLNVHHIESRKTGGDTPNNLATLCGYCHKQYHKGTILLPKSVRRGNSFRDAAFMGIMRRTFYNRLKEQYPRVAMTYGYITKNTRIRNSLPKTHYADARCIAGHPQAEPLEVYYFQKKVRCHNRQIHKSNILKGGKKKRNQAEYLVKGYRLYDRVRYQNREYYVFGRRASGFFDIRTLGGNKGNKGSVSCKKLRFLEPRKTMLIERRMQEREAV

SEQ ID NO: 2863 - protein, 424 aa, Moorena sp.; identical to SEQ ID NO: 2832

SEQ ID NO: 2864 - protein, 427 aa, Methanosarcina sp.
MLVFVINQNKKPLMPCKPSKARKLLQAGKAKVVRNTPFTIKLLFGSSGYTQPVIAGMDTGSKVVGCAAIANGKVLYQSEIYLRENVSKKMDQRKMYRRTRRGRKTRYRPARFDNRGNSRKEGRLAPSIRSKLESHFREKRFVESLLPVTGWKVELASFDIHKITNPEVSGVGYQEGNLKGFYNVKAYVLDRDGYTCQHCMGKSKDFRLHCHHIVFRSQKGSDAPENLITLCETCHKALHNGEFKLSGNKSKTKHATEIGILKSQIRKSGWSFAETFGYETKYRREQVLKLLKTHYFDAVAICCRDDQNVEVEDSVFLKRNVSKRDHQQRRGKRSEKKIPTGKLFGLRKFDLVKTENGIGFIRGKRSSGYFSISDIFGNKISDSVNVKKKCRRLSARSTTLVQMVQMTHSSPTCHFRQAGNVEEGVSC

SEQ ID NO: 2865 - protein, 423 aa, Moorena sp.
MRVFVLNKNREPLDPCKPARARILLTAGKALVYRRYPFTIILTEEIEEPITHTHQLKIDPVAKTSGLAIVQNNRVVWGCELTHRGFQIRDALTSRRQLRRARRNRKTRYRKPRFLNRSRPEGWLAPSLMSRVQNILTWVKKLTRLCPVTGISQELVRFDTQKLQNPEISGIEYQQGTLYGYELREYLLEKWHRKCAYCGATGTQLEIEHIKPKSKGGSDRVSNLAIACHPCNRAKSNQDIELFLSGKPNILKRILARAKSPLADAASVNTTRWRLYHELKSIGLPVEVGSGGLTKFNRCRQSLPKTHWLDAANVGKVETLIVEVTHPLIITAKGHGTRQLCRTNKFGFPVRHCSRTKIHKGFQTGDIVRAVVTKGKKIGTYVGRVATRKSGSFNISTKSGLVQGISHKYCQFIHRKDGYAYTN

SEQ ID NO: 2866 - protein, 406 aa, unidentified
  REGION 1..406: note = Human gut metagenome
MVYVQDIDGKPMMPTTRHGKVRRLLKDNKAVVVNTCPFTIKLTYKTSDYKQEIVLGVDAGTKHVGLSATTKSKELYSGEVILRNDVVELLSTRRESRRARRNRLRYRKPRFENRVKSKRLGWVAPSVRHRIDAHIRVIDNVCSILSISRIIIEVAQFDTQKINNPNISGNEYQKGDQLGFWNVREYVLARDGHKCQHCKGKSKDHILNVHHIESRKTGGDSPSNLITLCETCHKEYHKGNIDLKVKRGKSLRDAAVMGIMKWKLYDELKSKYDNVSMTFGYITKYNRIKYGIEKSHTSDAFVISRNFNAKRIERQYLKRLIRRHNRQIHKMKILKGGKKKNNQAPFEVFGFRLFDKVLYNNEICFIYGRRKSGCFDIRDFDGKNSKNVTYKKLKLIRGKRYPIILK

SEQ ID NO: 2867 - protein, 411 aa, unidentified
  REGION 1..411: note = Human gut metagenome
VSEMTNYAFVLDANNKQLTPTKEQKAWFLIRKKRATLVSKYPMVIQLKKKIPDKEICKDEVRCGIDDGGLHVGVALVQKCQTRNKVVFKGVIEQRNDVKHLIDVRCGYRRYHRYHKRYRSARFNNRNSSKREERIAPSILQKRQATIRVINQLNKWINITNYWLEDVAIDIRALTDGYKPYRWQYQKSNRLDENIRKAVILRDGCKCMECGKSNCRLEVHHIKPRRLKGSSTLDKLITLCTKCHQKTESVEELYMDRYFALLNSSDNKNLNYAQHVMIGKKWLREQLSNLGMLYLTNGGDTANKRIDWDIAKSHSNDAICITDLRPDTCEIKEWAIKPMRRQSKAKTDNVLGIKHRDLVEYTFRNGETHRGYVTALYPEQNAINFQSPTKHCKKVNAKNVKYFGNILKFTG

SEQ ID NO: 2868 - protein, 431 aa, unidentified
  REGION 1..431: note = Human gut metagenome
MPNKVYVINKHGRPLMPCSPAKARHLLDAGKAKVKKRTPFTIQLVYGSSGYTQEVILGVDAGSKTIGVSALTKKEELFAANVIPRNDVVDLLSTRREFRRARRNRKIRYRKPRFDNRVRSKHKGWLAPSVEVKIQEHITTIRRVYGILPVSKVVVETAEFDLQLLKAIADGKPVPQGEDYQKGEMYGHYNVRQYVLWRDGYTCQCCGAHATKKKEVRLHVHHLESRKVGGDAPDNQVTLCESCHEKLHKGLIAEKDFKKRKRRSTRDATFMGIMRKTLMQRLYSELPIPVIETRGYITKATREKLLVLPKSHTNDALAIAQGKRGFNVGYLPEIAQIDKIYTIRPVRHHNRQLHKAAILKGGIRKSNQAGKYVFGYRLFDKVQFNGQDCFIWGRRTTGIFTIKTINGKMIKDGISFKKLKLVEKSTSYLIA

SEQ ID NO: 2869 - protein, 420 aa, Moorena sp.
MQNYVFVVDTNKQPLNPVTPKKARRLLDKGKAAVFRMYPFTIILKTSVLNPTISPCQIKIDPGSKVTGFALVQNNQVIWGMELEHRGGLIKKKLESRRAVRHRRRNRHTRYRKPRFLNRKRSEGWLPPSLEHRILTIETWVKRLIKFCPVNEIWVERVKFDTQKMQNPEINGVEYQQGELAGYEVREYLLEKWGRECTYCGKQSVPLQIEHIHPKSKGGSERVSNLCLACEKCNQRKGNKPIEEFLKQKPSLLQKIKSKAKQPLRDAAAVNATRNKLVKVLQNIKPIITGTGAQTKYNRTKLGFPKEHWIDAACVGDIETLILRTSQPLLVTCKGQGGRQKAALNKYGYPIRHNPLKPIKGWCSGDIAKNIMTGEFGRVNPRSKSNSFNYTVPGKKAISLHVKNLIRVHKKDGYIYGFCS

SEQ ID NO: 2870 - protein, 552 aa, Streptomyces sp.
MTTFPAGEQTHQAVLPQQPALESVGADTPGSRDETAHGHPATAWGTGREHGRGETDGRGTRPRRRHAKGATTVANAAENGSGDAPTHNPSYKGGVGASRVFVLSKDGQPLMPCHPARARELLGKGRAVVARQVPFTIRLKDRTRAESAVEGLQLRIDPGSKGTGLVLTDEKKEIDEHGTTVTVRRGLISIELQHRGEQIRSSMRKRAGYRHRRRSANCRYRAPRSDNRTRPAGWLPPSLRHRVDSTFSLAKRLGRFAPVTEIYVERVSFDTHSMSAGRPLKGAEYKQGTLAGTDARVYLRAMWNNACAYCDATGVPLNIEHLRPRSRGGSNRITNLVLACTPCNEAKGSKPVEVFLAQRPDRLARILQQIETPLHDAAAMNATRWQLTEALATLGLPVHTSTGMCTKDNRCAMGLAKTHTLDALSVGHLDHEAGDAIVRYPGQVLVAKATGRGSYARTTTDRYGFPRLRRARTKQHFGYFTGDLVRASVPTGKWAGTWIGRISVRARGQHSLTTPMGRVNVSHWNLELLQRGDGYGYSILRESAPPTSRKNG

SEQ ID NO: 2871 - protein, 371 aa, Moorena sp.
VADITSLSNIEDEHLTGIIPELSSKDDKPLMPTKRHGKVRRLLKQGFAKVVRREPFTIQLLYDTTTYTQPITVGVDIGSKVIGVSAITDKQELFSAEVELRQDIKKLLLERREYRRNRRYRQPRFLNRKRRNNWLSPSVQWKVDAHNRLVNLITKILPIAKVEIAPFDIHKIVNPDVEGSQYQEGPQKGFFDVREYCLWRAEYKSELSGKKGILEVHHIIPRSQGGTDNPSSLIVLTSEEHETIHKGELEIPKSKLKKIKILKDATHVSTIGWYIVNRLKGHYCVEVTYGSITKVRRIELGIEKTHRNDAFVIAGGSKDVNRTTEWYFGKYFRRQNRSLHKANPIKGGIRPLNTIKEVKGFRRFDRVRYNN

SEQ ID NO: 2872 - protein, 346 aa, Arthrospira sp.
MPNYQNYVFVVDTLGQPLSPTHPARARKLLKKGLAAVFRTYPFTIILKKTVENPGNEPSRIKLDPGASVTGIALVNQSRDTVIWAAELTHRGDRIRAKLTARRVVRRHRRCRKTRYRQARFNNRKRQEGWLAPSLKHRVETTLTWVNRLISSRPITDISMELVRFDTQKLPNPEISGVEYQQGVLFGYELREYLLTKWQHQCAYCGGQNIPLEIEHIQPKSQGGFDRVSNLGIACHKCNQKKGSQPVEQFLLPKPEILKRCSVQAQAPLKNAAAVNSTRWALFNRLKPTGLPIEIGTGGLTKYNRTVQGLPKTHWLDAADCVGKSTHPPVDNQNSPAITNYLFWAR

SEQ ID NO: 2873 - protein, 454 aa, unidentified
  REGION 1..454: note = Human gut metagenome
MSTCVCVLGSDGERLMPTFRLGKVRRLLKDGKAKIIKHHPFTIQLLYDSKTNTQPIEICEDVGYNYIGISVKSESHEYVSAQYDTLQDEKACHDSCRKLRRTRRNRLRYRKPRFDNRKRGEGWLAPSLRHKKELNVNVVKMYCAVMPITHATVEVGSFDTMLVKAIQEGKAIPEGADYQKGPRYNLATLREAVFYRDNYTCQVCGRKIADGAILHMHHMFYWKGRHGNSLDELLTVCEKCHTPANHQKSGKLYGFGEDVKFSNLSGAAFMNTVRWQIVNELYAAFGKPFVTITYGAMTKEKRIALHLEKSHNNDAYAMGEFHPNCRCAFEHYEKVRRNNRILERFYDSRYIDIRTGEIATGKELFNGRINRNHKKDSENLHKYRGKRTYAGHRALLRKKVNLNPGDLVSLNGEVLIVYGTHTDKKGAVNVEFKTPAKNGRKSASLKKLKIVKAT

SEQ ID NO: 2874 - protein, 406 aa, unidentified
  REGION 1..406: note = Human metagenome
MVYVQDIDGRPLMPTTRHGKVRRLLKSKKATVVNLCPFTIRLLYDTTGYKQEITLGVDTGTKHVGLSATTKSKELYASEVILRSDVVDLLSTRRELRKIRRYRLRYRKPRFMNRIKSKKRGWIAPSIRQKIDSHIRIIGFVYSILPVSKLIIEVAQFDTQKIKNPEISGKEYQEGEQLGFWNVREYVLARDEHKCQHCKGKSKDPVLNVHHIESRKTGGDSPSNLITLCKTCHKEFHKGNIKLKVNRGESLRDAAVMSIMKWELYDELKSLYPNVKMTFGYITKYNRINHGIEKSHVSDAFVISRNFDSERLGYYYKRKLVRRHNRQIHKMKAPKGGNKRMNQSPFKVFGFRLFDKVMFQGKERFIYARRLRGIFNIRDINGENKKDISYKKLEYVSHGLISIVAG

SEQ ID NO: 2875 - protein, 438 aa, Methanosarcina sp.
MIFVLNKNKQPLSPWHSAVARKLLKTGKAVIHKKYPFTIRLKELKISENKAEFRLKIDYGSRHTGLAILNGSKVIGLAQIHHKTSIKSNMDSRRAMRRTRRNRTTRYRKPRFNNRKRKEGWLPPSLQSRVDNIQNWVNRLQKLCPLTHISYENAKFDTQLMQNPEISGIEYQQGELQGYEVREYLLEKWNRKCAYCGAENVPLEIEHIIPKARHGTSRVSNLTLACRTCNEAKGTKTAEEFGYPDIQKQARIPLRDATLVTATRWKVYNVLEKTGLEVECGTGARTKMNIIRLNLPKDHHFDAICVGVSTPENVVFKTNQVLHIKAKGRGSHCRTNLDKYGFPRGYLSRQKSFFGFQTGDIVKAVVPKGKYKGIHFGAVACRKTGYFDIKNKEGIRIVQGINHKYCNILSRADGYEYTTEHLEVDGIPPTTEVIGILP

SEQ ID NO: 2876 - protein, 512 aa, unidentified
  REGION 1..512: note = Human gut metagenome
MSTVYVLNKDGKPLMPTTRGGHVRHLLKEQKARVVRAKPFTIQLLYETNDVVQPLYLGIDPGRTNIGVAVVKANGTAVFTAHLETRNKEIPKLMQDRKKARRARRTNGRRCRRQRRAKANGTISKKCVKQDTAQSKNPSKRAKEIGVIKRCLPGHKKDLLCIGIKNKEAKYTNRARPEGWLTPTANQLLQTHINLVKKIQKFLPISDVVLEVNKFAFMRLDNPDIQKWQYQQGPLYQKGSLENAVSEMQEHHCLFCDKPIDHYHHVVPQSENGSNTIANIVGLCSEHHNLVHKDAAWQKKLAEEKVGLNKKYGALSVLNQIIPALTNKLSVLFPKHFFVTTGKSTHDYRESHSVSKDHWLDAYCIACSVLPSNVCDSNINNHVPYELKQFRRHDRRALHKENMSRVYTLNGKAVATNRHKAIKQTTDSLEEFRQSHPGDVCKLKVKEHHPAYRNLNRNHPGSVFFVGEQAHVMQSIVASKDGKATRYKDTNVNKIAAGQCRFVAKNEGIVFT

SEQ ID NO: 2877 - protein, 520 aa, Streptosporangium sp.
VLPQRAALEFASADTPEGGHETGRGHRLSTVTGVEHGRGEIAPDGTRLLRRHPEDTSVSEGADREVHPAVFVLDTHGHPLDPCHPARARRLLAAGRAVVVRHTPFVIRLKDRTVAGSTMQGVELGIDPGSKHTGIAAFSERGGSRIGLYALQLDHRGGQIRDKLASRAALRRGRRSRNLRYRAPRFNNRTRPQGWIAPSLRHRVDGTVSWVSRLSRWAPVTAVHVERVAFDTHLLSAGRPLEGVEYRYGTLHGYEVREYLLAKWGRACAYCGASGVPLNLDHIHPRSRGGSNRISNLCVACVGCNQAKNATPIEEFLTDRPVVLVKILQQSKAPLRDAAAVNATRWALWRALTATGLPVATASGGRTKWNRSRTGAAKSHTLDALHVGALDHVTGWPSMVLVIAATGRGTYARTRADRYGFPRLALPRTKQHHGFQTGDLVRAVVPTGKKAGVHTGRVAVRSTGNFNIRTRHGSVRGISHRHVRLLQRADGYGYTTHPEARNRAAFPPPPEGGGIHAGGN

SEQ ID NO: 2878 - protein, 414 aa, unidentified
  REGION 1..414: note = Human gut metagenome
MPCSPAKARLLLKEKKAIVKRRTPFTIQLTIATGETKQPVSLGVDAGYKHVGLSASTEKAELYASEVELRQDITDLLSARRALRQSRRNRKTRYRAPRFDNRIRTKRKGWLAPSVENRINAHLSRIETVIRLLPVTKISVETTSFDMQLLKNSDIAGKEYQEGEQLGFWNVREYVLFRDGHVCQHCHGRSKDPVLNVHHLESRRTGGDSPGNLITLCETCHKALHRSEITLKTKRGQSFRAEAYMGLMRWEVLNRLKTSHPGLEVHNTYGYRTKYTRIVNGIDKSHCADAFCIAGNLGAERLGEFFFQKQTRRNNRQIHKLSILKGGIRKRNQAPFEVKGFRLFDKVACQGEEGFIFGRRSSGFFDVRKLDGTRISAGISYKKLHLLEKRQTYLIEIRKEEAFPPLPEGRGLRA

SEQ ID NO: 2879 - protein, 264 aa, Methanosarcina sp.
MIFVLNKNKQPLSPCHSAVARKLLKTGKAVIHKKYPFTIRLKELKYSENKAEFRLKIDYGSRHTGLAILNGSKVIGLAQIHHKTSIKNNMDSRRAMRRTRRNRTTRYRKPRFNNRKRKEGWLPPSLQSRVDHIQNWVNRLQKLCPLTQISYENTKFDTQLMQNPEISGIEYQQGELQGYEVREYLLEKWGRKCAYCGAENVPLEIEHIIPKARHGTSRVSNLTLACRTCNEAKGTKTAEEFGYPEIQKQARIPLKDAIIVTATR

SEQ ID NO: 2880 - protein, 441 aa, unidentified
  REGION 1..441: note = Human gut metagenome
ERLMPTSEYRARKLLKSGKAIKYSYHPFTIQLTERKTGNIQPIELCMDTGYIHIGISVKSEKHEYLTEQIDTLTDERSRHNARRMYRSQRRNRKRYRQPRFNNRKKDKGWIAPSLEHKKNIHVQAISRINNVMPLTDITIEMGNFDTQVLKAKEEGRPLPQGVDYQHGERYSIATLREAVFARDGYKCQCCGRTIKDGAILHVHHIKYRSQGGTNSISNLATVCDKCHTPKNHKPGGKLYGWKPKLPSFKGATFMTTIRWQLYNEAKALFPDIDIHITYGAATKERRRELNIDKSHINDAFVMGQFHPRHRIKAVLYKKKRRNNRCLEKFYDAKYIDSRDGKKRSGQELFNGRINRNHKKDSENLHQYRLQKVTAGKRTVRKQHYSVQPHDIIIYESRKRETTGCHCNGARVMLLPDKKSVSIKKIKIYRYAGGYFKSTFN

SEQ ID NO: 2881 - protein, 456 aa, Halomonas sp.
MAVFVLDQQKQPLMPCSEKRARLLLARGRAVVHKRYPFTLRLKDRIGGDTQPLRLGIDPGSKTTGLSLMRESDGEQRHVLCLFELTHRGYQIKKALQQRAAFRRRRRSANLRYRAPRFNNRTKPKGWLAPSLQHRVDTTMAWVQRLGKLAPITALDQELVHFDTQKLENPEISGIEYQQGTLLGYEIREYLLEKWGRECAYCGDTETPLEIEHVVPHSRGGSNRISNLTLSCHPCNQEKDSQALTRFFATSNGLKRRLKANGHTADARLDRVQRQLKQPLRDASAVNATRWALFNALKATNLPVSVASSGRTKYNRQRLGIPKTHALDAACIGAFGTLNDWQVPTLTIKAMGRGSYQRTRLTKHGFPRGYLMRQKQLKGFQTGDMVKAIVTTGKRAGTHTGRVAVRKTGSFNIQTENGAVQGISYKYCTVIQRGDGYAYHLLSSINHKGGAEQAVA

SEQ ID NO: 2882 - protein, 419 aa, unidentified
  REGION 1..419: note = Human gut metagenome
MVYVISQDGKPLMPCSDPIARLLLKQGKAKVKKREPFTIKLTYETTNYTQGLTLGVDTGSGTIGTAVSKDNGDIVYMSEVVVRNDITDKMTQRAKYRRNRRNRKTRYRKARWLNRASSIKKDRFSPTMQSKLHSHVREIEYIQSILPVTEMVFETGQFDMQLMKNPSLANPKVRPWGYQKGANYGFENTKAMVLNRDNYTCQCCKGKHKDSKLEVHHIVFRSQGGSDEESNLLTLCHTCHKDLHSGKINPKLSGKVKGNLKYATQMNSIRKQLFRFYPNAIETFGYVTKANRLHLGVDKEHYYDACTIATQGNAFNVKSNLYKKKCVSDGDFQKTKGIRSEQPIVTDKICGFRKFDKVRYFGNDYFIKGRMSTGYAILMDIEGNKIDFSTMPRGYKTPKLSNCKRITARSTVMTQVKVV

SEQ ID NO: 2883 - protein, 470 aa, unidentified
  REGION 1..470: note = Human gut metagenome
MSVFVVGLNGCRLMPVSERKARLLLKGGKASVYRKVPFTIKLNYKTGSTVQPGYLGIDTGSQHIGVSVVRKDGTVLHKEEIGLRDSMSKRKLLESRASSRRGRRYRKTRYRHPKWKPKTKRIYNEKADRKGRHWKKQKNTFTSKRQAGWLPPSLQSKTDHHIQWIRKLLDLLPEGYRLSIELGRFDPARMKDPEIHGELYQKGPQYDYENVRAYVLARDGYTCRVCKKKGGKLHVHHILYRSRGASDNPKYMAAVCSKCHTTENHLPGGILYQWMQDQKKFTRGLRDATFMNILKKRLRKAFPDAVFTYGNITKADREKLELPKSHGNDATAIALVKTEVKSVKDEEPVIHIQQVRRKKRSLHEETPRKGRKEPNRTASRSDKNTKSVTVTKGSGEKKASMTACLFDRVELDGKKGWITGFTGTSCYVKDKEDNYICTSSKYKQVSISRLRILHHCGNWAIGAEKPLGKG

SEQ ID NO: 2884 - protein, 424 aa, Moorena sp.
MRVFVLDKNLKTLDPCRPARARLLLKQGRAKVFRRYPFTIILSDLEVENCTTHNHQLKIDPGAKTTGLAIRQNNTVIWGAEITHRGFQIRDALTSRRQLRRSRRNRKTRYRKPRFLNRKRPERWLAPSLMSRVHNIMTWVKKLIRFCPIAGISQELVRFDTQKTENPEISGTEYQQGTLYGYEIREYLLEKWNRKCAYCGTTDTKLEIEHIKPKSLGGSDRVSNLAIACHDCNQAKGNQEIKQFLSGKPDVLRRILSQAKRPLADAAAVNATRWKLYKELKSTGNPLETGSGGRTKYNRCRFNLPKTHWLDAACVGNVQSIYVENYQPLLIEAKGHGTRQICRTDKFGFPKRYCSRTKIHKGFQTGDIVKAVVTKGKKIGTYVGRVATRKTGSFNISTANGLIQGISHKYCQPIHKKDGYAYTI

SEQ ID NO: 2885 - protein, 454 aa, unidentified
  REGION 1..454: note = Human gut metagenome
VSYTARYVPAYRIKHITKKEAPYMVYVLDIDGQPLMPTSRHRKVRKLLNSHLAKVVKRCPFTIQLLYQSTKETQPVSLGVDAGSRHIGLAATTEQKVVYQEELVPRNDVVKLLSARRALRSSRRSRKARYRKPRFNNRVHSKHKGWLAPSVEVKIQEHITAIKRICQILPISDIHVETAEFDLQRLKAMEEGRPLPIGTDYQLGEQYDFYNTRQYVLHRDEYTCQCCGTHDNNVKLHVHHIESRQTGGDAPNNLITLCEHCHKLLHAGKTILPKGKKRGKSYRDATFMGIMRKTLLERLKKEIDVPVEGTYGYITKYWRERAGLEKSHINDAICISKHPYARPLETYYLTKAVRHHNRQIHKTKFSKGGIRKRNQAPYLVKGFRLFDKVLYQGESYFIFGRRITGYFDIRTLDGTKVNKGSTSYKKLRIQDTAEAYLTEVRAIPHMNEFTCVLA

SEQ ID NO: 2886 - protein, 414 aa, unidentified
  REGION 1..414: note = Human gut metagenome
MPCSPAKARLLLKEKKAIVKRRTPFTIQLTIATGESKQPVSLGVDAGYKHVGLSASTEKAELYESEVELRQDVSDLLSARRALRQSRRSRNTRYRAPRFDNRIRTKRKGWLAPTVENRINVHLSRIETVLRLLPVTKITVETASFDTQLLKNPDIAGKEYQEGEQLGFWNVREYVLFRDGHVCQHCHGRSKDPVLNVHHLESRRTGGDSPGNLITLCETCHKALHRGEIKLKAKRGRSFRAETFMGIMRWGVLNRLKASHPKLEVHNTYGYRTKHARIANGIAKSHCADAFCIAGNFGAKRLGEFFFQKQTRRNNRQIHKLSILKGGIRKRNQAPFEVKGFRLFDKVACQGEEGFIFGRRSTGYFDVRKLDGTCISAGISYKKLHLLEKRRTYLTEIRKEEALPPPPEGRGLRA

SEQ ID NO: 2887 - protein, 423 aa, Moorena sp.
MRVFVLNKKGQPLDPCKPARARILLSTGKAKVYRRYPFTIILTEEIKEPVTHEHQLKIDPGAKTSGLAIVQGQRVIWGAELTHRGFKIREALTSRRQLRSSRRNRKTRYRKPRFLNRTRPKGWLAPSLMSRVKNILTWVKKLIRLCPVIGISQELVRFDTQKLQNPEISGVEYQQGTLYGYELREYLLEKWNRKCAYCGTTGTQLEIEHIKPKSKGGSDRVSNLAIACHPCNQAKSSQDIELFLSKKPSILKRILNQAKRPLADAASVNVTRWKLYHNLKSTGLPVEVSSGGLTKFNRCRQNLPKTHWLDAANVGKVETLIVEVTHPLLIAAKGHGTRQLCRTNKYGFPIRHCSRTKIHRGFQTGDIVRAVVTKGKKVGTYVGRVATRKSGYFNISTKSGLVQGISHKYCKFIHRKDGYAYTN

SEQ ID NO: 2888 - protein, 424 aa, Moorena sp.
MFVFVLNSSRKPLNPTHPARARKLLKTGKAAVFKRYPFTIILKEEVAEPNNQQLRIKIDPGSKTTGIAILRNESVLWGAELTHRGGQIRSALTSRRQLRHSRRNRKTRYRQPRFNNRCRQEGWLPPSLISRVENILTWVKRLLQLSPIAHISTELVRFDTQLIQNPEISGIEYQQGTLAGYELREYMLEKWHRRCVYCGATDTKLEIEHIVAKSKGGSNRVSNLTLSCRKCNQKKGNKPIEQFLENNPLLLKSILSQSKRSLADTAAVNATRWKLFNGLKELGIPVETGTGGRTKYNRCRQNLPKTHWLDAANVGHSTPDTLKILVSRPMKIKATGHGNRQMCGTNAFGFPIRHRSNTKKHFGFQTGDIVKAVVTKGKKVGSYIGRVLCRATGSFDITTATGRVAGISHKYCSFVHRSDGYSYQ

SEQ ID NO: 2889 - protein, 458 aa, unidentified
  REGION 1..458: note = Human gut metagenome
MSTCVCVLSNSGERLMPTIRLGKVRRLLKDGKAKIIKHHPFTIQLLYDSKANTQPIEICEDVGYNYIGISVKSQSHEYVSAQYDTLQDEKACHDSCRKLRRTRRNRLRYRKPRFDNRKRSEGWLAPSLEHKKQLNIRLIERYVSVIPITHATVEVGSFDTMLVKAIEEGKATPESADYQKGPRYNLATLREAVFYRDNYICKVCGRKATEGAILHMHHMFYWKGRHGNSLSELITVCEKCHTPANHQKSGKLYGFGENVKFADLSGAAFMNTVRWQIVNELYAAFGKPFVTITYGAMTKEKRIALQLEKSHNNDAYAMGEFHPSCRCKFRHYQKRRRNNRVLEKFYDATYIDTRTGNKAKGKELFNGRISRNHKKDSENLHKYRAHKITKGRRSIRSKHYDIQSGDTVLYAGRKCITTGCFNKGKWLRIPVGSTAKSVAISKVKLINHVGAWKKGSSI

SEQ ID NO: 2890 - protein, 346 aa, Moorena sp.; identical to SEQ ID NO: 2872

SEQ ID NO: 2891 - protein, 434 aa, unidentified
  REGION 1..434: note = Human gut metagenome
MGFLTTWARRKILPKGKVAEMPKIKKYAFVLDAKRKQLDPTIEQNAWRLVRQYKARLVSKFPMIIQLNKVMDNPNNDEIRCGIDDGANHVGMALVQKCQTRNKVLFKGTIEQRKDVKHLLTVRRGYRRYHRYHKQYRPARFLNRASSRRSGRLMPSIIQRKQAILRVIDRLRQWVRIDGYWLEDVKIDIRALTDGYKPYRWQYQKSNRLDNNLRLAAIHRDGCKCVECGKTKTRFEVHHITPRKTGGADTISNLITLCPKCHAKTFGRESQFADRYYALIGSTGHVEGLDGAQRVMQGKHWFREQLQQRGSLVLTTGGNTANKREDWDIAKTHSNDAVCITDLKPENIDIEEWTIKPMRRQNKAGVDEVCGFHHRDYVTYTYRNGETHTGYVTAMYPDKNQLNFQSPTKHCKRVNALKARLLWRYDKIYWFKCA

SEQ ID NO: 2892 - protein, 442 aa, unidentified
  REGION 1..442: note = Human gut metagenome
MSTTVFVLDKKKRPLMPCRPARARRLLRAGRARVAKLYPFTIRLVDRMCEESAVQSVLVKIDPGSKETGIAVVREDEKKHHHALAFFDVVHRGAAIRDAMAARSALRRRRRSANLRYRAPRFNNRRRREGWLPPSLQHRVDSTLSWVARLRRLAPVSGLAVEVVKFDAQKLQNPEISGTEYQQGTLFSYDVREYLLEKFGRKCVYCGAQNVPLNIDHVVPRAAGGSDRVSNLVLACISCNQKKGAQTVASFLKGRPDVLARVNRQLKTPLRDAAAVNATRWALYRALQNSGLPVETGTGALTKFNRHVFGVTKEHWLDALCVGRVNGVHIPKSLFVLQVRCTGRGSRQRTRLTKYGFPRGCLMRHKRVHGFATGDMVEADVPSGKKAGFWRGRVAVRASGSFNIQTPEGVVQGVSWKYCRLISHNDGYGYAWLRPAPHSSPA

SEQ ID NO: 2893 - protein, 434 aa, unidentified
  REGION 1..434: note = Human gut metagenome
MGFLTTWARRKILPKGKVAEMPKIKKYAFVLDAKRKQLDPTIEQNAWRLVRQYKARLVSKFPMIIQLNKVMDNPNNDEIRCGIDDGANHVGMALVQKCQTRNKVLFKGTIEQRKDVKHLLTVRRGYRRYHRYHKQYRPARFLNRASSRRSGRLMPSIIQRKQAILRVIDRLRQWVRIDGYWLEDVKIDIRALTDGYKPYRWQYQKSNRLDNNLRLAAIHRDGCKCVECGKTKTRFEVHHITPRKTGGADTISNLITLCPKCHAKTFGRESQFADRYYALIGSTGHVEGLDDAQRVMQGKHWFREQLQQRGSLVLTTGGNTANKREDWDIAKTHSNDAVCITDLKPENIDIEEWTIKPMRRQNKAGVDEVCGFHHRDYVTYTYRNGETHTGYVTAMYPDKNQLNFQSPTKHCKRVNALKARLLWRYDKIYWFKCA

SEQ ID NO: 2894 - protein, 423 aa, Moorena sp.
MSNHIFVLDTNRKPLTPCKPGVARSLLKAGKASVFRRYPFTIILNKEVDANPEPLELKLDPGSKVTGIALKQGNHIIFAAELQHRGQQIKEALLSRRQLRRSRRNRKTRYRPARFLNRTRPEGWLAPSWQHRVDTLMTWVHRFRRLAPVGRITQELVRFDLQLMENPEISGVEYQQGELQGYEVREYLLEKWGRTCAYCGAQNVPLEVEQIQPRSKGGSDRVSNLTMACHSCNQAKGNGDIRDFLSSQPDVLSRLLRQVKSPLKDAAAVNSTRWALFNALKATGLPVTTGTGGQTKFNRLRLNLPKAHWLDTACVGPVESLEVLTSKPLLILAKGHGTRQMCGTNKYGFPNRHRSRRQIHKGFQTGDMVTALVTAGKKIGSYLGRVLCRASGSFDITTASVRVAGISHKYCQPIHRKDGYAYA

SEQ ID NO: 2895 - protein, 423 aa, Moorena sp.
MRVFVLNKNRQPLDPCKPARARILLSTGKALVYRRYPFTIILTEEIKDPVTHEHQLKIDPGAKTSGLAIVQGTRLIWGAELTHRGFQIREALSSRRQLRRSRRNRKTRYRKPRFLNRTRPKGWLAPSLTSRVQNILTWVKKLIRFCPITGISQELVRFDTQKLQNPEISGIEYQQGTLYGYELREYLLEKWNRKCAYCGATGTQLEIEHIKPKSKGGSNRVSNLTIACHPCNQAKSNQDIELFLSKKPSILKRILSQSLRPLADAASVNSTRWKLYYELKSIGLPVEVGSGGLTKFNRCRQNLPKTHWLDAANVGKVETLIIEVTLPLAITAKGHGTRQLCRTNKYGFPIRHCSRIKFHKGFQTGDIVRAVVTKGKKIGTYVGRVATRKSGSFNISTKSGLVQGISHKYCRFIHRKDGYAYTN

SEQ ID NO: 2896 - protein, 515 aa, unidentified
  REGION 1..515: note = Human gut metagenome
VTDVSTVYVLNKDGKPLMPTTRCGHVRYLLKEKKARVVKTKPFTIQLLYETNDVVQPLYLGIDPGRTNIGVAVVKADGTAVFTAHLETRNKEIPKLMKKRKDSRRARRTNGRRCRRQRRAKANGTISKKCVKQATAQNGSASKRAKKIGVIKRHLPGCEKEVLCIGIKNKEAKFNNRTRPAGWLTPTANQLLQTHINLIKKIQKLLPISDVVLEINKFAFMQLDNPNIQKWQYQQGPLYQKANLEEAVSEMQEHHCLFCKKKIDHYHHVVPQHKNGSNTIDNIVGLCTKHHDLVHKDTAWHEKLTKKKTGLNKKYGALSVLNQIIPALTKELSSIFPKHFFVTTGKSTYDYRAAHGVSKDHWLDAYCIACSVLPNDVCDSSINNRVPYELKQFRRHDRRALHKENMSRVYTLNGKKVATNRHKATEQTADSLEEFRQNHPDDVCKLKVKEHHSEYRNPKRNFPGCVFLVGKRTHVMQGTSGSHNGKADGYYDTNGNSYSSGKCKFVAKNEGIIFA

SEQ ID NO: 2897 - protein, 517 aa, Actinoplanes sp.
LHTRQSTHSGVLPQRRTLESVSADKPTRAHETGHGYRDPVAVPGVRHGRGETTAPIPGQWRHPDGQPSGDRGRKAPPTHHPVVFVLDKHGRPLQPCTPARARKLLTAGRAVVHRHTPFVVRLKDRTVQDSEIQGVEVGVDPGSKATGVAAFTTQTGARTGLLAIEVRHRGGQIRDKLTARAALRRGRRSRNLRYRAPRFRNRARPKGWLAPSLQHRVDTTMSWIERLRRWAPVIQLHVERVAFDTQLLQNPTIQGAEYQAGELAGYEVREYLLEKWKRRCAYCGASGVPLNIDHIHPKARGGSDRIANLTLACVPCNQAKGSTPVEVFLTGRPVVLARILRQVKTPLRDAAAASSTRWALWRALTGTGLQVAVATGGRTKWNRARTGAPKTHTLDALHVGVLDTVTRWPGTTLVATSTGRGSYARTRSDRYGFPRLRLPRIKQVWGFATGDLVHAVVPSGVKRGTHTGRVAVRSTGSFNIRTKTGLVQGIHHRHIRLLQRADGWAYTHQPEGQPTDA

SEQ ID NO: 2898 - protein, 489 aa, unidentified
  REGION 1..489: note = Human gut metagenome
MTMVYVQNKDGKPLMPTTRYCYVRLLLKEKKARVVSRTPFTIRLNYDTPDVTQDLILGVDPGRTNIGVAVVKEDGQCVFSAHLETRNKDVPLLMKKRAAFRRNHRTLDRRRKRQRRAKAAGTTIAEGSVERLLPGYEKPIVCNHIRNKEARFNNRSRPAGWLTPTANHLLQTHINLIAKVAKFLPITKVVIELNRFAFMAMDNPNIRRWEYQQGPLYGLGSVEDAVYAQQDGHCLFCEKPIDHYHHVVPRHKGGSETLANRCGLCARHHDLVHTDKSWAEKLVTRKGGMNKKYHALSVLNQIIPHLIEHLGSETPYEAYATDGKSTKGFRIAKNVPKEHYTDAYCIACSILDTNIEVSAPTSPFELKQFRRHDRQACIRQMVDRKYLLDGKVVATNRHKAIEQKSDSLQEFREAYGSAAVSQLTVKPHPPQYKDMTRIMPGAVMDFNGTIGVMQSSIVGRFYKSTKGYKAAPRRCVLLAQNAGMVFLPA

SEQ ID NO: 2899 - protein, 438 aa, Methanosarcina sp.
MIFVLNKNKQPLSPCHSAVARKLLKTGKAVIHKKYPFTLRLNELKNSENKAEFRLKIDYGSRHTGLAILNGSKVIGLAQIHHKTSIKSNMDSRRAMRRTRRNRTTRYRKPRFNNRKRKEGWLPPSLQSRVDNIQNWVAKLQKLCPLTHISYENTKFDTQLMQNPEISGVEYQQGELQGYEVREYLLEKWGRKCAYCGAENVPLEIEHIIPRARKGTDRVSNLTLACRTCNEAKGTMTAEEFGYPEIQKQARIPLRDATLVTATRWKVYNTLTEKGLEVECGTGARTKMNRIRLNLPKDHHFDAICVGASTPNKIIFKTNSVLHIKAKGRGSHCRTNLDKYGFPRGYLTRRKSFFGFQTGDIVKAVVPKGKYKGIHFGAVACRKTGYFDVKNKEGIRIVQGINHKYCNILSRADGYEYATEHLEVDGIPPTTEVIGILP

SEQ ID NO: 2900 - protein, 423 aa, Arthrospira sp.
MSNHIFVLDTNRKPLTPCKPGVARSLLKAGKASVFRRYPFTIILNKEVDANPEPLELKLDPGSKVTGIALKQGNHIIFAAELQHRGQQIKEALLSRRQLRRSRRNRKTRYRPARFLNRTRPEGWLAPSWQHRVDTLMTWVHRFRRLAPVGRITQELVRFDLQLMENPEISGVEYQQGELQGYEVREYLLEKWGRTCAYCGAQNVPLEVEQIQPRSKGGSDRVSNLTMACHSCNQAKGNGDIRDFLSSQPDVLSRLLRQVKSPLKDAAAVNSTRWALFNALKATGLPVTTGTGGQTKFNRLRLNLPKAHWLDTACVGPVESLEVLTSKPLLILAKGHGTRQMCGTNKYGFPNRHRSRRQIHKGFQTGDMVTVLVTAGKKIGSYLGRVLCRASGSFDITTASVRVAGISHKYCQPIHRKDGYAYA

SEQ ID NO: 2901 - protein, 427 aa, Methanosarcina sp.
MLVFVINQNKKPLMPCKPSKARKLLQAGKAKVVRNTPFTIKLLFGSSGYTQPVIAGMDTGSKVVGCAAIANEKVLYQSEIYLRENVSKKMDQRKMYRRTRRGRKTRYRPVRFDNRGNSTKGGRLAPSIRSKLEAHFREKMFVESLLPVTGWKVELASFDIHKITNPEVSGVGYQEGNLKGFYNVKAYVLDRDGYTCQHCMGKSKDSRLHCHHIVFRSNHGSDAPVNLITLCETCHKALHNGEFKLSGKKSKTKHATEIGILKSQIRKSGWSFAETFGYETKYRREQILKLIKTHYFDAVAICCRDDQNVEVEDSVFLKRNVPAGDYQQRRGKRSEKKIPTGKLFGLRKFDLVKTEKGIGFIRGKRSSGYFSISDIFGNKISDSVNVKKKCRRLSARSTTLVQMVQMTHSSPTCHFRQAGNVKEGVSC

SEQ ID NO: 2902 - protein, 421 aa, unidentified
  REGION 1..421: note = Human gut metagenome
MRGQPLMPCSPAKARHLLKAGKAVVRRRTPFTIQLRIATGETKQSVTLGVDAGAKHVGLSATMEKEEVFASEVELRQDITGLLAARLSLRRERRHRKTRYRAPRFLNRVRSKHKGWLAPSVENRIQAHMSRIDAVCKLLPVTKIVIETASFDIQKIRNPTVEGTDYQQGDLLGFWNVREYVLFRDGHVCQHCHGHSRDKILNVHHLESRQTGGDAPNNLITLCETCHKAYHAGKIKLKVKRAQSFRAEAFMGIMRWTLLDRVRKAHPGLPVENTYGYLTKNTRITLGLPKTHCVDAYCIAGNLKVVRRGVYLYQRQVRKHNRQIHKCTVLSKTLKDGTKIGYRKLNQTPHLVKNFRLFDKVRCLGQTGFIFGRRSSGYFDVRRLDGVKLSSGISYRKLTLLEKRSTYLTELRNEDGASSPV

SEQ ID NO: 2903 - protein, 442 aa, unidentified
  REGION 1..442: note = Human gut metagenome
MVTVQQSTHHLPFGRVFIRRNLFMVYVISQDGKPLMPCSDPIARLLLKQGKAKVKKREPFTIKLTYETTNHTQGLTLGVDTGSGTIGTAVSKDNGDIVYMSEVVVRNDITDKMTQRAKYRRNRRNRKTRYRKARWLNRASSIKKDRFSPTMQSKLHSHVREIEYIQSILPVTEMVFETGQFDMQLMKNPSLANPKVRPWGYQKGANYGFENTKAMVLNRDNYTCQCCKGKHKDSKLEVHHIVFRSQGGSDEESNLLTLCHTCHKDLHSGKINPKLSGKVKGNLKYATQMNSIRKQLFRFYPNAIETFGYVTKANRLHLGVDKEHYYDACTIATQGNAFNVKSNLYKKKCVSDGDFQKTKGIRSEQPIVTDKICGFRKFDKVRYFGNDYFIKGRMSTGYAILMDIDGNKIDFSTMPRGYKTPKLSNCKRITARSTVMTQVKVV

SEQ ID NO: 2904 - protein, 429 aa, Tolypothrix sp.
MSKVFLIDVNKRPLNPIHSAQARQLLRNGKAAVFRRFPFTIILKVTFKTDVEIEPLRLKIDPGAVISGIALVNDSTGEVVFAAEIKHRGFAIRDSLISRRQLRRSRRNRKTRYRQPRFNNRIRPKGWLAPSLQSRVDNIKTWVERLRKVAPIEAISQELVRFDMQLIRNPDIEGKEYQQGTLFGYETREYLLEKWNRQCAYCGVKDVPFQIEHIHCRAKGGSNSITNLTLSCEKCNKKKGTKDIRDFLKKDSARLEKILKQAKQPLTDAAAVNSTRFALLKTLQSTGLPVETGSGGLTKFNRTQQGLEKTHYFDAACVGQSTPEKLIVKGVKPLLITANGHGTRQMCRTDKFGFPNRHCSRTKFHFGFQTGDIVKAVVLSGKKVGEYVGRIATRSTGSFNISTKNGLVQGISHTYCQQIHKKDGYSYAF

SEQ ID NO: 2905 - protein, 498 aa, unidentified
  REGION 1..498: note = Human gut metagenome
MPTTRGGHVRYLLKEKKARVVTSKPFTIQLLYETDDVVQPLYLGIDPGRTNIGVAVVKTDGTAVFTAHLETRNKEIPKLMQGRKKARRARRTNGRRCRRQRRAKANGTISKKCVKQTTAQNGSVSKRAKKIGVIKRHLPGCEKKVLCIGIKNKEAKFSNRTRPEGWLTPTANQLLQTHINLIKKIRKFLPVNDVVLEINKFAFMQLDNPNIQKWQYQQGPLYQKASLEEAASEMQEHHCLFCKKSIAHYHHVVPQSENGSNTIGNIVGLCTKHHDLVHKDTAWQKKLAKKKTGLNKKYGALSILNQIIPALTKELSSLFPKHFFATNGKSTHDYRAAHDVSKDHWLDAYCIACSILPNDTCDKNINGRVPYKLKQFRRHDRRALHKENMSRVYTLDGKKVATNRHKAIKQTTDSLEEFRQRQPNDVCKLKVKEHHPEYRNPERNFPGCVFLVGKHTHVMQRTSGTHNGKADGYYDTNGNSYPSGKCKFVAKNKGIVFA

SEQ ID NO: 2906 - protein, 512 aa, unidentified
  REGION 1..512: note = Human gut metagenome
MSTVYVLNKDGKPLMPTTRGGHVRHLLKEQKARVVRTKPFTIQLLYETDDVVQHLYLGIDPGRTNIGVAVVKTDGTAVFTAHLETRNKEIPKLMKKRKDSRRARRTNGRRCRRQRRAKANGTISKKCVKQTTAQNGSVSKRAKEIGVIKRHLPGCEKEVLCIGIKNKEAKFSNRVKPEGWLTPTANQLLQTHINLVKKIQKFLPISDVVLEINKFAFMQLDNPNIQKWQYQQGPLYQKASLKEAVSEMQEHHCLFCKKPIAHYHHVVPQSENGSDTIGNIVGLCAKHHDLVHKDTTWQKKLAKKKTGLNKKYGALSVLNQIIPTLTKELSSLFLKHFFVTNGKSTYDYRAAHGVSKDHWLDAYCIACSVLPNDTCDKTINSRVPYEFKQFRRHDRRALNNENMSRVYTFNGKMVATNRHKATEQTTDSLEEFRQRQPNDVCNLKVKEHHPTYRNMNRNYPGSVFLIGKQVHVMQGIAGSKNGEATTYKDTNANSIAAGKCKFVAKNSGILFV

SEQ ID NO: 2907 - protein, 545 aa, Actinoplanes sp.
VTSPSKPFERGETTLNIGAQTYGRVLPQPGPLESRSVDNPSGRDETGPRHHSHPGWQAGVQHGRGETPTVVVPRQGRHPGAAAAEPGAGGNAHQQQVTEPRVFVLDRNGLPLQPCTPARARQLLRTGRAVVHRRTPFVIRLRDRNRQESVVQGVQIGVDPGSRYTGISLFTGSDAVSPKPVAEPAVVRAGVFSIEVQHRGNQIREKLTARAALRRGRRSRNLRYRQPRFDNRTRSVGWLAPSLRHRVETTMSWISRLQRWAPVAALHVERVAFDTQLLQDPEIAGRGYQQGTLHGYELREYLLEKWQRKCAYCGVSGVPLNLDHIRPRSRGGSDRASNLTLACISCNQTKGNQPVEVFLAGRPEMLARILAQVRKPLRDAAAVSSTRWALWKSLTVTGLPVHVASGGRTKYNRHRTNTPKSHTLDALHVGVVDEVTGWPVRVLVATATGRGTYTRTRTDRYGFPRLRLPRTKLHHGFQTGDLVRAVVRTGANQGTHVGRVAVRSTGRFNIRTATGLVQGIGHRYVRLLQRGDGWTYSRQPEQQPA

SEQ ID NO: 2908 - protein, 427 aa, Methanosarcina sp.
MLVFVINQNKKPLMPCKPSKARKLLQAGKAKVVRNTPFTIKLLFGSSGYTQPVTAGMDTGSKVVGCAAIANGKVLYQSEIYLRENVFKKMEQRKMYRRTRRGRKTRYRPARFDNRGNSTKGGRLAPSIRSKLEAHFREKMFVESLLPVTGWKVELASFDIHKITNPEVSGVGYQEGNLKGFYNVKAYVLNRDGYTCQHCRGKSKDSRLHCHHIVFRSQKGSDAPKNLITLCETYHKALHNGEFKLSGKKSKTKHATEIGILKSQIRKSGWNFAETFGYETKYRREQVLKLLKTHYFDAVAICCRDDQKVEVEDSVLVKRNVPAGDYQQRRGKRSEKKIPTGKLFGLRKFDLVKTEKGIGFIRGKRSSGYFSISDIFGNKISDSVNVKKKCRRLSARSTTLIQMVQMTHSSPTCHFRQAGNVEEGVSC

SEQ ID NO: 2909 - protein, 433 aa, Calothrix sp.
MEGLMSKVFVLDAENRLLNPIHSAQARQLLRNKKAAIYRRFPFTIILKESHLSPVQPLRLKLDPGAKATGIALVNDATGEVVFAAELKHRGFTIRDALTSRRQLRRGRRTRKTRYRKPRFLNRTRLEGWLAPSLQSRVDNIKTWINRLSKLALIGAISQELVRFDMQLMRNPEIEGKEYQQGTLAGYETREYLLEKWNRQCTYCGVKDVPLQIEHIHPKAKGGSNSITNLTLSCEKCNLKKGTNDIRDFLKKDPNKLQKILLQAKKPLADAAAVNTTRYALLEVLKATGLTVECGSGGLTKFNRNNQNLPKNHWLDAACVGKSTPFLVIKGVKPLLITANGHGTRQSCRTDKYGFPNRHCSRTKFHFGFQTGDIVKAVVKTGKTVGEYIGRIATRATGSFNISTRNGLVQGISHKYCSAIHKKDGYSYALGKI

SEQ ID NO: 2910 - protein, 451 aa, unidentified
  REGION 1..451: note = Human gut metagenome
MSVAVISKTGERLMPTSEYRARKLLKSGKAIKYSYHPFTIQLTERKTGNIQPIELCMDTGYIHIGISVKSEKHEYLTEQIDTLTDERSRHNARRMYRSQRRNRKRYRQPRFNNRKKDKGWITPSLEHKKNIHVQTISRINNVMPLTDITMEMGNFDTQVLKAKEEGRPLPQGVDYQHGERYSIATLREAVFARDGYKCQCCGRTIKDGAILHVHHIKYRSQGGTNSISNLATVCDKCHTPKNHKPGGKLYGWKPKLPSFKGATFMTTIRWQLYNEAKALFPDIDIHITYGAATKERRRELNIDKSHINDAFVMGQFHPRHRIKAVLYKKKRRNNRCLEKFYDAKYIDSRDGKKRSGQELFNGRINRNHKKDSENLHQYRLQKVTAVKRTVRKQHYSVQPHDIIIYESRKRETTGCHCNGARVMLLPDKKSVSIKKIKIYRYAGGYFKSTFN

SEQ ID NO: 2911 - protein, 425 aa, Nodularia sp.
MSNFVLVLDTNKKPLTPIHPGDARFLLNQQKAAVFRRFPFTIILKEPKSEVPTQPIELKIDPGSKTTGFALVQNNKVIWGMELQHRGLAIKESLETRKGVRRGRRSRHTRYRQARFLNRTKPQGWLAPSLSHRVLTINTWVKRLCNFAPITDIVQELARFDLQQLENPEISGFEYQQGELQGYEVREYLLNKWNRKCAYCTAENVPLQVEHIKPKAKGGTNRISNLCLACEKCNIKKGTQDIEKFLAKKPELLKQILSQAKRPLKDASAVNSTRWALFNKLKETGLPITTGSGGLTKFNRTRLGLPKTHWIDAACVGKVETLKILTTKILTVKSTGHSCRRFCRINKFGFPCTEPKKIFTHVSTGDFVKATLHKDRKNITSGKYVSRVKTPTKNGCEIVINGFRVEFSTMKDITKVHCSDGYSYG

SEQ ID NO: 2912 - protein, 413 aa, unidentified; identical to SEQ ID NO: 2636
  REGION 1..413: note = Human gut metagenome

SEQ ID NO: 2913 - protein, 443 aa, Caldicellulosiruptor sp.; identical to SEQ ID NO: 2385

SEQ ID NO: 2914 - protein, 470 aa, Anaerostipes sp.; identical to SEQ ID NO: 2825

SEQ ID NO: 2915 - protein, 431 aa, unidentified
  REGION 1..431: note = Human oral metagenome
MLVYVLDKNGQPLMPTHNGAKVRVLLNQKRAKVVSKCPFTIKLLYESTTFTQPLTLGVDTGSKYVGSAVINDITSEIVYESQTELRDDIKSKMDRRRQFRRTRRNKLRYRPMRFNNRNASKRKERYSPTLISKFQGHKREIEFIKSILPISDVILEVGEFDPQLLQDPTLAYHKWDYAKGELYQQENFKQATKARDGYQCQCCGKKNCRLEVHHLLPRSRGGSDKLANLITLCTDCHHLAHSSEEQLLAFQKKFGKKARCTLRYTTQMNILRNMLQKEYPDAELTYGFITKEMRRVFGLEKSHTIDACCIASRGSEFYNENSNKYKKKCVPKGSYPRTGVKGGKFVVLPKGKISGLKRYDKVLYNGKEYFVVGRRTTGYIYLIDVDNNRVQTERTKRTTGEKYMSKAIIKVALVRKVASAKSCVCVRECED

SEQ ID NO: 2916 - protein, 310 aa, Moorena sp.
MQNYVFVIDTKNQPLNPISPKKARRLLDKGKAAVFRMYPFTIILKTAIDNPTISPCQIKIDPGSKVTGFALVQNNQVIWGMELEHRGGLIKKKLESRKAVRHRRRNRNTRYRKPRFLNRRRKEGWLAPSLEHRVLTIETWVKRLIKFCPINQVWVERVKFDTQKMQNPEINGVEYQQGELAGYEVKEYLLEKWGRECTYCGKQSVPLQIEHIHPKSLGGSNRVSNLCLACEKCNQRKGNKPIEEFLKKKPNLLQKIKTKTKQPLPDAAAVNTTRNKLVKVLRSIKFVVTGTGAQTKYNRTRLGLPKQHAY

SEQ ID NO: 2917 - protein, 427 aa, Methanosarcina sp.
MLVFVINQNKKPLMPCKPSKARKLLQSGKAKVVRNTPFTIKLLFGSSGYTQPVIAGMDTGSKVVGCAAIANGKVLYQSEIYLRENVSKKMEQRKMYRRTRRGRKTRYRPARFDNRGNSRREGRLAPSIKSKLEAHFREKRFVESLLPVTGWKVELASFDIHKITNPEVSGVGYQEGDLKGFYNVKAYVLDRDGYTCQHCRGKSKDSRLHCHHIVFRSQKGTDAPENLITLCETCHKALHNGEFKLSGKKSKTKHATEIGILKSQIRKSGWSFAETFGYETKYRREQVLKVLKTHYFDAVAICCRDDQKVEVEDSVFLKRNVSAGDYQQTKGKRSEKKIPTGKLFGLRKFDLVKTEHGIGVVWGKRSSGYFSISDIFGNKISDSVNVKKKCRRLSARSTTLVQMVQMTHSSPTCHFRQAGNVEEGVSC

SEQ ID NO: 2918 - protein, 515 aa, unidentified
  REGION 1..515: note = Human gut metagenome
MTALEERLSKTEYIYVLGFDGKPQMPTRRKRHVLKLLKTGRARIAEDIPFTIRLTYRNVPVLQPVTLAEDPGRTNIGAAVLSPLGDLLFASVIETRNKEIKKLMADRKKSRQASRRGERKARQRLAKRYGSMVKSGMVIRKLPMYAADKFVTCKFIRNTQARFCNRKRCPDWITPTVQHLVQTHLNIIRKISRYLPVTDIAFEVSRFAFMHMENPEAMGVDFQNGPLKGYDDVKEAIRTQQHGKCLMCKKPIAHFHHIVPRSRGGSDTIQNLAGLCPECHTKVHTDTAFRKDFDEKKSGQLKKYGALSALNQAVPFICKKLLEEYGEEHIHFCRGLDTSLIRTALGFEKTKKNQMHEVDAYCIGLAALEVNEVETPAFDHTFQIRQFRRQDRSIIHHQTGRSYYQGKEKVAQNRKPGFEQKTTALSQWYEEQVRIHGEKESEKLRSQLRVEKSCRHYNDMDRFLPGAVFLYEGKRYVLSGRITNGKYLRACGQGMKNFPAAECTFIRHNAGLVFI

SEQ ID NO: 2919 - protein, 461 aa, unidentified
  REGION 1..461: note = Wastewater metagenome
MPNPIQVCVLDKQKKPLMPCHPARARELLREGRAVVHRRVPFTIRLKDRVGGDVQPVRLCEDPGSKKTGIAVVRETPAAETSLDANGDDVSGPTRTVLFKIELEHRGAAIHKAMESRKSLRHGRRSRKTRYREQRYNNRASSRRSGRLPPSLKHRVETTMTWTRRLSRLVPVTAISVERVRFDTQLMENPEISGVQYQQGTLRGYETREYVLEKWGRSCAYCDAENVPLQLDHVRPKSRGGPSRPTDFVPACGPCNQRKGAQPVETFLKRDPKRLAKIMAGLKAPMRDAAAVNATRWALDAELRTIGVPVEAASGGRTKWNRHRFDVPKTHANDAVCVGRVGGVAMLDRPTLYVRCTGRGSYCRTRVTASGFPRGYLMRSKSSHGFRTGDIVRAVVPSGKKRGTHTGRVAVRATGNFAVFTSGGRVDGISHRHCRVVQRADGYDYAWTEKKRAEKSEAATL

SEQ ID NO: 2920 - protein, 437 aa, Ktedonobacter sp.
MSYVFVVDTDLHPLNPVHPGRARILLSSGKAAVLKRSPFTIVLKTSVEQPTLAPLRLKLDPGSNTTGVALVSDQSGQVVFAADLSHRGHAIKDALQSRRGVRRSRRNRQTRYRKPRFRNRRRPKGWLPPSLQSRISNITSLVHRLQKLCPVSSISMELVKFDLQQMENPEMCGAEYQQGTLAGYELREYLLDKWHRTCAYCGRSNVPLQIEHMQPKAKGGTERASNLTLSCGPCNQKKGTQDIAVFLKKKPELLARLVAQAKAPLKDATAVNATRWALFERLKPFGLPIECGSGGLTKFNRTKRGLAKTHWLDAACVGRSTPESIHAEGIVPLCIKASGHGNRQMCGTDKHGFPIRHRQRQKMHHGYQTGDLVRAVVPEPLKTAGTHVGRVQARATGSFDITTKPGTRVAGVGYQYCRPIQRCDGYSYTKGVPYAGA

SEQ ID NO: 2921 - protein, 378 aa, Moorena sp.; identical to SEQ ID NO: 2642

SEQ ID NO: 2922 - protein, 427 aa, Methanosarcina sp.
MLVFVINQNKKPLMPCKPSKARKLLQAGKAKVVRNTPFTIKLLFGSSGYTQPVIAGMDTGSKVVGCAAIANGKVLYQFEIYLRENVSKKMEQRKMYRRTRRGRKTRYRPARFDNRGNSRREGRLAPSIKSKLESHFREKRFVESLLPVTGWKVELASFDIHKITNPEVSGVGYQEGNLKGFYNVKAYVLDRDGYTCQHCMGKSKDFRLHCHHIVFRSQKGTDTPENLITLCETCHKALHNGEFKLSGKKSKTKHATEIGILKSQIRKSGWNFAETFGYETKYRREQVLKLLKTHYFDAVAICCRDDQKVEVEDSVLVKRNVPAGDYQQRRGKRSEKKIPTGKLFGLRKFDLVKTEKGIGFIRGKRSSGYFSISDIFGNKISDSVNVKKKCRRLSARSTTLVQMVQMTHSSPTCHFRQAGNVEEGVSC

SEQ ID NO: 2923 - protein, 416 aa, Moorena sp.
MQNYVFVIDANKQPLNPIAPKKARRLLDKGKAAVFRMYPFTIILKTAIEYPIVSPCQVKIDPGSQMTGFALVQNGHVIWGMELEHRGGLIKKKLESRRAVRRGRRNRNTRYRKPRFLNRRRPQGWLPPSLEHRILTTQTWVKRLIKFCPINEIWVERVKFDTQKMQNPEISGVEYQQGELAGYEVREYLLEKWGRECTYCGKQNTPLQIEHIHPSSKGGTNRVSNLCLACEKCNIRKGDKSIEDFLKKKPDLLKKIKSLAKQPLKDAAVVNATCNKLVKVLRTLKPVVTGTGAQTKYNRTKLRLPKQHWIDAACVGGIETLILKISQPLLVTCKGQGGRQKAALNKYGYPTRHNPLKPIKGWTTGDLAKHQKLGIGKVTPRSKGSFGFTPLGTKGYKSCKPQDISAIHRKDGYIYG

SEQ ID NO: 2924 - protein, 432 aa, Methanosarcina sp.
MIFVLNKNKQPLSPCHSAVARKLLKSGKAVIHKKYPFTIRLKELKTSENKAEYRLKIDYGSRHTGLAILNGSKVIGLAQIHHKTSIKSNMDSRRAMRRTRRNRTTRYRKPRFNNRKRKEGWLSPSLQSRVDNIQNWVDKLQKLCPLTQISYENVKFDTQLLQNPEVSGVEYQQGELQGYEVREYLLEKWNRKCAYCGAENVPLEIEHIIPRARKGTDRVSNLTLACRTCNEAKGTNTAEEFGYPEIQKQATKTLKDAALVTATRWKVYSVLVETGLEVECGTGARTKMNRIRLNLPKDHHFDAICVGASTPNEITFKTNQVLHIKAKGRGSHCRTNLDKYGFPRGYMARQKSFFGFQTGDIVKAIIPKGKYKGTHFGAVACRKKGSFVIKNKHGKLIAETTYKNCKMLSKADGYEYTIEPMEVDGIPLTLKL

SEQ ID NO: 2925 - protein, 470 aa, unidentified
  REGION 1..470: note = Human gut metagenome
MSVFVVGLNGCRLMPVSERKARLLLKGGKASVYRKVPFTIKLNYKTGSTVQPGYLGIDTGSQHIGVSVVQKDGTVLHKEEIGLRDSMSKRKLLESRASSRRGRRYRKTRYRHPKWKPKTKRIYNEKADRKGRHWKKQKNTFTSKRQAGWLPPSLQSKTDHHIQWIRKLLDLLPEGYRLSIELGRFDPARMKDPEIHGELYQKGPQYDYENVRAYVLARDGYTCRVCKKKGGKLHVHHILYRSRGASDNPKYMAAVCSKCHTTENHLPGGILYQWMQDQKKFTRGLRDATFMNILKKRLRKAFPDAVFTYGNITKADREKLELPKSHGNDATAIALVKTEVKSVKDEEPVIHIQQVRRKKRSLHEETPRKGRKEPNRTASRSDKNTKSVTVTKGSGEKKASMTACLFDRVELDGKKGWITGFTGTSCYVKDKEDNYICTSPKYKQVSISRLRILHHCGNWAIGAEKPLGKG

SEQ ID NO: 2926 - protein, 438 aa, Methanosarcina sp.
MIFVLNKNKQPLSPCHSAVARKLLKTGKAVIHKKYPFTIRLKDLKYSENKAEFRLKIDYGSRHTGLAILNGSKVIGLAQIHHKTSIKSNMDSRRAMRRTRRNRTNRYRKPRFNNRKRKEGWLPPSLQSRVDNIQYWVNRLQKLCPLTHISYENAKFDTQLMQNPEVSGVEYQQGELQGYEVREYLLEKWNRKCAYCGAENVPLEIEHIIPKARHGTSRVSNLTLACRTCNEAKGTKTAEEFGYPDIQKQARIPLRDATLVTATRWKVYSVLVETGLEIECGTGARTKMNRIRLNLPKDHHFDAICVGASTPDKIIFKTNSVLHIKAKGRGSHCRTNLDKYGFPRGYLSRQKSFFGFQTGDIVKAVVPKGKYKGIFFGAVACRKTGYFDIKNKEGVRIGQGINHKDCNILSRADGYEYATEHLEVDGIPPTTEVIGILP

SEQ ID NO: 2927 - protein, 438 aa, Methanosarcina sp.
MIFVLNKNKQPLSPCHSAVARKLLKTGKAVIHKKYPFTIRLKELKYSENKAEFRLKIDYGSRHTGLAILNGSKVIGLAQIHHKTSIKSNMDSRRAMRRTRRNRKTRYRKPRFNNRKRKEDWLPPSLQSRVDNIQNWVAKLQQLCPLTHISYENAKFDTQLMQNPELSGIEYQQGELQGYEVREYLLEKWGRKCAYCGAENVPLEIEHIIPRARHGTSRVSNLTLACRTCNEAKGTRTAEEFGYPDIQKQARIPLRDAALVTATRWKVYNTLTEKGLEVECGTGARMKMNRIRLNLPKDHHFDAICVGASTPDKIIFKTNQVLYIKAKGRGSHCRTNLDKYGFPRGYLSRKKSFFGFQTGDIVKAVVPKGKYKGIHFGAVACRKTGYFDIKNKEGVRIGQGINHKYCNILSRADGYEYATEHLEVDGIPPTTEVIGILP

SEQ ID NO: 2928 - protein, 278 aa, unidentified
  REGION 1..278: note = Human gut metagenome
MVYVLANDGQPLMPTERHGKVCRMLKSGIAKVVKKCPFTIQLQYESERNVQPVALGIDAGSKHVGVSATTKAKVLYESDVELRDDIVKLLATRRQLRRRRRSRKTRYRPARFDNRRRKEGWLAPSIRQKIESHLTVVANVCKILPVSQIIVETASFDIQKIKNPDIQGIEYQQGEQMDFWNIREYVLFRDGHTCQCCKGKSKDKVLNVHHIESRKTGGNAPNNLITLCETCHKGYHNGTVTLPKNIKRGMKFKDAAFMGIMRWTFYNTLKEQYEPDIP

SEQ ID NO: 2929 - protein, 466 aa, Moorena sp.
MQRRVFVLSKNRKPLMPCSPARARQLLKERKASVYRQEPFTIILQKRTEGDLQKVQLKFDPGSKITGIALVVFFQKGTVVTWAAELEHRGEKIVDLLSKRRAIRRSRRNRKTRYRPPRFCNRTRKKGWIAPSLKSKVDNIFNWTKKLLAYTPIDNLCVETNRFDTQKLQNPEISGVEYQQGTLFGYEIREYLLYKWNHQCVYCDAKNVALEIDHIHPRSKGGSNRVSNLTISCRKCNENKGNSDIHDFLNKDNKRLQKIVSYSKKTLRDAASINTTRYVIGNQLKKLGIDVGFASGGKTKANRRHNGFNKQHWIDAACAGESGENVTISQDLIPLGIRSQGRGSRQMCRVDQFGFPRTTAKSQKRAKGFQTGDIVKAVVTKGKKKGVYVGRVAVRSNGYFNIKTNNSTVQGISYRYCHLIQQVDGYFYFQKGDARLKKPSCSCFAHSRPSGDSSPTYRSRGILATN

SEQ ID NO: 2930 - protein, 457 aa, Tolypothrix sp.
MITNSVFVLSKNGLILKPTTPARARILQAQGKTKKMKLFPFTLILEKEVNENVEPYLELRCDPGSKFTGISLVDLNKNEVIWAMELEHRGLAIKMELIKRAGVRRSRRTRRLRYRQKRFDRKKPDGWLAPSLRHRLLSTQTWIKRLLKIAPIKSIAIESVKFDLQKLETPDIEGLEYQQGTLWGYTLREALLEHWDRECVYCGKTDVPLQIEHINARSKGGSERFSNLTLSCEKCNQKKGNKPVEQFLKDQPEILKKIKSHQKKSLSDAAAVNSTRKAIFEMAHKFGLRVISGDGASTKMIRIQSGLPKLHWIDSACVGTSEIVKLRICQPLRVTCKGHGTKQVQRMNAKGFPAIASIKKNPITGKKEVKLVSTNQKYTHATASDYVICNLLKERKHIKAGIYRARVKTPTPKGVEVLISGHRIAIDQQYAKLIHRSDGYEYSFATIDQDLLRFRAI

SEQ ID NO: 2931 - protein, 461 aa, unidentified
  REGION 1..461: note = Human gut metagenome
MVKSSERQERCCRLETPSNIGEGSQPVERPRRQNLRVFVLNKRGKPLMPCSPAKARLLLKEKKAIVKRRTPFTIQLTIATGETKQPVGLGVDAGYKHVGLSASTDKAELYASQVELRQDITDLLSARRALRRARRNRKTRYRAPRFNNRIRTKRKGWLAPSVENRINAHLSRIEAVLRLLPVTKITVETASFDMLLLKNPDIAGKEYQEGEQLGFWNVREYVLFRDGHVCQHCYGRSKDPVLNVHHLESRRTGGDSPGNLITLCETCHEALHRGEIALKTKRGHSFRAEAFMGMMRWEVLNRLKASHSELEVNNTYGYRTKHARIVNGIDKSHCADAFCIAGNLGAERLCEFFFQKQTRRNNRQIHKLSILKGGIRKRNQAPFEIKGFRLFDKVACKGEESFIFGRRSSGYFDVRKLDGTRISAGISYKKLRLLEKRRTYLTEIRKEEALPPLPEGRGLRA

SEQ ID NO: 2932 - protein, 424 aa, Moorena sp.; identical to SEQ ID NO: 2651

SEQ ID NO: 2933 - protein, 431 aa, Moorena sp.
MEGLMSKTLVLDTNKRPLDPIHPAQARQLLRNKKAAVFRQFPFTIILKESRPDSPVSPLRLKIDPGAKFTGMALVNDSTGEVVFAAELKHRGFVIRDALTSRRQLRRSRRARKTRYRQPRFLNRTRPNGWLAPSLQSRVENIKTWVKKLRKFAPIEAISQELVRFDMQLMANPDIQGKEYQQGTLAGYETKEYLLEKWNRQCAYCGVKDVPFQVEHIHPRAKGGSNSITNLTLSCEKCNTKKGTKDIKDFLKKDPTRLQKILKQAKRPLADAAAVNATRWALFRVLKDTGLPVETGSGGLTKFNRSQQNLAKTHWIDAACVGQSTPILTIKGIKPLLIAANGHGSRQSCRTDKFGFPSRYVPRFKFVKGFQTGDIVKAVVTAGKKVGEYFGRVAIRTSGTFNISTNSGLVQGISHKYCLATHKKDGYSYAN

SEQ ID NO: 2934 - protein, 414 aa, unidentified
  REGION 1..414: note = Human gut metagenome
MPCSPAKARLLLKEKKAIVKRRTPFTIQLTIATGESKQPVTLGVDAGYKHVGLSASTEKAELYASEVELRQDITDLLSARLALRRSRRNRKTRYRAPRFDNRIRTKRKGWLAPSVENRINAHLSRIEAVLRLLPVTKISVETASFDMQLLKNPDIAGKEYQEGEQLGFWNVREYVLFRDGHVCQHCYGRSKDPVLNVHHLESRRTGGDSPGNLITLCETCHKALHRGDITLKAKRGKSFRAEAFMGIMRWEVHNRLRALHPGIEVSNTYGYRTKHARIANGIAKSHCADAFCIAGNLGAERLCEFFFQKQTRRNNRQIHKLSILKGGIRKRNQAPFKVKGFRLFDKVACQGEEGFIFGRRSSGFFDVRKLDGTRISAGISCKKLHLLEKRRTYLTEIRKEEALPPLPEGRGLRA

SEQ ID NO: 2935 - protein, 450 aa, Moorena sp.
MVYVINFEGKPLMPTTNAKARKLLKQKKATVKRVNPFIIQLLYKTDTEYIQTITLGIDSGYLNIGFSAITDSKELIVGEVKLLQGMKDRLLEKSQYRRIRRQRLRYRKPRWNNRKIRQGWLAPSLQHKLDTHVKFIDYLNTILPIRNIVLEVANFDIQKIKNPDISGVEYQQGEQMGFWNVREYVLHRDGHKCQNPNCKNKSKEQILEIHHIKYKSEGGSDAPSNLITLCNKCHTSPNHKKGKFLYDWCENGKKVRGFRDATFMSMIRWYLLEQLKEKYTNIKATYGYLTKNHRIEHGIEKSHFNDAFAIAKGVNQVRNLEIFKVEQSRLNNRSLEKFYDAKYIDNRTGEKVSASELNCGRRTRNKNLNSENLRVFRGQKISKGQRRIRKQKSLYQPNDLIKYNGNVYTVKGSQNEGKYIALKEIKKVPSVKLIKPYIFKKGLNWSHGLC

SEQ ID NO: 2936 - protein, 423 aa, Arthrospira sp.
MSNHIFVLDTNRKPLTPCKPGVARSLLKAGKASVFRRYPFTIILNKEVDANPEPLELKLDPGSKVTGIALKQGNHIIFAAELQHRGQQIKEALLSRRQLRRSRRNRKTRYRPARFLNRTRPEGWLAPSWQHRVDTLMTWVHRFRRLAPVGRITQDLVRFDLQLMENPEISGVEYQQGELQGYEVREYLLEKWGRTCAYCGAQNVPLEVEQIQPRSKGGSDRVSNLTMACHSCNQAKGNGDIRDFLSSQPDVLSRLLRQVKSPLKDAAAVNSTRWALFNALKATGLPVTTGTGGQTKFNRLRLNLPKAHWLDTACVGPVESLEVLTSKPLLILAKGHGTRQMCGTNKYGFPNRHRSRRQIHKGFQTGDMVTVLVTAGKKIGSYLGRVLCRASGSFDITTASVRVAGISHKYCQPIHSTDGYAYA

SEQ ID NO: 2937 - protein, 458 aa, Tolypothrix sp.
MMITNSVFVLNKNGLILKPTTPARARILQSVGKAKKLKLFPFTLILDKDVDENIEPYLEMRIDPGSRYTGICLVDLNKNEAVWAMELEHRGLAIKMEMITRASVRRARRSRRLRYRKKRFDRKKPDGWLAPSLRHRLLTTESWIKRLLKIAPIKSIAIESVKFDLQKMETPDIEGIEYQQGTLFGYTLREALLEHWGRECVYCGQTDVPLQIEHINARSKGGSDRFSNLTLSCEKCNQKKGNKPVEQFLKNKGEILQKIKAHQKESLSDAAAVNSTRKAIFQMAQHFGLRVISGNGASTKMIRIQSGLPKAHWIDSACVGTDQIVKLRICQPLRVTCKGHGTRQVQRVNASGFPAIASIKKNPVTGKKEVKLVAKNQKYTHLRAGDYVICNLLKDRKHTLAGIYRARVKTPTNRGVEVLISGHRIAIDQQHIKLIHRSDGYEYSFTTIDQDLLRLKPI

SEQ ID NO: 2938 - protein, 438 aa, Methanosarcina sp.
MIFVLNKNKQPLSPCHSAVARKLLKTGKAIIHKNYPFTIRLKELKYSENKAEFRLKIDYGSRHTGLAILNGSKVIGLAQIHHKTSIKSNMDSRRAMRRTRRNRTTRYRKPRFNNRKRKERWLPPSLQSRVDNIQNWINRLQKLCPLTHISYENVKFDTQLMQNPEMSGIEYQQGELQGYEIREYLLEKWGRKCAYCGAENVPLEIEHIIPKARHGTSRVSNLTLACRTCNEAKGTNTAEEFGYPDIQKQARIPLRDATLVTATRWKVYNVLEKTGLEIECGTGARTKMNRIRLNLPKDHHFDAICVGASTPDKIIFKTNSVLHIKAKGRGSHCRTNLDKCGFPRGYLARQKSFFGFQTGDIVKAVVPKGKYKGILFGAVACRKTGYFDIKNKEGVRIGQGINHKYCNILSKADGYEYATEHLEVDGIPPTTKVIGILP

SEQ ID NO: 2939 - protein, 442 aa, unidentified
  REGION 1..442: note = Human gut metagenome
MVTVQQSTHHLPFGRVFIRRNLFMVYVISQDGKPLMPCSDPIARLLLKQGKAKVKKREPFTIKLTYETTNYTQGLTLGVDTGSGTIGTAVSKDNGDIVYMSEVVVRNDITDKMTQRAKYRRNRRNRKTRYRKARWLNRASSIKKDRFSPTMQSKLHSHVREIEYIQSILPVTEMVFETGQFDMHLMKNPSLANPKVRPWGYQKGANYGFENTKAMVLNRDNYTCQCCKGKHKDSKLEVHHIVFRSQGGSDEESNLLTLCHTCHKDLHSGKINPKLSGKVKGNLKYATQMNSIRKQLFRFYPNAIETFGYVTKVNRLHLGVAKEHYYDACTIATQGNAFNVKSNLYKKKCVSDGDFQKTKGIHSEQPIVTDKICGFRKFDKVRYFGNDYFIKGRMSTGYAILMDIDGNKIDFSTMPRGYKTPKLSNCKRITARSTVMTQVKVV

SEQ ID NO: 2940 - protein, 456 aa, unidentified
  REGION 1..456: note = Marine metagenome
MAIFVLDKKKQPLMPCSEKRARLLLQRGRAVVHKRYPFTIRLKDRVGGSTQPLSLGIDPGSKTTGLALIREPDSQQRHVLCLFELIHRGYQIKKALQQRAAFRRRRRSANLRYRAPRFNNRTKPKGWLAPSLQHRVDTVMAWVNRLSRLAPVTAISQELVRFDTQKLDNPEISGVEYQQGTLLGYEVREYLLEKWERECAYCGTADTPLEIEHVVPRSRGGSNRVSNLTLSCHPCNAEKDSQTLTDFFATNKGLKKRLKANGLSADAQLERVQRQLKQPMRDASAVNATRWALFSALKTTDLPVAVSSGGHTKYNRQRLNIPKTHALDAACVGAFEKLHDWTVPTLTIKAMGRGSYQRTRLTKHGFPRGYLMRQKQVHGFQTGDMVRAIVPTGKKAGTHTGRVAIRKTGSFNIQAEYGAVQGISHKYCTLIQRSDGYGYYVTLFSNLTGEAGRAVA

SEQ ID NO: 2941 - protein, 281 aa, Moorena sp.
MSNFVFVLDTTKKPLNPVDPAQARRLLKQGKAAVFRRYPFTIILFEEITETPKNITLKLDPGSKTTGIALVQNNQVIWGAELQHHGQQIQDALTSRRQLRRGRRGRKTRYRQPRFLNRKRSEGWLPPSLQHRVDTTVTWVKRLIRYCPINSLAMELVKFDLQKQENPEISGVEYQQGTLYGGEVREYLLAKFNRSCQYCGATDRPFEVDHIHPRSKGGSDRVSNLTLACHNCNQSKGNQDIKDFLKEKPSLVNHILIQAKTPLKDAAAVNSTRLKLLNSLR

SEQ ID NO: 2942 - protein, 477 aa, Blautia sp.; identical to SEQ ID NO: 2707

SEQ ID NO: 2943 - protein, 517 aa, Streptosporangium sp.
MATLNTRQQTHRQVLPQSAALESVGADTPQGRDETAHGHRHTAVPGVQHGRGETERIGTRSARRHPDLASAGEGAGSSAHPVVFVLDKHGQPLQPTSPAYARKLLRSGRAVVHRHTPFVIRLKDRTAADSTVEGMHVGIDPGSKHTGIAVFTEHGGSRTGRYALQLDHRGAAIRDKLASRAALRRGRRSRNLRYRAPRFNNRTKPKGWLAPSLKHRMDTTMSWADRLRRWAPVSAVHVERVAFDTHALSAGRPLEGAAYQQGTLVGYEVREYLLAKWGRACAYCGISRTPLNIDHIHPRSRGGCDRISNLTVACIPCNQTKNATPVEEFLKAKPTLLAKILKQAKAPLRDAAAVNATRWALWRALEATGLPVATASGARTKWNRSRTGAAKSHALDALHVGHLETVAGWPSTVLVVTATGRGSYARTTPDRYGFPRLVRPRIKLHHGFQTGGLVRANVPAGKKAGVHLGRVLVRSSGSFDITTRHGRVAGISHRHVRHLQRADGYGYTTRKEADRND

SEQ ID NO: 2944 - protein, 413 aa, unidentified; identical to SEQ ID NO: 2636
  REGION 1..413: note = Human gut metagenome

SEQ ID NO: 2945 - protein, 431 aa, Moorena sp.
MRVFVLNKNRQPLDPCRPARARILLSTGKAKVYRRYPFTIILTEEIKEPITHGSQIKIDPGAKTSGLAIVQGNRVVWGAELTHRGFQIRDALTSRRQLRRARRNRKTRYRKPRFLNRTRSKGWLAPSLMSRVKNILTWVEKLTRVCPVTGISQELVRFDTQKLQNPEISGIEYQQGTLYGYELREYLLEKWNRKCAYCGATGTQLEIEHIKPKSKGGSDWPLATLRDRVSNLAIACHPCNQAKSNQDIELFLSNKPSVLKRVLSQARRPLADAASVNTTRWKLYHDLKSTGIPVEVGSGGLTKFNRCRQNLPKTHWLDAANVGKVETLIIEVTHPLLITAKGHGTRQLCRTNKYGFPVRHCSRTKIHKGFQTGDIVRAVVTKGKKIGTYVGRVATRKSGYFNISTKSGLVQGISHKYCQFIHRKDGYAYTN

SEQ ID NO: 2946 - protein, 423 aa, Moorena sp.
MRVFVLDKNRKPLDPCKPARARIMLGQGRAKVLKRYPFTIIMQDLEESECVTHNHQLKIDPGSKTTGLAIVQDNVVVWGSELTHRGFQIRESLTSRRQLRRSRRNRKTRYRSPRFLNRKRSEGWLAPSLMSRVHNILTWVKKLIRICPISGISQELVKFDTQKMQNPEVSGVEYQQGELYGYEVREYLLEKWNRKCAYCGKTDTKLEVEHIKPKSKGGSNRVSNLTIACRKCNEAKGNREIEQFLSRKPDLLNFVLSQAKKPLADAAALNSTRWRLFHELQSTGLSVETGSGGLTKYNRCRQNLPKTHWLDAVNVGQVDNLHVESYQPLLISAKGHGTRQMCRTDKFGFPTRYVPRFKFVKGFQTGDIVKAIVTKGNKIGTYTGRIATRTTGSFNITTKKGLVQGISHKYCSIVHRKDGYYYS

SEQ ID NO: 2947 - protein, 464 aa, Moorena sp.
MQRRVFVLSKNRKPLMPCSPARARQLLKERKASVYRQEPFTIILQKRTDGDLQKVQLKFDPGSKITGMALVVFFQKGTIVTWAAELEHRGEKIVDLLSKRHAIRRSRRNRKTRYRPPRFCNRTRKKGAPSLKSKVDNIFHWTKKLLVYTPIDNLCVETNRFDTQKLQNPEISGVMYQQGTLFGYEIREYLLYKWNHQCAYCDAKNLALEIDHIHPRSKGGSNRVSNLTISCRKCNENKGNGDIHNFLSKDNKRLQKIVSYSKKTLRDAASINTTRYVIGNQLKKLGIDVEFASGGKTKANRRHNGFSKQHWIDAACAGESGENVTISEDLIPLGIQSQGRGSRQMCRVDQFGFPRTTAKSQKRVKDFQTGDIVKAVVTKGEKKGVYIGRVAVRSNGYFNIKTNNSTVQGISYRYCHLIQQVDGYFYFQKGDARLKKASCSCFAHSRPSGDSSPTYRSRGILATN

SEQ ID NO: 2948 - protein, 414 aa, Methanosarcina sp.
MPCKPSKARKLLQAGKAKVVRNTPFTIKLLFGSSGYTQPVTAGMDTGSKVVGCAAIANGTVLYQSEIYLRENVSKKMEQRKMYRRTRRGRKTRYRPARFDNRGNSTKGGRLAPSIKSKLEAHFREKMFVESLLPVTEWKVELASFDIHKITNPEVSGIGYQEGDLKGFYNVKAYVLDRDGYTCQHCRGKSKDSRLHCHHIVFRSQKGTDAPENLITLCETCHKALHNGEFKLSGNKSKTKHATEIGILKSQIRKSGWSFAETFGYETKYRREQVLKLIKTHYFDAVAICCRDDQNVEVEDSVLLKRNVSKGDYQQRTGKRSEKKIPTGKLFGLRKFDLVKTSKGIGFVKGKRSSGFFAISDLFGNKISDSVNVKKKCRRLSARSTTLVQMVQMTHSSPTCHFRQAGTVEEGVSC

SEQ ID NO: 2949 - protein, 470 aa, unidentified
  REGION 1..470: note = Human gut metagenome
MSVFVVGLNGCRLMPTSEREARLLLKHGKASVYRKVPFTIKLNYKTGSTTQPGYLGIDTGSQHIGVSVVREDGTVLHKEEIGLRDSMSKRKLMESRSSLRRGRRHRKTRYRHPKWRLKAKRVYYETPDRKGRHWKKQKITFASKRPQGWLPPSLQSKTDHHIQWIKKLQDLLPDGYRLSIELGRFDPARMKDTEIHGDLYQKGPQYDYENVRAYVLDRDRYTCQVCGKKGGKLHIHHILYRSHGATDNPQYMATICSDCHSTENHQPGGILYQWMQEQKKFTRGLRDATFMNILRKRLMKAFPKATFTYGNITKADREKLKIPKSHGNDATAIAIVKTGIMTVKDNEPVIYIQQVRRKKRSLHEETPRKGRKEPNRKASRYNKNTKAVTVTKRKNKKRISITGCLFDRVELNGKKGWISGFTDKSCYIKDENDQYIRISPKYKQVSLSKLKILHHCGNWVIGARRSLGKG

SEQ ID NO: 2950 - protein, 408 aa, unidentified
  REGION 1..408: note = Human gut metagenome
MVYVQDIDGKPMMPTTRHGKVRQLLKDKKAVVINTCPFTIKLMYKTSDYKQEIVLGVDAGTKHVGLSATTKSKELYSSEVILRSDIVDLLSTRRELRRTRRNRLRYRKPRFDNRIKSKRTGWVAPSVRHRIDAHIRVIDNVCSILPISRIIVEVAQFDTQKIKNPNISGNEYQEGNQLGFWNVREYVLTRDGHKCQHCKGKSKDPILNVHHIESRKTGGDSPSNLITLCETCHKEYHKGKIDLRVKRGKSLCDAAVMGIMKWKLYEELRSRYDNVSMTFGYITKYNRIKYGIEKSHISDAFVISKNFNALMLEYHYKVRLIRRHNRQIHKQKVLKGGVKKPNQSSFEVFGFRLFDRVMFEGNCYFIFGRRKSGSFNIRDIDGGNQRDITYKKLKLLRCKRFMIQKETN

SEQ ID NO: 2951 - protein, 420 aa, unidentified
  REGION 1..420: note = Human gut metagenome
MQYVYVLNKHGEPLMPCSPGKARLLLKRQKACVVKRTPFTIKLLHESAGYKQPITLGVDAGSKHVGLSASTEKRELYSEEFTPRNDVVELLSTRRQNRCSRRNRKTRYRTPRFNNRVHSKHKGWLAPSVEVKIQEHITVIKRICRILPITLVRVETAEFDTQRLKAMLAGKPLPVGTDYQLGEMYDEYNVRQYVLKRDNYTCQYCGAHTTAKKAVKLHVHHLESRKVGGNAPSNLITLCVTCHNNLHKGKITLDGKKRGKTLRDAAFMGIMRNTLLTRLRNELNIPVQNTYGYITKLLREQNDIKKSHVNDARCISKHPLAEPCSVCYRTKAIRHHNRQIHKAKILKGGIRKANQAPYIVKGFRLWDKVLYDGQECFISGHRSSGYFALRKLDGTAITNSISFKKLWLLEPATNYLIERM

SEQ ID NO: 2952 - protein, 431 aa, unidentified
  REGION 1..431: note = Human gut metagenome
MPDKVYVISRLGHPLMPCSPAKARHLLDDGKAKVVKRTPFTIKLLYGSTEYTQPVILGVDAGSKTIGLSASTTKEELFAAEVMPRNDVVENLSTRREFRRARRNRTTRYRKPRFNNRVHSKNNGWLAPSVEVKIQEHITSIKRVCAILPISKIVVETAEFDLQLLKAVQDGKPVPEGEDYQKGEMYGSYDVRQYVLWRDNYTCTCCGVKGTDKKPVKLHVHHFESRKHGGNAPDNYGTLCEDCHKKLHLGIITDISLKTRKRPSTRGAAFMGIMRKTLMQRLITGLSIPVAETKGYITKAAREEILKLPKTHTNDALAIAQGRHGFGIREQAYVKPTNRIYTVRPVRHHNRQLHKATMLKGGIRKLNQASKYIFGFRLYDKVLYQGGECFVWGRRRSGSFLLRTIDGTKVKDGVGYRNLTLLERSTNYLIA

SEQ ID NO: 2953 - protein, 568 aa, Streptomyces sp.
MPSAKLSTTDEGPEVIHSRPDGRSVLLSREMHSCLTSPSHHHEEVPLMTTFSSREKTHRAVLPQRRALESAGADTPGSRDETACGLPATMSGTASEHGRGETLPEGTPPAGRHPNPASAGKGEAREGHPSVFVLDKHHQPLMPCTPARARKLLKQGRAVVHRHTPFVIRLKERTISSSEVTGVELGIDPGSRFTGIALFRTHGKPMETVRHGLFAIELAHRGGAISNRLTARATLRRARRQRNLRYRAPCSSNRARPEGWLAPSLRHRVDTTSAWVDRIARWAPVRTVHVEQVAFDTQAMSADRFASDAEYVHGTLQGMEVREYLLAKWNRTCTYCGATGVPLNIDHIHPRSRGGSDRISNLTLACIPCNEQKGNKPVEEFLKKKPALLSKVLQQAKAPLRDPAAVNATRCALIQTLKASHQDVRPSSGGRTKWNRERTATPKTHTLDALCVGALESVARHPGTVLVVTATGRGTYRRTTPDRYGFPRLNLPRAKQQFGFATGDLVRANVPTGKKQGRHTGRVAVRATGNFNIKTDHGLVQGIHHRHIRLLQRADGYGYTTRAEADHD

SEQ ID NO: 2954 - protein, 429 aa, Methanosarcina sp.
MLVFIINQTKKPLMPCKPSKARKLLQAGKAKVVRNTPFTIKLLFGSSGYTQPVIAGMDTGSKVVGCAAIANGKVLYQSEIYLRENVLKKMEQRKMYRRTRRGRKTRYRPARFDNRGNSTKGGRLAPSIRSKLEAHFREKRFVESLLPVTGWKVELASFDIHKITNPEVSGVGYQEGNLKGFYNVKAYVLDRDGYTCQHCMGKSKDFRLHCHHIVFRSQKGTDTPENLITLCETCHKALHNGEFQLSGNKSKTKHATEIGILKSQIRKSGWNFAETLGYETKYRREQVLKLLKTHYFDAVAICCRDDQKVEVEDSVFLKRNVPAGDYQQRRGKRSEKKMPTGKLFGLRKFDQVKTEKGIGFIRGKRSSGYFSISDIFGNKISDSVNVKKKCRRLSARSTTLVQMVQMTHSSPTCHFRQAGNVEEGGLLLR

SEQ ID NO: 2955 - protein, 428 aa, unidentified
  REGION 1..428: note = Human gut metagenome
LKVFVLNMRGQPLMPCSPAKARHLLKAGKAVVKRRTPFTIQLRIATGETKQNVTLGVDAGAKHVGLSATTEKEEVFASEVELRQDITELLSARRAFRRARRHRKTRYRAPRFSNRVHSKHTGWLAPSVENRIQAHMSRIDAVCGLLPVTKFVIETASFDIQKIKNPDIEGTDYQQGDQLGFWNVREYVLFRDGHVCQHCRGRSKDKILNVHHIESRQTGGDAPNNLITLCETCHKAYHAGKIKLKVKRGQSFKAETFMGIMRWTLLDRVRKAHPDLPVENTYGYLTKNTRITLGLRKTDCIDAYCIAGNLNARRRGVFLYQRQVRKHNRQIHRCTVLSKTLKDGTKVGYRKLNQTPYLVKNFRLFDKVRCLGQTGFIFGRRSSGSFDVRRLDRVKLSSNISYKKLTLLEKRRTFLTELRKEDGASSPV

SEQ ID NO: 2956 - protein, 462 aa, Streptomyces sp.
VFVLDRKGRPLMPCHPARARELLRKGRAVVARHTPFAIRIKDRLLEDSEVGGVAVRIDPGSKATGIALTDDITRMPDSSGEVMVLRRGLYAMELVHRGAAIRKGMERRAGYRRRRRVANTRYRAPRFDNRRSTEGWLPPSLQHRVDTTWSQVQRLSQLAPLTEVHVERVAFDTHAMAAGRELKGVEYQQGTLAGYELRHYLLEKWGRSCAYCGQSDVPLQVEHVQPRARGGSDRVSNLTLSCAPCNQAKASRPIEDFLKDRPEVVAKLKREVKLPLRDAAAMNATRDRLSERLRALGHPVSCWSGGRTKYNRDLFRLAKSHTFDALAVGEVGSRCRVVRYASSTLIAVATGRGDYARTRTDKHGFPRLALPRTKTHFGFRTGDLVRAVVPVGKKAGTYTGRVAVRSSGRFNIRTSHGIVQGIGHQHVSLLQRADGYSYAVRAEEQNTQAPVASAGGQVGDVR

SEQ ID NO: 2957 - protein, 427 aa, Methanosarcina sp.
MFVFVLSKDGNPLMPTKPAKARILLKTGKAKVVRTTPFTIKLLFESSGYTQPVTAGIDTGSKAVGCAAIASGKVLYQSEISLRENVSKKMQQRQMYRRSRRSRKTRYRPARFDNRGNSKKEGRLAPSIRSKLEAHFREKRFVESLLPVTGWKVELASFDIHKITNPEVSGIGYQEGNLKGFYNVKAYVLDRDGYTCQHCRGKSKDSRLHCHHIVFRSNQGTDAPENLITLCETCHKALHKGEFELSERRSNTKHATEVGIVKSLIKKSGWSFEEVFGYETKFWREQVLGLEKTHYFDAVAICCGDKQTVEPDDTVYFKKHVPAGDYQQTKGKRSEKNIPTGKLFGLRKFDLVKTEKGIGIVWGKRSSGYFSISDIFGNKISDSVNVKKKCRRLSARSTTLVQTIQLTHSSPTCHFRQAGTVEEGVSC

SEQ ID NO: 2958 - protein, 487 aa, Moorena sp.
VDHPAIAGEPETDNLFAPKSVRTWAYARRKEVSVVRDVFVIACDGTRLMPTSRYRARKMLNAGKAVIHKHQPFTIRLNHASEKNTQPIELCMDTGSEHIGVSVKSEKHEYVHAQYDNLPDEKERYASQKIYRRTRRNRLRYRKARFDNRRKPEGWTAPSIRNKKENHVRLTAMYAEVCPITSVVLEVGQFDPAALQAMEETGEVLQGTDYQRGKRYDLANLREAVFTRDRYTCQVCGKSVKDGVILHAHHIIYRSDGGTDRLNNLLTVCDRCHTPKNHKPGGKLYGLKPVTGTFKDATFMNIVRWHIVDEIKALYPDIEVRHTYGSYTKASRRELGQLAKTHANDAYAMGEFHPKHRHREEHWKKKRRNNRCLAKFYDAKYIDVRNGSKKSGQQLSCNRTKRNIPRNNPQNERVFRGQAVSKGRISIRRKRYDLQPGDIAIWNRKPYSVAGIQNRGAYVKLSNKKVISIKNVHTKYHCHGWRFISDL

SEQ ID NO: 2959 - protein, 420 aa, Moorena sp.
MQNYVFIIDVNKQPLNPIRPKRARTLLMRGKAAVIRMYPFTLILKTVVENPVLRPVELKIDPGSKVTGLALVQDGEVVWGANLEHRGAEIKSDLESRSAVRKSRRNRKTRYRKARFLNRKRTQMWLPPSLMHRVLTIETWVKRLCRYVPVTGIVMELVRFDTQALQNPEITGQEYQQGKLFGYEVKEYLLAKWGRNCVYCGKQDVPLQVEHIHPKSNGGSDRISNLTITCVRCNQKKGSKSIEDFLKKKPDLLRQIKVVRLAPLKDAAAVNSTRWKLYQSLKKISGLNIATSTGGRTKYNRIKNGFDKDHWIDACCVGESGLGVILKTKQAMMIKSTGVGSGRQMTRTNKFGFPCAKPKQRYQHGWKTGDIARFIDGTTTGRIVVQSASRLEIRINKQRIGGQLNKFSKLHSMDGYNYAF

SEQ ID NO: 2960 - protein, 448 aa, unidentified
  REGION 1..448: note = Human gut metagenome
MSTDLRAEQAEPAGIRKGDTLKVFVLNMRGKPLMPCSPAKARHMLKAGKAFVVRRTPFTIKLTIATGETKQDVTLGVDAGARHVGISATTEKEEVFASEVALRQDITGLLADRLAFRRARRNRKTRYRAPRFNNRVRSKHKGWLAPSVENRIQAHMSRIDAVCRLLPVTKIVIETASFDIQKIKDPSVEGTDYQQGDQLGFWNVREYVLFRDGHVCQHCHGRSKDKILNVHHLESRQTGGDAPNNLITLCETCHKAYHAGKIKLKVKRGQSFRAEAFMGIMRWTLLDRVRKAHPGLPVENTYGYLTKHTRITHGLPKTHCVDAYCIAGNLKAVRRGVYLHQRQMRKHNRQIHKFTVLSKRLEDGTKIGYRKLNQSPYLVHGFRLFDKVRCLGQIGFIFGRRSSGYFDVRRLDGVKLSPSISWRKLTLLEKRSTYLTELRKQDGASSPV

SEQ ID NO: 2961 - protein, 531 aa, unidentified
  REGION 1..531: note = Human gut metagenome
MDAPADFSSLRHCIADAKPGETFTPPETAGVLQKEVRTMAVVYVISASGKPLMPTTRCGHVRGLLNEGKARVVEREPFTIQLKYETPDVTQPLYLGIDPGRTNVGAAVVCEDGECVFTAQLTTRNKDVPKLMKARKQFRMAHRRLKRRCKRQRRAKAAETLSQKGEFQRLLPGYEEPILCKGIRNKEARFNNRQRPAGWLTPTANHLLLTHLNMVKKLQKLLPITDVVLEVNRFAFMAMENPSIRRWQYQQGPLYGKGSVEDAVYAQQDGHCLFCGKPIAHYHHVVPQHKNGSETLENRVGLCNEHHDLVHKDRAWDAKMKETKAGLNKKYHALSVLNQIIPALTEQLTAMFPQHAFVTTGKDTADFREDYGIAKEHHLDAYCIACSVLAEPTKVAAPTGKPHRLMQFRRHDRQVCHKENIKRVYLSEGKAVATNRHKAIEQKDDSLEEFRKTHTQQEVSALTVKDHQPVYKDMRRFMPGGVFLFNGKVHTLQRSHGRYKGMPFYYIDTDGSKNHAKGCIFLQQNCGLRWV

SEQ ID NO: 2962 - protein, 255 aa, Methanosarcina sp.
MLVFVINQNKKPLMPCKPSKARKLLQAGKAKVVRNTPFTIKLLFGSSGYTQPVIAGMDTGSKVVGCAAIANGKVLYQSEIYLRENVSKKMEQRKMYRRTRRGRNTRYRPARFDNRGNSRREGRLAPSIRSKLEAHFREKMFVESLLPVTGWKVELASFDIHKITNSEVSGVGYQEGDLKGFYNVKAYVLDRDGYTCQHCRGKSKDSRLHCHHIVFRSNHGSDAPENLITLCETCHKALHNGEFKLSGSKSKQTCN

SEQ ID NO: 2963 - protein, 513 aa, unidentified
  REGION 1..513: note = Human gut metagenome
LKKEAAGHQQGKDCRPVRYGPPYRAGMPDGRRKPERKHMVAVVTSTGKPLMPTSAYRARKLLKKGRAVIFKYRPYFTIQLVDRADGEVQEVEYKSDTGSVHVGISVCTEKKELLSEQRDLLENEPEHHNDRKKNRRTRRNRKRYRKPRFDNRKKKPQVGHEKWLPPTLLHKMEVQVRLYREFCRVVPVTSACFEMGKFDTQALKAVLKGDPVPEGEGYQKGERYGTDTLRAAVFLRDGHTCRFCGRSVKDGAVLHVHHVGYWKGDRTNRPANLASACEQCHTPANHGKNGLLYGKEPEFKTLKDASYMTSVRWIMLDEIKKAAPGVRVSVTYGVTTKKKRQELRLPKSHVNDAFSMASFHPKKRADTEYWKKIPRHDRVLQKFYDAVYLDTRDGSKKKGSEMSNGRISRNHKKDNENLHQYRGHKVLKGHDSIRRGASSLKPGSIVMYKGEKMTVHGTHTRYVTDKEGKTVKKVNVQFTCPASDGRKSASMNKCTPVSRVYNTGWKRYWPDKK

SEQ ID NO: 2964 - protein, 457 aa, Moorena sp.
MVITLDKHKKPLGFTTEKRARKLMEAKRAVIYRYFPTVIILMDTDVRNIINLPTYRIKIDPGSVYTGIAIICNETNKVMFSIQIEHRAKAITELLQTRKASRRNRRNRETHYRHSKWGNGNGNDRPSKEGNLPPSIKSIRDNIINTVKKLRRFINITECSFEAVRFDSQLMDDPDISGREYQQGKGTLFGYELREYLLEHFRHTCQYCGGASGDSVLEWEHKIPKSRGGTDSIKNATLSCFTCNRDKGSMTPGEWLEYLKSEESGRLAEIRIRHLENMDTVYGSNRYSAWTNTLRKKTEKELFDIFGEVECSSGGKTKYNREKILKLPKDHHIDALAVGSVPPDGYIDCTNGYILHIKAMGRGTRLRGLINECGIINVKWTDRRKRFNGLQTGDIVRVYIPNGKYSGTYTGRVMIRKSGSHDIRTLDGKLVTGTKLSVYRVLQHADGYSYKQERIIV

SEQ ID NO: 2965 - protein, 472 aa, unidentified
  REGION 1..472: note = Human gut metagenome
MNTCVCVLSNNGERLMPTFRLGKVRRLLKDGKAKIVKHHPFTIQLLYDSKTNKQPIEICEDVGYNYIGISVKSESHEYVSAQYDTLQDEKEHHDDCRKMRRARRNRLRYRKPRFDNRKRSEGWLAPSLKHKKELNVNVVKMYCAVMPITHATVEVGSFDTMLVKAIQEGKAIPEGADYQKGPRYNLATLREAVFYRDNYVCKVCGRKATEGAILHMHHMFYWKGRHGNSLNELLTVCEKCHTPANHQKSGKLYGFGEDVKFADLSGAAFMNTVRWQIVNELYAAFGKPFVTITYGAMTKEKRIALQLEKSHNNDAYAMGEFHPNHRCAFEHYEKVRRNNRILEKFYDSQYIDIRTGEIATGKELFNGRINRNHKKDSENLHKYRGKRTYAGHRALLRKKVNLNPGDLVSLNGEPLVVLGTHTRKNGAVNVEFETPSKSGRKSASLKKLKIVKAADSIHPAWEKVSQIIQRKE

SEQ ID NO: 2966 - protein, 462 aa, unidentified
  REGION 1..462: note = Human gut metagenome
MSVLVIGRNGRALMPTNPRKARLLLKKKTASVVCRHPFTIQLLYKTGCATQEGSIGIDTGSQHIGVGITCGDKVILKDEHALRSSMEKRSLLATRAVMRRGRRYRKVRYRKPKWRHHTKRMYFEKANRRGQHWRKVKTTTQSPRPKGWLPPSLQSKCDHHFRIIDRYLKYLPDPITRNLVIETGRFDMARMNDPTIHGEMYQRGPMYDAENLRAYIFARDNYQCACCKAKAGTTRKADGTTVKLVAHHILFRSRGATDNPKYIISVCDHCHTTKAHQPGGILYSWMENNKKVARGLRDATFMNILRKRLFARYPQAAFTYGNITAADRKQLRLPKSHANDAVAISLFGKEASTVKNICQTMHYKQIRKSKRSLHEAIPRKGRKNPNTKAVRNKKNTTQVNGFKLWDSVLANGKKLFICSFTGTSAYLIDKNGCYISQPGKTYKQWPLSKLKRLHPNGNWLMA

SEQ ID NO: 2967 - protein, 406 aa, unidentified
  REGION 1..406: note = Human gut metagenome
MVYVQDIDGSPLMPTTRHGKVRRLLKSKKATVVNLCPFTIRLLYDTTGYKQEITLGVDAGTKHVGLSATTKSKELYASEIILRSDIVELLSSRRESRRRRRNRLRYRKPRFMNRIKTKKEEWVAPSVRQKIDSHLKIIGFVYSILPISKLIIEVAQFDIQKIKNPEISGKEYQEGDQLGFWNVREYVLARDGHKCQHCRGKSKDSILNIHHIESRKTGGNSPSNLITLCETCHKEFHKGKIKLKVKRSASLRDAAVMGIMKWILYDKLKSLYPNVKMTFGYITKHDRINHGIEKSHVSDAFVILRNFNSCRLGYYYKRKLVRRHNRKIHKMKILKGGIRKRNQAPFKVFEFRLFDKVMFQGEEYFIYARRLSGQFNIRDINGENKKDVSCKKLRYIIHGLISIETG

SEQ ID NO: 2968 - protein, 466 aa, Tolypothrix sp.
VSKVFVIDSEKRPLNPIHPAQARQLLRNGKAGVFKHFPFTIILKEAKPNQQIQVLRLKIDPGASVTGIALVNDSTGEVVFAAEIKHRGFAIRESLTSRRQLRRSRRNRKTRYRQPRFNNRAKTKGWLPPSLQSRIANIKTWVERWRKVSPIEAISQELVRFDMQLIRNPDIQGKEYQQGTLQGYETRQYLLEKWGRSCAYCGIKDVPLQIEHILCRAKGGSNSITNLALSCEKCNLKKGTKDIREFLKKDPARLEKILKQSKQPLRVRPSGSPVAYGGKPACSAGLTSSQGAGNPPSGLDSPLADAAAVNSTRFALLSVLKETGLPVETGSGGLTKFNRTQRELPKTHYFDAACVGKSTPEKLIVKGVKPLLITANGHGTRQMCGTNKHGFPIRHRTRKQIHFGFQTGDIVKAVVTSGKKVGHYVGRVLCRASGSFDIATKTGRVAGISYKYCKSIHKKDGYNYAF

SEQ ID NO: 2969 - protein, 424 aa, Moorena sp.
ITRVFVLNKNRQPLDPCKPARARILLSVGKAKVYRRYPFTIILTEEVKQPITHDQQLKIDPGAKISGLAIVQGKRVIWGSELTHRGFQIQEALTSRRQLRRSRRNRKTRYRKPRFLNRTRPKGWLAPSLTSRVQNILTWVKKLIRFCPITGISQELVRFDTQKLQNPEISGIEYQQGTLYGYELREYLLEKWNRKCAYCGATGTQLEIEHIKPKSKGGSNRVSNLTIACHPCNQAKSNQDIELFLSKKPSILKRILSQSLRPLADAASVNSTRWKLYYELKSIGLPVEVGSGGLTKFNRCRQNLPKTHWLDAANVGKVETLIIEVTLPLAITAKGHGTRQLCRTNKYGFPIRHCSRIKFHKGFQTGDIVRAVVTKGKNIGTYVGRVATRKSGSFNISTKSGLVQGISHKYCRFIHRKDGYAYTN

SEQ ID NO: 2970 - protein, 432 aa, Moorena sp.
MQPAKQQNWVFQINGDKQPLDMINPGRCRELQNRGKLASFRRFPYVVIQQQTIENPQTKEYILKIDPGSQWTGFAIQCGNDILFRAELNHRGEAIKFDLVKRAWFRRGRRSRNLRYRKKRLNRAKPEGWLAPSIRHRVLTVETWIKRFMRYCPIAWIEIEQVRFDTQKLANPEIDGVEYQQGELQGYEVREYLLQKWGRKCDYCGTENVPLEVEHIQSKSKGGSSRIGNLTLACHVCNVKKGNLDVRDFLAKSPDILNQVLENSTKPLKDAAAVNSTRYAIVKMAKSICENVKCSSGARTKMNRVRQGLEKTHSLDAACVGESGASIRVLTDRPLLITCKGHGSRQSIRVNASGFPAVKNAKTVFTHIAAGDVVRFTIGKDRKKAQAGTYTARVKTPTPKGFEVLIDGARISLSTMSNVVFVHRSDGYGYEL

SEQ ID NO: 2971 - protein, 317 aa, unidentified
  REGION 1..317: note = Human gut metagenome
MSTTVFVLDKKHRPLMPCRPARARRLLRAGRARVVKRFPFVIRLVDRTVEQSEVQPVLIKLDPGSRETGAAVVRDDGKKRHHALAFFVIEHRGGAIRDALKARSAFRRRRRSQNLRCRSPRFLNRVKPKGWLPPSLRHRVETTLSFVRRMCRYLPVSGIATELVKFDSQKLQNPEVSGVEYQQGTLFEYEVREYLLEKFGRKCVYCGAEGVPLNIDHMVPRAKGGSNRVSNLVLACMSCNQKKGARSLEDFLKGKPKVLARVRRELKTPLRDAAAVNATRWVLFNELKATGLPVETGSGALTKLNRHAFGVEKEHWL

SEQ ID NO: 2972 - protein, 379 aa, Arthrospira sp.
MPNYQNYVFVVDTLGQPLSPTHPARARKPLKQGLAAVFRTYPFTIILKKTVENPGNEPLRVKLDPGASVTGIALVSQKTGAVIWGAELAHRGDRIRAKLAARRLVRRHRRCRKTRYRQARFNNRKRPDGWLAPSLKHRVETTLTWVNRLISSCPITDISMELVRFDTQKLLNPEISGVEYQQGVLFGYELREYLLTKWQHQCAYCGAKNIPLEIEHIQPKSKGGSDRVSNLAIACHKCHQKKGSQSAREFLDTKPEILKLLLVQAKAPLKNAAAVNSTRWALFNGLKLTGLPIEIGTGGLTKYNRTVQGLPKTHWLDAACVGKSTPTRLKIKTHQPLLITCFGRGGRQKAAPNKRLPIRHNPLKPIKGWLTGDIAKHKT

SEQ ID NO: 2973 - protein, 406 aa, unidentified
  REGION 1..406: note = Human gut metagenome
MVYVQDIDGRPLMPTTRHGKVRRLLKSKKATVVNLCPFTIRLLYDTTGYKQEITLGVDTGTKHVGLSATTKSKELYASEVILRSDVVDLLSTRRELRKIRRYRLRYRKPRFMNRIKSKKRGWIAPSIRQKIDSHIRIIGFVYSILPVSKLIIEVAQFDTQKIKNPEISGKEYQEGEQLGFWNVREYVLARDEHKCQHCEGKSKDPVLNVHHIESRKTGGDSPSNLITLCKTCHKEFHKGNIKLKVNRGESLRDAAVMGIMKWELYDELKSLYPNVKMTFGYITKYNRINHGIEKSHVSDAFVISRNFNSCRLGYYYKRKLVRRHNRQIHKMKISKGGIRKMNQAPFKVFGFRLFDKVMFQGKERFIYARRLRGIFNIRDINGENKKDISYKKLEYVSHGLISIVAG

SEQ ID NO: 2974 - protein, 311 aa, unidentified
  REGION 1..311: note = gut metagenome
MPKVYVLNRHGRPLMPCTPAKARHLLDAGKAKVRHRTPFTIQLLYGSTGYTQEVILGVDAGSKTIGLSAATETEELFSAEVKPRNDVVELMSARRQFRRARRNRTTRYRKPRFDNRVRSKHKGWLAPSVEVKIQEHMTAIRRACAILPVSKVVVETAEFDLQLLKAVAEGKPVPQGEDYQKGEMYGHYNVRQYVLWRDSYTCRICGMHGSVRKGVPLHVHHLESRRVGGDAPDNLVTLCTACHDKLHKGIIMAADIKKRKRRSTRDATFMGIMRMTLLRRLREQLPVPVVETRGYITKATRENLLVLPKSH

SEQ ID NO: 2975 - protein, 474 aa, Thermincola sp.
MVFVLDKHKKPLMLCTEKRARLLLKRGRAVVHRMAPFTIRLKDRVVEESELQPLRLKLKPGAKASGIAVLREVDSRKSEAVFLCEIHHKPGIKQSLDNRRNLRRSRRNRRTRYRKPRFDNRRRPEGWLPPSLQARVELTANAVNKLLKLAPITAISVALFKFDTQKLQDPEISGVEYQQGELFGYEVKEYLLEKWGRRCAYCGKEGVPLEVDHVVPRNPKYGPKGTDRVSNLTLACEACNKAKGNLQPGDWLEELKQSKRQIDAVRAANLEKVLTQLKEPLRDAALMNATRWALYDRLKGTGLPVECGTGARTKYNRLRTGLPRTHCFDACCVGGSTPDEIIIGQEYAQVWSAKGRGTRKMCNTDRYGFPVGHRSRGKFHFGFQTGDLVVAEIPKGKYTGRWTGRVAVRSSGYFDIKDGSGRRICQGVSWKYMRIVQRNDGWQYEKQKIAQRGGKQKGRIPPTAEARGLPAAFL

SEQ ID NO: 2976 - protein, 412 aa, Methanosarcina sp.
MLVFIINQNKKPLMPCKPSKARKLLQAGKAKVVRNTPFTIKLLFGSSGYTQPVIAGMDTGSKVVGCAAIANGKVLYQSEIYLRENVSKKMQQRKMYRRTRRGRKTRYRPARFDNRGNSTKGGRLAPSIRSKLEAHFREKRFVESLLPVTGWKVELASFDIHKITNPEVYGVGYQEGDLKGFYNVKAYVLDRDGYTCQHCMGKSKDFRLHCHHIVFRSQKGTDTPENLITLCETCHKALHKGEFKLSGSRSKTKHATEIGILKSQIRKSGWSFAETFGYETKYRREQVLKLLKTHYFDAVAICCRDDQKVEVEDSVFLKRNVPAGDYQQRRGKRSEKKIPTGKLFGLRKFDLVKTENGIGFIRGKRSSGFFTLCDVFGNMITTSVNIKRNCRRLRAASTTLVQMVQMTHSSPH

SEQ ID NO: 2977 - protein, 431 aa, unidentified
  REGION 1..431: note = Human gut metagenome
MVYVLDINGQPLMPTTRHGKVRRLLNSHLAKVVKRCSFTIQLLYQSTKETQPVSLGVDAGSKHIGLAATTDKKVVYQEELVSHNDVVKLISARRILRRSRRNRKTRYRKARFNNRVHSKHKGWLAPSVEVKIQEHITTIKRICQILPISEIQVETAEFDLQRLKAMKEGKPLPVGTDYQLGEQYDFYNTRQYVLHRDGYTCQCCGTHDNNIKLHVHHIESRQTGGDAPNNLIILCEHCHKALHEGKLELPKGKKRGKSYRDATFMGVMRKTLLERLKKEIDVPVEGTYGYITKCWREKTGLEKSHINDAICISKHPYAKPLDTYYLTKAVRHHNRQIHKSNFSKGGIRKRNQAPYLVKGFRLFDKVLYQGKEYFIFGRRATGYFDIRTLDGTKVNKGSIKYKKLRIQDTAKAYLKEARAIPHVNKFTCVLA

SEQ ID NO: 2978 - protein, 427 aa, Methanosarcina sp.
MLVFVINQNKKPLMPCKPSKARKLLQAGKAKVVRNTPFTIKLLFGSSGYTQPVIAGMDTGSKVVGCAAIANGKVLYQSEIYLRENVSKKMEQRKMYRRTRRGRKTRYRPARFDNRGNSRREGRLAPSIRSKLEAHFREKMFVESLLPVTEWKVELASFDIHKITNPEVSGIGYQERDLKGFYNVKAYVLDRDGYTCQHCRGKSKDSRLHCHHIVFRSQKGTDAPENLITLCETCHKALHNGEFKLSGNKSKTKHATEIGILKSQIRKSGWSFAETFGYETKYRREQVLKLLKTHYFDAVAICCRDDQNVEVEDSVLLKRNVSKGDYQQRTGKRSEKKIPTGKLFGLRKFDLVKTSKGIGFVKGKRSSGFFAISDLFGNKISDSVNVKKKCRRLSARSTTLVQMVQMTHSSPTCHFRQAGTVEEGVSC

SEQ ID NO: 2979 - protein, 442 aa, unidentified; identical to SEQ ID NO: 2834
  REGION 1..442: note = Human gut metagenome

SEQ ID NO: 2980 - protein, 427 aa, unidentified
  REGION 1..427: note = Cyanobacteria bacterium UBA9226
MSKQPNYAFVLDTNRKPLTPCKPSIARKLINAGKAKVFRLYPFTIILNKEVVDTPEPLTLKIDPGSKITGLAILSGSSLLWVAELTHRGQTIKAALESRRSIRRNRRNRHTRYRQARFLNRTRSSSWLAPSLQHRVETILTWIKKLTRYAPINAVDQELVRFDLQQLENPEISGIEYQQDELAGYEVREYLLNKWERKCAYCGIENIPLQIEHIHPKAKGGTNRISNLCLACEPCNIKKGTKNIEEFLQKKPEILKKVLAQAKRPLKDTAAVNSTRWALFNRLKKTGLEVATGSGGLTKFNRTHLQLPKTHFFDAACVGDTPELLVLANQPLLIKATGHGSRQMCRTDKFGFPSRYVPQFKFVKGFQTGDIVKAIVTSGKKIGAYTGRIALRSTGSFNISTTSGLIQGISYKYCQQIHQKDGYGYGF

SEQ ID NO: 2981 - protein, 226 aa, Methanosarcina sp.
MLVFVINQNKKPLMPCKPSKARKLLQAGKAKVVRNTPFTIKLLFGSSGYTQPVIAGMDTGSKVVGCAAIANGKVLYQSEIYLRENVSKKMEQRKMYRRTRRGRKTRYRPSRFANRGNSRREGRLAPSIKSKLEAHFREKMFVESLLPVTEWKVELASFDIHKITNPGGFRDRISGRDLKGFYNVKAYVLARDGYTCQHCRGKSKDFRLHCHHIVFRSQKGTDAPEN

SEQ ID NO: 2982 - protein, 295 aa, Methanosarcina sp.
MYRRTRRGRKTRYRPARFDNRGNSRREGRLAPSIKSKLESHFREKRFVESLLPVTEWKVELASFDIHKITNPEVSGIGYQEGDLKGFYNIKAYVLDRDRYTCQHCRGKSKDSRLHCHHIVFRSNQGSDAPKNLITLCETCHKALHKGEFKLSGKKSKTKHATEIGILKSQIRKSGWSFAETFGYETKYRREQVLKLLKTHYFDAVAICCRDDQNVEVEDSVFLKRNVPAGDYQQRRGKRSEKKIPTGKLFGLRKFDLVKTENGIGFIRGKRSSGYFSISDIFGNKISDSVNVKKK

SEQ ID NO: 2983 - protein, 437 aa, unidentified
  REGION 1..437: note = Wastewater metagenome
MPCSEKRARLLLARGRACVHRLVPFVIRLTDRQLDTCTLQPLRIKLDPGSKTTGLALVRDTEHLNTDTGEIQRGVAVLSLIELVHRGRQISEALTARRQMRRRRRGCLRYRAPRFLNRGNKARGWLAPSLQHRINTTMAWVARIRRWSPVTALSAELVRFDMQRLQNPEISGVEYQQGTLAGYEVREYLLAKWSRKCAYCGVENVPLQIDHVHPKAKGGTNRVSNLTLACGPCNARKSAQSVDAFLAKDPKRLTALLAQAKRPLKDAAAVNATRWALVGALKATGLPVETASGGCTKFNRSRLAIPKTHALDAVCVGAVSVVTNWQKPSLTIKCTGRGSYQRTRLDKYGFPRGYLMREKSVKGFKTGDLVRAIVPTGKKAGRHTGRVAIRKSGSFNIQTLAGVVQGIGYRHCRLLQRADGYGYFFNKAACDTAQKRE

SEQ ID NO: 2984 - protein, 427 aa, Methanosarcina sp.
MLVFVINQNKKPLMPCKPSKARKLLQAGKAKVVRNTPFTIKLLFGSSGYTQPVIAGMDTGSKVVGCAAIANGKVLYQSEIYLRENVSKKMEQRKMYRRTRRGRKTRYRPSRFANRGNSRREGRLAPSIRSKLEAHFREKRFVESLLPVTEWKVELASFDIHKITNPEVSGIGYQEGDLKGFYNVKAYVLDRDGYTCQHCRGKSKDSRLHCHHIVFRSQKGTDAPENLITLCETCHKALHNGEFKLSGNKSKTKHATEIGILKSQIRKSGWSFAETFGYETKYRREQVLKLLKTHYFDAVAICCRDDQNVEVEDSVLLKRNVSRGDYQQRTGKRSEKKIPTGKLFGLRKFDLVKTSKGIGFVKGKRSSGFFAISDLFGNKISDSVNVKKKCRRLSARSTTLVQMVQMTHSSPTCHFRQAGTVEEGVSC

SEQ ID NO: 2985 - protein, 448 aa, Methanosarcina sp.
MLVFVINQNKKPLMPCKPSKARKLLQAGKAKVVRNTPFTIKLLFGSSGYTQPVIAGMDTGSKVMGCAAIANGKVLYQSEIYLRENVSKKMEQRKMYRRTRRGRKTRYRPARFDNRGNSRREGRLAPSYRPARFDNRGNSRREGRLAPSIKSKLEAHFREKMFVESLLPVTGWKVELASFDIHKITNPEVSGVGYQEGDLKGFYNVKAYVLDRDGYTCQHCRGKSKDFRLHCHHIVFRSQKGTDTPENLITLCETCHKALHNGEFKLSGKKSKTKHATEIGIIKSQIRKSGWNFAETFGYETKYRREQVLKLLKTHYFDAVAICCRDDQKVKVEDSVFLKRNVPAGDYQQRRGKRSEMKIPTGKLFGLRKFDLVKTSKGIGFVKGKRSSGFFAISDLFGNKISDSVNVKKKCRRLSARSTTLVQMVQMTHSSPTCHFRQAGNVEGEVSC

SEQ ID NO: 2986 - protein, 316 aa, Methanosarcina sp.
MLVFVINQNKKPLMPCKPSKARKLLQAGKAKVVRNTPFTIKLLFGSSGYTQPVIAGMDTGSKVMGCAAIANGKVLYQSEIYLRENVSKKMEQRKMYRRTRRGRKTRYRPARFDNRGNSRREGRLAPSIKSKLEAHFRENMFVESLLPVTGWKVELASFDIHKITNPEVSGVGYQEGDLKGFYNVKAYVLDRDGYTCQHCRGKSKDSRLHCHHIVFRSNHGSDAPENLITLCETCHKALHNGEFKLSGSKSKTKHATEIGIIKSQIQKSGWNFAETFGYETKYRREQVLKLIKTHYFDAVAICCRDDQNVEVEDRFF

SEQ ID NO: 2987 - protein, 343 aa, unidentified
  REGION 1..343: note = Human gut metagenome
DITDLLSARRALRQSRRNRKTRYRAPRFDNRIRTKRKGWLAPSVENRINAHLSRIEAVLRLLPITKITVETASFDMQRLKNPDISGKEYQEGEQLGFWNVREYVLFRDGHVCRHCHGRSKDPVLNVHHLESRRTGSDSPDNLITLCETCHKALHRGEITLKAKRGQSFRAQAFMGIMRREVLNRLKASYPELKVHETYGYLTKHARIANGIVKSHGADAFCIAGNLGAERLGEFFFQKQTRRNNRQIHKLSILKGGIRKRNQAPFEAKGFRLFDKVACQGEEGFIFGRRSSGSFDVRKLDGTRISAGISCKKLRLLEKRRTYLTEIRKEEALPPLPEGRGLRA

SEQ ID NO: 2988 - protein, 466 aa, Moorena sp.
MQRRVFVLSKNRKPLMPCSAARARQLLKERKASVYRQEPFTIILQKRTEGDLQKVQLKFDPGSKITGMALVVFFQKGTVVTWAAELEHRGEKIVDLLSKRRAIRRSRRNRKTRYRPPRFCNRTRKKGWIAPSLKSKVDNIFNWTKKLLTYAPIDNLCVETNRFDTQKLQNPEISGVMYQQGTLFGYEIREYLLYKWNHQCAYCDAKNVALEIDHIHPRSKGGSNRVSNLTISCRKCNENKGNGDIHNFLSKDNKRLQKIVSYSKKTLRDAASINTTRYVIGNQLKKLGIDVEFASGGKTKANRRHNGFSKQHWIDAACAGESGENVTISQDLIPLGIQSQGRGSRQMCRVDQFGFPRTTAKSQKRVKGFQTGDIVKAVVTKGKKKGVYVGRVAVRSNGYFNIKTNNSTVQGISYRYCHLIQQVDGYFYFQKGDARLKKASCSCFAHSCPSGDSSPTYRSRGILAIN

SEQ ID NO: 2989 - protein, 428 aa, Desulfonema sp.
LKVFVLDTEKRISAPVHSAEARLLLSQQKAAVFRRFPFTIILKESAKEEPEPLRLKTDPGSRTTGMAIVNDTTGEIIFVAELSHRGQRIKSLLENRRAIRRSRRNRKTRYRKPRFLNRTRTENWLPPSLKSRVHNIETWVHRFRRFCNIRAISTELVRFDMQLMENPGISGAEYQQGELAGYEVREYLLEKWERKCAYCGKRNIPLEIEHIVPKSGGGSDRVSNLTLACNSCNVRKGNRPVREFLKRKPEVLKKILAQAKAPLKDAAAVNATRWDLYHILKKTGLPVETGSGGLTKFNRVRRGMEKTHWADAACVGKSTPAGLFQMHKGVLGITATGHGSRQMCRVDRYGFPRTGAKPRQKDVRGFQTGDMVRAVVPTGKKAGVYEGRVAVRTSGSFNIKTDTGTVQGIGWKRCRILHHSDGYSYTHI

SEQ ID NO: 2990 - protein, 512 aa, unidentified
  REGION 1..512: note = Human gut metagenome
MSTIYVLNKDGKPLMPTTRGGHVRHLLKEQKARVVRAKPFTIQLLYETNDVVQPLYLGIDPGRTNIGVAVVKANGTAVFTAHLETRNKEVPKLMQDRKKARRARRTNGRRCRRQRRAKANGTISKKCVKQDTAQSKNPSKRAKEIGIIKRRLPGYKKDVLCIGIKNKEAKYTNRTRPEGWLTPTANQLLQTHINLVRKIQKFLPISDVVLEVNKFAFMRLDNPDIQKWQYQQGPLYQKGSLENAVSEMQEHHCLFCDKPIDHYHHVVPQSENGSNTIANIVGLCAEHHNLVHKDAAWQKKLAEEKVGLNKKYGALSVLNQIIPALTNKLSVLFPKHFFVTAGKSTHDYRATHGVSKDHWLDAYCIACSVLPSDVCDSNINNHMPYELKQFRRHARRALNNENMNRVYTLNDKAVAINRHKATEQEAASLEEFRKEHPNDVCKLKVKEHHPTYRNMNRNYPGSIFLVGKHVHIMQGIAGSKDGKATTYKDSNANSITASKCKFVAKNSGILFV

SEQ ID NO: 2991 - protein, 572 aa, Nocardiopsis sp.
VRAPADAHTAVSQSKARCKGIPALRGRAFSPVVESRLYQTEPTPLKEVTELATFRAGRKTHQAVLPQRPALESASADTLRIKDETGRGHHTRVVPGAEHGRGEIGAASPGGSGVTPEPCGAGESGREAHTNRTVHPAVFVLDRHGTPLQPCPPARARQLLAKGRAVVHRHTPFVIRLKDRTAADSEVDGVEVGIDPGSKHTGITVFTEQVGRRRSRYAIQLDHRGTRIRKNMGQRSGYRRRRRTANLRHRPPRFDNRTRPQGWLPPSLRHRVDTTVSWVDRLTRLAPVRAVHVERAAFDTHALSAGRSLEGLEYQQGALCGFEVREYLLAKFDRTCAYCGATNTPLNIDHVHPRSWGGSDRVSNLVLSCVPCNQGKDDQPVEEFVTNTRTLARIKAQTKTPLKDAAAVQSTRWALWRALDARLPSHVGSGGRTKWNRTRNHLPKSHTLDALCVGKAETVTEVVHTVLVVGCAGRGSYARTRPDRYGFPRLRLSRTKGFFGFATGDLVRAVVPVGKKAGTHTGRVAVRASGSFNITTGHGTVQGIGHRYLRLLQRADGYAYTTRKERGVSSRS

SEQ ID NO: 2992 - protein, 346 aa, Moorena sp.; identical to SEQ ID NO: 2872

SEQ ID NO: 2993 - protein, 409 aa, Moorena sp.
MDLMAYVVNKDGSPLMPCTSVIARLLLKQGKAKCIRKVPFTIKLSYQTTNYAQDITLGVDTGSGTIGSSVIKDNGDVIYMSQIEIRNDISDKLKQRSKYRRNRRNRKTRYRKVRGLNRKKSIKKDRFSPTMTSKIKSHVKEIKFVKTILPISKVILETATFDPHALKNPAVLNNKWLYQKGINYGFANTKAYVLDRDNHTCQHCKGKSKDSKLEVHHIVFRRNGGSDESSNLITLCKTHHDHLHSGNITLKGGKTKGHLKHATQMNSIRVQLLSLLPSAEETFGFVTKEHRQLLNLPKEHHMDAVVIASQGNAVNFKTNVILFKRCICDGDYQQSKGVRSEQRIPTGKIQGFRKFDKVKYLGSEYFIKGRMSTGYAILMDSKGIKVTLKPIPKFSKMERIQARKSWIIS

SEQ ID NO: 2994 - protein, 424 aa, Moorena sp.; identical to SEQ ID NO: 2614

SEQ ID NO: 2995 - protein, 415 aa, unidentified
  REGION 1..415: note = Human gut metagenome
MVYVLANDGQPLMPTERHGKVCRMLKSGIAKVVKKCPFTIQLQYESERNVQPVALGIDAGSKHVGVSATTKAKVLYESDVELRDDIVKLLATRRQLRRRRRSRKTRYRPARFDNRRRKEGWLAPSIRQKIGSHLTVVANVCKILPVSQIIVETASFDIQKIKNPDIQGIEYQQGEQMDFWNIREYVLFRDGHTCQCCKGKSKDKVLNVHHIESRKTGGNAPNNLITLCETCHKGYHNGTVTLPKNIKRGMKFKDAAFMGIMRWTFYNTLKEQYEPDIPVHYTYGYITKNTRINHNLPKGHCIDARCISGNPDAVSDGTYYYQKKVRCHNRQIHKQTILKGGIRKSNQAEYLVRGFRLFDKVRYQGREYFIFGRRKSGFFDIRTLSGEKVNKGSINVKRLTFVDTRKNYLTERRTV

SEQ ID NO: 2996 - protein, 287 aa, Methanosarcina sp.
MIFVLNKNKQPLSPCHSAVARKLLKTGKAVIHKKYPFTIRLKELKNSENKAEFRLKIDYGSRHTGLAILNGSKVIGLAQIHHKTSIKSNMDSRRAMRRTRRNRTTRYRKPRFNNRKRKEGWLPPSLQSRVDNIQNWVNRLQKLCPLTHISYENAKFDTQLMQNPEISGIEYQQGELQGYEVREYLLEKWNRKCAYCGAENVPLEIEHIIPKARHGTSRVSNLTLACRTCNEAKGTKTAEEFGYPDIQKQARIPLRDATIVTATRWKYIMFFPKLRSISSVAQVQGRR

SEQ ID NO: 2997 - protein, 310 aa, Moorena sp.; identical to SEQ ID NO: 2916

SEQ ID NO: 2998 - protein, 423 aa, unidentified
  REGION 1..423: note = coral metagenome
MRVFVLNKNRQPLDPCKPARARILLSTGKAKVYRRYPFTIVLTEEIKEPITHEHQLKIDPGAKTSGLAIVQVKRIIWGAELTHRGFQIREALTSRRQLRCSRRNRKTRYRKPRFLNRTRPKGWLAPSLMSRVQNILTWVKKLTRLCPVTGISQELIRFDTQKLQNPEISGIEYQQGTLDGYELREYLLEKWDRKCAYCGATGTRLEIEHIKPRSKGGSDRVSNLAIACRPCNQAKSNQDIELFLSKKPSILKRILNQAKRPLADAASVNTTRWKLYHELKSIGLPIEVGSGGLTKFNRCRQSLPKTHWLDAANVGKVETLIIEVTHPLIMTAKGHGTRQLCRTNKYGFPIRHCSRIKFHKGFQTGDIVRAVVTKGKKIGTYVGRVATRKSGSFNISTKSGLVQGISHKYCQFIHRKDGYAYTN

SEQ ID NO: 2999 - protein, 419 aa, Moorena sp.
MQNYVFVIDTNKRPLNPISPKKARRLLDKGKAAVFRMYPFTIILKTAIPNPTISPSQIKIDPGSKTTGFAIVQNDQVIWAMELEHRGALIKKKLESRSAVRRGRRNRNTRYRKPRFLNRRRPEGWIAPSLEHRVLTTETWVKRLIKFCPVNQIWIERVKFDTQKMQNPEVNGTEYQQGELAGYEVREYLLEKWGRECAYCGKQNVPLQIEHIHPKSCGGSDRVSNLCLACEKCNRRKGNKPIEEFLKKKPSLLQKIKTKAKQPLMDAAAVNTTRNKIVKVLKEIKPVVTGTGAQTKYNRTRLGLPKQHWIDAACVGDIKTLVLKTSQPLLVTCKGQGGRQKAALNKYGYPIRYNPLKPIKGWSSGDIAKNLLTGEFGRVNPRSKSNSFNYTVPGKKAISLHLKNLLRVHLKDGYTYGFC

SEQ ID NO: 3000 - protein, 423 aa, Moorena sp.
MSNFVFVLDTEKRPLNPVQPGQARRLLKTEKAAVFRKYPFTIILKVAVTTTPESITLKIDPGSKTTGIALVQGGKVIFGAELTHRGQSIAASLDSRRSLRRSRRNRHTRYRQARFLNRTRKEGWLAPSLQHRVETTLTWVIKFIKLAPIDSIVQELVRFDLQQLDNPEISGVEYQQGELQGYEVREYLLNKWNRKCAYCSIGNVHLQVEHIHPKAKGGTNRISNLCLACEKCNQKKGTQDVKQFLVKKPDILKHIFAQAKRPLKDAAAVNSTRWALFSRLKETLLPVLTGSGGLTKFNRTRLQLPKTHWLDAACVGQIESLFVLTSKPLLIKATGHGTRQMCRTDKFGFPSRYVPRNKFVRGFQTGDIAKAVVTSGKKIGEYVGRVAVRTTGSFNISASELVQGISYKYCKIVHKKDGYSYAF

SEQ ID NO: 3001 - protein, 466 aa, Moorena sp.
MQRRVFVLSKNRKPLMPCSPARARQLLKERKASVYRQEPFTIILQKRTQGDLQKVQLKFDPGSKITGMALVVFFQKGTIVTWAAELEHRGEKIVDLLSKRRAIRRSRRNRKTRYRPPRFSNRTRKKEWIAPSLKSKVDNIFNWTKKLLTYTPIDNLCVETNRFDTQKLQNPEISGVEYQQGTLFGYEIREYLLYKWNHQCVYCDAENVALEIDHIHPRSKGGSNRVSNLTISCRKCNENKGNGDIHNFLSKDNKRLQKIVSYSKKTLRDAASINTTRYVIGNQLKKLGIDVEFASGGKTKANRRHNGFNKQHWIDAACAGESGENVTISQDLIPLGIQSQGRGSRQMCRMDQFGFPRTTAKSQKRVKDFQTGDIVKAIVTKGKKKGVYVGRVAVRSNGYFNIKTNNSTVQGISYRYCQLIQQVDGYFYFQKGDARLKKASCSCFAHSRQSGDSSPTYRSRGILAIN

SEQ ID NO: 3002 - protein, 477 aa, Blautia sp.; identical to SEQ ID NO: 2707

SEQ ID NO: 3003 - protein, 466 aa, Moorena sp.
MQRRVFVLSKNRKPLMPCSPARARQLLKERKASVYRQEPFTIILKKRTQGDLQKVQLKFDPGSKITGMALVVFFQKGTVVTWAAELEHRGEKIVDLLSKRRAIRRSRRNRKTRYRPPRFCNRTRKKEWIAPSLKSKVDNIFNWTKKLLTYTPIDNLCVETNRFDTQKLQNPEISGVMYQQGTLFGYEIREYLLYKWNHQCAYCDAKNVALEIDHIHPRSKGGSNRVSNLTISCRKCNENKGNDDIHDFLSKDNKRLQKIVSYSKKTLRDAASINTTRYVIGNQLKKLGMDVEFASGGKTKANRRHNGFNKQHWIDAACAGESGENVTISQDLVPLGIQSLGRGSRQMCRVDQFGFPRTTAKSQKRVKDFQTGDIVKAVVTKGKKKGVYIGRVAVRSNGYFNIKTNNSTVQGISYRYCQLIQQVDGYFYFQKGDARLKKPSCSCFAHSRPSGEDTPTYRSRGILAIN

SEQ ID NO: 3004 - protein, 420 aa, unidentified
  REGION 1..420: note = Freshwater metagenome
MVYVLNIQGNPLMPCTEAKARKLLKNDLAIIIKREPFTIQLVFECENQIQEITLGVDAGSKIIGLSATTNKKELYSAEVLLRNDIVNLLSTRRQNRRTRRNRLRYRKPRFLNRVSNKKKGWLAPSIENKIQTHFSIISKIHKLLPITKIIVEVASFDIQKIKNPNIQGKEYQQGEQLDFWNVREYVLFRDGHKCHGKKGCTNNILNVHHIESRKTGGDSPSNLITLCEKCHNNYHNGKLKLNLKRSQSFRDATFMGIMRWSFYNKLKELYPAVSLTYGYITKNTRITNNLPKEHRIDALCITGNPTISRLDNWYYIKQVRKHNRQIHKANILKGGRKKLNQAPYLVKGFRLFDKVRYNGIECFIYGRRSSGYFDIRTLDGVRINASVSYKKLKLLETSQSLIIERRKTGLETHSSTSLKA

SEQ ID NO: 3005 - protein, 424 aa, Moorena sp.; identical to SEQ ID NO: 2772

SEQ ID NO: 3006 - protein, 373 aa, Moorena sp.
MQNYVLVIDTDKQPLNPISPKKARRLLDKGKAAVFRMYPFTIILKAAIANPTISPCQIKIDPGSKVTGFALVQDDQVIWGMELEHRGGLIKKKLESRSAVRGGRRNRNTRYRKPRFLNRKRPEGWIAPSLEHRVLTIETWVRRLTKFCPVNEIWIEIVKFDTQKMQDPEINGVEYQQGELAGYEVREYLLEKWGRECAYCGKPNIPLQIEHIHPKSKGGSDSAKPTLRERVSNLCLACEKCNQRKGNRPIEEFLKKKPGLLQKIKNKALSPLRDAAAVNTTRNKVVKVLKEIKPVVTGTGAQTKYNRTKLGLPKQHWIDAACVGDVEALVLRTSQPLLVTCKGQGGRQKAALNKYGYPIRHNPLKPIKGWKAW

SEQ ID NO: 3007 - protein, 416 aa, unidentified
  REGION 1..416: note = Human gut metagenome
MVYVLSQHGQPLMPTENHAKVRALLKHGKAKVIQGCPFTIQLLYESTTHTQKINLGIDAGSKTIGVSATTDSKVLYESEVVLRNDIVELLSGRRALRNSRRSRKTRYRKPRFDNRKKPDGWLAPSIRQKIETHVTVVGNVMKILPVTKIIVETASFDIQKIKNPEIEGVGYQHGEQLDFWNVREYVLFRDGHTCQCCKGKSKDNILNVHHIESRKTGGNAPNNLITLCETCHKAYHKGIITLPKEIHRGMRFRDAAFMGIMRWAFYDRLKELYNPLGAEVINTYGYITKNTRIEHGLPKEHYVDARCISDNPAAKPLDHYYFQKKVRCHNRQIHKNTILKGGIRKRNQASYEVKGFRLYDQVLWKGQKCFIFGRRSTGRMDLRLLDGTHINASVGHKNLKLLSMRKNYLIEQRKAG

SEQ ID NO: 3008 - protein, 425 aa, Moorena sp.
MSTNYVLVLDTNRKPLNPCKPGMARSLLKAGKAAVFKQYPFTIILNKAVDDAPKPVQLKIDPGSKVTGLALVQDDKVLWGAELYHRGQQIKADLEDRRKLRRGRRNRKTRYRQPRFLNRTRPEGWLAPSMLHRVLTTMTWVRRLTKFVPVTGISLERVRFDMQKMINPEVSGVDYQQGELQGYEVREYLLEKWNRQCAYCQATDTRLEVDHIHPKSKGGSDRVSNLTVACHDCNQAKGNRNITDFLSGKSDLLNRILSQVKQPLLDAAAVNSTRNKIAEELIARGLPIEFGTGGQTKYNRCRLDLPKTHWLDAACVGVVVHLTLETKQCLTITASGHGNRQMAGVDKYGFPYRHRTRQQVHFGFRSGDIVRAVVPKGKKAGTHLGRVLCRKSGSFDIQTKSGRVTGINHKYCSTIHGRDGYAYVF

SEQ ID NO: 3009 - protein, 259 aa, unidentified
  REGION 1..259: note = Human gut metagenome
PVPQGEDYQKGEMYGHYNVRQYVLWRDDYTCQCCGAHATKKKEVRLHVHHLESRKVGGDAPDNQVTLCESCHEKLHKGLITEGDFKKRKRRSTRDATFMGIMRKTLMQRLCSELPIPVVETRGYITKATREKLLVLPKSHTNDALAIAQGKQGFNVGYLPEILQIDKIYTIRPVRHHNRQLHKAAILKGGIRKSNQAGKYVFGYRLFDKVQFNGQDCFVWRRRTTGIFTIKTINGKMIKDGISFKKLKLAEKSTSYLIA

SEQ ID NO: 3010 - protein, 459 aa, Tolypothrix sp.
MMMTNSVFVLSKNGLILKPTTPARARILQSIGKGKKLKLFPFTLILDKDVDENIEPYLELRIDPGSKFTGISLVDLNKNEVIWAMELEHRGARIKMELIKRAATRRSRRSRRLRYRQKRFDRKKPDGWLAPSLRHRLLTTQTWIKRLLRLAPIKSIAIESVKFDFQKMETPDIEGIEYQQGTLFGYTLREALLEHWGRECVYCGKTDVPLQIEHIHARTKGGSDRFSNLTLSCEKCNQKKGNKPVEQFLKGKPEILQKIKAHQKKSLSDASAVNSTRKAIFEMAQQFGLRVISGDGASTKMIRIKSELPKQHWIDSACVGTDQIVKLRIYQSLRVTCTGHGTRQVQRVNASGFPAIASIKKNPITGKKEVNLVSKNEKYTHARAGDYVICNLLKDRKHIKAGIYRARVKTPTPKGVEVLINGYRIAIDRQYVQLIHCADGYECSFATIDQNLLRFSAIR

SEQ ID NO: 3011 - protein, 423 aa, Moorena sp.
MRVFVLNKNRQPLDPCKPARARILLSTGKAKVYRRYPFTIFLTEEIKEPITHEHQLKIDPGAKTSGLAIVQGKRVIWGAELTHRGFQIREALTSRRQLRCSRRNRKTRYRKPRFLNRTRPKGWLAPSLMSRVQNILTWVKKLTRLCPVTGISQELVRFDTQKLQNPEISGIEYQQGTLYGYELREYLLEKWNRKCAYCGATGTQLEIEHIKPKSKGGSDRVSNLAIACRPCNQAKSNQDIELFLSKKPSILKRILNQAKRPLADAASVNTTRWKLYHELKSIGLPIEVGSGGLTKFNRCRQSLPKTHWLDAANVGKVETLIIEVTHPLIMTAKGHGTRQLCRTNKYGFPIRHCSRIKFHKGFQTGDIVRAVVTKGKKIGTYVGRVATRKSGSFNISTKSGLVQGISHKYCQFIHRKDGYAYTN

SEQ ID NO: 3012 - protein, 427 aa, Methanosarcina sp.
MLVFIINQNKKPLMPCKPSKARKLLQAGKAKVVRNTPFTIKLLFGSSGYTQPVIAGMDTGSKVVGCAAIANGKVLYQSEIYLRENVSKKMEQRKMYRRTRRGRKTRYRPARFDNRGNSRREGRLAPSIKSKLEAHFREKMFVESLLPVTGWKVELASFDIHKITNPEVSGIGYQEGDLKGFYNVKAYVLDRDGYTCQHCRGKSKDSRLHCHHIVFRSQKGSDAPENLITLCETCHKALHNGEFKLSGNKSKTKHATEIGILKSQIRKSGWSFAETFGYETKYRREQILKLIKTHYFDAVAICCRDDQKVEVEDSVFLKRNVSKGDYQQRTGKRSEKKIPTGKLFGLRKFDLVKTSKGIGFVKGKRSSGFFAISDLFGNKISDSVNMKKKCRRLSARSTTLVQMVQMTHSSPTCHFRQAGTVEEGVSC

SEQ ID NO: 3013 - protein, 427 aa, Methanosarcina sp.
MFVFVLSKGGNPLMPTKPAKARILLKTGKAKVVRTTPFTIKLLFGSSSYTQPVTAGIDSGSKAVGCAAIASGKVLYQSEVSMRENVSKKMQQRQMYRRSRRSRKTRYRPARFDNRGNLRREGRLAPSIKSKLESHFREKRFVEALLLVTKWKVELASFDIHKIKNPEVSGIGSQEGDLKGFYNVKAYVLHRDGYTCHHCKGKSKDSRLHCHHIVFRSNQGSDAPENLITLCETCHKALHKGEFKLSERRSNTKHATEVGIVKSLIKKSDWSFEEVFGYETKFRREQVLGLEKTHYFDAVAICCGNKQTVEPDDTVYFKKHVPAGDYQQTKGKRSEKNIPTGKLFGLRKFDLVKTEKGIGVVWGKRSSGYFSISDIFGNKISDSANVKKKCRRLSARSTTLVQTIQLTHSSPTFHFRQAGTVEEGISC

SEQ ID NO: 3014 - protein, 413 aa, unidentified
  REGION 1..413: note = Human gut metagenome
MTDYAFVLDANGKQLAPTKEQKAWFLIRRKRATLVSKYPLVIQLKKKIPDNEICKDEVRCGIDDGGLHVGVALVQKCQTRNKVVFKGTIEQRNDVKHLMDVRRGYRRYHRYHKRYRPARFNNRDSSKREGRIAPSILQKRQATIRVINQLNRWINITNYWLEDVAIDIRALTDGYKPYRWQYQKSNRLDENIRKAVILRDGCRCMECGKSNCRLEVHHIKPRRLKGSSTLGNLITLCTKCHQKTEGIEELYMDRYFALLNSSDNRNLDYAQHVMIGKKWLREQLSNLGMLYLTNGGDTANKRIDWDITKSHSNDAICITDLRPDTCEIKEWVIKPMRRQSKAKTDNVLGIKHRDLVEYTFRNGETHRGYVTALYPEQNAINFQSPAKHCKKVNAGKCKVLWKYSKIYWLDNVS

SEQ ID NO: 3015 - protein, 427 aa, Methanosarcina sp.
MLVFVINQNKKPLMPCKPSQARKLLQAGKAKVIRNTPFTIKLLFGSSGYTQPVIAGMDTGSKVVGCAAIANGKVLYQSEIYLRENVSKKMEQRKMYRRNRRGKKTRYRPARFDNRGNSRKEGRLAPSIRSKLEAHFREKRFVESLLPVTGWKVELASFDIHKITNPKVYGIGYQEGDLKGFYNIKAYVLDRDGYTCQHCRGKSKDSRLHCHHIVFRSQKGTDAPENLITLCETCHKALHNGEFKLSGKKSKTKHATEIGILKSQIRKSGWSFAETFGYETKYRREQVLKLLKTHYFDAVAICCRDDQKVEVEDSVFLKRNVSAGDYQQRRGKRSEKKMPTGKLFGLRKFDLVKTENGIGFIRGKRSSGYFSISDIFGNKISDSVNVKKKCRRLSARSTTLVQMVQMTHSSPTCHFRQAGTVEEGVSC

SEQ ID NO: 3016 - protein, 442 aa, Tolypothrix sp.
MSNYVFLIDKNKTPLNPVHPAQARKLLDSGKAAVFRRYPFTLILKRVIENPNVYPLILKIDPGSKFTGIALVTNQGNVIWGMELQHRGQQIKDALEHRRAVRRGRRSRNTRYRQARFLNRKRPDGWLAPSLRHRVITSETWVKRLQKFAPIGSIVQELVKFDTQAIQNPEISGAEYQQGTLHGYECREYLLEKWNRQCAYCGIKDVPLEIEHIQPKSACGSDRISNLCLACHKCNQRKGSKDIQEFLKGKPDVLNRVLRQAKTPLKDAACVNSTRWSLLNTLKQTGLPVKTGTGGQTKFNRIRFDLPKAHWIDAACVGECSAVDGFPVAGNCRTRKGIVETIKLVTTKILKVRATGFGGRQRCQTDQFGYPQKHRPLRPILGFSTGDIVRASVPKGKYAGTFTARVCPMSHGYGEFVIDKKRRSIKLNYLTPVHRRDGYDYA

SEQ ID NO: 3017 - protein, 506 aa, unidentified
  REGION 1..506: note = Human gut metagenome
MTMVYVQNKDGKPLMPTTRYCYVRLLLKEKKARVVCTTPFTIQLNYDTPDITQDLILGIDPGRTNIGVAVVKEDGSCVFSAHLETRNKEVPLLMKKRAAFRRQHRTQDRRRKRQRRAIAAGATVESNTIERLLPGYSTPIVCHHIRNKEARFNNRSRPAGWLTPTANHLLQTHINLIAKIAKFLPITKVVVELNRFAFMAMDNPNIHRWEYQQGPLYGLGSVEDAVYAQQDGHCLFCKKPIDHYHHVVPRHKSGSETLANRCGLCEKHHALVHKDKAWAEKLVTRKGGMNKKYHALSVLNQIIPHLMEYLGRETPYDVYATNGRSTKGFRIAKNVPKEHYTDAYCIACSILNTDIKVSAPVEPFELKQFRRHDRQACIRQMVDRKYLLDGKVVAANRHKAIEQKSDSLEEFREAYGDAAVSQLTVRPHSPQYKDMARIMPGAVMDFDGIVGVFKGSSGRNNGTPNYYNSTKGARVLTKRCALLAKNVGMVFIPAGKLSFVGKHIKS

SEQ ID NO: 3018 - protein, 415 aa, unidentified
  REGION 1..415: note = Human gut metagenome
MVYVVANDGQPLMPTERHGKVCRMLKSGMAKVVKKCPFTIQLQYESERNVQPVALGIDAGSKHVGVSATTKAKVLYESDVELRDDIVKLLATRRQLRRRRRSRKTRYRPARFDNRRRKEGWLAPSIRQKIESHLTVVANVCKILPVSQIIVETASFDIQKIKNPDIQGIEYQQGEQMDFWNIREYVLFRDGHTCQCCKGKSKDKVLNVHHIESRKTGGNAPNNLITLCETCHKGYHNGTVTLPKNIKRGMKFKDAAFMGIMRWTFYNTLKEQYEPDIPVHYTYGYITKNTRINHNLLKGHCIDARCISGNPDAVSDGTYYYQKKVRCHNRQIHKQTILKGGIRKSNQAEYLVRGFRLFDKVRYQGREYFIFGRRKSGFFDIRTLSGEKVNKGSINVKRLTFVDTRKNYLTERRTV

SEQ ID NO: 3019 - protein, 231 aa, Methanosarcina sp.
MLVFVINQNKKPLMPCKPSKARKLLQAGKAKVVRNTPFTIKLLFGSSGYTQPVIAGMDTGSKVVGCAAIANGKVLYQSEIYLRENVSKKMEQRKMYRRTRRGRKTRYRPSRFANRGNSRREGRLAPSIKSKLEAHFREKRFVESLLPVTEWKVELASFDIHKITNPEVSGIGYQEGDLKGFYNVKAYVLDRDGYTCQHCRGKSKDFPAALPSYRFQVTEGNRCTRKPDNAL

SEQ ID NO: 3020 - protein, 457 aa, Tolypothrix sp.
MITNSVFVLSKNGKILKPTTPARARILQAQGQAKKLKLFPFTLILDKEVDENVEPLLELRIDPGSKYSGFSLVDLNKNEVVWAMELEHRGLAIKMDLIKRASVRRSRRSRRLRYRQKRFDRKKPYGWLPPSLKHRLLTTQTWIKRLLKVAPIKSIAIESVKFDLQKIEAPNIEGIEYQQGTLFGYTLREALLEHWGRECVYCGLTDVPLQIEHINPRSKGGSERFSNFTLSCEKCNQKKGSKPVEQFLKNQPEILKKIKAHQKKSLSDAAAVNSTRKAIFEMAHQFELPVISGDGASTKMIRIQSQLPKAHWLDSACVGTDQIVKLRVCQPLLVTCTGHGTRQVQRVNAKGFPAIASIKKNPMTGKKEVKLVSKNQKYTHATAGDYVICTLSENRKHIKAGIYRARVKTPTPKGVEVLINGHRIGVNQKYFKLIHRSDGYEYSFTTIDPDLLRLKPI

SEQ ID NO: 3021 - protein, 427 aa, Eubacterium sp.
MLVYVLNKNEKPLMPCNPTKARKLLKQNKAKVLRIEPFTIQLLYGSSGYKQNITLGVDAGSKHIGLSASTPIKELYAADVELRNDIVDLLSTRRQNRRTRRNRKTRYRKCKFLNRVKSKNKGWLAPSIENKIDAHFKSIAQVNKILPITNIVVETASFDIQKIKNPEISSKQYQEGDQLGFWNVREFVLWRDNHTCQCCKGKSKDKILNVHHIESRKTGGDAPNNLITLCETCHTGYHKGTLKLPSSIKRGASFKDATFMGVMRWSFYNRLKKLYSNISMTYGYITKNTRIENGLPKEHYIDALCISGHPKAKQLDYYYYQKQVRRNNRQIYKANILKGGKKKLNQAPRYVKGFQLFDKVKYDGDSYYIFGRRSNGYFDIRKLDGTKVNNGSINYKYLKRLESRRNMLTERRSRSPLMTEVTSLRTV

SEQ ID NO: 3022 - protein, 372 aa, Moorena sp.
MMGNYHVRICRRVGAGDSPLDSIGIALVNNRDEVIWGMELHHRGQQIKDSLETRKAVRRGRRARHTRYRQTRFLNRTRPEGWLNAPSLRHRVLTIETWVKRLMKFAPIVTLTQELVKFDLQAMQNPEISGTEYQQGTLHGYECREYLLEKWNRQCAYCGIKDVPLEVEHIQPKSKGGSDRISNLCLACHKCNQNKGNKDVKEFLKGKPEVLSRILKQAKSPLKDAAAVNSTRWALLKVLGRFGLKVYANSGARTKFNRIKLGLPKAHWIDAACVDFVEKLIILTTKILTVKSTGKGTRRLCRINKFGFPCSNPRTSYEHGWNTGDVATGKGVTGRVVVQSKTRLEIRIDGKRIGAQLSDFKKLHCKDGYSYA

SEQ ID NO: 3023 - protein, 413 aa, unidentified
  REGION 1..413: note = Human gut metagenome
MTSYSFVLDVNGKPLAPTKEQKAWFLIRKKRAALVSKYPMVIQLMKEIPENEICQDEIRCGIDDGGLHVGIALVQKCKTKNKVVFKGTMEQRNDVKHLMEVRRGYRRYHRYHKRYRQARFDNRKSSKREGRIAPSILQKRQATIRVIHWLNKWINITNYWLEDVSVDIRALTDGYQSYRWQYQRSNRLDENIRKAAILRDGGKCMECGKSNCRLEVHHIKPRRRNGSNTLDNLITLCESCHQKTEGQEELYMDRYFSLLKSSNNKNLNYAQHVMIGKRWLRKQLSGLGVLYLTSGGDTANKRIDWNIEKSHANDAVCITDLQPDTCDMKEWTMKPMRRQSKAKTDHVLGIHHRDLVEYTFKNGETHRGYVTALYPEQKAINFQSPTKHCKKVNARKCKLLWNYSKIYWFENAS

SEQ ID NO: 3024 - protein, 465 aa, Calothrix sp.
MSLLTNHVFVLNKDKSFLSMVHPARARKLLTQNKAAVFRTYPFVIILLQQIMNPSLKQYFLKIDPGSQWTGFAIQCGEEIVFRMELKHRGDVIKSDLQKRSGFRRGRRSRNLRYRQERFNKKKKSGWLPPSLMHRVFTVETWIKRFCKFCPIILIEIEQVRFDMQKIANPEISGIEYQQGTLFGYEVREYLLEKWDRECAYCGAKNIQLEVEHIKAKSNGGSDRVSNLTLACHDCNQKKGNMNVDDFLSDKHKLAHILANAQTPLKDAAVVNSTRIHIVDVAKKYNPVNTWTGGRTKMNRVNQNLEKGHSIDAACVGESGSKVIFLTEQPLLVIAFGHGSRQSRRTNDKGFPALVTKKCKNTGRDIVQKDEFGNVKIISPKNEYTHITAGDIVRFEIKKVRSVKSNHIQAVDGKVVVEPKWYTCRVKTPTPQGFEVLIKGGRVGISSMKGAKFAYRADGYEYKFR

SEQ ID NO: 3025 - protein, 589 aa, Streptomyces sp.
VTRVHREREGRSLAPPAPGRSSDQPKSSRSKDQGGVPMTTLPAGEQTHQAVLPQQPALESVGADTPGSRDETAHGHLVAVRGAVGKHGRGETDGLGTCTRRRHVENAATAAEEAETGSGDAPAHEHVYTGGVGAGRVFVLSKEGDPLMPCHPARARELLGKGRAVVARYVPFTIRLKDRTLADSEVDGVQLRIDPGSKGTGLHLTDEKKGINEQGVTGTVRRGLISFELQHRGDQIRGRMQQRAGYRRRRRSANCRYRAPRSDNRTRPGSWLPPSLRHRVDTVFSQAARLCRYAPVAEIHVESGGFDTHSMSTGRPLRGAGYTQGALAGTDARAYLHARWNSSCSYCGITGVPLNIEHVRPRSRGGSSRISNLVLACVPCNMRKGTLPVEVFLAASPDRLAKILQQGETPLHDAAAMNATRWPLREALSSLGRPVFGWPGGLTKRNRAAMGLDKSHTLDALSVGHLAHESGDAIVRFPSQVLVLKATGRGSYARTTPDRFGFPRLRRARTKQHFGYVTGDLVRTTVPTGKWAGTWTGRICVRARGQHSLSTSKGRINVSHRHLRLLQRGDGYDYSTRPEPPPSISRKTG

SEQ ID NO: 3026 - protein, 427 aa, Methanosarcina sp.
MLVFVINQNKKPLMPCKPSKARKLLQAGKAKVVRNTPFKIKLLFGSSGYTQPVIAGMDTGSKVMGCAAIANGKVLYQSEIYLRENVSKKMEQRKMYRRTRRGRKTRYRPARFDNRGNSRREGRLAPSIKSKLEAHFREKMFVESLLPVTGWKVELASFDIHKITNPEVSGVGYQEGDLKGFYNVKAYVLDRDGYTCQHCRGKSKDSRLHCHHIVFRSNHGSDAPENLITLCETCHKALHNGEFKLSGSKSKTKHATEIGIIKSQIRKSGWSFAETFGYETKYRREQVLKLIKTHYFDAVAICCRDDQNVEVEDSVFLKRNVSKGDYQQRTGKRSEKKIPTGKLFGLRKFDLVKTSKGIGFVKGKRSSGFFAISDLFGNKISDSVNVKKKCRRLSARSTTLVQMVQMTHSSPTCHFRQAGNVEEGVSC

SEQ ID NO: 3027 - protein, 517 aa, Leptospirillum sp.
MLPQSRALEAADADNREGQDETVGGKGAIPKPVANIPEGRRFERSALRPQGQCNVRFDGGFVQVFVLDKKKKPLMPCHPARARELLREGRAVVHRIAPFTIRLKDRIGGETQPIRVKLDPGSKTTGLAVVREEETDGEKTAHVLFQAEIHHRGSAIKKKLDQRRAFRRRRRSQLRYRTPRFDNRTRPDGWLPPSLRHRVDTTLAWVERLRRLVPVSELSQELVRFDMQKIENPEISGVEYQQGTLAGYEVREYLLEKWGRTCAYCGSENVPLEIDHIHPRSLGGSDRVSNLTLACRSCNLKKGNRPVGEFLSKTPERLSTILARAKAPLKDAAAVNTTRWALFQALKATGLPVETASGGRTKWNRTRLVLPKTHALDAACVGKVDRIEGWNRPCLSIKSTGRGSYRRTRLDAFGFPRGSLTRTKAHFGFQTGDRVRAIVTKGKKTGTYAGRVAVRSSGSFNIQTGSGVVQGISCKDCRLLQRADGYGYSIHPITEKGGAGEAISLPGMNAGVSRARG

SEQ ID NO: 3028 - protein, 438 aa, Methanosarcina sp.
MIFVLNKNKQPLSPCHSAVARKLLKTGKAVIHKKYPFTIRLKELKYSENKAEFRLKIDYGSRHTGLAILNGSKVIGLAQIHHKTSIKSNMDSRRAMRRTRRNRTTRYRKPRFNNRKRKEGWLPPSLQSRVDNIQNWVAKLQKLCPLTHISYENAKFDTQLMQNPEVSGVEYQQGELQGYEVREYLLEKWGRKCAYCGAENVPLEIEHIIPRARKGTDRVSNLTLACRTCNEAKGTMTAEKFGYPEIQKQARIPLRDATLVTATRWKVYNTLTEKGLEVECGTGARTKMNRIKLNLPKDHHFDAICVGASTPNKIIFKTNSVLHIKAKGRGSHCRTNLDKYGFPRGYLTRQKSFFGFQTGDIVKAIIPKGKYKGIFFGAVACRKTGYFDIKNKEGVRIGQGINHKYCNILSRADGYEYATEHLEVDGIPPTTEVIGILP

SEQ ID NO: 3029 - protein, 449 aa, Methanosarcina sp.
MKVFVKNQYNKPLMPTTPRKARILLKSGKAEVVQRLPFTIKLLYPTGNATQDITLGIDTGFLNIGFSAVSDKEELISGEVKLLGGMPGRNEERAMYRRNRRGRLWHRKPGFDVNTNREGWLAPSIKHKLDSHIRFINKITDILPITKIVIEVANFDIQKIKNPDIKGRQYQEGEQKGYENLRAYILHRDNYRCQNPDCKNKQAQPELHVHHIQYRINGGPDRPDNLITLCSKCHTPKNHKGFLLTWKQKVRGFKDATFMNTVKWKLVEILKENHAVDVTYGYLTKEKRQAMELEKTHANDAFCIANGMNQVRHNPYEIRQIRRNNRSLSTFHDAKYIDSRDKSLKTGTELYSGRTTRNKQLNTENLRKYRQQRITKGKLVIRKNHYPVQPMDLVNYNGNLYYVMGTHSYGKRVILKDQIKKSGISVNSLKVEIIKHGKGFCWVDTSIPC

SEQ ID NO: 3030 - protein, 430 aa, Methanosarcina sp.
MLVFVINQNKKPLMPCKPSKARKLLQAGKAKVVRNTPFTIKLLFGSSGYTQPVIAGMDTGSKVVGCAAIANEKVLYQSEIYLRENVSKKMDQRKMYRRTRRGRKTRYRPVRFDNRGNSRREGRLAPSIKSKLDSHFREKRFVDSLLPVTGWKVELASFDIHKITNPEVSGVGYQEGDLKGFYNVKAYVLDRDGYTCQHCKGKSKDSRLHCHHIVFRSNHGSDAPVNLITLCETCHKALHNGEFKLSGNKSKTKHATEIGILKSQIRKSGWSFAETFGYETKYRREQVLKLLKTHYFDAVAICCRDKQTVEPDDTVYFKKHVPAGDYQQTKGKRSEKNIPTGKLFGLRKFDLVITENGIGFIRGKRSSGYFSISDIFGNKISDSVNVKKKCRRLNARSTTLVQMVQMTHSSPPAISGKPEMSRKGSPAEVR

SEQ ID NO: 3031 - protein, 427 aa, Nostoc sp.
MSKVLVIDQRKRPLDPVHPAQARQLLRSKKAAIYRQFPFTLILKESRTGTPVLPLRLKIDPGAKVTGIALVNDSSALVVFVAELKHRGFAIRDALTSRRQLRRGRRARKTRYRQPRFLNRTRPEGWLAPSLQSRVDNIETWVKKLRQFAPIEAISQELVRFDMQLMRNPDIQGNEYMQGTLQGFETREFLLEKWNRQCAYCDVKDVPFQIEHIFPKARGGSNSITNLTLSCEKCNIKKGVKDIKGFLKKDPSRLEKSLKQAKRPLADAAAVNTTRFALLNVLKSTGLPVETGSGGLTKFNRSQQNIPKSHWADAAAVGKSTPELIVKGVKPLLIAANGHGSRQSCRTDKFGFPNRHVPRDKIHFGFQTGDIVRAVVTSGKKIGSYVGKVAIRSSGSFNISTKNGLVQGISHKFCLRIHAKDGYSYAY

SEQ ID NO: 3032 - protein, 552 aa, Streptomyces sp.
MTTFPAGEQTHQAVLPQQPALESVGADTPGSRDETAHGLPAIARGTVGGHGRGETGGRGTSARRRHAKSAATAAQAAENRSGDAPAHHPSYTGGVGASRVFVLAKDGRPLMPCHPARARELLGKGRAVVARQVPFTIRLRDRTLADSVVDGVQLRIDPGSKGTGLALTDEKQEADEQGTHVTVRRGLISIELQHRGDQIRMCMRRRAGYRRRRRSANCRYRAPRSNNRPRPAGWLPPSLRHRVDTTLSLATRLCRYAPVTEVHVERVAFDTHSMSSGRRLSGTEHGQGALAGTTVRAYLHTKWNSACAYCDATGVPLNIEHLSPRSRGGSDRVSNLVLACVPCNEAKGSTPVDTFLADRPDRLAKILEQARAPLRDAAAMNATRWRLTEALGTLGRPVHAWSGGLTKGNREAMGLAKTHTLDALSVGRLRHERGDAIVRHPGQVLVAKAAGRGSYARTTPDRFGFPRLHRARAKQHFGYVTGDLVRATVPSGKWAGTWTGRIAVRARGQHSLTTSGGRINVSHRNLRLLQRGDGYGYGSRPEPSRSTAGKSG

SEQ ID NO: 3033 - protein, 423 aa, Moorena sp.; identical to SEQ ID NO: 2845

SEQ ID NO: 3034 - protein, 419 aa, Lachnospira sp.
MVYVISQNGKPLMPCSNTIARLLLKQGKAKVKRREPFTIKLTYETTSYTQNLTLGVDTGSGTIGTAVSKNNGDIIYMSEVVVRNDIADKMKQRAKYRRNRRNRKTRYRKARWLNRANSIKNDRFSPTMQSKLHSHVKEIEYIKSILPITELVFETGQFDTHLMKNPSLASPKVKHWGYQKGANYGFENTKAMVLNRDSYTCQYCKGKHKDSRLEVHHIIYRSQGGSDEADNLITLCHTCHKALHNGKINPKLSGKTKGNLKYATQMNSIRKQLFKLYPGAIETFGYITKANRLRLGINKEHYYDACTIAAQGNSFTLKSNLYKKKCIPDGDFQKTKGIRSEQPIETKKICGFRKFDKVCYLGKEYFIKGRMSTGYAILMDIEGKKIDFSSMPKGYKTPKLNKCMRIAARTSQIIQTMAI

SEQ ID NO: 3035 - protein, 427 aa, Methanosarcina sp.
MLVFVINQNKKPLMPCKPSKARKLLQAGKAKVVRNTPFTIKLLFGSSGYTQPVIAGMDTGSKVVGCAAIANGKVLYQSEIYLRENVSKKMEQRKMYRRTRRGRKTRYRPARFDNRGNSRREGRLAPSIKSKLEAHFREKMFVESLLPVTEWKVELASFDIHKITNPEVSGIGYQEGDLKGFYNVKAYVLDRDGYTCQHCRGKSKDSRLHCHHIVFRSQKGTDAPENLITLCETCHKALHNGEFKLSGKKSKTKHATEIGILKSQIRKSGWSFAETFGYETKYRREQVLKLLKTHYFDAVAICCRDDQKVEVEDSVFLKRNVPAGDYQQRRGKRSEKKIPTGKLFGLRKFDLVKTSKGIGFVKGKRSSGFFAISDLFGNKISDSVNVKKKCRRLSARSTTLVQMVQMTHSSPTCHFRQAGTVEEGVSC

SEQ ID NO: 3036 - protein, 442 aa, unidentified
  REGION 1..442: note = Human gut metagenome
MSTSVFVLDKKHRPLMPCRPARARRLLRAGRARVVKRFPFVIRLVDRTVEQSEVQPVLIKLDPGSRETGAAVVRDDEKKRHHALAFFVIKHRGGAIRDALKARSAFRRRRRSQNFRCRSPRFLNRVKPKGWLPPSLRHRVETTLSFVRRMCRYLPVSGIAAELVKFDSQKLQTPEVSGIEYQQGTLFEYEVREYLLEKFGRKCVYCGAEGVPLNIDHVVPRAKGGSNRVSNLVLACVSCNQKKGARSLEDFLKGKPEVLARVRRELKTPLRDAAAVNATRWVLFNELKATGLPVETGSGALTKLNRHAFGVEKEHWLDALCVGRLNGAVTRKGLNVLEIRCMGRGSRQRTRLTKYGFPRGYLMRQKCVHGFATGDMVEANVPKGKKAGLWRGRVAVRVSGSFNIQTPKGVIQGVGWKHCRLISHNDGYGYAWLGHAPHSSPA

SEQ ID NO: 3037 - protein, 442 aa, unidentified
  REGION 1..442: note = Human gut metagenome
MSTTVFVLDKKHRPLMPCRPARARRLLRAGRARVVKRFPFVIRLVDRTVEQSEVQPVLIKLDPGSRETGAAVVRDDGKKRHHALAFFVIEHRGGAIRDALKARSAFRRRRRSQNLRCRSPRFLNRVKPKGWLPPSLRHRVETTLSFVRRMCRYLPVSGIATELVKFDSQKLQNPEVSGVEYQQGTLFEYEVREYLLEKFGRKCVYCGAEGVPLNIDHVVPRAKGGSNRVSNLVLACMSCNQKKGARSLEDFLKGKPKVLARVRRELKTPLRDAAAVNATRWVLFNELKATGLPVETGSGALTKLNRHAFGVEKEHWLDALCVGRLNGVVTRKGLNVLEIRCMGRGSRQRTRLTKYGFPRGYLMRQKCVHGFATGDMVEANVPKGKKAGLWRGRVAVRVSGSFNIQTPKGVIQGVGWKHCRLISHNDGYGYAWLGHAPHSSPA

SEQ ID NO: 3038 - protein, 480 aa, unidentified
  REGION 1..480: note = Human gut metagenome
LYTKPLDNIGEGSLPPSGEINLKGMTFMVYVKSIDGKALMPTSNAKARKLLKQKKAKVVSLRPFVVKLTYKTKTEYTQKLNLGVDSGYSNIGFSVIDAKQEYIAGEVKLLEGMKKRLLEKASYRRIRRSRLRYRKARWNNRVKSKKKGWLAPSLKHKLDTHIKFIDYLKNILPIEKITIEVANFDIQKMKDDLISGIDYQNGDMFGFWNVREFVLHRDGHKCQNRNCKHKDKKEQILKVHHIRYRSEGGSDRPENLITLCSKCHTPANHKKGKFLYDWCVNGKKVRGFKDATFMSMIRWYLVNELKSKHNNVSITYGYITKNHRIQNGIEKSHLNDAFAIAKGTNHARTKDRFLVIQDRLKNRSLEKFYDSKIIDIRTEKKVSGGDLNCGRSTRNKKLNTENLRKYRGVKISKGQRRIRKQKYFYQPNDLVKYDGKVYTVKGTQNEGKYIDLKEIKKVPKVELLIPYVFKKGLNWSYGLC

SEQ ID NO: 3039 - protein, 494 aa, unidentified
  REGION 1..494: note = Human gut metagenome
MTMVYVQNKDGKPLMPTTRYCYVRLLLKEKKARVVCTTPFTIQLNYDTPDITQDLILGIDPGRTNIGVAVVKEDGQCVFSAHLETRNKDIPLLMKKRAGFRRQHRTLDRRRKRQRRAKAAGTTVAEGSVERLLPGYEKPVVCHHIRNKEARFNNRCRPAGWLTPTANHLLQAHINLIAKAAKFLPITKVVVELNRFAFMAMDNPNIRRWEYQQGPLYGLGSVKDAVYAQQDGHCLFCKKPIDHYHHVVPRHKGGSETLANRCGLCEKHHALVHKDKAWAEKLVTRKGGMNKKYHALSVLNQIIPHLMEYLGSETPYDVYATDGKSTKGFRVAKNVPKEHYTDAYCIACSILDADTKVSAPAEPFKLKQFRRHDRQSCIRQMVDRKYLLDGKVVATNRHKSIEQKSDSLEEFREAYGDAAVSQLTVRPHSPQYKDMARIMPGAVMDFDGIVGVFKGSSGRNNGTPNYYNSTKGARVLTKRCALLAKNAGMVFIPA

SEQ ID NO: 3040 - protein, 448 aa, Moorena sp.
MSNVFVVDTYQRPLNPVHPGRARILLSEGKAAVFKRYPFTIILKIEVQEPAVQPLRIKLDPGSKTTGLAIVNDATGEVVFAAELSHRGQKIKAALDDRRTVRRSRRQRKTRYRKPRFNNRKNKKKGWLPPSLESRIANVLTWVNRMSRSCRITAISMELVRFDMQLMQNAEVSGVEYQQGTLAGYEIRHYLLEKWDRTCSYCGSKDMPLQIEHIQPRANGGTNRISNLCLACEACNTAKGTLDIAVFLKKKPEVLKRIQSQAKKPLKDAAAVNATRWALFERLKATGLPIECGSGGLTTFNRTTRAFQKTHWLDAANVGKSTPDVLIVKDIVPVLITATGHGSRQMCRPDRYGFPRTSAKGNKKVKGFQTGDIIKAIVTTGIKKGTYIGRVAVRSSGSFTIVTSTQTIQGISYRFCRMVHHSDGYSYTKGSALLPMHECRGIRAIEKR

SEQ ID NO: 3041 - protein, 555 aa, Streptomyces sp.
MTTFPVGEQTHQAVLPQQPALESVGADTPGSRDETAHGHPATGRDTGREHGRGETGGPGIPARRRHAKSAVPTAQAAETGSGDAPALDQSCRSYAGGTGACRVFVLSRDGQPLMPCHPARARELLSKARAVVVRQVPFVIRLKDRTLGESEVDGVQLRIDPGSKGTGVVLTDEKKEPHDRNPVVTVRRGLLSVELQHRGDQIRAGMRQRAGYRRRRRKANLRYRAPRSDNRARRSGWLPPSLRHRVDTTFSLADRLCHWAPVTEIHVESVAFDTHSQSVGRPLHGTEHQRGPLAGTTVREHLRATWNAACAYCGVSGVPLNVDHLRPRSRGGSHRISNLVLACVPCNKAKGSKPVETFLAHRPSRLAAVLSQVRAPLDDAAAMNATRWQLTAVLAALGRPVHAWSGRLTKANRLAMGLDKTHTLDALCIGPLDHAAGDHIVRFPHHALTAKATGRGSYARTTPNRYGFPRLLRPRAKQHHGYVTGDLVRAVVTAGKWAGTWTGRVSIRSSGQHSLATASGRFNCSHRNLRLLQRGDGYAYSSRRESAASVSQKNS

SEQ ID NO: 3042 - protein, 452 aa, unidentified
  REGION 1..452: note = uncultured beta proteobacterium
MPCSEKRARKLLESRRARVHKLFPFCIRLVDRLVADCVFQPLRLSLDPGSKTTGVAVCRVAKTVDVTTGEIQPTMHIQFLMELVHRGATIKKSLGARSAMRRRRRSANLRYRAPRFSNRPKPKGWLAPSLNHRVETTMTQVKRLCRLAPITHLAQELVRFDMQKMQNPEISGAEYQQGTLAGYEVREYLLEKFNRTCAYCDATEVPLQMEHIHPKAAGGTNRISNLTLACQACNQKKSAQDVKDFLAKDPKRLAKILKQAKAPLHDAAAVNTTRWTLFNALKQTNLPVKTGTGGQTKYNRSRLNIPKTHALDAACVGQVQAVQKTNAPTLRVTCSGRGSRCKTRLDKYGFPRTYLTNQKTAFGFKTGDMVIATVPKGVKKGTHKGRVAIRLSGRFNIQTGVAGAATVQGISHKHCRITQRADGYGYSHVAQTQKECGNKGCAVRTPRYPFPA

SEQ ID NO: 3043 - protein, 427 aa, Methanosarcina sp.
MLVFVINQNKKPLMPCKPSKARKLLQSGKAKVVRNTPFTIKLLFGSSGYTQPVIAGMDTGSKVVGCAAIANGKVLYQSEIYLRENVSKKMQQRKMYRRTRRGRKTRYRPARFDNRGNSTKGGRLAPSIRSKLESHFREKRFVESLLPVTEWKVELASFDIHKITNPEVSGIGYQEGDLKGFYNVKAYVLDRDGYTCQHCRGKSKDSRLHCHHIVFRSQKGTDAPENLITLCETCHKALHNGEFKLSGNKSKTKHATEIGILKSQIRKSGWSFAETFGYETKYRREQVLKLLKTHYFDAVAICCRDDQNVEVEDSVFLKRNVPAGDYQQRRGKRSEKKIPTGKLFGLRKFDLVKTENGIGFIRGKRSSGYFSISDIFGNKISDSVNVKKKCRRLSARSTTLVQMVQMTHSSPTCHFRQAGNVEEGVSC

SEQ ID NO: 3044 - protein, 551 aa, Streptomyces sp.
MTTFPAGEQTRRAVLPQQPALESVRADTLRSKDETAHGLPATARGTGGEHGRGETDGHRVRPRRRHAESAAMAAEEAENGSGDASTPPGYTGGVGASRVFVLAKDRRPLMPCHPARARELLNSGRAVVHRHAPFTIRLKDRTRAESEIDGVRLRIDPGSQGTGFALTDEKTETGKRGDAVLVRRGLMAAELRHRGEQIRHCMGQRAGYRRRRRSANLRHRAPRSDNRTRPEGWLAPSLRHRVDTTISLAHRFCRYAPVTEIHVESVAFDTHSMSAGKQLKWAEYRNGTLAGTDARAFLLAIRGRVCAYCGVTGVPLNIDHIHPSSRGGSSKISNLVLACVPCNQAKGSKPIDVFLADRPERLAEIRAQNRPPLRDAAVMNSTRRQLIEGLGALGPPVHAWQGLRTQRNRTAMGLDKTHTTDALAVGELDRENGGQIVRVPARVLVVKATGRGSYARTTPDRFGFPRLQRARTKEHFGYVTGDLVRATLPTGKWAGTWNGRISVRARGQHSLATPTGRINVSYRNLRLLQRGDGYAYGTRQEPVSSPSRKTG

SEQ ID NO: 3045 - protein, 426 aa, Parasutterella sp.
LRVFILNKRGKPLMPCSPAKARLLLKEKKAIVARRTPFTIQLTIATGEAKQPVSLGVDAGYKHVGLSASTEKAELYASEVELRQDVSDLLSARRALRQSRRSRNTRYRAPRFDNRIRTKRKGWLAPTVENRINVHLSRIETVLRLLPVTKITVETASFDTQLLKNPDIAGKEYQEGEQLGFWNVREYVLFRDGHVCQHCHGRSKDPVLNVHHLESRRTGGDSPGNLITLCETCHKALHRGEIKLKAKRGRSFRAETFMGIMRWGVLNRLKASHPKLEVHNTYGYRTKHARIANGIAKSHCADAFCIAGNFGAKRLGEFFQKQTRRNNRQIHKLSILKGGIRKRNQAPFEVKGFRLFDKVACQGEEGFIFGRRSTGYFDVRKLDGTCISAGISYKKLHLLEKRRTYLTEIRKEEALPPPPEGRGLRA

SEQ ID NO: 3046 - protein, 427 aa, Methanosarcina sp.
MLVFVINQNKNPLMPCKPSKARKLLQAGKAKVVRNTPFTIKLLFGSSGYTQPVIAGMDTGSKVVGCAAIANGKVLYQSEIYLRENVSKKMEQRKMYRRTRRGRKTRYRPSRFANRGNSRREGRLAPSIKSKLEAHFREKRFVESLLPVTEWKVELASFDIHKITNPEVSGIGYQEGDLKGFYNVKAYVLDRDGYTCQHCRGKSKDSRLHCHHIVFRSQKGTDAPENLITLCETCHKALHNGEFKLSGNKSKTKHATEIGILKSQIRKSGWSFAETFGYETKYRREQVLKLLKTHYFDAVAICCRDDQNVEVEDSIFLKRNVSKGDYQQRTGKRSEKKIPTGKLFGLRKFDLVKTSKGIGFVKGKRSSGFFAISDLFGNKISDSVNVKKKCRRLSARSTTLVQMVQMTHSSPTCHFRQAGTVEEGVSC

SEQ ID NO: 3047 - protein, 432 aa, Methanosarcina sp.
MIFVLNKNKQPLSLCHSAVARKLLKSGKAVIHKKYPFTIRLKELKTSENKAEFRLKIDYGSRHTGLAILNGSKVIGLAQIHHKTSIKSNMDSRRAMRRTRRNRTTRYRKPRFNNRKRKERWLSPSLQSRVDNIQNWVNRLQKLCPLTHISYENVKFDTQLMQNPEVSGVEYQQGELQGYEVREYLLEKWNRKCAYCGAENVPLEIEHIIPKARHGTSRVSNLTLACRTCNEAKGTMTAEEFGYSDIQKQARIPLKDAALVTATRWKVYNVLEKTGLEVECGTGARTKMNRIRLNLPKDHHFDAICIGASTPNEITFKTNQVLHIKAKGRGSHCRTNLDKYGFPRGYLARQKSFFGFQTGDIVKAIIPKGKYKGTHFGAVACRKKGSFVIKNKHGKLIAETSYKNCKMLSKADGYEYTIEPMEVDGIPLTLKL

SEQ ID NO: 3048 - protein, 499 aa, unidentified
  REGION 1..499: note = Human gut metagenome
MRYVYVLDQEGRPLMPTSRFRKVRRMLKAGQARAVSTLPFTIQLTYRPKTQERQAVVAGIDPGRTNIGLAAVREDGICLYQAHGTTRNKEIVNLMSDRLASRRASRRGERLARKRQAKRLHTTAKKLLDRILPGCREPLAVKDIINTEARFNNRLRPQGWLTPSATQLLRTHVNLLKKMQEILPVSDVVVELNRFAFLQLDQPGVRKKDIDFAHGALYGTGGLHAAVRELQQDRCLLCREGEIEHFHHIIPRSRRGSDTLANLAGLCERCHELVHKHAEAADRLQERKNGLEKRYGGTSVLNQIIPTLMQNLGECFPGHAFATTGWKTKEFREAHELEKDHAVDAYSIAGSILQPSVLDLAVEGYEILQFRRHSRANINHQTERTYLLDNKTVAKNRRKRMDQKTDSLQEWYEDAAARYGEKQADRLRSRLTVKKSTRYYNSKDRLLPGTIFSYEGKRYVLTGQLTGGAYYRAYGQGKKNFPAKKVRILCQNEGLVYAS

SEQ ID NO: 3049 - protein, 427 aa, Methanosarcina sp.
MLVFVINQNKKPLMPCKPSKARKLLQAGKAKVVRNTPFTIKLLFGSSGYTQPVIAGMDTGSKVVDCAAIANGKVLYQSEIYLRENVSKKMQQRKMYRRTRRDRKTRYRPARFDNRGNSRRDGRLAPSIKSKLESHFREKRFVESLLPVTGWKVELASFDIHKITNPEVSGVGYQEGDLKGFYNVKAYVLDRDSYTCQHCMGKSKDSRLHCHHIVFRSQKGSDAPENLITLCETCHKALHNGEFKLSGKKSKTKHATEIGILKSQIRKSGWSFAETFGYETKYRREQVLKLLKTHYFDAVAICCRDDQNVEIEDSVFLKRNVSKGDHQQRRGKRSEKKIPTGKLFGLRKFDQVKTENGIGFIRGKRSSGYFSISDIFGNKISDSVNVKKKCRRLNARSTTLVQMVQMTHSSPTCHFRQAGNVEEGVSC

SEQ ID NO: 3050 - protein, 346 aa, Arthrospira sp.; identical to SEQ ID NO: 2872

SEQ ID NO: 3051 - protein, 408 aa, unidentified
  REGION 1..408: note = Human gut metagenome
MVYVQDINGKPMMPTTRHGKVRRLLKSNKAVVVNLCPFTIKLMYVTSDYKQEIVLGVDAGTKHVGLSATTKSKELYSSEVILRNDIVDLLSTRRELRRSRRNRLRYRKPRFDNRIKSKRPGWVAPSVRYKIDAHIRVIDNVCSILPISRIVIEVAQFDTQKINNPNISGKEYQEGDQLGFWNVREYVLARDGHKCQHCKGKSKDPVLNVHHIESRKTGGDSPSNLITLCETCHKEYHKGNIDLKIKRGSSLRDAAVMGIMKWRLYEELRSKYNRVSMTFGYVTKYNRIKHGIEKSHVFDAFVISKNFDAIRLGYYYKVRLVRRHNRQIHKQKIPKGGIKRPNQSPFEVFGFRLFDRVMFENSYYFIFARRKTGSFNIRDIDGKNQRDITYKKLKLSRCKRFMVQKEMD

SEQ ID NO: 3052 - protein, 318 aa, unidentified
  REGION 1..318: note = Human gut metagenome
LVKKIQKFLPISDVVLEVNKFAFMRLDNPDIQKWQYQQGPLYQKGSLENAVSEMQEHHCLFCDKPIDHYHHVVLQSENGSNTIANIVGLCSEHHNLVHKDAAWQKKLAEEKVGLNKKYGALSVLNQIIPALTNKLSVLFPKHFFVTTGKSTHDYRESHSVSKDHWLDAYCIACSVLPSNVCDSNINNHVPYELKQFRRHDRRALHKENMSRVYTLNGKAVATNRHKAIKQTTDSLEEFRQSHPGDVCKLKVKEHHPAYRNLNRNHPGSVFFVGEQAHVMQSIVASKDGKATRYKDTNVNKIAAGQCRFVAKNEGIVFT

SEQ ID NO: 3053 - protein, 431 aa, unidentified
  REGION 1..431: note = Human gut metagenome
MPNKVYVINKHGRPLMPCSPAKARHLLDEGKAKIKKRTPFTIQLVYGSSGYTQEVILGVDAGSKTIGMSTSTKKEEVFAADVTPRNDVVDLMSTRREFRRARRNRKIRYRKPRFDNRVRSKHKGWLAPSEEVKIQEHITSIKRVCRILPVSKVVIETAEFDLQLLKAIEEGKPVPQGEDYQQGEMYGHYNVRQYVLWRDDYTCQCCGAHTTKKKEVRLHVHHLESRKVGGDAPDNQVTLCESCHEKLHKGLIAEKDFKKRKRRSTRDATFMGIMRKTLIQRLRAELTIPVAETRGYITKATREKLLVLPKSHTNDALAIAQGKRGFNVGYPPEIAQIDKIYTIRPVRHHNRQLHKATILKGGIRKSNQTEKYVFGYRLFDKVQFNGQDCFIWGRRTTGIFTIKTINGKMIKDGISFKKLKLVEKSTSYLIA

SEQ ID NO: 3054 - protein, 423 aa, Arthrospira sp.
MSNHIFVLDTNRKPLIPCKPGVARSLLKAGKASVFRRYPFTIILNKEVDANPEPLELKLDPGSKVTGIALKQGNHIIFAAELQHRGQQIKEALLSRRQLRRSRRNRKTRYRPARFLNRTRPEGWLAPSWQHRVDTLMTWVHRFRRLAPVGRITQELVRFDLQLMENPEISGVEYQQGELQGYEIREYLLFKWGRTCAYCGAQNVPLEVEQIQPRSKGGSDRVSNLTMACHSCNQAKGNGDIRDFLSGQPDVLSRLLRQAKSPLKDAAAVNSTRWALFKALKATGLPVTTGTGGQTKFNRLRLNLPKAHWLDAACVGPVESLEVLTSKPLLILAKGHGTRQMCGTNKYGFPNRHRSRRQIHKGFQTGDMVTATVTAGKKIGSYLGRVLCRASGSFDITTASVRVAGISHKYCQPIHRKDGYAYA

SEQ ID NO: 3055 - protein, 438 aa, Methanosarcina sp.
MIFVLNKNKQPLSPCHSAVARKLLKTGKAVIHKKYPFTIRLKELKTSINKAEFRLKIDYGSRHTGLAILNGSKVIGLAQIHHKTSIKSNMDSRRAMRRTRRNRTTRYRKPRFNNRKRKERWLPPSLQSRVDNIQNWINRLQKLCPLTHISYENAKFDTQLMQNPEVSGVEYQQGELQGYEVREYLLEKWNRKCAYCGAENVPLEIEHIIPKARHGTSRVSNLTLACRTCNEAKGTKTAEEFGYPDIQKQARIPLRDATLVTATRWKVYSVLVETGLEVECGTGARTKMNRIRLNLPKDHHFDAICVGASTPDKIIFKTNQVLHIKAKGRGSHCRTNLDKYGFPRGYLSRQKSFFGFQTGDIVKAVVPKGKYKGILFGAVACRKTGYFDIKNKEGVRIGQGINHKYCNILSRADGYEYATEHLEVDGIPLTTEVIGILP

SEQ ID NO: 3056 - protein, 359 aa, Methanosarcina sp.
LLTEKCCISPKSTLEKTFQKRWNNGRCTGEPEEVEKQGIDLQDLLTGEIQGEKGRLAPSIKSKLEAHFREKMFVESLLPVTEWKVELASFDIHKITNPEVSGIGYQEGDLKGFYNVKAYVLDRDGYTCQHCRGKSKDSRLHCHHIVFRSQKGTDAPENLITLCETCHKALHNGEFKLSGNKSKTKHATEIGILKSQIRKSGWSFAETFGYETKYRREQVLKLLKTHYFDAVAICCRDDQNVEVEDSVLLKRNVSRGDYQQRTGKRSEKKIPTGKLFGLRKFDLVKTSKGIGFVKGKRSSGFFAISDLFGNKISDSVNVKKKCRRLSARSTTLVQMVQMTHSSPTCHFRQAGTVEEGVSC

SEQ ID NO: 3057 - protein, 512 aa, unidentified
  REGION 1..512: note = Human gut metagenome
MSTVYVLNKDGKPLMPTTRCGHVRHLLKEQKARVVASKPFTIQLLYKTNDVVQPLYLGIDPGRTNIGVAVVKADGTAVFTAHLETRNKEIPKLMKKRKDSRRARRTNGRRCRRQRRAKANGTISKKCVKHDTAQNGSVSKRAKEIGVIKRHLPGCEKDVLCIGIKNKEAKFSNRTRPEGWLTPTANQLLQTHINLVKKIRKFLPISDAVLEINKFAFMQLDNPNIQKWQYQQGPLYQKANLEEAVSEMQEHHCLFCKKPIAHYHHVVPQSENGSDTIGNIVGLCTKHHDLVHKDTAWQKKLAKKKTGLNKKYGALSVLNQIIPALTKELSSLFPKHFFATNGKSTYDYRSAHGVSKDHWLDAYCIACSVLPNDVCDSGINNRVPYELKQFRRHDRRALNNENMSRVYTLNDNVVATNRHKATKQTTDSLEEFRQNHPDDVCKLKVKEHHPTYRNMNRNYPGSVFLIGKQVHVMQGIAGSKDGEATTYKDTNANSIAAGKCKFVAKNSGILFV

SEQ ID NO: 3058 - protein, 418 aa, Moorena sp.; identical to SEQ ID NO: 2704

SEQ ID NO: 3059 - protein, 310 aa, Moorena sp.; identical to SEQ ID NO: 2916

SEQ ID NO: 3060 - protein, 427 aa, Methanosarcina sp.
MFVFVLSKDGNPLMPTKPAKARILLKTGKAKVVRTTPFTIKLLFESSGYTQPVTAGIDTGSKAVGCAAIASGKVLYQSEISLRENVSKKMQQRQMYRRSRRSRKTRYRPARFDNRGNSKKEGRLDPSIRSKLEAHFREKRFVESLLPVTEWKVELASFDIHKITNPEVSGKGYQEGDLKGFYNVKAYVLDRDGYTCQHCRGKSKDSRLHCHHIVFRSNQGTDAPENLITLCETCHKALHKGEFELSERRSNTKHATEVGIVKSLIKKSGWSFEEVFGYETKFWREQVLGLEKTHYFDAVAICCGDKQTVEPDDTVYFKKHVPAGDYQQTKGKRSEKNIPTGKLFGLRKFDLVKTEKGIGIVWGKRSSGYFSISDIFGNKISDSVNVKKKCRRLSARSTTLVQTIQLTHSSPTCHFRQAGTVEEGVSC

SEQ ID NO: 3061 - protein, 451 aa, unidentified
  REGION 1..451: note = Human gut metagenome
VLHARNLSITLAKVSYGLYDAGLPQKIIQKERSTYMVYVLSQNGQPLMPTIRHGKVRRLLKEGKANVVKKCPFTIRLTYPSGDQTQEISLGIDSGSKYIGISATTQKKVLYEAEVELRNDISKLLAARRQNRRSRRSRKTRYRKPRFDNRKRKEGWLAPSVQQKVDCHLKVVEDVCKLLPVTRIIAEVASFDIQKIKDPKIHGTDYQQGDQLGFWNVREYVLFRDGHTCQCCKGKSKDKILNVHHIESRQTGGNAPNNLITLCETCHKGYHKGQVKLPKKIKRGMTFKDAAFMGIMRWAFYDRLKEIYLPLGIDVSLTYGYLTKNTRIAHQLPKTHYLDARCISGHPDAISDGIYYHQKKIRCHNRQLHKANTLKGGIRKRNQAEYLVHGFRLFDKVRYQGKDYFIFGRRKSGYFDIRDLNGEKVNKGSISYKKLRLVETRRSYLTERRLA

SEQ ID NO: 3062 - protein, 431 aa, unidentified
  REGION 1..431: note = Human gut metagenome
MDAWDIIVILNKRGKPLMPCSPAKARLLLKEKKAIVKRRTPFTIQLTIATGETNQPVSLGVDAGYKHVGLSASTEKAELYASEVELRQDVSDLLSARRALRQSRRNRKTRYRAPRFNNRLRTKRKGWLAPSVENRINAHLSRIEAVLRLLPVTKITVETASFDLQLLKNPDISGKEYQEGEQLGFWNVREYVLFRDGHVCQHCHGRSKDPVLNVHHLESRRTGGDSPGNLITLCETCHKALHRGEITLKTKRGQSFRAEAFMGIMRWEVLNRLKASHPELEVNNTYGYRTKHARIANGIAKSHCADAFCIAGNLGAERLGEFFFQKQTRRNNRQIHKLSILKGGIRKRNQAPFEVKGFRLFDKVSCKGEEGFIFGRRSSGFFDVRKLDGTCISAGISYKKLHLLEKRRTYLTEIRKEEALPPLPEGRGLRA

SEQ ID NO: 3063 - protein, 423 aa, Moorena sp.
MRVFVLNSNRQPLDPCKPARARILLSTGKAKVYRRYPFTIILTEEIQEPITHGSQFKIDPGAKTSGLAIVQGNRIVWGGELTHRGFQIRDALTSRRQLRCARRNRKTRYRKPRFLNRSRPEGWLAPSLMSRVHNILTWVKKLTRLCPIAGISQELVRFDTQKLQNPEISGIEYQQGTLYDSIFREYLLEKWNRKCAYCGTTGTQLEIEHIKPLSKGGSNRVSNLAIACHSCNQSKSAQEIEQFLSGKPDVLKRVLSQAKRPLTDAAAVNTTRWKLYHELKSIGLPVEVGSGGLTKFNRCRQNLPKTHWLDAANVGKVDTLIIEGYQPLLIAAKGHGTRKICRTNKYGFPIRYCSRTKIHKGFQTGDIVRAVVTKGKKIGTYVGRVATRKSGSFNISTKSGLVQGISHKYCQFIHRKDGYAYRH

SEQ ID NO: 3064 - protein, 408 aa, unidentified
  REGION 1..408: note = Human gut metagenome
MVYVQDINGKPLMSTTRHGKVRRLLKDKKAVVVNLCPFTIRLTYISDSYKQEIVLGVDAGTKHVGLSATTKSKELYSSEVILRNDIVDLLSTRRELRRTRRNRLRYRKPRFNNRVKNKRPGWIAPSVRYKVDAHIRVIDNVCSILPISRIVVEVAQFDTQKTNNPEISGKEYQEGDQLGFWNVREYVLARDGHKCQYCKGKSKDAILNVHHIESRKTGGDSPSNLITLCETCHKEYHKGNIDLKIRRGKSLRDAAVMGIMKWRLYEELKSKYDRVSMTFGYVTKYNRINHDIEKSHVSDAFVISKNFNAIRLGYYYKVRLVRRHNRQIHKQKIPKGGIKRLNQSPFEVFGFRLFDRVMFENSYYFIFGRRKTGSFNIRDIDGKNQKNVTYKKLKLSRCKRFMIQKEMN

SEQ ID NO: 3065 - protein, 449 aa, unidentified
  REGION 1..449: note = Ga0307928_10039402
METEMQQLGKRNTYTPLGASQAHRSVTMSLNREETLSEHGSKTFSNNLDVNQQSSKTERNLRVFVINLRQQSLMPCSSSRARILLKQKKAKVVSSQPFTIQLMSPTGETKQDLTLGIDAGSKYIGFSVVDNNKELLSGEFELRQDVSKKISDRAMYRRNKRNKLWHRKPRFMNRSKPKGWLAPSIQHKVDTHIRLVEEIKSLLPIHKTIIEVAKFDTQKLQDVDIEGAEYQQGKMEGWDNLRAFILCRDNYTCQICKKQKGIFDIHHIIQRKDNGSNRPDNLVCVHTDCHKKFHAGKIKHTFKKPKQFKETVIMNNIKKYVVDKLDCAYTYGYITKRHRLNLELEKTHYNDAFVIAGAVNQERTSILKSKQIRRNNRCLQLNRNGFKPSIRKQRYPIQPKSIVKWNNKNYVVNGTHNKGKSVVLYVGDKKKSVSVNHLEMVNYSRGILC

SEQ ID NO: 3066 - protein, 433 aa, Methanosarcina sp.
MLVFVINQNKKPLMPCKPSKARKLLQAGKAKVVRNTPFTIKLLFGSSGYTQPVIAGMDTGSKVVSCAAIANGKVLYQSEIYLRENVSKKMEQRKMYRRNRRGRKTRYRPARFDNRGNSTKGGRLAPSIRSKLEANFQEKRFVESLLPVTGWKVELASFDIHKITNPEVSGVGYQEGNLKGFYNVKAYVLDRDGYTCQHCMGKSKDSRLHCHHIVFRSQKGSDAPENLITLCETCHKALHNGEFKLSGKKSKTKHATEIGILKSQIRKSGWNFAETFGYETKYRREQVLKLLKTHYFDAVAICCRDDQKVEVEDSVFLKRNVPAGDYQQRRGKRSEKKMPTGKLFGLRKFDQVKTEKGIGFIRGKRSSGFFTLCDVFGNMITTSVNIKRNCRRLRAASTTLVQMVQMTHSSPPLKVRGILLSCPETENYKMQEI

SEQ ID NO: 3067 - protein, 456 aa, unidentified
  REGION 1..456: note = Terrestrial metagenome
MAVFVLNKHRQPLMPCSEKRARLLLERGRAVVHKRYPFTLRLKDRVGGDTQALRLGIDPGSKTTGLALMRDTADGQRHVLCLFDLNHRGFQIKKALAQRAAFRRRRRSANLRYRAPRFNNRTRPQGWLAPSLQHRVDTVMAWVRRLSTLAPITALSQELVCFDTQKLKNPELSSVEYQQGALLGYEVREYLLEKWGRECAYCGTGDTPLEVEHVVPRSRGGSNRVSNLVIACHDCNSAKSSQPLTDFFATDKGLRKRLKVNGHTADTRLDRVQRQLKQPLRDASAVNVTRWVLFNALKATGLPVSVSSGGRTKYNRLRLGIPKTHALDAACVGAFDTLHDWQVTTLTIKAMGRGSYQRTRLTKHGFPRGYLMRQKQVHGFQTGDMVKAIVPTGKTVGSYTGRVAVRKTGRFNIQTEQGAVQGISHKYCTVIQRGDGYGYHLTPSINLTGGAGQAVA

SEQ ID NO: 3068 - protein, 429 aa, Moorena sp.
MCNYVFVLDASHKPLNPCRPVTARKLLTAGKAAVYRRYPFTIILKKQVDGVAKPMSLKIDPGSKITGLAIVYGNQVVWSAEIEHRGSKIKSALDSRRAVRRSRRNRKCRYRKPRFNNRKRPEGWLAPSLQHRVATTMTWVLKLMKLTPIGGISQELVRFDTQKLQNPEISGIEYQQGELMGYEVREYLYQKWGRQCVYCGANSVKLEVEHIVPKSKGGTNRVNNLTLACHGCNQAKGNLDARDFLSGKPDVLKRILGKAKQPLLDAAAVNSTRWQLYQSLKETGLSVAVGTGGRTKYNRIKLGLPKGHWVDAACVGEVATLKIVTRQPLLIKAMGHGCRQVIQMDKYGFPRKGYKPKHPVKGWKTGDIVNVVAGKNAGLKGVRIKSVRAKGNFDLIGSFNGASNKVLSASQNYIQCVHRHDGYSYSFAE

SEQ ID NO: 3069 - protein, 416 aa, unidentified
  REGION 1..416: note = Human gut metagenome
MVYVLDKNGQPLMPTDRHRKVRLMLQSGQAKVIKRCPFTIQLNYDSGHQTQEISLGIDAGSKHIGVSTTTKIKVLYEVDVELRNDIVDLLSSRRELRRGRRNRKTRYRQAKFNNRRRGNGWLAPSIRQKIGTHLTVVENICKMLPISRIMVETASFDIQKIKNPDIQGAEYQQGDQLEFWNVREYVLFRDGHTCQCCKGKSKDKILNVHHIESRKTGGNAPNNLITLCETCHTGYHKGTVQLPKAIKRGMRFKDAAFMGIMRWAFYEALKQQYEPVGTPVHNTYGYITKHTRIEHNLPKEHYIDARCISGNPDAFPSGEYYYQKKVRCHNRQIHKLTILKGGIRKQNQVTYLVKGYRLFDKVSYQGKGYFVFGRRQSGFFDIRTLSGEKVNKGSLSCKKLKFIATRTYYLTERRAV

SEQ ID NO: 3070 - protein, 465 aa, unidentified
  REGION 1..465: note = Human gut metagenome
MSTCVCVLSNNGERLMPTIRLGKVRHLLKDGKAKIIKHHPFTIQLLYDSETNIQPIEICEDVGYNYIGISVKSQSHEYVSAQYDTLQDEKSCHDACRRMRRTRRNRLRYRQKRFDNRKRDKGWLAPSLKHKKELNVNVIKMYCEVVPITHATVEVGSFDTMLVKAIEEGKATPEGADYQKGPRYNLATLREAVFYRDNYTCQVCGREASEGAILHVHHMFYWKGRHDNSLSELITVCEKCHTPANHQKGGKLYGFGEDIKFANLSGAAFMNTVRWQIVNELYAAFGKPFVTFTYGAMTKEKRIALHLEKSHNNDAYAMGEFHPNCRCTFEHYEKVRRNNRILEKFYDSRYIDIRTGEIATGKELFNGRINRSHKKDSENLHKYRGKRIRKGYRALRRKKVALNPGDLVSLNGEILTVHGTHTKKNGSVNVEFKTPSKSGKKSTSLKKLKIIKTISPMRSAWDKVS

SEQ ID NO: 3071 - protein, 425 aa, Calothrix sp.
MQQNYVFVVDTNKQKLNPVTPKQARRLLEKGKAAIYRMYPFTLILKTAIDSPTIKTLTLKLDPGSKFTGIALLEGENVIWCAELEHRGYQIKDALLSRRQLRSNRRSRKTRYRKPRFDNRKCEENWLPPSLEHRILTTETWVKRLMRYASITELWIEKVKFDMQQMQDPEISGVEYQQGELQGYQVREYLLETWGRECTYCGKKDVPLQIEHIYPKSKGGSNRVSNLCLACEKCNQKKSNKPVEEFLKRKPDLLKKIQSKAKKPLLDAAAVNATRNKLVKVLSNLLPTKTATGAQTKFNRTRLNLDKQHWIDAACVGDVQNLKLLTKQPLKIKCNGHETRQICRTDKYGFPARYVPRFKFVKSFQTGDIVKAIVTSGKKIGEYIGRIATRSTGSFNISTRKKLVQGISYKYCKTIHKKDGYSYAF

SEQ ID NO: 3072 - protein, 415 aa, unidentified
  REGION 1..415: note = Human gut metagenome
MENKIEYCFVIDKNNKPLTPTKVNKGWYLIRKGRAKLKSKYPMVIQLEKEVKSDEDDESHIVCGIDDGSAHVGLAIVQKCPTKNKVVFKGTIEQRQDVKRLMDVRRGYRRYHRYHKRYRQARFNNRSSSKRTCRLAPSIKQKKDAILRVLYQLNKWVNIQEYYLEDVCIDIRAMTDDYKPYRWQYQKSNRLDENLRKATILRDGCRCQECGKSNCILEVHHIRARRYGGANTIGNLITLCKKCHDKTESREKDFEERYFNMIKSKPKRFDYAMHVMQGKTYLREKISELGILHLTNGGETANKRIEWDIVKSHSNDAICIADGIPDTCDIKEWIIKPMRRKSKAKTDNVLGIKHRDLVSYTYKSGETHTGYVTALYPEQLALNFQSKTKHCKKVNARKCRLLWKFNKIYWLEQCV

SEQ ID NO: 3073 - protein, 424 aa, Moorena sp.; identical to SEQ ID NO: 2969

SEQ ID NO: 3074 - protein, 423 aa, Moorena sp.
MSNHIFVLDTNRKPLTPCKPGMARSLLKAGKASVFRRYPFTIILNKEVDANPEPLELKLDPGSKVTGIALKQGNHIIFAAELQHRGQQIKEALLSRRQLRRSRRNRKTRYRPARFLNRTRPEGWLAPSLQHRVDTLMTWVHRFRRLAPVGRITQELVRFDLQLMENPEISGVEYQQGELQGYEIREYLLEKWGRTCAYCGAQNVLLEVEHIQPRSKGGSDRVSNLTMACHSCNQAKGNGDIRDFLSGQPDVLSRLLRQAKSPLKDAAAVNSTRWALFKALKATGLPVTTGTGGQTKFNRLRLNLPKAHWLDAACVGPVESLEVLTSKPLLILAKGHGTRQMCGTNKYGFPNRHRSRRQIHKGFQTGDMVTVLVTAGKKIGSYLGRVLCRASGSFDITTASVRVAGISHKYCQPIHSTDGYAYA

SEQ ID NO: 3075 - protein, 293 aa, unidentified
  REGION 1..293: note = Human gut metagenome
SVEVKIQEHITVIKRICRILPITLVRVETAEFDTQRLKAMLAGKPLPVGTDYQLGEMYDEYNARQYVLKRDHYTCQCCGAHTTTMKSVKLHVHHLESRKVGGNAPSNLITLCTTCHDNLHKRKVTLDGKKRGKTLRDAAFMGIMRKALMARLKEELSIPVQETYGYITKMRREQNDIKKSHVNDARCISKHPLAEPCSVCYRTKAIRHHNRQIHKANFSKGGYRKRSQMSYIVEGYRLWDKVLYKGQECFISGRRASGRFALKKLDGTSISKSVTFKKLRLLEPATNYLIERM

SEQ ID NO: 3076 - protein, 438 aa, Methanosarcina sp.
MIFVLNKNKQPLSPCHSAVARKLLKTGKAVIHKKYPFTIRLKELKNSENKAEFRLKIDYGSRHTGLAILNGSKVIGLAQIHHKTSIKSNMDSRRAMRRTRRNRTTRYRKPRFNNRKRKEGWLPPSLQSRVDNIQNWVAKLQKLCPLTHISYENTKFDTQLMQNPEISGVEYQQGELQGYEVREYLLEKWGRKCAYCGAENVPLEIEHIIPRARKGTDRVSNLTLACRTCNEAKGTMTAEEFGYPEIQKQARIPLRDATLVTATRWKVYNTLTEKGLEVECGTGARTKMNRIRLNLPKDHHFDAICVGASTPNKIIFKTNSVLHIKAKGRGSHCRTNLDKYGFPRGYLTRRKSFFGFQTGDIVKAVVPKGKYKGIHFGAVACRKTGYFDVKNKEGIRIVQGINHKYCNILSRADGYEYATEHLEVDGIPPTTEVIGILP

SEQ ID NO: 3077 - protein, 472 aa, unidentified
  REGION 1..472: note = Human gut metagenome
VVGNRLLSIKPLINIGEGVIYSSICTGLSLQTYQKRKEVPCMVYVLDINGQPLMPTTRHGKVRRLLNSHLAKVVKRCPFTIQLLYQSTKEIQPVSLGVDAGSKHIGMAATTEKKVVYQEELSARNDVVKLLSARRTLRRTRRNRKTRYRKPRFNNRVHSKHKGWLAPSVEVKIQEHITTIKRICQILPISEIQVETAEFDLQRLKAMEEGRTPPVGTDYQLGEQYDFYNTRQYVLHRDGYTCQCCGTHDNNIKLHVHHIESRQTGGDAPNNLIILCEHCHKALHEGKLELPKGKKRGESYRDATFMGVMRKTLLERLKKEIDVPVEGTYGYITKYWRERAGLEKSHIHDAVCISQYPYAKPLDIYYLTKTVRHHNRQIHKSNFSKGGIRKRNQAPYLVKGFRLFDKVLYQGKEYFIFGRRATGYFDIRTLDGTKVNKGSVSYKKLRIQDTAKAYLKEARAIPHMNKFTCILA

SEQ ID NO: 3078 - protein, 517 aa, Streptosporangium sp.
MATLNTRQQTHRRVLPQPAALESVGADTPQGRDETAHGHRHTAVPGVRHGRGETAADGTRPPRRHPGPASAGKGAGSQAHPAVFVLDRHGRPLQPTSPACARKLLRSGRAVVHRHTPFVIRLKDRAAADSTVQGVAVGIDPGSKHTGIAVFTEHDESRTGVYALQLDHRGGRIRDRLTARAARRRGRRSRNLRYRAPRFRNRTRPEGWLAPSLQHRVDTTMSWVGRLRRWAPVTAVHMERAAFDTHALSADRALEGVEYQRGTLAGYEVREYLLTTWGRRCAYCGATGVPLNIDHIHPRSRGGSGRIANLTLACVPCNQAKNATPIEEFLKTKPALLARILARAKAPLRDAAALNATRWALWRALEATGPPVATASGGRTKWNRSRTGAPKSHTLDALHVGWLETVTGWPSALLVVTATGRGAYARTTPDRYGFPRLTRPRSKRHHGFQTGDLVRANVPTGRKAGVHLGRVLVRSSGFFDITTRHGRVAGINHKHVRHLQRADGYGYTTQKEADRND

SEQ ID NO: 3079 - protein, 423 aa, Arthrospira sp.
MSNHIFVLDTNRKPLTPCKPGVARSLLKAGKASVFRRYPFTIILNKEVDANPEPLELKLDPGSKVTGIALKQGNHIIFAAELQHRGQQIKEALLSRRQLRRSRRNRKTRYRPARFLNRTRSKGWLAPSLQHRVDTLMTWVHRFRRLAPVGRITQELVRFDLQLMENPEISGVEYQQGELQGYEVREYLLEKWGRTCAYCGAQNVPLEVEHIQPRSKGGSDRVSNLTMACHSCNQAKGNGDIRDFLSGQPDVLSRLLRQAKSPLKDAAAVNSTRWALFKALKATGLPVTTGTGGQTKFNRLRLNLPKAHWLDAACVGPVESLEVLTSKPLLILAKGHGTRQMCGTNKYGFPNRHRSRRQIHKGFQTGDMVTATVTAGKKIGSYLGRVLCRASGSFDITTASVRVAGISHKYCQPIHRKDGYAYA

SEQ ID NO: 3080 - protein, 373 aa, Moorena sp.; identical to SEQ ID NO: 3006

SEQ ID NO: 3081 - protein, 423 aa, Moorena sp.; identical to SEQ ID NO: 3011

SEQ ID NO: 3082 - protein, 421 aa, unidentified
  REGION 1..421: note = Human gut metagenome
MQYVYVLNMHGEPLMPCSPRKARLLLKEGKARVVKRTPFAIKLLYGSAGYKQPVTLGVDAGSKHVGLSACTESRELYKEELTPRNDVVELLSARRQYRRSRRNRKTRYRASRFDNRVHSKHKGWLAPSVEVKIQEHITAIKRVCKILPVTLIRVETAEFDTQRLKAMLEGKPLPVGKDYQLGEMYDEYNVRQYVLKRDNYTCQCCDAHPTIKKPIRLHVHHLESRQTSGNAPNNLIVLCEHCHKALHEGKIKLKNGKKRGKPLRDAAFMGIMRNTLLARLRKELPIPVEQTYGYITKLLREKNKISKSHVNDARCIAGFPNAESCDTMFRTRALRHHNRQIHKAKTLKGGIRKKNQAPYLVKGFRLWDKVRYNGEECFISGRRSSGYFALKKYNGAVVSSGVSYKRLTLLEAATNYITERS

SEQ ID NO: 3083 - protein, 420 aa, Moorena sp.; identical to SEQ ID NO: 2959

SEQ ID NO: 3084 - protein, 413 aa, unidentified; identical to SEQ ID NO: 2636
  REGION 1..413: note = Human gut metagenome

SEQ ID NO: 3085 - protein, 509 aa, Streptomyces sp.
LATFRVGEKTDQAVLPQQLALELDPADNPGIRDETGAERRKAPGAEPGREETATASPGGSGVTPNPTVGEKPRERHPFVFVLDKHGHPLQPCTPARARKLLKKGRAVVHRHTPFVIRLKDRTVAESEVDGVELGIDPGSKHTGIAVFSAQAGQRRGRYALQLDHRGAAIRRKLEQRSAYRRGRRTRNLRYRAPRFLNRRRPDGWLAPSLQHRVVTTMSWVKRISRWAPARAVHVERIAFDTHAISAGNALEGAEYQQGTLHGYEAREYLLAKWGRSCAYCGAQNTPLNIDHIHPRSRGGTDRLSNLCVACIPCNQTKSNRPVEEFVKNKTKLAKLLAQAKAPLRDAAAVQSTRWALWRALDALLPTHTASGGRTKWNRTRCRLPKTHTLDALAVGKLESVTETVITVLAAGCTGRGTHTRTRADKHGFPRLHMPRQKTFYGFQTGDLVRAVVPTGKHAGTHTGRVAVRATGSFNITTRYGTAQGIRHKHLRLLQRADGYAYTTRPEQTD

SEQ ID NO: 3086 - protein, 427 aa, Methanosarcina sp.
MLVFVINQNKKPLMPCKPSKARKLLQVGKAKVVRNTPFTIKLLFGSSGYTQPVIAGMDTGSKVVGCAAIANGKVLYQSEIYLRENVSKKMEQRKMYRRTRRGRKTRYRPSRFDNRGNSRREGRLAPSIRSKLESHFREKRFVESLLPVTGWKVELASFDIHKITNPEVSGVGYQEGNLKGFYNVKAYVLDRDGYTCQHCMGKSKDSRLHCHHIVFRSQKGTDTPENLITLCETCHKALHNGEFKLSGKKSKTKHATEIGILKSQIRKSGWSFAETFGYETKYRREQVLKLLKTHYFDAVAICCRDDQKVEVEDSVFLKRNVSAGDYQQRRGKRSEKKIPTGKLFGLRKFDFVKTENGIGFIRGKRSSGYFSISDIFGNKISDSVNVKKKCRRLSARSTTLVQMVQMTHSSPTCHFRQAGNVEEGVSC

SEQ ID NO: 3087 - protein, 416 aa, unidentified
  REGION 1..416: note = Human gut metagenome
VSEITSYAFVLDVNGKPLAPTKEQKAWFLIRKKRAALVSKYPMVIQLKKEIPENKICKDEIRCGIDDGGLHVGIALVQKCKTKNKVVFKGTIEQRNDVKHLMEVRRGYRRYHRYYKRYRQARFDNRKSSKRKERIAPSILQKRQATMRVIHRLNKWINITNYWLEDVSVDIRALTDGYKPYRWQYQKSNRLDENIRKAAILRDGSKCMECGRANCRLEVHHIKPRRRNGSNTLDNLITLCESCHQKTEGQEELYMDRYFSLLKSSDHKNLNYAQHVMIGKKWLRKQLSNLGVLYLTNGGDTANKRIDWNVEKSHANDAVCITDLQPDTYDMKEWAIKPMRRKSKAKTDHVLGIRHRDLVEYTFKNGETHRGYVTALYPEQKAINFQSPTKHCKKVNARKCKLLWKYSKIYWFENAS

SEQ ID NO: 3088 - protein, 551 aa, Streptomyces sp.; identical to SEQ ID NO: 3044

SEQ ID NO: 3089 - protein, 420 aa, unidentified
  REGION 1..420: note = Human gut metagenome
MQYVYVLNKHGEPLMPCSPRKARLLLKQKKACVIKRTPFTVKLLHGSAGYKQPVTLGVDAGSKHIGISATTEKHELYREEATPRNDVVDLLSARRAFRRSRRNRKTRYRAPRFNNRVHSKHKGWLAPSVEVKIQEHITLIKHVFRILPVTLVRVETAEFDTQRLKAMLEGKPLPVGTDYQLGEMYDEYNVRQYVLKRDNYTCQCCGAHSTKTKGVKLHVHHIETRRTGGNAPNNLITLCKACHKALHAEKVTLDGKKRGKPLKDAAFMGIMRKTLMERLRKELKIPVQGTYGYITKYLREKNGIPKSHTNDARCISKNPLAIPCDTCYYTKAVRHHNRQLHKATILKGGIRKANQAPYIVKGYRLWDKVAYNGTECFITGRRTSGYFALKELDGTVVSNSISYKKLRLLEAATNYIIERK

SEQ ID NO: 3090 - protein, 523 aa, Ammonifex sp.
LNAGVPFAEPDVPGRHSQSRETPVQSRGLTRGATVCLRETHRRLVPGSQGSSQGEVSEMVFTVDKNGRPGHPTRRYDMIRKLRKRGKARIVGGGASGKPPVVIFLDREFDYSRTVGRKLVVALDPGYRYIGFAVCEPRGRELIVYCRGVLHTRIPEIKGLMGERRAHRRFRRYIARYKKRRLSARKGRVLTKYKVPRDVRSRDRSNATLRHGVETHLNLYRKLLRFFPFPAHQVQFVMEDNVFDVRAMTWGKVYGADYQKSPRVPESERKCVLCGSREGLHRHHLVPRKRGGTEVRENKVCLCKGCHEDVHAGRVYLPVGGVKQWRELGTMNAVVGVLREVPWINFVPAPDAVLKRRELGLEKGHAEDALAAAAAFCGSAELRTSWERCFTLVKFRRHSRARVHAQRDRLYKINGVIVARNRRKKTDQKEASFADISPLPREWQRNLKVYPGTKVLNPFRRDTPSVGGDVWVHVPTGKRFVVTSVTSKEYLYSPQLKEIVGKPYVRPDLCRRVIRNEGIVVWE

SEQ ID NO: 3091 - protein, 423 aa, Arthrospira sp.
MSNHIFVLDTNRKPLTPCKPGVARSLLKAGKASVFRRYPFTIILNKEVDANPEPLELKLDPGSKVTGIALKQGNHIIFAAELQHRGQQIKEALLSRRQLRRSRRNRKTRYRPARFLNRTRSKGWLAPSWQHRVDTLMTWVHRFRRLAPVGCIAQELVRFDLQLMENPEISGVEYQQGELQGYEVREYLLFKWDRTCAYCGAQNVPLEVEHIHPRSKGGSDRVSNLTMACHSCNQAKGNGDIRDFLSGQPDVLSRLLRQAKSPLKDAAAVNSTRWALFKALKATGLPVTTGTGGQTKFNRLRLNLPKAHWLDAACVGPVESLEVLTSKPLLILAKGHGTRQMCGTNKYGFPNRHRSRRQIHKGFQTGDMVTVLVTAGKKIGSYLGRVLCRASGSFDITTASVRVAGISHKYCQPIHRKDGYAYA

SEQ ID NO: 3092 - protein, 534 aa, Micromonospora sp.
VVDQPQKLLREGSTLYTGVKTHSGVLPQPRTMESASADTAPRSHETGCGRRKAAGVRHGRGETGVSRRHPELASAGTGAGREAHIHPVVFVVDRRHRPLQPCSPARARKLLAAGRAVVHRHTPFVIRLRDRDVECSQVAGVELGIDPGSKFSGFAVFRADDAVRTGLFALEVRHRGGQIRDKLTARAAFRRGRRSRNLRYRAPRFDNRTRPDGWLAPSLRHRVEGIMSWVGRLCRWAPVRQVHVERVAFDTQLMQDPDIAGVEYQHGTLHGYEVREYLLATWGRACAYCGAAGVPLNIDHIVPRSRGGSDRVSNLTLACVGCNQAKGATSIEIFLVDRPAVLARIRSLQKLPLPDAAAVSATRARLWHELHGTGLPVAVATGGRTKWNRHRTGAPKTHTLDALHVGRLTAVKVYPGWVLVAAASGRGSYARTRCDRYGFPRLRLPRSKSVRGFQTGDLVHAVVPSGKNRGRHTGRVAVRNTGSFNIRTRHALVQGVHHRHIRRLQRADGWAYTREEERRFLQALNGQVSTPRMS

SEQ ID NO: 3093 - protein, 378 aa, Moorena sp.; identical to SEQ ID NO: 2642

SEQ ID NO: 3094 - protein, 420 aa, Moorena sp.
MQNYVFVIDANFQPLNPIIPKKARRLLDKGKAAVFRMYPFTIILKTSINNPTISPCKIKIDPGSKVTGFALVQDGQVIWAMELEHRGGLIKKKLSSRSAVRRGRRNRNTRYRKPRFLNRKRPEGWLPPSLEHRILTTQTWVKRLIKFCPVNEIWVERVKFDAQKMQNPEISGIQYQQGELAGYEVREYLLEKWGRECTYCGKKSVPLQIEHIYPKSKGGSERVSNLCLACEKCNQRKGNKPIEDFLKKKPSLLQKIKTKALSPLKDAAAVNTTRNKLVKVLQKTKPVVTGTGAQTKYNRTKLGFPKEHWIDAACVGNIEALTLKTFQPLLVTCKGQGGRQKAALNKYGYPIRHNPLKPIKGWCSGDIAKNLLTGEFGRVNPRSKSNSFNYTVSGKKAISLHVKNLCRVHRKDGYTYGFCQ

SEQ ID NO: 3095 - protein, 493 aa, Streptosporangium sp.
MPGTGMEHGRGEIGSGGTRLHRRHPEGASVSEGANREVHPVVFVLDKHDQPLDPCHPARARRLLAAGRAVVARHTPFVIRLKDRTAADSTIQGVQVSIDPGSKHTGIAVFTEHGGDRSGGYALQLDHRGGQIRDKLTARSQYRRRRRSKNLRYRAPRFKNRTKPKGWLAPSLQHRVDTTMSWVGRLRSWAPVTAMHVEKVAFDTHALSAGKPLEGVDYQQGTLAGYEVREYLLEKWGRACAYCGAQNVPLNLDHLHARSRGGSDRISNLALACIPCNQTKNATPIQEFLTTRPALLTKILKQAKAPLGDAAAVNATRWALWRALEATGLAVATASGGRTKWNRSRTGAPKSHTLDALHVGDLETVTAWPSIVLVVKATGRGTYCRTRTDAYGFPRLRLPRIKQVKGFTTGDLVGANVPTGKKAGVHTGRVAVRSTGRFNITTRHGTVQGIHHRHVRLLQRADGYGYTTHPEARDRSVFSPGPEGSGFHAGGNR

SEQ ID NO: 3096 - protein, 423 aa, Moorena sp.; identical to SEQ ID NO: 2640

SEQ ID NO: 3097 - protein, 446 aa, Methanosarcina sp.
MVFVLNKNKQPLSPCHSAVARKLLKTGKVVIHKKYPFTIRLKELKESERKLKDSESKAEFRLKIDYGSRYTGLAILNGPTVVWLAQIHHKTNIKSNIDSRRAMRRTRRNRNTRYRKPKFNNRGRKEGWLPPSLQSRVDNIKNWVIKLQRLCSLTHISYENVKFDTQLMQNPEISGIEYQQGELQGYEIREYLLEKWDRKCAYCGAENISLEIEHIIPKSRGGTSRISNLTLACHACNQVKGDMTAEEFGYPDIQKQAKKPLKDAALVTATRWKVYNVLSETGLNIECGTGARTKMNRILLNLPKNHHFDAVCVGTSTPNDIIFRTNSVLHIKAKGRGSHCRTNLNKYGFPRGYLARQKSFFGFQTGDIVKAIVPKGKHQGTWIGAVACRKTGYFDIKNKEGVKAAQGINHKYCKMLSRVDGYEYASEHVGVDGIPLMTEVTSILPY

SEQ ID NO: 3098 - protein, 429 aa, Ktedonobacter sp.
MVFVLDRHKKPLMPCTPRRARLLLARKRAVVHRLSPFTIRLKDRSIQQSTLQAVVLKIDPGSKTTGLALARVEETGEGEVHHALHLAELSHRGEEICDRLRKRAGYRRRRRSTNLRYRPARFLNRRRAPGWLPPSLHSRIDNVLSWGRRYQRWVPLVRIAIERVKFDTQLLQHPEISGVEYQRGELAGWEVRAYLLEKFEHRCAYCGCGEVAFEVDHIQPRSRGGSNRVSNLALSCHACNAAKGERTAAEFGHREVAAQAKQPLRDAAAVNATRYALWDELRALGLPLTSWSGGRTRWNRARFSIPKTHALDALCVGELAGVAVGGQSTLAITATGRGRYSRTNVDEHGFPVGYLMRRKQVLDIKTGDRVRAVVPEGFAAQGTHTGRIAVRANKQFRMGKVQGIPARFCRVLQLADGYDYAVVATTLQG

SEQ ID NO: 3099 - protein, 442 aa, Anaerostipes sp.; identical to SEQ ID NO: 2903

SEQ ID NO: 3100 - protein, 451 aa, unidentified
  REGION 1..451: note = Human gut metagenome
VTTILKTCFAAFNLAKVVVLMDAWDIIVILNKRGKPLMPCSPAKARLLLKEKKAVVVRRTPFTIQLTIATGETKQPVSLGVDAGYEHVGLSASTEKAELYASEVELRQDVSDLLSARRALRQSRRNRKTRYRAPRFDNRIRTKRKGWLAPSVENRINAHLSRIETVLRLLPVTKITVETASFDMQLLKNPDIAEKEYQEGEQLGFWNVREYVLFRDGHVCQYCHGRSKDPVLNVHHLESRRTGGDSPGNLITLCETCHKALHRGEIKLRAKRGQSFRAETFMGIMRWEVLNRLKASHSKLEVNNTYGYLTKHARIKSGITKSHCSDAFCIAGNLGAKRLGEFLFQKQTRRNNRQIHKLSILKGGIRKRNQAPFEIKGFRLFDKVACKGEEGFIFGRRSSGSFDVRRLDGTRISAGISYKKLRLLQKRQTYLTEIRKEEALPPLPEGRDLRA

SEQ ID NO: 3101 - protein, 427 aa, Anabaena sp.; identical to SEQ ID NO: 2799

SEQ ID NO: 3102 - protein, 423 aa, Moorena sp.; identical to SEQ ID NO: 3063

SEQ ID NO: 3103 - protein, 554 aa, Streptomyces sp.
MTTFPVGEQTHLAVLPQQPALESVGADTPGSRDETAHGHPAAVRGTGREHERGETGGLGTGVRRRHAETVAPAAEAAENGSGDAPAHDQSHAGGVGAGRVFVLSKDGRPLMPCHPARARELLGKGRALIARQAPFAIRLKDRTLAESEVDGLCLRIDPGSRGTGLALTDEKSQIDARGQSFTVRRGLVSVELRHRGEQIRLCMRQRAGYRRRRRSANHRYRAPRQDNRSRPAGWLPPSLRHRVDTTCALASRLCRYAPVTEVHVESAAFDVHAMSAGRPLSDVEYQRGTLAGIEARSYLRSRWENACAYCDATGVPLNIEHLTPRSRGGSNRITNLVLACVPCNRAKGSMPVEGFLADRPDRLAKILRQARAPLGDAAAMNATRRQLLESLGILGRPLNAWSGAQTQWNRHATGLGKTHTVDALCVGGMDHERGDAIVRIPARVLVVSATGRGSYARTTPDRFGFPRLRRARVKRHFGFASGDLVRAVVPAGKWAGVWTGRVSVRATGRHSLTVREGRIDVSHRNLRLLQRADGYGYAFRSEGAREHLGKPVEP

SEQ ID NO: 3104 - protein, 406 aa, unidentified
  REGION 1..406: note = Human gut metagenome
MVYVQDINGKPMMPTTRHGKVRRLLKDKKAVVVNLCPFTIKLIYVTSDYKQEIVLGVDAGTKHVGLSATTKSKELYASEVTLRNDIVDLLSTRRELRKTRRNRLRHRKPRFNNRIKSKRPGWIAPSVQHKVDAHIRVIDNVFSILPVSRIVIEVAQFDTQKIKNPEIFGKEYQEGDQLGFWNIREYVLTRDGHKCQHCKGKSKDPVLNVHHLESRKTGGDSPSNLITLCETCHKEYHKGNIDLKIRRGKSLRDAAVMGIMKWRLYEELKSRYDRVFMTFGYITKHNRIKYGIEKSHTSDAFVISMNINAKRIERQYLKRLIRRHNRQIHKMKILKGGKKKNNQAPFEVFGFRLFDKVLYNNKIFFVYGRRKSGNFNIRDFNGENPKDVSHKKFKLIRGKRHPIILK

SEQ ID NO: 3105 - protein, 429 aa, Arthrospira sp.
MPNYQNYVFVVDTLGQPLSPTHRARARKLLKQGLAAVFRTYPFTIILKKTVENPVNEPLRLKLDPGASVTGIALVNQSRDTVIWGAELTHTGDRIRAKLTAHRVVRRHRRCRKTRYRQARFNNRKRADGWLAPSLKHRVETTLTWVNRLISSCPITDISMELVRFDTQKLQNPEISGVEYQQGVLLGYELREYLLTKWQHQCAYCGGQNIPLEIEHIQPKSQGGSDRVSNLAIACHKCHQKKGSQALEQFLEKKPEILKRLLVQAKAPLKNAAAVNSTRWALFNSLKLTGLPIEIGTGGLTKYNRTVQGLPKTHWLDDADCVGKSTPTRLKIKTHQPLLITCFGRGGRQKAAPNKRLPIRHNPLKPIKGWLTGDIAKHKTHGIGRITLRSRGSFVLTKPDKTQFSVKPIDLKPVFRRDGYLYKFSRVFR

SEQ ID NO: 3106 - protein, 437 aa, Calothrix sp.
MSKLTLPIEALTMQQNYAFLIDTNKQQLNPVTPKQARRLLEKGKAAVYRMYPFTLILKTAIDTPNIKPLTLKLDPGSKFTGIALLDGENVVWGAELEHRGYQIKDALLSRRQLRSSRRSRKARYREPRFDNRKRKENWLPPSLEHRILTTETWVKRLMRYAPITELWIEKVKFDMALMQNPDRRGVEYQQGELKGYQVREYLLEKWGRECTYCGKKDTPLQIEHIHPKSKGGSNRVSNLCLACEKCNQKKGNKLVEDFLKKKPDLLKKIKFQAKKPLKDAAAVNATRNKLAQVLSNLLPTKTATGAQTKYNRTRLNLPKQHWIDAACVGDVSNIKLFTNQPLKIKCSGHGTRQMCRTDKYGFPARYVPRFKFVKGFQTGDIVKAVVTTGKKVGEYIGRIATRSTGSFNISTRKKLVQGISYKYCKTIHKKDGYSYVF

SEQ ID NO: 3107 - protein, 554 aa, Streptomyces sp.
MATFPVGEQTHQAVLPQQPALESARADTPGSRDETARGHSATARGAGREHGRGETDGRDTPARRRHAERAVTAAPTAETGSGDAPPHEPEPSYAGGVGTSRVLVLSRDGHPLMPCHPARARELLGRGRAVVARQVPFVIRLKDRTRAESEVDGVQLRIDPGSKGTGLVLTDEKKETDGRGAVVTVRRGLFSVELWHRGEQIRGYVRQRAAYRRRRRSANLRYRAPRSRNRTRPPGWLPPSLRHRVDTTFSLAGRLCRYAPVTDLHLERVAFDTHSMTAGTLLRTAERQQGALAGTSTRAQLRGRWNSSCAYCGASNVPLNIEHLRPRSRGGSDRISNLVLACAPCNRAKASKPVDVFLTDRPELLARILQQARAPLSDAAAMNATCWELTDRLAALGRPLHAWSGALTRRNRHAMGLHKTHTLDALSVGRLDHESGDRIVRFTGRALIAKSTGRGSYARTTPDRYGFPRLLRPRRKQHFGYVTGDLVRAVVPSGKWAGTWTGRVSVRARGQHSLTTPEGRISVSFRNLRLLQRGDGYAYSSRSEPGRSSSRKKG

SEQ ID NO: 3108 - protein, 557 aa, unidentified
  REGION 1..557: note = Human gut metagenome
MIYNLGSTRERGFMKQKKQKVMVYILNKKGKPLMPTTRCGHVRKLLDSKKAVVVNSNPFTIRLKYDTPNGVQDVFAGIDSGRENIGSGVSNEDGDCLYLGELRTSNKSIKMKMTERVGFRRERRKHDRQNKQRKARKDHTEIQNGKDDICRATISCKSVQISYPTAEESVTHKIIRGKEGKFANRHRDGDWITPSARQLVQMHMNDLKSICKILPISHVTLERVAFDFQKLENENIKAWEYGKGKLYGYDSPEEYIHDVQDGKCLVCGKPHIDYLHHIIPRSKGGSDKVSNIAGLCYDCHYGPIGVHNCQDTQDRLPELKNEVNKQYKVSLLNSVMPVLIEEIDKFCKANSIMFSICEGHDTAKVRDMYDLQKDHCLDGFAISLVGRNVKSVDVMPDRIHQKQRYKKKSKNIIQKRNYREYYDDKKLVAINRHKGTDQKADSLEEYMNTYAETHTADECKMHFESLTVKPARRTYTFHKEGRICPLHIGDKVRYEKKNKIKGNTKVDTFICEGIYFSKDENKAKVEHNKTKSKKMKFCRAIESGCIPYIDYIKLALI

SEQ ID NO: 3109 - protein, 420 aa, Moorena sp.; identical to SEQ ID NO: 3094

SEQ ID NO: 3110 - protein, 589 aa, Streptomyces sp.; identical to SEQ ID NO: 3025

SEQ ID NO: 3111 - protein, 443 aa, Nocardiopsis sp.
VHTVHPSVFVLDKHHVPLQPCTSARARKLLAKGRAVVHRLTPFTIRLKDRTVTESEVDGVEVGIDPGSKHTGIAMFTTRAGERRGRFSLQLDHRGAQIKKKMGQRASYRRRRRSTNLRYRAPQFLNRTRPQGWLPPSLQHRVDTTVAWVDRLALWAPVRAVHVERVAFDTHTLSAGKLLEGAEYQHGTLHGFEVREYLLAKFGRTCVYCGATDTPLNIDHVRPRSRGGSDRVSNLVLACIPCNQAKDNQPVEEFLAGKPKILASVLAQVKAPLGDAAAVNSTRWALWRALDQRLPTHVGSGGRTKWNRSRSQLPKSHTLDALAVGKVDTITHTVDTILVAACAGHGSYARTRPDKYGFARLRLPRTKRFFSFATGDLARAVVSQGKKKGTHTGRVAVRATGKFNITTAQGTVQGINHRHVRLLQRADGYAYTIRKEQGVSSRP

SEQ ID NO: 3112 - protein, 452 aa, unidentified; identical to SEQ ID NO: 3042
  REGION 1..452: note = uncultured beta proteobacterium

SEQ ID NO: 3113 - protein, 425 aa, Nodularia sp.
MSNFVLVLDTNKKPLTPIHPGDARFLLNQQKAAVFRRFPFTIILKEPKSEVPTQPIELKIDPGSKTTGFALVQNNKVIWGMELQHRGLAIKESLETRKGVRRGRRSRHTRYRQARFLNRTKPQGWLAPSLSHRVLTINTWVKRLCNFAPITDIVEELARFDLQQLENPEISGFEYQQGELQGYEVREYLLNKWNRKCAYCTAENVPLQVEHIKPKAKGGTNRISNLCLACEKCNIKKGTQDIEKFLAKKPELLKQILSQAKRPLKDASAVNSTRWALFNKLKETGLPITTGSGGLTKFNRTRLGLPKTHWIDAACVGKVETLKILTTKILTVKSTGHSCRRFCRINKFGFPCTEPKKIFTHVSTGDFVKATLHKDRKNITSGKYVSRVKTPTKNGCEIVINGFRVEFSTMKDITKVHCSDGYSYV

SEQ ID NO: 3114 - protein, 519 aa, Nocardiopsis sp.
MATFHAGEKTHQAVLPQRPALESVSADTRRISDETGRGHRTTGAVPGVEHVRGETTTASPGEGGVTPEPARAGERGREVHIRANDPYVFVLDKKHRPLQPCPPARARKLLAKGRAVVHRYTPFTIRLKDRLLEESEVDGVEVGIDPGSKYTGIAVFTARAGERRGRHAIQLDHRGAAVKKKLQQRSAYRRGRRSRNLRYRAPRFDNRARSKGWLAPSLQHRVDTTVSWTDRLCRWAPVTAVHVELVAFDTHALSAGRPLEGAEYHKGTLHGYEVREYVLAKFGRACAYCGITSVPLNIDHVHPRSRGGSDRVSNLALACVPCNQAKADRPVEDFAPQAAARVLGQAKAPLRDAAAVQSTRWALWRALDTRLPTHVGTGGRTKWNRTRNDIPKSHTLDALCVGKLEAITQTVSTVLVAACSGRGSYARTRTDRYGFPRLLLPRVKGFFGFTTGDLVRAVVPKGKRAGTHTGRVAVRASGNFNITTAHGTVQGIGHRHVRLLQRADGYAYTLRKAEGVPPG

SEQ ID NO: 3115 - protein, 417 aa, unidentified
  REGION 1..417: note = Human gut metagenome
MPCSPAKARLLLKERKAIVKRRTPFTIQLTIATGEAKQPVTLGVDSGYKHIGLSATTEKVELYASEVELRQDITDLLSARLALRRSRRSRKTRYRVPRFDNRVASKRKGWLAPSVENRITAHMSRVEAVMRVLPVTAITVETAAFDTQLLKNPDITGAAYQQGEQLRFWNVREYVLFRDGHVCQHCRGKSKDPILNVHHIESRRTGGDAPNNLITLCETCHKAFHRGEIKLKVRRGKSFKAETFMGIMRRTLFERLKKAHPELNVRNTYGYLTKHKRISYGIAKSHCADAYCIADNLGAKRLEGFFFQKQTRKHNQQIHKLLILKGGLKKKNQAPYEVKGFRLFDKVICKGEEAFIFGRRTSGSFDVRRLDGTRISAGINYKKLRLLEPRTTYLTEFRKEAALPPLHKCRGVCAEFL

SEQ ID NO: 3116 - protein, 466 aa, unidentified; identical to SEQ ID NO: 2809
  REGION 1..466: note = Human gut metagenome

SEQ ID NO: 3117 - protein, 284 aa, Moorena sp.
LGASAVALIEVISQELVRFDMQLMRNPDIQGKEYQQGTLAGYETREYLLEKWNRQCAYCGTKDVKLQIEHIHPRSKGGSNSITNLTLSCEKCNTKKGTKDIREFLKKDPSKLENILKQAKKPLVGAAAVNTTRFALLEVLKATGLSVETGSGGLTKFNRTQQGLDKTHWLDAACVGKSTPILNVKNVKPLLITANGHGTRQLCRTDKYGFPSRHCSRAKFHFGFQTGYVVKATVTSGKKVGQYVGRIATRATGSFNVATKTELIQGVNHTYCKHIHKKDGYSYA

SEQ ID NO: 3118 - protein, 423 aa, unidentified
  REGION 1..423: note = Human gut metagenome
VLNKRGKPLMPCSPAKARLLLKEKKAVVVRRTPFTLQLTIATGEAKQAVSLGVDAGYKHVGLSASTKKAELYASEVELRQDITDLLSARRALRRARRNRKTRYRAPRFDNRIRTKRKSWLAPSVENRINAHLSRIEAVLRLLPVTKITVETASFDTQLLKNPDIAGKEYQEGEQLGFWNVREYVLFRDGHVCQHCHGRSKDPVLNVHHLESRRTGGDSPGNLITLCETCHKALHRSEITLKAKRGQSFRAESFMGIMRWEVLNRLKTSHSELEVHNTYGYRTKHARIANGIDKSHCADAFCIAGNLGAQRLGEFFFQKQTRRNNRQIHKLSILKHGLRKRNQAPFEIKGFRLFDKVACKGEEGFIFGRRSSGFFDVRKLDGTRISAGISYKKLHLLEKRRTYLTEIRKEEALPPLPEGRGLRA

SEQ ID NO: 3119 - protein, 413 aa, unidentified
  REGION 1..413: note = Human gut metagenome
MTSYAFVLDANGKQLAPAKEQKAWFLIRKKRAALVSKYPMVIQLKKEIPENEICKDEIRCGIDDGGLHVGIALVQKCKTKNKVVFKGTIEQRNDVKHLMEVRRSYRHYHRYHKRYRPARFDNRKSSKRKKRIAPSILQKRQAIIRVIHWLNKWINITNYWLEDVSIDIRALTDGYKPYRWQYQKSNRLDENIRKAAILRDGGKCMECGKLNCRLEVHHIKPRRRNGSDTLDNLITLCKSCHQKTEGQEELYMDRYFSLLKSSDHKNLNYAQHVMIGKEWLRKQLSSLGVLYLTNGGDTANKRIDWNIEKSHANDAVCITNLQPDTYDMKEWTVKPMRRQSKAKTDNVLGIKHRDLVEYTLKNGETHRGYVTALYPEQKAINFQSPTKHCKKVNARKCKLRWKYSKIYWFENAS

SEQ ID NO: 3120 - protein, 431 aa, Calothrix sp.
MEGLMSKVFLIDTNKKPLNPIHPAQARQLLKNKKAAIFRRFPFTIILKQAKSDIEIQPLRIKIDPGAKNTGFALVNDATGEVIFAAELQHRGFQIRDALTSRRQLRRGRRNRKTRYRAPRFNNRKRNEGWIPPSLQSRVDNILTWVKRLQKLALIDSISQELVKFDMQIMQNPHIQGKEYQQGTLAGYETREYLLEKWDRQCAYCGIKDVPLQVEHINPRSKGGSNSILNLTLSCKKCNLKKGTQDIKDFLKKEPKKLESILKQAKKPLESAAAVNTTRFTLLNALKATNLPVETGSGGLTKFNRSQQGLDKTHWIDAACVGKSTPILNIKGIKPLLIAAKGHGTRQMCRTDKYGFPTRYVPRIKFVHGFQTGDIVKAVVKTGKKVGIYIGRIATRSTGSFNISTKTGLVQGISHKYCKTVHKKDAYSYSN

SEQ ID NO: 3121 - protein, 425 aa, Calothrix sp.
MQQNYVFLIDTNKQPLNLVTPKQARRLLEKGKAAVFRQYPFILILKTAIDNPTIRPLTLKLDPGSKVTGIVILSGENVIWCAELEHRGYQIKDALFSRRQLRSSRRNRKNWYRKPRFNNRTRSEDWLPPSLEHRILTTQTWVKRLMRYAPITELCIEKVKFDMQQMENPEVSAIEYQQGELQGYQVREYLLEKWSRECTYCGKKDVPLQIEHIYPKSKGGSNRVSNLCLACEKCNKKKGNKLVEEFLKKKPDLLKKIKSKAKKPLLDAAAVNATRNKLVKVLYNLLPTKTATGAQTKFNRTRLNLDKQHWIDAACVGDVDNLKLLTNQPLKIKCNGHGTRQMCRTDKYGFPTRYVPKIKFVKGFQTGDIVKAVIKTGKKVGEYVGRIATRSTGSFNISTREKLVQGISYKYCKTIHKKDGYSYAF

SEQ ID NO: 3122 - protein, 378 aa, Moorena sp.; identical to SEQ ID NO: 2642

SEQ ID NO: 3123 - protein, 412 aa, unidentified
  REGION 1..412: note = metagenome
VTTILKTCFAASNLAKIVVLMDAWDIIVILNKRGKPLMPCSPAKARLLLKEKKAIVVRRTPFTIQLTIATGESKQPVTLGVDAGYKHVGLSASTEKAELYASEVELRQDVSDLLSARRALRQSRRNRKTRYRAPRFDNRIRTKRKGWLAPSVENRINAHLSRIEAVLRLLPVTKITVETASFDMQLLKNPDIAGKEYQEGEQLGFWNVREYVLFRDGHVCQHCHGRSKDPVLNVHHLESRRTGGDSPGNLITLCETCHKALHRGEITLKAKRGQSFRAEAFMGIMRWEVHNRLRALHPGIEVSNTYGYRTKHARIANGIAKSHCADAFCIAGNLGAERLCEFFFQKQTRRNNRQIHKLSILKGGIRKRNQAPFEVKGFRLFDKVACQGEEGFIFGRRSSGFFDVRKLDGTRI

SEQ ID NO: 3124 - protein, 427 aa, Nostoc sp.
MSKVLVIDQRKRPLDPVHPAQARQLLRSKKAAIYRQFPFTLILKESRTGTPVLPLRLKIDPGAKVTGIGLVNDSSALVVFVAELKHRGFAIRDALTSRRQLRRGRRARKTRYRQPRFLNRTRPEGWLAPSLQSRVDNIETWVKKLRQFAPIEAISQELVRFDMQLMRNPDIQGNEYMQGTLQGFETREFLLEKWNRQCAYCDVKDVPFQIEHIFPKARGGSNSITNLTLSCEKCNIKKGVKDIKDFLKKDPSRLEKILKQAKRPLADAAAVNTTRFALLNVLKSTGLPVETGSGGLTKFNRSQQNIPKSHWADAAAVGKSTPELIVKGVKPLLIAANGHGSRQSCRTDKFGFPNRHVPRDKIHFGFQTGDIVRAVVTSGKKIGSYVGKVAIRSSGSFNISTKNGLVQGISHKFCLRIHAKDGYSYAY

SEQ ID NO: 3125 - protein, 413 aa, unidentified; identical to SEQ ID NO: 2636
  REGION 1..413: note = Human gut metagenome

SEQ ID NO: 3126 - protein, 310 aa, Moorena sp.; identical to SEQ ID NO: 2916

SEQ ID NO: 3127 - protein, 367 aa, unidentified
  REGION 1..367: note = Human gut metagenome
YKHVGLSASTEKAELYASEVELRQDITDLLSARRALRQSRRNRKTRYRAPRFDNRIRTKRKGWLAPSVENRINAHLSRIEAVLRLLPITKITVETASFDMQRLKNPDISGKEYQEGEQLGFWNVREYVLFRDGHVCRHCHGRSKDPVLNVHHLESRRTGSDSPDNLITLCETCHKALHRGEITLKAKRGQSFRAQAFMGIMRREVLNRLKASYPELKVHETYGYLTKHARIANGIVKSHGADAFCIAGNLGAERLGEFFFQKQTRRNNRQIHKLSILKGGIRKRNQAPFEAKGFRLFDKVACQGEEGFIFGRRSSGSFDVRKLDGTRISAGISCKKLRLLEKRRTYLTEIRKEEALPPLPEGRGLRA

SEQ ID NO: 3128 - protein, 423 aa, Arthrospira sp.
MSNHVFVLDTNRKPLRPCKPGVARSLLKAGKASVFRRYPFTIILNKEVDANPEPLELKLDPGSKVTGIALKQGNHIIFAAELQHRGQQIKEALLSRRQLRRSRRNRKTRYRPARFLNRTRSKGWLAPSLQHRVDTLMTWVHRFRRLAPVGRIAQELVRFDLQLMENPEISGVEYQQGELQGYEVREYLLFKWDRTCAYCGAQNVPLEVEQIQPRSKGGSDRVSNLTMACHSCNQAKGNGDIRDFLSGQPDVLSRLLRQAKSPLKDAAAVNSTRWALFKALKATGLPVTTGTGGQTKFNRLRLNLPKAHWLDAACVGPVESLEVLTSKPLLILAKGHGTRQMCGTNKYGFPNRHRSRRQIHKGFQTGDMVTALVTAGKKIGSYLGRVLCRASGSFDITTASVRVAGISHKYCQPIHSTDGYAYA

SEQ ID NO: 3129 - protein, 589 aa, Streptomyces sp.; identical to SEQ ID NO: 3025

SEQ ID NO: 3130 - protein, 509 aa, Streptomyces sp.; identical to SEQ ID NO: 2802

SEQ ID NO: 3131 - protein, 425 aa, Moorena sp.; identical to SEQ ID NO: 3008

SEQ ID NO: 3132 - protein, 547 aa, Streptomyces sp.
MTTFFTGEQTHQAVLPQQPALEFVGADTPGGRDETAHGPPGKVRDAGREHGRGETGERSTVTRQRHAKSAATAAKAAENGSGDAPTPDRDYAAGAGAARVFVLSSDGKPLMPCHPARARELLARGRAVVARRVPFVIRMKDRTRAESGVHGLQLRIDPGSEGTGLVLTDEKTEVGERGAVVTVRRGLFATELRHRGDQIRACMQQRAGYRRRRRSANNRYRAPRSRNRTHPAGWLSPSVRHRVDTTFSLAARLSRYAPVTEIHVERVAFSMRQEEHQARGTVRTRLQAKWNSTCAYCGATGVRLNVEHVRPRSRGGSSRISNLVLACVPCNRAKGSESVEDFLAHRPEQLATVLGQIESPLDDAAAMNALSPRLSEALNALGKPVHCWSGRLTKTNRDFCGMRKTHTLDALSVGRLDRESGDRIVRFSGRVLVAKATGRGSYARTTPDRYGFPRLRRSRTKQHFGFVTGDLVRATLPTGTWAGTWTGRVSVRARGQHSVTVPVGRINVSHKHLSLLQRGDGYQYSACAESGALPLSKKEVDRSPVRS

SEQ ID NO: 3133 - protein, 431 aa, Moorena sp.; identical to SEQ ID NO: 2945

SEQ ID NO: 3134 - protein, 386 aa, unidentified
  REGION 1..386: note = Human gut metagenome
LTIATGESKQPVSLGVDAGYKHVGLSASTEKAELYASEVELRQDITDLLSARRALRQSRRNRKTRYRAPRFDNRIRTKRKGWLAPSVENRINAHLSRIETVIRLLPVTKITVETTSFDMQLLKNSDIAGKKYQEGEQLGFWNVREYVLFRDGHVCQHCHGRSKDPVLNVHHLESRRTGGDSPGNLITLCETCHKALHRGEITLKAKRGQSFRAETFMGIMRWEVLDRLKASHSKLEVQNTYGYRTKHARISNGIAKSHCADAFCIAGNLGAERLGEFFFQKQTRRNNRQIHKLSILKGGIRKRNQAPYEIKGFRLFDKVACQGEEGFIFGRRSSGYFDVRKLNGTHISAGISCKKLRLLEKRQTYLTEIRKEKALPPLPEGRGLRA

SEQ ID NO: 3135 - protein, 373 aa, Moorena sp.; identical to SEQ ID NO: 3006

SEQ ID NO: 3136 - protein, 329 aa, unidentified
  REGION 1..329: note = Human gut metagenome
SRRNRKTRYRAPRFDNRIRTKRKGWLAPSVENRINAHLSRIEAVLRLLPITKITVETASFDMQRLKNPDISGKEYQEGEQLGFWNVREYVLFRDGHVCRHCHGRSKDPVLNVHHLESRRTGSDSPDNLITLCETCHKALHRGEITLKAKRGQSFRAQAFMGIMRREVLNRLKASYPELKVHETYGYLTKHARIANGIVKSHGADAFCIAGNLGAERLGEFFFQKQTRRNNRQIRKLSILKGGIRKRNQAPFEAKGFRLFDKVACQGEEGFIFGRRSSGSFDVRKLDGTRISAGISCKKLRLLEKRRTYLTEIRKEEALPPLPEGRGLRA

SEQ ID NO: 3137 - protein, 427 aa, Moorena sp.; identical to SEQ ID NO: 2719

SEQ ID NO: 3138 - protein, 447 aa, unidentified
  REGION 1..447: note = uncultured beta proteobacterium
MPCTERRARILLERGRARVHRLYPMVIRLVDRFAEDSEFQELNLKLDPGSKTSGVALNRVDGSTEAVLNLFELIHRGAFISKKLEQRRALRRNRRNRHTRYREERFLNRGNKQRGWLAPSLMHRVNTTTAWVDRIMRWSPVPLITQELVRFDTQKLENPEISGVEYQQGTLLGYEVREYLLNKWHRACAYCDAQNVPFEVEHIHPKSKGGSNRISNLTLACRPCNEKKDNRDIREFLASDPTRLAKILAQAKAPLKDAAAVNSTRWRLFNELKTMGIVVKTGTGGQTKFNRLQNKIPKTHALDAACAGHVEFVSDWQKPTLSIKSSGRGTYVRTKLDSYGFPRGYCLRQKQVHGFATGDIVRAEVTKGKKIGSYFGKVAIRESGSFNISTNAGVIQGVSHKYCKVVQRADGYGYLFNQDSKQSRVKRIALQSALSLPGMNAEVSRAL

SEQ ID NO: 3139 - protein, 428 aa, Moorena sp.
MSNQNYVFVLDTNGKPLNPCRPITARKLLNANKAAVFRRYPFTIILKKEVVDTPEPITLKLDPGSKATGIALLQREKVVFGASLAHRGQAIKASLDSRRAIRRSRRARHTRYRQPRFLNRTRAKGWLAPSLQHRVETTLTWIDRFIRFAPIGSIVQELVRFDLQRLENPEISGIEYQQGELQGYEVREYLLNKWDRKCAYCGAENVPLQVEHIHPKAKGGSNRISNLCLACDKCNAKKGTQDIKQFLAKKPEVLKRVLAQAKRPLKDAAAVNSTRWALFNRLKAIGLPVSRASGGLTKFNRTRLQLPKAHWLDAACVGKVESLLLLTQQPLLIKALGWGCRQMVQTDKYGFPRKGYRAKQKVKNWNTGDIVSVVAGKFAGITGKRLKTVRFKGNFDIRLSKELVISVSRNDIKAVHRKDGYDYKFAQV

SEQ ID NO: 3140 - protein, 604 aa, Nocardiopsis sp.
MGDSCSACRNPMRFRGGSATVSPLGDAPDTSYEQSDRRRGENPRGRIPAVTGSPAGRRGLSTRGVERRRYQTQPSPRSEVTLMATFRTGLKTHQAVLPQRPALESAPADTPRVGNETGRGDHTGGVVPGPGHGRGETGTASPGGSGVTPEPFGAGEQGREAHTVEQVHPFVFVLDRHGTPLQSCPPARARQLLARGRAVVHRRTPFVIRLKDRTAADSEVDGVEVGIDPGSKHTGIVVFTQQAGERRGRYAVQLDHRGSQIRKKLAQRSGYRRRRRSANLRYRPPRFDNRTRPTGWPAPSLRHRVETPVSWVDRLCRWAPVRAVHVERVAFDTHALSAGRPLEGAEYQQGTLRGYEVREYLLAKFDRTCAYCGTTGVPLNIDHVRPRSRGGSDRVSNLVPACIGCNQTKGNRPMEEFVTNPKTLAQIRARTKAPMRNAAAANATRWALWRALDARIPTHVGSGGRTKWNRIRNRLPKSHTLDAVAVGKVDTITETVGMILAVGCSGRGSYARTRPDRNGFPRLGLPRTKHFFGFATGDLVRAVVPKGKWVGTHTGRVAVRSTGRHTVTTVCGPVSTSYKNLRLLQRADGYAYTMKKEAGAPSPA

SEQ ID NO: 3141 - protein, 419 aa, Moorena sp.; identical to SEQ ID NO: 2658

SEQ ID NO: 3142 - protein, 373 aa, Moorena sp.; identical to SEQ ID NO: 3006

SEQ ID NO: 3143 - protein, 423 aa, Arthrospira sp.
MSNHIFVLDTNRKPLTPCKPGVARSLLKAGKASVFRRYPFTIILNKEVDANPEPLELKLDPGSKVTGIALKQGNHIIFAAELQHRGQQIKEALLSRRQLRRSRRNRKTRYRPARFLNRTRSKGWLAPSLQHRVDTLMTWVHRFRRLAPVGRITQELVRFDLQLMENPEISGVEYQQGELQGYEVREYLLEKWGRTCAYCGAQNVPLEVEHIQPRSKGGSDRVSNLTMACHSCNQAKGNGDIRDFLSGQPDVLSRLLRQAKSPLKDAAAVNSTRWALFKALKATGLPVTTGTGGQTKFNRLRLNLPKAHWLDAACVGPVESLEVLTSKPLLILAKGHGTRQMCGTNKYGFPNRHRSRRQIHKGFQTGDMVTALVTAGKKIGSYLGRVLCRASGSFDITTASVRVAGISHKYCQPIHRKDGYAYA

SEQ ID NO: 3144 - protein, 423 aa, Symploca sp.
MFVLTVDKNRNPLNPTHPARARRFLKEGRAVVLRRYPFTIMLLEVEGSNVVEYRLKLDPGSKTTGIAIVTDDRVIWGAELHHRGYTIKKSLESRRALRRGRRNRHTRYRQPRFDNRTRADGWLAPSLQHRVLTIKTWVERLRRFCPISAISMELVRFDTQLMQNPEVSGVLYQQGELAGYEVREYLLEKWGRKCAYCHKEGVPLEVEHIQPRSKGGSHRVSNLTLACTKCNQKKGNKPVEQFLSRKPELLKRILAAAKRPLKDAAAVNSTRWALYRVLKQTGLAVETGTGGRTKFNRTSQELPKTHWLDAACVGSSTSKRLKVLVAKPLAITATGHGTRQMCRTDKYGFPSRYVPRYKLVKGFRTGDIVKAIVTAGKKIGTYVGRVAVRSTGSFDISTANGLIQGISHKYCKHIHNKDGYSYA

SEQ ID NO: 3145 - protein, 428 aa, unidentified
  REGION 1..428: note = Human gut metagenome
LKVFVLNMRGQPLMPCSPAKARHLLKAGKAVVRRRTPFTIKLTIATGETKQDVTLGVDAGARHVGISATTEKEEVFASEVALRQDITGLLADRLAFRRARRNRKTRYRAPRFNNRVRSKHKGWLAPSVENRIQAHMSRIDAVCRLLPVTKIVIETASFDIQKIRNPEVEGTGYQQGDQLGFWNVREYVLFRDGHVCQHCHGRSRDKILNVHHLESRQTGGDAPNNLITLCETCHKACHAGKIKLKVKRGQSFRAEAFMGIMRWTLLDRVRKAHPGLPVENTYGYLTKNTRITLGLPKAHCVDAYCIAGNLKAVRRGVYLHQRQVRKHNRQIHKCTVLSKTLKDGTKIGYRKLNQTPHLVKNFRLFDKVRCLGQTGFIFGRRSSGYFDVRRLDGVKLSSGISYRKLTLLEKRSTYLTELRKEDGASSPV

SEQ ID NO: 3146 - protein, 423 aa, Arthrospira sp.
MSNHIFVLDTNRKPLTPCKPGMARSLLKAGKASVFRRYPFTIILNKEVDANPEPLELKLDPGSKVTGIALKQGNHIIFAAELQHRGQQIKEALLSRRQLRRSRRNRKTRYRPARFLNRTRPEGWLAPSWQHRVDTLMTWVHRFRRLAPVGRIAQELVRFDLQLMENPEISGVEYQQGELQGYEVREYLLEKWDRTCAYCGAQNVPLEVEQIQPRSKGGSDRVSNLTMACHSCNQAKGNGDIRDFLSGQPDVLSRLLRQAKSPLKDAAAVNSTRWALFKALKATGLPVTTGTGGQTKFNRLRLNLPKAHWLDAACVGPVESLEVLTSKPLLILAKGHGTRQMCGTNKYGFPNRHRSRRQIHKGFQTGDMVTATVTAGKKIGSYLGRVLCRASGSFDITTASVRVAGISHKYCQPIHRKDGYAYA

SEQ ID NO: 3147 - protein, 442 aa, Lactobacillus sp.
MKHENANRVFLLNRDGKPLMPCRPRKARLLLKSGKAFVVKKYPFTIQLKYGSYGYKQKVSLGVDTGQRHIGFAVVSQEKVLCQSEVELRQDVHKNLYTRKIYRGGRRNRKTRYRQSRFLNRVHGKRDGLWLPPSVKGKVNHNIAWIKRYLAVLPNPDLHVEVGKFDMAKMLNPQISGKQYQEGSLKGWKNYEYYVLARDKYTCQLCRKHGKGVKLAVHHIIYRSQGGTDRVSNLITLCTDCHTTKNHQPGGKLYKWMKAKKKVTKYLKGATFMNILRKRIMTAFPEASFQYGSQTYVDRKNLNLPKGHFMDAIAISGIKSVGQMPETVTMISQFRKKKRSLHEATARKGRKQPNKAAKRNAKNTKYARGIWLNDYVRIIENNAKGYVQGFKSNGYAVYLTDGLGNYVLNNGKKNINRKQCRLIMHNGNWQKAEQKLSLYEFK

SEQ ID NO: 3148 - protein, 425 aa, unidentified
  REGION 1..425: note = Human gut metagenome
MLVYVVTKDKQPLMPCTPVIARLLLKQEKAKVKRRDPFTIQLLYETTEYRQDLELGVDTGSGKFATAVRTEQNEIVYLSEVAVRNDITSKMTERRTKRRSRRHRKTRYRKPRFDNRRNSKRKDRFSPTMQSKIHSHVKEIEYIQSILPITRIILETGQFDPHRMKNPALADPNVRHWGYQKGPNYGYENTRAMVLDRDNHQCQCCHGKRKDRHLEVHHIVFRSQGGSDDAKNLITLCHTCHQALHKGKIHLDLEGMGKGTLKYATQMNSIRKQLLRRYSEAVETYGYITKANRLAMDLPKEHYIDACVIATEGRPFTINSLLYRKKCVSAGDFQQYHGERSEIRQTTGKIMGFRKYDKVRYFGKYYFIKGRMSTGYAVLMDVNGDTVKFSDMPWGFKTPKLERMERIQARSTWMVMGEKVTLNIV

SEQ ID NO: 3149 - protein, 469 aa, Desulfonema sp.
MKVYVKSETGKWLMPTNPANARILLKKGKAKVIGRTPFVIRLLYETGEYVQPVTVGIDDGGINIGIAAVSNGSVLFQQELVLRSDIKSKLDTRRQYRRSRRNRKTRYRKARFLNRKQSLPVCKICGGNAPASKIICRKCLNAAGGVHQKYAGIQKTHFRLPPSVRAKKNAVIRTVRQIPLPISAIRLEDAYFDFQAMENPDISGDRYQHGELFYHKNFKQAGLVRDKFRCRVCGSESSLQCHHIRSKAEGGTDKLSNLMTLCKDCHGRHHKKGLKLPKQKSSFYISAAHVQQGKHYLQAELSETAFLTRTFGYITSHYRNRAGIEKSHVNDAVIIADKKAVPVTHYIKSKHIQTRKRSLHEATARKGRKIPNRTQKRNCKNVSALKGFRRWDTVRYKGQTGFISGFTGTSSCYIVNVEGDYIRNPGKKYKQVSLGKVVRLHNNKSVISQRADSSPTFAIAQEGDFSAES

SEQ ID NO: 3150 - protein, 429 aa, Moorena sp.; identical to SEQ ID NO: 3068

SEQ ID NO: 3151 - protein, 425 aa, unidentified
  REGION 1..425: note = Human gut metagenome
MENTLKVFVLNMRGQPLMPCSPPKARKLLRAGKAVPVRRTPFVIQLTVPTGETKQPITLGVDAGYKHVGLSATTAKEELLASEVELRQDVTGLLSDRLALRRARRNRKTRYRAPRFDNRVRSKHKGWLAPSVENRIQAHISRIEAVCRVLPITKIVIETASFDIQKIKNPEVEGTDYQQGEQLGFWNVREYVLFRDGHVCQACKGRSKDLILNVHHIESRKTGGDAPGNLITLCEACHKAYHAGKLKQFSPRRGASFRAETFMGIMRWTVLNRLRERHPELPVTNTYGYLTKHKRIVAGLPKTHCADAFCIAGVLDAKRRGEYLFQKQTRRHNRQIHKLTILKGGVRKRHQAPYLVHGFRLFDKVLCKGEVGFIFGRRSSGAFDVRRLNGTKISAGISYKKLSLLEKRKMFLTELRKEGRDSSRV

SEQ ID NO: 3152 - protein, 419 aa, Moorena sp.; identical to SEQ ID NO: 2999

SEQ ID NO: 3153 - protein, 420 aa, unidentified
  REGION 1..420: note = Human gut metagenome
MQYVYVLSKHGEPMMPCSPGKARLLLKQQKACVVRRTPFTIKLLYGSAGYKQPITLGVDAGSKHVGLSASTEKRELYREEFTPRNDVVELLSTRRQNRRSRRNRKTRYRAPRFDNRVHSKHKGWLAPSVEVKIQEHITIIKRICKILPISLVRVETAEFDTQRLKAMLAGKPLPVGTDYQLGEMYDEYNVRQYVLKRDNYTCQCCGAHTTAKKLVKLHVHHLESRKTGGNAPSNLVTLCTTCHKNLHKGKVTLDGKERGKPLRDAAFMGIMRKTLMARLKKELPIPVQGTYGYITKMRREQNDIKKSHTNDARCISKHPLAEPCSVCYRTKAIRHHNRQTHKANFSKKGIRKRSQMPYLVEGYRLWDKVLYKEQECFVSGRRSSGSFTLKKLDGTSVSKGVTFKKLRLLEPATNYLIERM

SEQ ID NO: 3154 - protein, 493 aa, unidentified
  REGION 1..493: note = Human gut metagenome
MAAVYVISASGKPLMPTTRCGHIRGLLNAGKARVVEREPFTIQLKYETPDVTQPLYLGIDPGRTNVGSAVVREDGECVFTAQLTTRNKDVPKLMKARKQFRMAHRRLKRRCKRQRRAKAAETLSQKGEFQRLLPGYEESILCKGIRNKEARFNNRQRPAGWLTPTANHLLLTHLNMVKKLQKLLPITDVVLEVNRFAFMAMENPSIRRWQYQQGPLYGKGSVEDAVYAQQDGHCLFCGKPIAHYHHVVPQHKNGSETLENRVGLCNEHHDLVHKDRAWDAKMKETKAGLNKKYHALSVLNQIIPALTEQLTAMFPQHAFVTTGKDTADFREDYGIAKEHHLDAYCIACSVLAEPTKVAAPTGKPHRLMQFRRHDRQVCHKENIKRVYLSEGKAVATNRHKAIEQKDDSLEEFRKTHTQQEVSALTVKDHQPVYKDMRRFMPGGVFLFNGKVHTLQRSHGRYKGMPFYYIDTDGSKNHAKGCIFLQQNCGLRWV

SEQ ID NO: 3155 - protein, 412 aa, unidentified
  REGION 1..412: note = Human gut metagenome
MTNYAFVLDANGKQLAPTKEQKAWFLIRKKRATLVSKYPMVIQLKKEIPDEQIYKDEICCGIDDGGLHVGISLVQKCKTKNKVVFKGTMEQRKDVKHLMEVRKGYRRYHRFYKRYRQARFNNRKSSKRKERIAPSILQKRQATIRVINQLNKWINITNYWLEDVAIDIRALTDGYKAYRWQYQQSNRLDENIRKAVILRDGCKCMECGKSNCKLEVHHIKPRRLNGSNTLGNLISLCKKCHQKTEEQEEVYMNRYFSMLNSSDNKNLNYAQHVMIGKKWLREQLSKLGTLTLATGGDTANKRIDWNIEKSHSNDAICIAGLQPDTCNVKEWTIKPMRRQSKAKTDNVLGINHRDLVEYTFRNGETHRGYVTALYPGQNAINFQSSTKHCKKVNAKKCKLIWKYSKIYWLANV

SEQ ID NO: 3156 - protein, 380 aa, Arthrospira sp.
MPNYQNYVFVVDTLGQPLSPTHPARARKLLKQGLAAVFRTYPFTIILKKTVENPVNEPSRIKLDPGASVTGIALVNQSRDTVIWGAELAHRGDRIRAKLTARRVVRRHRRYRKTRYRQARFNNRKRAYGWLAPSLKHRVETTLTSVNRLISSCPITDISMELVRFDTQKLLNPEISGVEYQQGVLFGYELREYLLTKWQHQCAYCGGQNIPLEIEHIQPKSQGGSDRVSNLAIACHKCHQKKGSQAVEQFLEKKPEILKRLLVQAKAPLKNAAAVNSTRWALFNSLKLTGLPIEIGTGGLTKYNRTVQGLPKTHWLDDADCVGKSTPTRLKIKTHQPLLMTCFGRGGRQKAAPNKRLPIRHNPLKPIKGWLTGDIAKHKT

SEQ ID NO: 3157 - protein, 406 aa, unidentified
  REGION 1..406: note = Human gut metagenome
MVYVQDINGKPMMPTTRYGKVRRLLKDKKAVVVNLCPFTIKLMYVTSDYKQEIVLGVDAGTKHVGLSATTKSKELYSSEVILRNDIVDLLSTRRELRKARRNRLRYRKPRFDNRVKSKRPGWIAPSVKYKVDAHICVINNVCSILPISRIVIEVAQFDTQKIKNPEISGKEYQEGDQLEFWNTREYVLARDGHKCQYCKGKSKDSILNVHHIESRKTGGDSPSNLITLCETCHKEYHKGNIDLKIRRGKSLRDAAVMGIMKWRLYEELKSRYDRVFMTFGYITKHNRIKYGIEKSHTSDAFVISKNINAKRIERQYLKRLIRRHNRQIHKMKILKGGKKKNNQAPFEVFGFRLFDKVLYNNKIFFVYGRRKSGSFNIRDFNGENSKDVSRKKFKLIRGKRHPIILK

SEQ ID NO: 3158 - protein, 346 aa, Arthrospira sp.; identical to SEQ ID NO: 2872

SEQ ID NO: 3159 - protein, 442 aa, Streptomyces sp.
MPCHPARARALLRKGRAVVVRQAPFVIRLKDRTRAASEVKGMQLRIDPGSKGTGLVLTDEKEEYDDHGAMVTVRRGLISVELQHRGDQIRAGMRQRAGYRRRRRKANLRHRSRRSGNRARRAGWLPPSVQHRVDTTFSLADRLCRHAPVAEIHMERVAFDTHSLSVGRRLKGTEHQRGPLTGTTIRGHLRVTWKGACAYCGVTGVPLNVEHLRPRSRGGSHRVANLVLACVPCNRAKGSNPVRIFLADRAERLAAILPQLSAPLDDAATMNATRRQLSDVLSTLGKPLHAWVGELTKANRLATRLDKTHTLDALCVGPLDHAAGDRIVRFPSHVLTAKATGRGSYARTTPDRYGFPRLLRTRAKQHFGYVTGDLVRAVVPRGKWAGTWTGRVSVRTRGQHSLATALGRINVSHRTLRLLQRGDGYGWGIRQESTASTSRKMG

SEQ ID NO: 3160 - protein, 423 aa, Arthrospira sp.
MSNHIFVLDTNRKPLTPCKPGMARSLLKAGKASVFRRYPFTIILNKEVDANPEPLELKLDPGSKVTGIALKQGNHIIFAAELQHRGQQIKEALLSRRQLRRSRRNRKTRYRPARFLNRTRPEGWLAPSLQHRVDTLMTWVHRFRRLAPVGRITQELVRFDLQLMENPEISGVEYQQGELQGYEIREYLLEKWGRTCAYCGAQNVLLEVEHIQPRSKGGSDRVSNLTLACHSCNQAKGNGDIRDFLSGQPDVLSRLLRQAKSPLKDAAAVNSTRWALFKALKATGLPVTTGTGGQTKFNRLRLNLPKAHWLDAACVGPVESLEVLTSKPLLILAKGHGTRQMCGTNKYGFPNRHRSRRQIHKGFQTGDMVTALVTAGKKIGSYLGRVLCRASGSFDITTASVRVAGISHKYCQPIHRKDGYAYA

SEQ ID NO: 3161 - protein, 442 aa, unidentified
  REGION 1..442: note = Human gut metagenome
MVTVQQSTHHLPFGRVFIRRNLFMVYVISQDGKPLMPCSDPIARLLLKQGKAKVKKREPFTIKLTYETTNYTQGLTLGVDTGSGTIGTAVSKDNGDIVYMSEVVVRNDITDKMTQRAKYRRNRRNRKTRYRKARWLNRASSIKKDRFSPTMQSKLHSHVREIEYIQSILPVTEMVFETGQFDMHLMKNPSLANPKVRPWGYQKGANYGFENTKAMVLNRDNYTCQCCKGKHKDSKLEVHHIVFRSQGGSDEESNLLTLCHTCHKDLHSGKINPKLSGKVKGNLKYATQMNSIRKQLFRCYPNAIETFGYVTKVNRLHLGVAKEHYYDACTIATQGNAFNVKSNLYKKKCVSDGDFQKTKGIHSEQPIVTDKICGFRKFDKVRYFGNDYFIKGRMSTGYAILMDIDGNKIDFSTMPRGYKTPKLSNCKRITARSTVMTQVKVV

SEQ ID NO: 3162 - protein, 323 aa, unidentified
  REGION 1..323: note = Human gut metagenome
RRSRRNRKTRYRAPRFDNRVHSKHKGWLAPSVEVKIQEHITVIKHICKILPISLVRVETAEFDTQRLKAMLAGKPLPVGTDYQLGEMYDEYNVRQYVLKRDHYTCQCCGAHNTAEKVVKLHVHHLESRKTGGNAPSNLVTLCTTCHKNLHKGRVTLDGKERGKPLRDAAFMGIMRKTLMTRLKEELPIPVQRTYGYITKMRREQNDIKKSHTNDARCISKHPLAEPCSVCYRTKAIRHHNRQTHKANFSKGGYRKRSQTPYIVEGYRLWDKVLYKGQECFVSGRRSSGSFALKKLDGTSISKGVTFKKLRLLEPAANYLIERM

SEQ ID NO: 3163 - protein, 410 aa, Bacillus sp.
MTYCFVLDAQGNKLSPTRENRAWYLIRKKKATLQNKFPMVIQLKREIPLEEIDTTPVKLGIDDGSKQVGIALVQECKTISKPVFKGTIELRTDVKEKMSVRRGYRRYRRQHKRYRPVRFNNRSSSKKEGRIAPSIKQKKDSILRVVNQLHKWIRIDHSFLEDVLIDIRALEKGYKPYNWEYQRSNRLDENIRKAVVLRDHNTCQECGVTNTRMEVHHIIPRRFNGGDSIHNLITLCSSCHEKVTGDEIAHTKRFHKKLKGRNIHFGDAMHVMLGKTFLQNKLREIAPLTLTTGGDTANKRIDWGIEKTHANDAIVVCGSEVNSQQCEIKNWSIKPLKKRSKKKIESINGFHHRDFVQYTKRNGKAYFAYITSFYPLKNQCNMTTIDGKVLKRYGVNRLKLICRSNKIFWY

SEQ ID NO: 3164 - protein, 476 aa, unidentified
  REGION 1..476: note = Human gut metagenome
LAASGTEGVSHPGLPGKYKHKGGQLMSVAVISKTGERLMPTSEYRARKLLKSGKAIKHSYHPFTIQLTERETGDIQPIELCMDTGYIHIGISVKSEKHEYLAEQIDTLTDERGRHDACRMYRRQRRSRKRYRQARFNNRKRDQGWIAPSLEHKKKIHIQAISRINNVMPITDITLEMGNFDTQVLKAKEEGKPLPHGADYQHGGRYGIATLREAVFSRDGYKCQCCGRTIKDGVILHIHHIKYRSQGGTNSMSNLATVCDKCHTPKNHKPGGKLYNWKPKLSSFKGATFMTAIRWQLYNEVKALFPDIDIHITYGAATKERRRKLDIDKSHVNDAFVMGQFHPKHRIKAILCKKKRRNNRCLEKFYDAKYIDSRDGKKRSGQELFNGRINRNHKKNSENLHQYRLQKVTAGKRTVRKQHYKIQPHDIVIYENRKRETAGCHCNGTRMMLLPDKKSASIKKVKIYKYAGGYFKSAFN

SEQ ID NO: 3165 - protein, 425 aa, Nodularia sp.
MSNFVLVLDTNKKPLTPIHPGDARFLLNQQKAAVFRRFPFTIILKEPKSEVPTQPIELKIDPGSKTTGFALVQNNKVIWGMELQHRGLAIKESLETRKGVRRGRRSRHTRYRQARFLNRTKPQGWLAPSLSHRVLTINTWVKRLCNFAPITDIVQELARFDLQQLENPEISGFEYQQGELQGYEVREYLLNKWNRKCAYCTAENVPLQVEHIKPKAKGGTNRISNLCLACEKCNIKKGTQDIEKFLAKKPELLKQILSQAKRPLKDASAVNSTRWALFNKLKETGLPITTGSGGLTKFNRTRLGLPKTHWIDAACVGKVETLKILTTKILTVKSTGHSCRRFCRINKFGFPCTEPKKIFTHVSTGDFVKATLHKDRKNITSGKYVSRVKTPTKNGCEIVINGFRVEFSTMKDITKVHCSDGYSYV

SEQ ID NO: 3166 - protein, 420 aa, unidentified
  REGION 1..420: note = Human oral metagenome
MEYVYVLDKNGSPLVPTSRCGKVRRLLNRGEARVIQREPFTIKLLKETTNNTQPINLGVDTGAVYVGVSAIGNSKAYYKAEVMLRADIKKKMNNRRQSRKFRRNRKTRYRKPRFLNRGNSIKKDRYPPTLISTFNAHIREIEFVKSILPITQLVLELGQFDPHALKDPLIRNQKWKYQKDVNYGFQNTRHAVLARDKYKCQCCGKKNCRLEVHHIKFRSDNGSDDLENLITLCEDCHKAVHAGKIEIKKQGRKKNIGLAAATQMNVLRCMLQRKYQEAEIVYGYQTKVTRELMHLPKSHINDAIAIASMGELDINIQGQEYKKRVVPVGDRILAQGVRDEKAIPKGKIAGFHRYDKVEYLGEEYFIKGRSKTSPFRLMDIYGNLCTFENKSPYKYAPTKKLKRVLARNSVLCIRDVAHVV

SEQ ID NO: 3167 - protein, 423 aa, Arthrospira sp.
MSNHIFVLDTNRKPLTPCKPGVARSLLKAGKASVFRRYPFTIILNKEVDANPEPLELKLDPGSKVTGIALKQGNHIIFAAELQHRGQQIKEALLSRRQLRRSRRNRKTRYRPARFLNRTRSKGWLAPSWQHRVDTLMTWVQRFRRLAPVGRITQELVRFDLQLMENPEISGVEYQQGELQGYEVREYLLFKWGRTCAYCGAQNVPLEVEQIQPRSKGGSDRVSNLTMACHSCNQAQGNGDIRDFLSGQPDVLSRLLRQVKSPLKDAAAVNSTRWALFNALKATGLPVTTGTGGQTKFNRLRLNLPKAHWLDAACVGPVESLEVLTSKPLLILAKGHGTRQMCGTNKYGFPNRHRSRRQIHKGFQTGDMVTATVTAGKKIGSYLGRVLCRASGSFDITTASVRVAGISHKYCQPIHSTDGYAYA

SEQ ID NO: 3168 - protein, 470 aa, Rhodanobacter sp.
MAVFVLDTHKEPLMPCSEKRARLLLGRGRARVHRLRPFAIRLVDRRKEDSVLQPLRVGIDPGSKVTGLALCRESEAVDRITGEVATTRHTLFLAELQHRGQAIRDALTQRAGYRRRRRNSHLRHRAARFDNRTRPPGWLAPSLQHRVDTTVAWVSTLSRLAPISAIDQELVRFDMQSIQNPDISGVEYQQGTLAGYEVREYLLEKWHRQCAYCGAQNVPLQIEHVQPRSVGGSDRVSNLTLACGACNAAKGARDVRVFLAHKPAVLKRIPVQATAPLKDAAAVNATRWALFNALKGLGLPVEAASGGRTKWNRTRLGVPKAHALDALCVGRMDAVAHWQVPTLAIKATGRGSYQRTRVDRFGFARGFLMRTKSVRGFQTGDHVSARVPDGKKVGLHIGRVAVRASGTFNIQTPHGIVQGISHRHCRMLQRADGYGYQYVAPHHKESENGGHAARAALSLPGQNAGVSRAK

SEQ ID NO: 3169 - protein, 532 aa, unidentified
  REGION 1..532: note = Human gut metagenome
MSTVYVLNKDGKPLMPTTRGGHVRHLLKEQKARVVQSNPFTIQLLYKTNDAVQPLYLGIDPGRTNIGVAVVKADGTAVFTAHLKSRNKEIPKLMQDRKRARRARRTNGRRHRRQRRAKANGTISKKCVKQTTTQNGSVSKRAKEIGIIKRHLPGCEKDVLCIGIKNKEAKYTNRERPEGWLTPTANQLLQTHVNLVKKVQKLLPISDVVLEVNKFAFMRLDNPDIQKWQYQQGPLYKKESLESAVSEMQEHHCLFCKKPIDHYHHVVPKSENGSNTIANIVGLCAEHHNLVHKDVAWQEKLAEEKTGLNKKYGALSVLNQIIPALTNKLSVLFPKHFFVTAGKSTHDYRAAHGVSKDHWLDAYCIACSVLPSNVCDSNINNHVPYELKQFRRHDRRVLHKANMSRVYTLNGKAVATNRHKAIKQTTDSLEEFRQNYPDDVYKLKVKEHHPAYRNLNRNYPGSVFLVGKQAHVMQGIASSKDGKTTKYNDTNATTITAGKCKFVAKNSGILFVQCKFRKALSDGTTKKLQYPV

SEQ ID NO: 3170 - protein, 269 aa, Aphanothece sp.
LVRFDLQQLENPEISGVEYQQGELVGYEVREYLLNKWDRKCSYCSIENVPLQVEHIHPKAKGGTNRISNLCLACESCNLKKGTKDINVFLAKKPDVLKRILSQAKRPLKDAVAVNSTRWTLFNALKNTGLPITTGSGGKTKFNRTRLNLPKQHWIDAACVGIVDTLKVLTNKPLLIKATGHGTRQSCRTDKYGFPSRYVPRFKFIKGFQTGDIVKAVVTKGKKIGTYVGRVAVRSIGSFNISSPNGLIQGISYKNCTHIHKKDGYSYAT

SEQ ID NO: 3171 - protein, 379 aa, Moorena sp.; identical to SEQ ID NO: 2727

SEQ ID NO: 3172 - protein, 420 aa, unidentified
  REGION 1..420: note = Human gut metagenome
MQYVYVLNKHGEPLMPCSPRKARLLLKQKKACVVKRTPFTIKLLYGSTGYKQPITLGVDAGSKHIGISATTEKCELYREEATPRNDVVDLLSARRAFRRNRRNRKTRYRAPRFNNRVHSKHKGWLAPSVEVKIQEHITLIKRVCRILPVTLVRVETAEFDTQRLKAMLEGKPLPVGTDYQLGEMYDEYNVRQYVLKRDKYTCQCCGAHPTKTKAVKLHVHHIETRRTGGNAPNNLITLCTACHKALHAGKVTLNGKKRGKPLKDAAFMGIMRKTLMERLLKELKIPVQGTYGYITKYLREKNGIPKSHTNDARCISKNPLAIPCDTCYYTKAVRHHNRQLHKATILKGGIRKANQAPYIVKGYRLWDKVSCNGTECFITGRRTSGYFALKKLDGTVISNSISYKKLRLLEVATNYITERK

SEQ ID NO: 3173 - protein, 423 aa, Moorena sp.
MSNHVFVLDTNRKPLTPCKPGVARSLLKAGKASVFRRYPFTIILNKEVDANPEPLELKLDPGSKVTGIALKQGNHIIFAAELQHRGQQIKEALLSRRQLRRSRRNRKTRYRPARFLNRTRSKGWLAPSLQHRVDTLMTWVHRFRRLAPVGCIAQELVRFDLQLMENPEISGVEYQQGELQGYEVREYLLFKWDRTCAYCGAQNVPLEVEHIHPRSKGGSDRVSNLTMACHSCNQAKGNGDIRDFLSGQPDVLSRLLRQAKSPLKDAAAVNSTRWALFKALKATGLPVTTGTGGQTKFNRLRLNLPKAHWLDAACVGPVESLEVLTSKPLLILAKGHGTRQMCGTNKYGFPTRHRSRRQIHKGFETGDMVTATVTAGKKIGSYLGRVLCRASGSFDITTASVRVAGISHKYCQPIHRKDGYAYA

SEQ ID NO: 3174 - protein, 427 aa, Nitrosococcus sp.
MNSVFVLDTDKTPLMPCRPSRARRLLRDGRAAVFRMQPFTVILKYRVVPTPQPVEFKVDPGSKTTGMALVGHFSVQGRVVLWAANLMHRGQSVRDRLERRRLLRRGRRGRKTRYRAPRFLNRTRPQGWLAPSLRSRVENVSTWFNRLLDRAPISACHIETVRFDLQKIQNPEISGVEYQQGELQGYEVREYVLEKWGRKCAYCHKTNIPLEIEHLVPRSRGGSHRVSNLTLACTPCNQKKNSKTAAEFGYPHLQTKANQPLKDAAAVNATRYAIGRAIQSIGLPTSFWSGGRTKKNRLSQGYAKDHWIDAACVGESGEQVTLAEGDRPLQIKATGRGTRQVVRTDKYGFPRGKAGRCKRVKGFQTGDRVRLIQPKGKYEGAHTGILAGIRANGVFDIKAKAGKISANWKNFKLIQRGEGYDYGLSAV

SEQ ID NO: 3175 - protein, 428 aa, unidentified
  REGION 1..428: note = Human gut metagenome
LKVFVLNMRGQPLMPCSPAKARHLLKAGKAVVKRRTPFTIQLRIATGETKQNVTLGVDAGAKHVGLSATTEKEEVFASEVELRQDITGLLAARLSLRRDRRHRKTRYRAPRFLNRVRSKHKGWLAPSVENRIQAHMSRIEAVCRLLPVTKIVIETASFDIQKIKDPSVEGTDYQQGDQLGFWNVREYVLFRDGHVCQHCHGRSKDKILNVHHLESRQTGGDAPNNLITLCETCHKAYHAGKIKLKVKRGQSFRAEAFMGIMRWTLLDRVRKAHPGLPVENTYGYLTKHTRITHGLPKTHCVDAYCIAGNLKAVRRGVYLHQRQMRKHNRQIHKFTVLSKRLEDGTKIGYRKLNQSPYLVHDFRLFDKVRCLGQIGFIFGRRSSGYFDVRRLDGVKLSPSISWRKLTLLEKRSTYLTELRKQDGASSPV

SEQ ID NO: 3176 - protein, 515 aa, Moorena sp.
MTALEERLSKTEYIYVLGFDGKPQMPTRRKRHVLKLLKTGRARIAEDIPFTIRLTYRNAPVLQPVTLAEDPGRTNIGAAVLSPLGDLLFAAVIETRNKEIKKLMTDRQKSRQASRRGERKARQRLAKRYGSMVKSGMVMRKLPMYAADRFVTCKFIRNTQARFCNRKRCPDWITPTVQHLVQTHLNIIRKISRYLPVTDIAFEVNRFAFMHMENPEAIGVDFQNGPLKGYGDVKEAIRTQQHGKCLMCKKPIAHFHHIVPRSRGGSDTIQNLAGLCPECHTKVHKDTAFRKDFDEKKSGQLKKYGALSALNQAVPFICKKLLEEYGEEHVHFCRGLDTSLIRTALGFEKTKKDQMHEVDAYCVGLAALEVNEVETPAFDHTFQIRQFRRQDRSIIHHQTGRSYYQGKEKVAQNRKPGFEQKTTALSQWYEEQVRIHGEKEAEKLRSQLRVEKSCRHYNDMDRFLPGAVFLYEGKRYVLSGRITNGKYLRACGQGMKNFPAAEGTFIRHNAGLVFI

SEQ ID NO: 3177 - protein, 426 aa, Moorena sp.
MSNYVFLIDANKTPMNPIHPSHAKKLLETNKAAIFRRYPFTLIMKRVVENIVAYPLTLKLDPGSKLTGFALVNNRDEVIWGMELQHRGLAISDGLQTRSAVRRGRRSRHTRYRQPRFVNRTREKGWLAPSLRHRVLTTETWVKRLCKFAPISAIVQELVRFDLQQMENPEISGMEYQQGALQGYEIKEYLLNKWDRKCTYCGAENIPLQVEHICPKANGGTNRISNLCLACQKCNQNKGTQDIETFLAQKPDLLKKILSEAKRPLKDAAAVNSTRWSLFNVWKSLGLPVKTGSGGLTKFNRTRLLLPKAHWIDAACVGITGTLKILITKIFTAKSTGHGIRRMCRINKYGFPCTAPKQTFTHVSTGDFVRVQIVKERKNLQSGTYTGRVKTPTNKGCEVVINGFRVGFSTMKGVSRIHCSDGYNYA

SEQ ID NO: 3178 - protein, 423 aa, Arthrospira sp.
MSNHIFVLDTNRKPLTPCKPGVARSLLKAGKASVFRRYPFTIILNKEVDANPEPLELKLDPGSKVTGIALKQGNHIIFAAELQHRGQQIKEALLSRRQLRRSRRNRKTRYRPARFLNRTRPEGWLAPSWQHRVDTLMTWVHRFRRLAPVGRITQDLVRFDLQLMENPEISGVEYQQGELQGYEVREYLLEKWGRTCAYCGAQNVPLEVEQIQPRSKGGSDRVSNLTMACHSCNQAKGNGDIRDFLSGQPDVLSRLLRQAKSPLKDAAAVNSTRWALFKALKATGLPVTTGTGGQTKFNRLRLNLPKAHWLDAACVGPVESLEVLTSKPLLILAKGHGTRQMCGTNKYGFPNRHRSRRQIHKGFQTGDMVTALVTAGKKIGSYLGRVLCRASGSFDITTASVRVAGISHKYCQPIHSTDGYAYA

SEQ ID NO: 3179 - protein, 513 aa, unidentified
  REGION 1..513: note = Human gut metagenome
LKKEAAGHRQGKDCRPVRYGPPYRAGMPDGRRKPERKHMVAVVTSTGKPLMPTSAYRARKLLKKRRAVIFKYRPYFTIQLVDRADGEVQEVEYKSDTGSVHVGISVCTEKKELLSEQRDLLENEPEHHNDRKKNRRTRRNRKRYRKPRFDNRKKKPQESHEKWLPPTLLHKMEVQVRLFREFCRVVPVTSACFEMGKFDTQALKAVSKGEPVPEGEGYQKGERYGTDTLRAAVFLRDGHTCRFCGRSVKDGAILHVHHVGYWKGDRTDRLANLASACEQCHTPANHGKNGILYGKEPEFKTLKDASYMTSVRWIMLDEIKKVAPGVQVSVTYGVTTKRKRQELHLPKSHVNDAFSMASFHPKKRSDTEYWKKIPRHDRVLQRFYDAVYLDTRDGSEKKGSELSNGRISRNHKKDSENLHRYRGYKVSKGHNSIRRGASSLKPGSIVMYKGEKMTVHGTHTRYVTDKDGKTVKKVNVQFTRPASDGKKSASLKKCTPVSRVYNTGWKRYWPDKK

SEQ ID NO: 3180 - protein, 319 aa, unidentified
  REGION 1..319: note = metagenome
APRFDNRIRTKRKGWLAPSVENRINAHLSRIGAILRLLPVTKITVETASFDTQLLKNPDISGKEYQEGEQLGFWNVREYVLFRDGHACQHCHGRSKDPVLNVHHLESRRTGGDSPGNLLTLCETCHKALHRREIKLKTKRGQSFRAEAFMGIMRWEVLNRLKASHPELEVHNTYGYRTKHTRIVNGIDKSHCADAFCIAGNLGAKRLGEFFFQKQTRRNNRQIHKLSILKHGLRKRNQAPFEVKGFRLFDKVVCQGEEGFIFGRRSSGSFDVRKLDGTRISAGISYKKLRLLEKRRTYLKEIRKEEALPPLPEGRSLRA

SEQ ID NO: 3181 - protein, 442 aa, unidentified
  REGION 1..442: note = Human metagenome
MSTTVFVLDKKHRPLMPCRPARARRLLRAGRARVVKRFPFVIRLVDRTVEQSEVQPVLIKLDPGSRETGAAVVRDDGKKRHHALAFFVIEHRGGAIRDALKARSAFRRRRRSQNLRCRSPRFLNRVKPKGWLPPSLRHRVETTLSFVRRMCRYLPVSGIAAELVKFDSQKLQTPEVSGIEYQQGTLFEYEVREYLLEKFGRKCVYCGAEGVPLNIDHVVPRAKGGSNRVSNLVLACMSCNQKKGARSLEDFLKGKPEVLARVRRELKTPLRDAAAVNATRWVLFNELKATGLPVETGSGALTKLNRHAFGVEKEHWLDALCVGRLNGAVTRKGLNVLEIRCMGRGSRQRTRLTKYGFPRGYLMRQKCVHGFATGDMVEANVPKGKKAGLWRGHVAVRVSGSFNIQTPKGVIQGVGWKHCRLISHNDGYGYAWLGHAPHSSPA

SEQ ID NO: 3182 - protein, 426 aa, Moorena sp.
MSKVFVVDLEKRPLNPVHPAQARQLLRNKKAAIFKRFPFTLILKESRPDAPIQPLRLKIDPGAKHTGIALVNDSTGEVVFAAELKHRGFAISFALTSRRQLRRGRRNRQTRYRKPRFLNRTRPDGWLAPSLQSRVENIKTWVNRLRKLTSINAISQELVRFDMQLMRNPDIQGKEYQQGTLAGYETREFLLEKWNRQCAYCGVKDVPLQIEHIYPRAKGGTNSITNLTLSCEKCNTKKGTKDIKDFFKKNSARLEKILKQAKRPLADAAAVNTTRFTLLEVLKATGFPVETGSGGLTKFNRNQQNLVKLHWLDAACVGKSTPILNIKGVKPLLITANGHGTRQSCRTDKFGFPNRHCSRTKFHFGFQTGDIVKAVVTSGKKVGGYVGRIATRATGSFNISTKNGLLQGINHKYCKHIHKKDGYSYA

SEQ ID NO: 3183 - protein, 432 aa, unidentified
  REGION 1..432: note = Human gut metagenome
LSKVKTMRVFVFNMRGRPLMPCSQRKARLLLRENKAKIYKYHPFTIQLTYTTGETKQDCHIGIDTGSKYIGAAVRSEDKVFWKGEIELRQDIRSNLDTKRIYRRSRRNRKTRYRKPRFLNRKRRDEWLPPSLQSRINHTFHWIDTLSSLVPNPILHIEVGKFDVAKMINPEIHGVDYQHGQTYGFFDERYFVFARDNYTCQCCGKSKNKILNTHHIIYRSNGGTNRVDNLITVCTDCHTSQNHRKGGIFYQWQEQHKKVKQYKEPPFMNTLRKRIFVAYPDAEITYGSETTPKRKAMKLDKTHYNDAIVISGINEIKENPEEWLLIKQFRKKKRSLHEATARKGRKKPNRNQTRNSKNTPYYKGFYLNDKVSVFGRPMIEYYRSGTGSGGAVNVEYTTNILDGFENSNLNFNKTIVEDYKEWLKDHPFDNGG

SEQ ID NO: 3184 - protein, 447 aa, unidentified
  REGION 1..447: note = Human gut metagenome
VPAYRIKHITKKEAPYMVYVLDIDGQPLMPTSRHRKVRKLLNSHLAKVVKRCPFTIQLLYQSTKEIQPVSLGVDAGSRHIGLAATTEQKIVYQEELVPRNDVVKLLSARRALRSSRRSRKTRYRKPRFNNRAHSKHKGWLAPSVEVKIQEHITAIKRICQILPISDIHVETAEFDLQRLKAMEEGRLLPAGTDYQLGEQYDFYNTRQYVLHRDEYTCQCCGTHDNNVKLHVHHIESRQTGGDAPNNLITLCEHCHKLLHAGKTILPKGKKRGKSYRDATFMGIMRKTLLERLKKEIDVPVEGTYGYITKYWRERAGLEKSHINDAICISRHPYARPLETYYLTKAVRHHNRQIHKTKLSKGGIRKRNQAPYLVKGFRLFDKVLYQGESYFIFGRRITGYFDIRTLDGTKVNKGSTSYKKLRIQDTAEAYLTEVRAIPHMNEFTCVLA

SEQ ID NO: 3185 - protein, 634 aa, Nocardiopsis sp.
MTRAPSRARSSLGGASSTFPMGTPASVRVPVPPLVPAPPSTTVIPVLSRYGWLVTPSETWFRGPSAKDNHLRPQPTSRGNAFPARRRGFRPPGRGPGVTSTSQHQGGDQLATFHTGEKTHQAVLPQRPALESASADIPRNGNETGRGSHVRVAPGVEHVRGETTGGSPTAGGVTPVPSGAGEQAREGRPPKTTPRKGHPYVFVLDRHGTPLQPTRPARARRLLAKGRAIVARHTPFVIRLKDRTTAESEVDGVETGIDPGSKRTGIAVFTDRHGERRGRYAIRLDHRGGQIAKRMRQRAAYRKGRRSRNLRYRTARFDNRTRPRGWLPPSLRHRVDTTLAWAGRLARWAPVRAVHVERVAFDVHALSAGRPVEGVEYQHGTLHGYEVREYLLAKWGRACAYCGATGAPLNIDHVRPRSRGGSDRVANLALACVPCNRAKADQPVEEFVTNPRALAGISAQTKAPLRDAAAVNATRWALWRSLDGCLPTRVGSGGRTKWNRTRNHLPKSHTLDALAVGRVEAITTAVSTVLVVGAAGRGSYARTRADRHGFPRLRLPRRKRFFGFQTGDLARAAVPSGMNAGTHTGRVAVRSGGSHTLQTSYGPIKTSWKNLCLLQRADGYGYTTQKEAGAPSTA

SEQ ID NO: 3186 - protein, 423 aa, Arthrospira sp.
MSNHVFVLDTNRKPLTPCKPGVARSLLKAGKASVFRRYPFTIILNKEVDANPEPLELKLDPGSKVTGIALKQGNHIIFAAELQHRGQQIKEALLSRRQLRRSRRNRKTRYRPARFLNRTRSKGWLAPSLQHRVDTLMTWVHRFRRLAPVGRITQELVRFDLQLMENPEISGVEYQQGELQGYEVREYLLEKWGRTCAYCGAQNVPLEVEHIQPRSKGGSDRVSNLTMACHSCNQAKGNGDIRDFLSGQPDVLSRLLRQAKSPLKDAAAVNSTRWALFKALKATGLPVTTGTGGQTKFNRLRLNLPKAHWLDAACVGPVESLEVLTSKPLLILAKGHGTRQMCGTNKYGFPNRHRSRRQIHKGFQTGDMVTALVTAGKKIGSYLGRVLCRASGSFDITTASVRVAGISHKYCQPIHSTDGYAYA

SEQ ID NO: 3187 - protein, 440 aa, Moorena sp.
MVVFVLDKRKKALMPCSEKRAWMLLERGGACFDRMVPFTIPPVDRRVEDSALQPLRLKLDPGSKATGMVWVRGKETVDASTSEIVRAIPVHMLLEWQHRGEAIWDALARRRAFRRRRRGNLRYRPSRFDNRSKPKGWLAPSLRHRVDTVLGWVTRIGRLRPITALSQELVRFDTLALKHPEISRTEYQQGSLFGYEVREYMLEKWGRKCAYCDATGLPLEIDHIHPCSKGGSDRLSNLTLTSHPCNQRKGNQPLEQFLVKAPEPAQKIMAKAKSPLRDDAAVNSSGWALFQRLKARGLEVEVASGGRTKWNRYRLSIPKTHCLDAACVGHVDAVECWKQPVLQVQAMERGRYQRTRLTKYGFPHVYLTRSKSSFGFQTGELIGAVGRTGKKVGIYLGRVAIRASGSFEVQTGNGLVQGKASTDSLPWSGVQMDMGIRGPR

SEQ ID NO: 3188 - protein, 423 aa, Moorena sp.
MSNHIFVLDTNRKPLTPCKPGVARSLLKAGKASVFRRYPFTIILNKEVDANPEPLELKLDPGSKVTGIALKQGNHIIFAAELQHRGQQIKEALLSRRQLRRSRRNRKTRYRPARFLNRTRPEGWLAPSLQHRVDTLMTWVHRFRRLAPVGRIAQELVRFDLQLMENPEISGVEYQQGELQGYEVREYLLFKWDRTCAYCGAQNVPLEVEQIQPRSKGGSDRVSNLTMACHSCNQAKGNGDIRDFLSGQPDVLSRLLRQAKSPLKDAAAVNSTRWALFKALKATGLPVTTGTGGQTKFNRLRLNLPKAHWLDAACVGPVESLEVLTSKPLLILAKGHGTRQMCGTNKYGFPNRHRSRRQIHKGFQTGDMVTALVTAGKKIGSYLGRVLCRASGSFDITTASVRVAGISHKYCQPIHRKDGYAYA

SEQ ID NO: 3189 - protein, 413 aa, unidentified; identical to SEQ ID NO: 2636
  REGION 1..413: note = Human gut metagenome

SEQ ID NO: 3190 - protein, 533 aa, Actinomadura sp.
VLPQQSALEFGSADIPRIGDETGLEGRQAPGAVHVRGETLGASPGVERVTPNLAVGEKVREGHPAVFVLDKHGAPLQPTTPARARKLLKQGRAVVARHTPFVIRVKDRTIAESQVDGVELGVDPGSRHTGIAVFTDKEGNRRGLYGIDLAHRGGSIRDKLSQRAAYRRGRRSRNLRYRAPRYSNRTKPRGWLAPSLRHRVETTMAWTARLARWAPVQTVHLERVAFDTHAMSAGRPLEGAEYQHGTLHGTEVREYLLAKWGHACAYCGITAVPLNIDHIHPRSEGGSDQVGNLCTACIPCNQAKNNRSVEDFLSTSPKQLARILAHAKPSLRDAAAVNTTRWVLWRALGAAFPTVRTASGGRTKWNRTRTGLPKTHTLDALCVGHLDTIDRIPRTVLTAAATGRGTYTRTRTDRYGFPRLRLPRVKTFFGYQTGDLARAVVPAGKNAGTHTGRIAVRASGSFNIRTRHGLLQGVRHKHLHLLQRADGYGYTTKPEGVISMRPDRPERRLGPSCPPALSFPPPARAGESTKGTR

SEQ ID NO: 3191 - protein, 570 aa, Streptomyces sp.
MRHVRSLNSNVTHTTPLSPKSLRAPASGATCPRRPHVRVISPDPCSLGNPRCVASGTSREGRSLAPSYRVTSPGHHDLRISRGASMTTFFTGEQTHQAVLPQQPALESAGAYTPGSRDETAHGLPDPKPGTGVGHGRGETGAVRTRTRRRHARRLDPGSKATGIAVTDERDEVGAKGRTALVRRGLVSIELRHRGRQIHSGMVRRAGHRRRRRSANLRYRAPRRDNRTRPDGWLPPSLRHRIDSTMSLVARLCRYAPVLEIHVEQVAFDTALIAAAVSSREQDFSERTHAGSEIRESLLAKWERSCAYCGATGVLLNIEHVRPRSRGGSDRVANLVIACVPCNQAKGTARIDEFLADRPARLERVIAQLRRPLHDVAAMNTTRLLLVKTLATHGVAVHTWSGGRTSWNRLAMGLPKSHTLDALATGVIDLERGDAVVRIPAQILVVRSTGRGSYARTTPDRYGFPRLQRPRRKIHHGFSTGDLAAAVVPKGKWAGRWVGRVSVRAGGQHRITTLTSRFDVSHRNLRLLQRADGYTYGFADEIRLSEEHGPAYSGRTLKGGDPGNVRTPDA

SEQ ID NO: 3192 - protein, 408 aa, unidentified
  REGION 1..408: note = Human gut metagenome
MVYVQDINGKPLMPTTRYGKVRRLLKANKAVVVNICPFTIKLTYVTSDYKQEIVLGVDAGTKHVGLSATTKSKELYASEVILRNDIVDLLSTRRELRRTRRNRLRYRKPRFNNRIKSKKQEWIAPSVKYKIDAHIRVVEKVYSVLPVSKLIIEVAQFDTQKIKNPDISGKEYQEGDQLGFWNVREYVLARDGHKCQYCKGKSKDAILNVHHIESRKTGGNSPSNLITLCETCHKEYHKGNIDLKIKRGKSLRDAAIMGIMKWRLYETLKSKFSNISMTFGYITKYNRIRNNIEKSHISDAFVITNNFNAKRLGFLYKIKLVRRHNRQIHKMKIQKGGVKRLNQSPFEVFGFRLFDRVKIDNKFYFIYGRRRTGRFNIRDINGENSKDVMYKKLNLSRCKRFMVKIEMN

SEQ ID NO: 3193 - protein, 423 aa, Arthrospira sp.
MSNHVFVLDTNRKPLTPCKPGVARSLLKAGKASVFRRYPFTIILNKEVDANPEPLELKLDPGSKVTGIALKQGNHIIFAAELQHRGQQIKEALLSRRQLRRSRRNRKTRYRPARFLNRTRSKGWLAPSLQHRVDTLMTWVHRFRRLAPVGCIAQELVRFDLQLMENPEISGVEYQQGELQGYEVREYLLFKWDRTCAYCGAQNVPLEVEQIQPRSKGGSDRVSNLTMACHSCNQAKGNGDIRDFLSGQPDVLSRLLRQAKSPLKDAAAVNSTRWALFKALKATGLPVTTGTGGQTKFNRLRLNLPKAHWLDAACVGPVESLEVLTSKPLLILAKGHGTRQMCGTNKYGFPNRHRSRRQIHKGFETGDMVTATVTAGKKIGSYLGRVLCRASGSFDITTASVRVAGISHKYCQPIHSTDGYAYA

SEQ ID NO: 3194 - protein, 417 aa, unidentified
  REGION 1..417: note = Human gut metagenome
MPCSPAKARLLLKEKKAIVKRRTPFTIQLTIATGEARQPVTLGVDSGYKHIGLSATTEKAELYASEVELRQDITDLLSARLALRRSRRSRKTRYRAPRFDNRVASKRKGWLAPSVENRIAAHMSRVEAVMRVLPVTAITVETAAFDTQLLKNPDIAGEAYQQGEQLGFWNVREYVLFRDGHVCQHCRGKYKDPILNVHHIESRRTGGDAPNNLITLCETCHKAFHRGEIKLKVKRGKSFKAETFMGIMRWTLFERLKKAHPELRVRNTYGYLTKHKRISHGIAKSHCADAYCIADNLGAKRLEGFFFQKQTRKHNRQIHKLSILKGGLRKKNQAPYEVKGFRLFDKVICKGEEAFIFGRRTSGSFDVRRLDGTRISAGINYKKLRLLEPRTTYLTEFRKEAALPPLHKCRGFRAEFL

SEQ ID NO: 3195 - protein, 420 aa, unidentified
  REGION 1..420: note = Human gut metagenome
MQYVYVLNKHGEPLMPCSPRKARLLLKQKKACVIKRTPFTVKLLHGSAGYKQPVTLGVDAGSKHIGISATTEKHELYREEATPRNDVVDLLSARRAFRRSRRNRKTRYRAPRFNNRVHSKHKGWLAPSVEVKMQEHITLIKHVFRILPVTLVRVETAEFDTQRLKAMLEGKPLPVGTDYQLGEMYDEYNVRQYVLKRDNYTCQCCGAHSTKTKGVKLHVHHIETRRTGGNAPNNLITLCKACHKALHAEKVTLDGKKRGKPLKDAAFMGIMRKTLMERLRKELKIPVQGTYGYITKYLREKNGIPKSHTNDARCISKNPLAIPCDTCYYTKAVRHHNRQLHKATILKGGIRKANQAPYIVKGYRLWDKVAYNGTECFITGRRTSGYFALKELDGTVVSNSISYKKMRLLEAATNYITERK

SEQ ID NO: 3196 - protein, 380 aa, Arthrospira sp.
MPNYQNYVFVVDTLGQPLSPTHPARARKLLKQGLAAVFRTYPFTIILKKTVENPVNEPSRIKLDPGASVTGIALVNQSRDTVIWGAELAHRGDRIRAKLTARRVVRRHRRYRKTRYRQARFNNRKRADGWLAPSLKHRVETTLTSVNRLISSCPITDISMELVRFDTQKLLNPEISGVEYQQGVLFGYELREYLLTKWQHQCAYCGGQNIPLEIEHIQPKSQGGSDRVSNLAIACHKCHQKKGSQAVEQFLEKKPEILKRLLVQAKAPLKNAAAVNSTRWALFNSLKLTGLPIEIGTGGLTKYNRTVQGLPKTHWLDDADCVGKSTPTRLKIKTHQPLLMTCFGRGGRQKAAPNKRLPIRHNPLKPIKGWLTGDIAKHKT

SEQ ID NO: 3197 - protein, 379 aa, Arthrospira sp.; identical to SEQ ID NO: 2727

SEQ ID NO: 3198 - protein, 420 aa, unidentified; identical to SEQ ID NO: 3153
  REGION 1..420: note = Human gut metagenome

SEQ ID NO: 3199 - protein, 451 aa, Moorena sp.
MVYVINFEGKPLMPTTNAKARKLLNQKKATVKKVNPFIIQLLYKTDTEYIQTITLGIDSGYLNIGFSAITDSKELIVGEVKLLQGMKDRLLEKSQYRRIRRQRLRYRKPRWNNRKIRQGWLAPSLQHKLDTHVKFIDYLNTILPIRNIVLEVANFDIQKIKNPDISGVEYQQGEQMDFWNVREYVLHRDGHKCQNPNCKNKSKEQILEIHHIKYKSEGGSDAPSNLITLCNKCHTSPNHKKGKFLYDWCEKGKKVRGFRDATFMSMIRWYLLEQLKEKYTNIKATYGYLTKNHRIEHGIEKSHFNDAFAIAKGVNQVRNLEIFKVEQSRLNNRSLEKFYDAKYIDNRTGEKVSASELNCGRRTRNKNLNSENLRMFRGQKISKGQRRIRKQKSLYQPNDLIKYNGNVYTVKGSQNEGKYIALKEIKKVPNVKLIKPYIFKKGLNWSHGLSW

SEQ ID NO: 3200 - protein, 429 aa, Ktedonobacter sp.
MVFVLDRYKKPLMPCTPRRARLLLARKRAVVHRLSPFTIRLKDRSVQQSTLQPVALKIDPGAKTTGLALARVEETSEGEVHHALHLAELSHRGEEVRDRLRKRAGYRRRRRSTNLRYRPARFLNRRRAPGWLPPSLRSRIDNVLSWGRRYQRWVPLVRIAVERVKFDTQLLQQPEISGVEYQRGELAGWEVRAYLLEKFGRRCVYCGRTDTPFELDHIQPRSRGGSNRVSNLALSCHTCNAAKGERTAAEFGHPEVAAQAKQPLRDTAAVNATRYALCDELRTLDLPLTTWSGGRTRWNRARFSIPKTHALDALCVGEVAGVKVGAHQALAITATGRGRYSRTNVDESGFPVGSLMRRKQVLGIKTGDRVRAMVPEGFAAQGTHTGRIAVRANKHFRMGKVQGIPARFCRVLQLADGYDYAVVATTLQG

SEQ ID NO: 3201 - protein, 426 aa, Moorena sp.
MSKVFLIDTNYKPLNPIHPAQARQFLRNGKAAIHKQFPFTLILKESCLEVDVKPLRLKIDPGAKFTGIALVNDKSGEVVFAAELQHRGFAIRDSLTSRRQLRRSRRNRKTRYRKPRFLNRTRPKGWLPPSLQSRVENIKAWVKRLQKVANITAISFELVRFDMQLMRNPEIQGKEYQQGALAGYETREYLLEKWGRECAYCGAKDVPLEIEHIHPKSKGGSNSITNLTLSCHKCNTKKGTQDIKDFLKGSSRLEKILKQAKKPLADAAAVNMTRNALFATLKETGLPIETGSGGLTKFNRCQQNLPKTHWLDACCVGKSTPILKVKGIKPLSIIANGHGTRQSCRTDKYGFPSRYVPRFKFVQGFQTGDIVKAVVTKGKKIGTYTGRVAVRSSGSFNISTKNGLVQGISHKYCKHIHRKDGYNYAT

SEQ ID NO: 3202 - protein, 423 aa, Arthrospira sp.
MSNHIFVLDTNRKPLTPCKPGMARSLLKAGKASVFRRYPFTIILNKEVDANPEPLELKLDPGSKVTGIALKQGNHIIFAAELQHRGQQIKEALLSRRQLRRSRRNRKTRYRPARFLNRTRPEGWLAPSWQHRVDTLMTWVHRFRRLAPVGRIAQELVRFDLQLMENPEISGVEYQQGELQGYEVREYLLFKWDRTCAYCGAQNVPLEVEHIQPRSKGGSDRVSNLTMACHSCNQAKGNGDIRDFLSGQPDVLSRLLRQAKSPLKDAAAVNSTRWALFKALKATGLPVTTGTGGQTKFNRLRLNLPKAHWLDAACVGPVESLEVLTSKPLLILAKGHGTRQMCGTNKYGFPNRHRSRRQIHKGFQTGDMVTALVTAGKKIGSYLGRVLCRASGSFDITTASVRVAGISHKYCQPIHRKDGYAYA

SEQ ID NO: 3203 - protein, 453 aa, unidentified
  REGION 1..453: note = Human gut metagenome
MPVAVVSKTGERLMPTSEHRARKLLKSGKAIKYSYHPFTIQLTERESGDVQPIELCMDTGYIHIGISVKSEKHEYLAEQIDTLTDEKTRHDACRMYRRQRRSRKRYRQPRFNNRKRNDRWIAPSLEHKKSIHIQAILRICKVMPVTDITLEMGNFDTQVLKAREEGKPLPQGVDYQHGERYGITTLREAVFARDGYTCQCCGRAIKDGAILHVHHIVYRSQGGTNRMSNLITVCDKCHTPANHKQGGKLYNWKPKIASFKSATYMTTIRWKLYNEVKALFPDIDIDIHITYGAETKERRRALDIDKSHVNDAFVMGQFHPKHRSKPICYKKKRRNNRCLEKFYDAKYIDSRDGKKRSGQELFNGRISRNHKKDSENLHQYRLQKVTPGRRAIRRQHYPIQPHDIIVYNGNKIEVSGCQHKGTRVVFSKTKKSVQISKIKLFKYAGGYSKSVFN

SEQ ID NO: 3204 - protein, 423 aa, Moorena sp.
MSNHIFVLDTNRKPLTPCKPGVARSLLKAGKASVFRRYPFTIILNKEVDANPEPLELKLDPGSKVTGIALKQGNHIIFAAELQHRGQQIKEALLSRRQLRRSRRNRKTRYRPARFLNRTRSKGWLAPSWQHRVDTLMTWVHRFRRLAPVGRIAQELVRFDLQLMENPEISGVEYQQGELQGYEVREYLLFKWDRTCAYCGAQNVPLEVEHIHPRSKGGSDRVSNLTMACHSCNQAKGNGDIRDFLSGQPDVLSRLLRQAKSPLKDAAAVNSTRWALFKALKATGLPVTTGTGGQTKFNRLRLNLPKAHWLDAACVGPVESLEVLTSKPLLILAKGHGTRQMCGTNKYGFPNRHRSRRQIHKGFQTGDMVTVLVTAGKKIGSYLGRVLCRASGSFDITTASVRVAGISHKYCQPIHSTDGYAYA

SEQ ID NO: 3205 - protein, 424 aa, unidentified
  REGION 1..424: note = human skin metagenome
MSNHVFVLDTNHKQLTPCKPGVARSLLNTGKAAVFRRYPFTIILKKEVNAHPEPIELKLDPGSRVTGIALKQGNQIIFGAELQHRGQQIKDALLSRRQLRRGRRNRKTRYRQARFLNRTRQSGWLAPSLQHRVATVLTWGNRFRKIAPIASIAQELVRFDLQLMQNPEMSGVEYQQGELQGYEVREYLLEKWNRKCAYCGAENVPLEVEHIQPRSKGGSDRVSNLALACNPCNQSKGSQDIRDFLSGKPDLLNRILKQSKSPLRDAAAVNSTRWALNNALKATGLPVTTGTGGQTKFNRTRLNLPKAHWLDAACVGQVETLKILTSKPLLIAAKGHGTRQMCGTDKFGFPNRHRSRVQVHKGFQTGDIVIATVTAGKKIGSYVGRVLCRASGSFDIATKTGRVAGISHKYCKPIHKKDGYAYTF

SEQ ID NO: 3206 - protein, 460 aa, unidentified
  REGION 1..460: note = Human metagenome
MVLVIDRCKRPRNAISEAYARILLYSKQAVIHKRFPFTIRLKNDNAVFNDKTYTVKLDPGANTTGVAVVSNNEVVMLAEIEHRGKVVKSSLDSRRAIRRSRRNRKTRYRESRFLNRTRPDGWLAPSVKSRADNVINFIRKYKKLLNVVKVDIERVSFDTAQMSSEAELCGIDYQQGALYRTKLRNFIFSRSNGKCSYCGEKAVEIDHIVPRSKGGTDSVNNLTASCRACNEKKSNLSLKEFGKLVGKDFSKLMPKTLPKQASIVQSAREYTIKEITKLVADTKSYDSWLTKYNRDELGLPKRHYYDALSVGNVQDYKFLTDKVLTISAKGRGSRQMCRMDRFGFPRTSPKGSKSVKGFRTGDIVKAIVPSGLKRGEYFGRVAVRSSGSFDIEMKGKVVQGIGHKYCRIIQRNDGYSYDYRERDFLSAMDNRVSVAGFNEKCGIIISSYPHFRTLKYQKGA

SEQ ID NO: 3207 - protein, 540 aa, Streptomyces sp.
MTTLPVGEQTHQAVLPQQPALESVGADTPGSRDETAHGLPVAERGTGRKHGRGETAGGSTGSRRRHADQAEIGSGDAPMESSGYSGGAGSGRVFVLARDGVPLMPCHPARARELLRRSRAVVVRLAPFTIRLKDRGRGESEVAGVQLRIDPGSKATGIAVTDTKAERLVGGSTATVRRGLVSVELLHRGEQIRRAMAQRAGYRRRRRSANCRYRAPRNRNRARSAGWLAPSLRHRVESVASVTDRLRRLAPVTEIHVEHAAFDTHAMSEGRGLEAIEYRRGALAGTEIRELLLVRWQRSCAYCGASGVPLNAEHIRPRSRGGSSRLSNLTLACVPCNKAKGATPVEEFLAGSPERLERILRDVGVPLHDAAAMNATRGRLISALEHLGPPVHTWTGARTKWNREAMGLGKTHTLDALSVGGLDHENGDAIVRVCARILVVKAAGRGVYARTTPDRFGFPRLRRPRRKRHYGFVTGDLVRATVPKGRWKGTWSGRLAARSTGRHSLTTAQGRFNVSYRNVQLLQRADGYAYSLGQELRKKG

SEQ ID NO: 3208 - protein, 368 aa, Nodularia sp.
MSNFVLVLDTNKKPLTPIHPGDARFLLNQQKAAVFRRFPFTIILKEPKSEVPTQPIELKIDPGSKTTGFALVQNNKVIWGMELQHRGLAIKESLETRKGVRRGRRSRHTRYRQARFLNRTKPQGWLAPSLSHRVLTINTWVKRLCNFAPITDIVQELARFDLQQLENPEISGFEYQQGELQGYEVREYLLNKWNRKCAYCTAENVPLQVEHIKPKAKGGTNRISNLCLACEKCNIKKGTQDIEKFLAKKPELLKQILSQAKRPLKDASAVNSTRWALFNKLKETGLPITTGSGGLTKFNRTRLGLPKTHWIDAACVGKVETLKILTTKILTVKSTGHSCRRFCRINKFGFPCTEPKKNIHSCFYRRFC

SEQ ID NO: 3209 - protein, 476 aa, unidentified; identical to SEQ ID NO: 3164
  REGION 1..476: note = Human gut metagenome

SEQ ID NO: 3210 - protein, 395 aa, unidentified
  REGION 1..395: note = Human gut metagenome
MDTGYIHIGISAKSEKHEYLAEQIDTLTDERGRHDACRMYRRQRRSKKRYRQARFNNRKRDQGWIAPSLEHKKKIHIQAISRINNVMPLTDIALEMGNFDTQVLKAKEEGKPLPQGADYQHGERYGIATLREAVFSRDGYKCQCCGRTIKDGAILHIHHIKYRSQGGTNSMSNLSTVCDKCHTPKNHKPGGKLYSWKPKLPSFKGATFMTTIRWQLYNEVKTLFPDYRYSYYIRSSNKRTARELDIDKSHANDAFVMGQFHPRHRIKAVFYKKKRRNNRCLEIFYDAKYIDSRDGKKRNGQELFNGRISRNHKKDSENLHQYRLQKVTAGKRTVRKQHYSIQPHDIIVYESRKRETTGCHCNGARVILLPDKKSISIKKVKIYKYAGGYFKSAFN

SEQ ID NO: 3211 - protein, 543 aa, Streptomyces sp.
MTTFPAGEQTHRAVLPQQLALESVRADTPGSRDETAHGHPATERGTGREHGRGETDGHGTRTRRRHANNAGQPAKAAENGSGDAPTGACRVFVLSKDGHPLMPCHPARARELLRKGRAAVARQMPFTIRLKDRTVVDSEVDGVQLRIDPGSKGTGLALTDEKKETTKDGATVTVRRGLVSLELHHRGAQIQNSMQQRAGYRHRRRSANCRYRTPRSRNRVRPEGWLPPSLRHRVDTTFSIVSRLCRYAPVTEIHLERTAFDTHSLSAGKPLNGAEYAQGPLAGTTARSYLHARWNSACAYCGATGVPLNIEHVRPRNRRGSSRISNLVLSCIPCNKAKGSRSIESFLAHQPDLLARILAQTKAPLRDAAAMNAVQWQLTEALERLGKPVHAWPGHLTKTNRDAMGLDKTHTLDALSVGHLDHESGDAIARFPDRVLVLKATGRGSYARTTPDRYGFPRLRRTRTKQHFGYVSGDLVRATMPTGRWEGTWTGRIAVRANGQHSLATPVGRFNVRHRNLRLLQRGDGYGYTTQLEATSSISQKNS

SEQ ID NO: 3212 - protein, 396 aa, Massilia sp.
MTVLVLDKKKRPLMPCTPKRARKLLASGRARIHRLFPFCIRLVDRCLERSAVQPLRLSIDPGSKFTGMAISRIEIIDAERDLEPVMHIAFLLELTHRGQVIRDALHARSAMRRRRRGNLRYRAPRFFNRTKPKGWLPPSLQHRIDTTTAWIARLRRLAPITHLAQELVRFDTHLMQNPEISGVAYQQGTLAGYEVREYLLEKFHRICAYCDAKDVPLQMDHIQSRARGGSDRISNLTLACVVCNGRKAAQDIQEFLANDPARLTRILKQAKVPLHDAAAVNATRWALLKTLKKTGLPVETGTGGRTKWNRTRFGIVKTHALDAACVGIVGTCKVRTCQRCMSSARAGALAARRDWINMVSRVLTSHARKRPSAFALATWWRPQSRPVSTWANTKAA

SEQ ID NO: 3213 - protein, 298 aa, unidentified
  REGION 1..298: note = Human gut metagenome
LNKRGKPLMPCSPAKARLLLKEKKAIVVRRTPFTIQLTIATGESKQPVSLGVDAGYKHVGLSASTEKAELYASEVELRKDITDLLSARRALRQSRRNRKTRYRAPRFDNRIRTKRKGWLAPSVENRINAHLSRIEAVLRLLPITKITVETASFDMQRLKNPDISGKEYQEGEQLGFWNVREYVLFRDGHVCRHCHGRSKDPVPNVHHLESRRTGSDSPDNLITLCETCHKALHRGEITLKAKRGQSFRAQAFMGIMRREVLDRLKASHPKLEVQNTYGYWTKHARMLSASPAILAPKG

SEQ ID NO: 3214 - protein, 379 aa, Moorena sp.; identical to SEQ ID NO: 2727

SEQ ID NO: 3215 - protein, 514 aa, Nocardiopsis sp.
VLPQRPALESTSADHPGNRDETGRGGRARVAPGVEHVRGEMPDAPPGVEHVTPVPARDGERAREGHPPRKGTSPRQGHRCVFVLDAHGTPLQPTHPARARKLLAKDRAVVARHTPFVIRLKDRTTAGSEIDGIEVGVDPGSKHTGLAVFTAQAGQRRSRYALQLDHRGDQITRRMRQRAAYRKGRRSRNLRYRSPRFDNRTRPDGWLPPSLRHRVDTTLAWVDRLARWAPVRAVHAERVAFDTHALSAGRSLEGVEYQHGTLHGYEVREYLLAKWGRSCAYCGAAGTPLNIDHIHPRSKGGSNRVANLAPACIPCNQAKDNRPVEEFVTSPRTLARVRSQAKAPLRDAAAVNATRWALWRALDERLPTHAASGGRTKWNRTRNRLPKSHTLDALAVGKVDAITTTVSTILVVGCSGRGSYARTRTDRYGFPRLRLPRRKAFFGFQTGDLARAVVPSGKHAGTHAGRVAVRSSGGHTLQTPHGPIKTSWKNLRLLQRADGYGYSTQKEAGAFSPA

SEQ ID NO: 3216 - protein, 427 aa, Anabaena sp.
MCKVFVINKEKRPLNPIHPAQARQLLRSGKAAVFKRFPFTIIVKESNVNTNVSPLRLKLDPGAKTTGIAIINDANDEVVFAAELKHRGFAIRDAITSRRQLRRSRRNRKTRYRQPRFLNRTKPEGWLAPSLQSRVENIKTWVSKLRKVAPITAISQELVKFDMQLIRRPDIQGKEYQQGTLAGFETRQYLLEKWNRECAYCGIKDVPLQIEHIHPKSKGGSNSITNLTLSCEKCNLRKGNQDIRDYLEKDKPRLEKILALTKKPLADAAAVNATRFALLYALKSTGLPIETGSGGLTKFNRTQQALNKSHWLDACCVGASTPILKIKGIKPLLITANGHGTRQSCRTDKYGLPVRHCSRTKFHFGFQTGDIVKAVVTKGKKVGTYVGRIATRATGSFNISTAKGLIQGISHKYCKTIHKKDGYAYGI

SEQ ID NO: 3217 - protein, 423 aa, Moorena sp.
MSNHIFVLDTNRKPLTPCKPGVARSLLKAGKASVFRRYPFTIILNKEVDANPEPLELKLDPGSKVTGIALKQGNHIIFAAELQHRGQQIKEALLSRRQLRRSRRNRKTRYRPARFLNRTRSKGWLAPSWQHRVDTLMTWVHRFRRLAPVGRIAQELVRFDLQLMENPEISGVEYQQGELQGYEVREYLLFKWDRTCAYCGAQNVPLEVEHIHPRSKGGSDRVSNLTMACHSCNQAKGNGDIRDFLSSQPDVLSRLLRQVKSPLKDAAAVNSTRWALFNALKATGLPVTTGTGGQTKFNRLRLNLPKAHWLDTACVGPVESLEVLTSKPLLILAKGHGTRQMCGTNKYGFPNRHRSRRQIHKGFQTGDMVTALVTAGKKIGSYLGRVLCRASGSFDITTASVRVAGISHKYCQPIHRKDGYAYA

SEQ ID NO: 3218 - protein, 442 aa, unidentified
  REGION 1..442: note = Human gut metagenome
MVTVQQSTHHLPFGRVFIRRNLFMVYVISQDGKPLMPCSDPIARLLLKQGKAKVKKREPFTIKLTYETTNYTQGLTLGVDTGSGTIGTAVSKDNGDIVYMSEVVVRNDITDKMTQRAKYRRNRRNRKTRYRKARWLNRASSIKKDRFSPTMQSKLHSHVREIEYIQSILPVTEMVFETGQFDMQLMKNPSLANPKVRPWGYQKGANYGFENTKAMVLNRDNYTCQCCKGKHKDSKLEVHHIVFRSQGGSDEESNLLTLCHTCHKDLHSGKINPKLSGKLKGNLKYATQMNSIRKQLFRFYPNAIETFGYVTKANRLHLGVDKEHYYDACTIATQGNAFNVKSNLYKKKCVSDGDFQKTKGIRSEQPIVTDKICGFRKFDKVRYFGNDYFIKGRMSTGYAILMDIDGNKIDFSTMPRGYKTPKLSNCKRITARSTVMTQVKVV

SEQ ID NO: 3219 - protein, 284 aa, Moorena sp.; identical to SEQ ID NO: 3117

SEQ ID NO: 3220 - protein, 413 aa, unidentified
  REGION 1..413: note = Human gut metagenome
MTSYVFVLDANGKKLAPTKKQKAWFLIRKKRATLVSKYPMVIQLKKKIPDKEICKDEIRCGIDDGSLHVGIALVQKCQTRNKVVFKGIIEQRNDVKHLMDVRRGYRRYHRYHKRYRPARFNNRFSSKREGRIAPSILQKRQAIIRVINRLNKWINITNYWLEDVAIDIRALTDGYKSYSWQYQRSNRLDENIRKAVILRDNCRCKECGKSNCRLEVHHIKPRRLNGPNTLDNLITLCENCHQKTEGKEELYMSRYFGLLKSSDSKRLNYAQHAMIGKKWLREELSNLGMLYLTNGGNTANKRIDWSIEKSHSNDAICITDLQPDTCNIKEWTIKPMRRQSKAKTDNVLGIKHRDLVEYTFRNGETYKGYVTALYPEQKAINFQSSTKHCKKVNARKCKLLWKYSKIYWLENAG

SEQ ID NO: 3221 - protein, 423 aa, Arthrospira sp.
MSNHIFVLDTNRKPLTPCKPGVARSLLKAGKASVFRRYPFTIILNKEVDANPEPLELKLDPGSKVTGIALKQGNHIIFAAELQHRGQQIKEALLSRRQLRRSRRNRKTRYRPARFLNRTRSKGWLAPSWQHRVDTLMTWVQRFRRLAPVGRIAQELVRFDLQLMENPEISGVEYQQGALQGYEVREYLLEKWDRTCAYCGAQNVPLEVEHIHPRSKGGSDRVSNLTMACHSCNQAKGNGDIRDFLSSQPDVLSRLLRQVKSPLKDAAAVNSTRWALFNALKATGLPVTTGTGGQTKFNRLRLNLPKAHWLDTACVGPVESLEVLTSKPLLILAKGHGTRQMCGTNKYGFPNRHRSRRQIHKGFQTGDMVTALVTAGKKIGSYLGRVLCRASGSFDITTASVRVAGISHKYCQPIHRKDGYAYA

SEQ ID NO: 3222 - protein, 406 aa, unidentified
  REGION 1..406: note = Human gut metagenome
MVYIQDIDGKPMMPTTRHGKVRRLLKDSKAVVVNTCPFTIKLMYKTSGYKQEIVLGVDAGTKHVGLSATTKSKELYSSEVILRSDIVELLSTRRESRRTRRNRLRYRKPRFNNRIKSKRTGWVAPSVRHRIDAHIRVIDNICSILPVSRVIVEVAQFDTQKIKNPDISGDEYQEGDQLGFWNVREYILARDGHKCQHCKGKSKDPILNIHHIESRKTGGDSPSNLITLCETCHKEYHKGNIDLKVKRGKSLRDAAVMGIMKWKLYDELKSRCDNVSMTFGYITKYNRIKYGIEKSHTSDAFVISRNFNAKRIERQYLKRLIRRHNRQIHKMKILKGGKKKNNQAPFEIFRFRLFDKVLYNNEILFVYGRRKSGNFNIRDFNGENPKDVSHKKLKLIRGKRHLIILK

SEQ ID NO: 3223 - protein, 379 aa, Arthrospira sp.
MPNYQNYVFVVDTLGQPLSPTHPARARKPLKQGLAAVFRTYPFTIILKKTVENPGNEPLRVKLDPGASVTGIALVSQKTGTVIWGAELAHRGDRIRAKLAARRLVRRHRRCRKTRYRQARFNNRKRPDGWLAPSLKHRVETTLTWVNRLISSCPITDISMELVRFDTQKLLNPEISGVEYQQGVLFGYELREYLLTKWQHQCAYCGAKNIPLEIEHIQPKSQGGSDRVSNLAIACHKCHQKKGSQSAREFLDTKPEILKLLLVQAKAPLKNAAAVNSTRWALLNGLKLTGLPIEIGTGGLTKYNRTVQGLPKTHWLDAACVGKSTPTRLKIKTHQPLLITCFGRGGRQKAAPNKRLPIRHNPLKPIKGWLTGDIAKHKT

SEQ ID NO: 3224 - protein, 451 aa, unidentified
  REGION 1..451: note = Mouse gut metagenome
MTTFVFVLDRKGRSLMPCHPARARKLLKKGRARVHKVFPFTIRLTDRELENSSVQPMLIKIDPGSKETGIALLREEKNKGHHALYFINLQHRGQQIRNALHKRLCLRRSRRSRNLRYRSPRFLNRRRAEGWLAPSLQHRADSILSWVSRLRKITPVERISQELVKFDTQLIQNSKIEGIEYQQGELAGYELREYLLEKFGRKCIYCGADNVPLNIDHVIPKSKGGSNRVTNLVLACVQCNQKKGSRSIEEFLKDKPEVLRQIKNQLKQPLKDAASVNATRWKLFNKLKSTDFPFEVGSGALTKFNRKKFGIPKAHWLDALCVGNVPSVTNWRNLNVLNIKCCGRGAYQRTRTDKYGFPRGICMRQKKVYGFSTGDMVKAIIPKGKKKGVYVGKVAVRKTGSFNLQTSGQTIQGISYRYCRLITHSDGYSYSWKSGPLPPRVETRGILGEVR

SEQ ID NO: 3225 - protein, 480 aa, unidentified; identical to SEQ ID NO: 2726
  REGION 1..480: note = Human gut metagenome

SEQ ID NO: 3226 - protein, 442 aa, Lactobacillus sp.
MKHENANRVFLLNKDGKPLMPCCPRKARLLLKSGKAFVVKKYPFTIQLKYGSYGYKQKVSLGVDTGQRHIGFAIVSQNKVLHQSEVELRQDVHKNLYTRKIYRRSKRNRKTRYRQARFLNRVHGKRDGLWLPPSIKGKVSHNIAWIKRYLAVLPNPDLHIEVGKFDMAKMVNPEISGKQYQEGSLKDWKNYEYYVLARDEYTCQLCHKHGEGVKLVVHHIVYRSHGGTDRISNLITLCTDCHTTKNHQPGGKLYKWMKAKKKVTKQLKGATFMNILRKRIMTAFPEASFQYGSQTYVDRKNLLLPKGHFMDAIAISGIKSVGQLSDTVTLISQFRKKKRSLHEATARKGRKQPNTSSKRNEKNMNYARGLWLNDYVRVIGNHAKGYVKGFKSKGYYVYLTDGLGNYVLSNGKNYINRKQCRLIMHNGNWQKAEQKLSLYEFK

SEQ ID NO: 3227 - protein, 455 aa, Moorena sp.
MSVAVIRKTGIRLMPTNEYRARHLLKAGKAVIEQYRPIFTIRLTEREDGDTQPIEYASDTGYQHVGVSIKSEKHEFVHAQYDMLSNEKERHDKCRKYRRERRNRLRYRKARFRNRKPKMTKGEVSAPSLQHRADNQTRLFDSFCKVMPITSAAFEMGKFDTQLLQAIADGSPLPKGKDYQHGSKYLYQTKRAAVFGRDNYTCQICGRSIKDGAILHTHHIGFWMPYRSNRIGNLLTVCEKCHTAKNHKSGGKLWGLEPKVSNLAGATFMTTVRWRMYYALVLAHPEVDIHIQYGAKTAVVRKARNIAKTHANDAYCIGQLHPLHHCKEVLFVKKRRNSRILAKFYDAKYIDIRDGKKKSGAQLSCGRTNRGESRHTEKNERIYRGQKCSGGRASVRKCHYLFQPGDTVCWKSASYIVKGTHCNGTRVLLETGKSVKLTDLEIIKKQGGYAAPPTA

SEQ ID NO: 3228 - protein, 409 aa, unidentified
  REGION 1..409: note = Human oral metagenome
MPTERFGKVRRLLKEGKAKVVCREPFTIRLLYEPETDVVQECYCGVDTGSRHVGVAVVGNDKVLYQSQIELRNDIKKKMDRRRAFRQNRRFRKTRYRKQRFLNRRNSIKKDRLPPSVKHKVQAHIDEIEFCKKILPVSDLILEVSQFDTALMKSPNLMNEKVRHWGYQKGFNYGYSSRREAVLHRDNYTCQCCGKKNCRLEVHHIKFKSNGGTDDEENLITLCKECHEGIHNGTITLNKKPKKDKGLKHATHMSIIRSWLLKKYPDAIETFGFVTAENRNHLKLKKDHYIDACVIASGGLEFKELNVIYKKRRVSIQDRVLTDGIRDEKKLPTGKVHGFKRYDKVKYLGEICFVKGRRTSGGFVLMDIDNNSIDFRNKGGNLNPHYKFIKRTNARKSILCILQRIEREE

SEQ ID NO: 3229 - protein, 551 aa, Moorena sp.
LTGLSCELYRSYVVRKLKTHPGMLPQFQALKPAAADKLWVGAKRAARMGCRIPKGTRSRRLRATLARGAQPQGCRYKARKGRKGIITMTVFVIDRQGRPLMPCTEKRARLLLARARARVHRVVPFVIRLTDRRAQDSSFQSLRLKLDPGSQTTGIALVQEKADGIAVLNLMELVHRGRQISQALRQRRAFRRRRRGANLRYRAPRFNNRTRAAGWLAPSLQHRVDSTMSWVWRVMRWAPVSALSMELVRFDMQAMQNPDISGVGYQQGELFGYEVREYLLEKWGRKCAYCDAAGVPLQIEHILARARGGSNRVSNLTLGCAPCNIGKGRRDVREFVKDEARLARILSKAKAPLRDAAAVNSTRWALLNALKGTELALETGSGGRTKWNRARLEIPKTHALDAVCVGEVEAVCGWPRPTLELRCTGRGSYQRTRLTAQGFARGYLTRKKRAHGFQTGDRVRAIVPKGKKAGVHVGRVAVRASGSFNIQAPTGVVQGIAHRHCTMVLRADGYGYSTVPLTMEGNSGNGTKAWLAAQVMLSHPGMNAEASRANG

SEQ ID NO: 3230 - protein, 490 aa, unidentified
  REGION 1..490: note = Human gut metagenome
VRHLLKEQKARVVQSNPFTIQLLYETNDVVQPLYLGIDPGRTNIGVAVVKADGTAVFAAHLETRNKKIPKLMQDRKKARRARRTNGRRCRRQRRAKANGTISKKCVKQDTAQSKNPSKRAKEIGVIKRHLPGCKKDVLCVGIKNKEAKYTNRARLEGWLTPTANQLLQTHINLVKKIQKFLPISDVVLEVNKFAFMRLDNPNIQKWQYQRGPLYQKGSLENAVSEMQEHHCLFCEKPIEHYHHVVPKSENGSNTIANIVGLCAEHHNLVHKDVAWQEKLVEEKTGLNKKYGALSVLNQIIPALTKELSFLFPKHSFMTNGKSTHDYRAAHGISKDHWLDAYCIACSVLPIDVCDSTINNCVPYELKQFRRHDRRALNNENMNRVYTLNDKVVATNRHKATEQEAASLEEFRKEHPNDVCKLKVKEHHPTYRNMNRNYPGSVFLVGKQIHVMQGIASSKDGKATKYNDTRATTIAAGKCKFVAKNSGILFV

SEQ ID NO: 3231 - protein, 425 aa, Arthrospira sp.
MPNYQNYVFVVDTLGQPLSPTHRARARKLLKQGLAAVFRTYPFTIILKKTVENPVNEPLRLKLDPGASVTGIALVNQSRDTVIWGAELTHTGDRIRAKLTAHRVVRRHRRCRKTRYRQARFNNRKRADGWLAPSLKHRVETTLTWVNRLISSCPITDISMKLVRFDTQKLQNPEISGVEYQQGVLLGYELREYLLTKWQHQCAYCGGQNIPLEIEHIQPKSQGGSDRVSNLAIACHKCHQKKGSQALEQFLEKKPEILKRLLVQAKAPLKNAAAVNSTRWALFNSLKLTGLPIEIGTGGLTKYNRTVQGLPKTHWLDDADCVGKSTPTRLKIKTHQPLLITCFGRGGRQKAAPNKRLPICHNPLKPIKGWLTGDIAKHKTHGIGRITLRSRGSFVLTKPDKTQFSVKPIDLKPVFRRDGYLYKFS

SEQ ID NO: 3232 - protein, 424 aa, unidentified
  REGION 1..424: note = Human gut metagenome
MRVFVFNMRGRPLMPCSQRKARLLLRENKAMIYKYHPFTIQLTYTTGETKQDCHIGIDTGSKYIGAAVRSEDKVFWKGEIELRQDIRSNLDTKRIYRRSRRNRKTRYRKPKFLNRKRRDEWLPPSLQSRINHTFHWIDTLSSLVPNPILHIEVGKFDVAKMINPEIHGVDYQHGQTYGFFDERYFVFARDNYTCQCCGKSKNKILNTHHIIYRSNGGTNRVDNLITVCTDCHTSQNHRKGGIFYQWQEQHKKVKQYKEPPFMNTLRKRIFVAYPDAEITYGSETTPKRKAMKLDKTHYNDAIVISGINEIKENPEEWLLIKQFRKKKRSLHEATARKGRKKPNRNQTRNSKNTPYYKGFYLNDKVSVFGKSGYITGFTSNAAYIKDENNDYITLPNKTYKQVSINKMKLECHNNNWQYIIKNAV

SEQ ID NO: 3233 - protein, 570 aa, Streptomyces sp.
MRHVRSLNSNVTHTTPLSPKSLRAPASGATCPRRPHVRVISPDPCSLGNPRCVASGTSREGRSLAPSYRVTSPGHHDLRISRGASMTTFFTGEQTHQAVLPQQPALESAGADTPGSRDETAHGLPDPKPGTGVGHGRGETGAVRTRTRRRHARRLDPGSKATGIAVTDERDEVGAKGRTALVRRGLVSIELRHRGRQIHSGMVRRAGHRRRRRSANLRYRAPRRDNRTRPDGWLPPSLRHRIDSTMSLVARLCRYAPVLEIHVEQVAFDTALIAAAVSSREQDFSERTHAGSEIREFLLAKWERSCAYCGATGVLLNIEHVRPRSRGGSDRVANLVIACVPCNQAKGAARIDEFLADRPARLERVIAQLRRPLHDVAAMNTTRLLLVKTLATHGVAVHTWSGGRTSWNRLAMGLPKSHTLDALATGVIDLERGDAVVRIPAQILVVRSTGRGSYARTTPDRYGFPRLQRQRRKIHHGFSTGDLAAAVVPKGKWAGRWVGRVSVRAGGQHRITTLTSRFDVSHRNLRLLQRADGYTYGFADEIRLSEEHGPAYSGRTLKGGDPGNVRTPDA

SEQ ID NO: 3234 - protein, 442 aa, unidentified
  REGION 1..442: note = Human gut metagenome
MSTSVFVLDKKHRPLMPCRPARARRLLRAGRARVVKRFPFVIRLVDRTVEQSEVQPVLIKLDPGSRETGAAVVRDDEKKRHHALAFFVIKHRGGAIRDALKARSAFRRRRRSQNFRCRSPRFLNRVKPKGWLPPSLRHRVETTLSFVRRMCRYLPVSGIATELVKFDSQKLQNPEVSGVKYQQGTLFEYEVREYLLEKFGRKCVYCGAEGVPLNIDHVVPRAKGGSNRVSNLVLACVSCNQKKGARSLEDFLKGKPEVLARVRRELKTPLRDAAAVNATRWVLFNELKATGLPVETGSGALTKLNRHAFGVEKEHWLDALCVGRLNGVVTRKGLNVLEIRCMGRGSRQRTRLTKYGFPRGYLMRQKCVHGFATGDMVEANVPKGKKAGLWRGRVAVRVSGSFNIQTPKGVIQGVGWKHCRLISHNDGYGYAWLGHAPHSSPA

SEQ ID NO: 3235 - protein, 431 aa, unidentified
  REGION 1..431: note = Human gut metagenome
MPGKVYVISRLGHPLMPCSPAKARHLLDDGKAKVVKRTPFTIKLLYGSTEYTQPVILGVDAGSKTIGLSASTTKEELFAAEVMPRNDVVENLSTRREFRRARRNRTTRYRKSRFNNRVHSKNNGWLAPSVEVKIQEHITSIKRVCAILPISKIVVETAEFDLQLLKAVQDGKPVPEGEDYQKGEMYGSYDVRQYVLWRDNYTCTCCGVKGTDKKPVKLHVHHFESRKHGGNAPDNYGTLCEDCHKKLHLGIITDISLKTRKRPSTRDAAFMGIMRKTLMQRLITGLSIPVAETKGYITKAAREEILKLPKTHTNDALAIAQGRHGFGIREQAYVKPTNRIYTVRPVRHHNRQLHKATILKGGIRKLNQASKYIFGFRLYDKVLYQGGECFVWGRRTSGSFLLRTIDGTKVKDGVGYRNLTLLERSTNYLIA

SEQ ID NO: 3236 - protein, 457 aa, unidentified
  REGION 1..457: note = Human gut metagenome
VWLYQAVYNLGEGFLPSSEERTAFYWLLIYRKEHGIMQYVYVLNKHGEPLMPCSPGKARLLLKQQKACVVKRTPFTIKLLYGSAGYKQPITLGVDAGSKHVGLSASTEKRELYREEFTPRNDVVDLLSTRRQNRRSRRNRKTRYRAPRFDNRVHSKHKGWLAPSVEVKIQEHITVIKRICRILPITLVRVETAEFDTQRLKAMLKGKPLPVGTDYQLGEMYDEYNVRQYVLKRDNYTCQCCGAHPTEKKPVRLHVHHLESRHVGGNAPNNLITLCVACHKALHEGKITLDKGKKRGKPLRDAAFMGIMRNTLLARLKDELNIPVKQTYGYITKLLREKNKIPKSHVNDARCIAKAPNAKPCDTMLYTRALRHHNRQIHKAKILNGGIRKKNQAPYLVKGFRLWDKVRYNGEECFITGRRSSGYFALKKYDGTVISNSASYKKLMLLEAATNYITERS

SEQ ID NO: 3237 - protein, 427 aa, Nostoc sp.
MSKIFVIDSEKRPLNPIHPAQARQLLTSKKAAIYRKFPFTLILAESLPEVPVSPLRLKVDPGAKVTGIALVSDSTGEVVFASELNHRGFAIRDALTSRRQLRRGRRARKTRYRKPRFLNRTRPEGWLAPSLQSRVDNIKTLVEKLRRFAPITAISQELVRFDMQLMRNPDIEGKEYQQGTLAGYETREYLLEKWGRQCAYCGVKDAPLQIEHIHPRAKGGSNSITNLALSCEKCNTKKGTKDIKDFLKLDPSKLTKILAQAKKTLADAAAVNTTRFALLNVLKSTGLPVETGSGGLTKFNRSQQMLGKTHWLDAACVGKSTPVLIIKGIEPLLIQAFGHGSRQSCRTDKFGFPNRHVPREKIHFGFQTGDIVKAVVTTGKKIGTYVGKVAIRSSGSFNISTKNGLIQGISHKFCKRIHAKDGYSYAT

SEQ ID NO: 3238 - protein, 426 aa, Moorena sp.; identical to SEQ ID NO: 3177

SEQ ID NO: 3239 - protein, 458 aa, Ktedonobacter sp.
VSKVFVLDTQKQPLNPVHPGRARMLLSSGKAAVFKRYPFTLILKGRGEQPQVAPLRIKIDPGSKTTGIAIVNDTSGEVVFAAELSHRGQEIKKRLERRRGVRRSRRQRHTRYRKPRFENRHNKQRGWIAPSLESRVCNVVTWVQRLMRVCPIVAMSQELVKFDMQAMEQAEIKGIEYQQGTLQGYETREYLLEKWNRMCAYCSAKDIPLQIEHIHPRAKGGSDRLSNVTLACEACNSKKGTQDVRAFLATKPDVLRRILAQAQAPLKDAAAVNTTRWALYERLKALGIPLECGTGGRTKYNRVTRGIEKAHWCDAACVGASTPEHLHLSGVVPLLITADGHGSRQMCLMDKHGFPRTGPKQAKHVQGFQTGDMVCAIVTRGTKIGTYVGRVAVRATGSFNITTKQGTIQGISHRYCTALHTCDGYSYGQGEPLHPSPEKECLFPPPVLPDRGRKEAEV

SEQ ID NO: 3240 - protein, 423 aa, Moorena sp.
MSNHIFVLDTNRKPLTPCKPGMARSLLKAGKASVFRRYPFTIILNKEVDANPEPLELKLDPGSKVTGIALKQGNHIIFAAELQHRGQQIKEALLSRRQLRRSRRNRKTRYRPARFLNRTRPEGWLAPSWQHRVDTLMTWVHRFRRLAPVGRITQELVRFDLQLMENPEISGVEYQQGELQGYEIREYLLFKWGRTCAYCGAQNVPLEVEQIQPRSKGGSDRVSNLTMACHSCNQAKGNGDIRDFLSGQPDVLSRLLRQAKSPLKDAAAVNSTRWALFKALKATGLPVTTGTGGQTKFNRLRLNLPKAHWLDAACVGPVESLEVLTSKPLLILAKGHGTRQMCGTNKYGFPTRHRSRRQIHKGFQTGDMVTVLVTAGKKIGSYLGRVLCRASGSFDITTASVRVAGISHKYCQPIHRKDGYAYA

SEQ ID NO: 3241 - protein, 477 aa, Clostridium sp.
LYTKPSDNIGEGSLPPSGEINLKGMTFMVYVKSIDGKALMPTSNAKARKLLKQKKAKVVSLRPFVVKLTYKTKTEYTQKLNLGVDSGYSNIGFSVIDAKQEYIAGEVKLLEGMKKRLLEKASYRRIRRSRLRYRKARWNNRVKSKKKGWLAPSLKHKLDTHIKFIDYLKNILPIGKITIEVANFDIQKMKDDLISGIDYQNGDMFGFWNVREFVLHRDGHKCQNPNCKHKDKKEQILKVHHIRYRSEGGSDRPENLITLCSKCHTPANHKKGKFLYDWCVNGKKVRGFKDATFMNMIRWYLVNELKSKHNNVSITYGYITKNHRIQNGIEKSHLNDAFAIAKGTNQARTKARFLVIQDRLKNRSLEKFYDSKIIDIRTGKKVSGGDLSCGRSTRNKNLNTENLRKYRGAKISKGQRRIRKQKYFYQPNDLVKYDGKVYTVKGTQNEGKYIALKEIKKVPKVELLIPYVFKKGLNWSY

SEQ ID NO: 3242 - protein, 423 aa, Arthrospira sp.; identical to SEQ ID NO: 2894

SEQ ID NO: 3243 - protein, 426 aa, unidentified
  REGION 1..426: note = Human gut metagenome
MVYVLNKQGKPIMPCKEAKARKLLKQNKAKIAKHEPFTIQLLFDCENQTQEINLGVDAGSKHIGVSATTEKQVLYEADVELRNDIVDKLSSRREARKTRRNRLRYRPARFNNRVKSKHKGWLAPSIEQKINTHIQVIKHLYDVLPITKLIVETAQFDIQKINNPEISGEGYQQGEQLGFWNVREYVLYRDNHECQCCHGKSKDVVLNVHHIESRKTGSNASNNLITLCETCHKAYHKSEIKLNLKRGKSCRDAAFMGIMRKTLLNRLRELYPNIYETYGYITKNVRIENDLPKEHYMDARCISGNPKANPLGYYIYQKCVRRQNRQIHKNNFLKGGHKKNNQLIGDVFGFKLFDTVKYQNKQYFVFGKRKSGFLDIRNLNGENVNNGSISYKKLKRIKHNSIKLVERRRQFLRTPKGDVVSLPNIS

SEQ ID NO: 3244 - protein, 423 aa, Moorena sp.
MSNHIFVLDTNRKPLTPCKPGVARSLLKAGKASVFRRYPFTIILNKEVDANPEPLELKLDPGSKVTGIALKQGNHIIFAAELQHRGQQIKEALLSRRQLRRSRRNRKTRYRPARFLNRTRSKGWLAPSLQHRVDTLMTWVHRFRRLAPVGRITQELVRFDLQLMENPEISGVEYQQGELQGYEIREYLLEKWGRTCAYCGAQNVPLEVEQIQPRSKGGSDRVSNLTMACHSCNQAKGNGDIRDFLSGQPDVLSRLLRQAKSPLKDAAAVNSTRWALFKALKATGLPVTTGTGGQTKFNRLRLNLPKAHWLDAACVGPVESLEVLTSKPLLILAKGHGTRQMCGTNKYGFPNRHRSRRQIHKGFQTGDMVTALVTAGKKIGSYLGRVLCRASGSFDITTASVRVAGISHKYCQPIHRKDGYAYA

SEQ ID NO: 3245 - protein, 437 aa, Moorena sp.
VSNVFIVDHSGKPRDPVHPGYARFLLKQGKASVYRRYPFTIILNKAIEQPQVQPLRIKLDPGSKTTGIAIVNDVSGEIVFAAELFHRGHAIKGALDARRAVRRSRRQRKTRYRKARWQNRKRKQGWLPPSLESRIANVLTWVRRLSRSAPIEAISQELVRFDMQLMENPEVKGVEYQQGTLAGYEVRQYLLNKWNHQCAYCGARDIPLQIEHIHPRAHGGTHRISNLTLACDTCNKAKGTKDIQDFLKKKPEVLKRIEAQAKKPLKDAAAVNASRWALFERLKATGLPVEVGSGGLTKCNRTRRGLPKTHWLDAANVGTSTPDHLITIGVVPLLITATGRGNRHMCLPDKHGFPRTSAKGAKRVKGFQTGDIVKAIITKGKKRGTYVGRVAVRSSGYFNIVTTRGTIQGISYHYCHMIHRSDGYSYTKGGAAFPPVA

SEQ ID NO: 3246 - protein, 346 aa, Moorena sp.; identical to SEQ ID NO: 2872

SEQ ID NO: 3247 - protein, 420 aa, unidentified
  REGION 1..420: note = Human gut metagenome
MQYVYVLNKHGEPLMPCSPGKARLLLKQQKACVVRRTPFTIKLLYGSAGYKQPITLGVDAGSKHVGLSASTEKRELYSEEFTPRSDVVKLLSTRKQNRRSRRYRKTRYRAPRFDNRVHSKHKGWLAPSVEVKIQEHITVIKRICKILPISLVRVETAEFDTQRLKAMLAGKPLPVGTDYQLGEMYDEYNVRQYVLKRDHYTCQCCGAHNTAEKVVKLHVHHLESRKTGGNAPSNLVTLCTTCHKNLHKGKVTLDGKERGKPLRDAAFMGIMRKTLMARLKEELPIPVEGTYGYITKMRREQNDIKKSHTNDARCISKHPLAEPCSVCYRTKAIRHHNRQTHKANFSKKGIRKRSQMPYLVEGYRLWDKVLYKEQECFVSGRRSSGSFTLKKLDGTSVSKGVTFKKLRLLEPATNYLIERM

SEQ ID NO: 3248 - protein, 442 aa, Nocardiopsis sp.
VRTTHPSVFVLDKHGLPLQPCPSARARKLLTKGRAVVARHTPFTIRVKDRTVAESEVDGVEVGIDPGSKHTGIAVFTTQAGERRSRFSLQLDHRGARIKKKLDQRANYRRRRRSTNLRYRAPRFDNRARPQGWFPPSLKHRVDTTIAWVDRLSRWAPVRAVHVERVAFDTHALSVGRPLEGLEYQHGTLHGFEVREYLLAKFDRTCVYCGATNTPLNLDHVHPRSRGGSDRVANLVLACIPCNQAKDNKPVEEFVTNTRTLNRILAQAKAPLRDAAAVNTTRRALWRALDARLPTRVSSGGRTKWNRTRNQLPKSHTLDALAVGKLDTITQTVKTILVAGCTGRGSYSRTRTDKHGFPRLRLPRTKHFFSFATGDLVRAVVPRGKKAGTYIGRVAVRATGSFNIATNQSSVQGISHRHVRLLQRADGYAYTTRKEQSVFSRL

SEQ ID NO: 3249 - protein, 413 aa, unidentified; identical to SEQ ID NO: 2636
  REGION 1..413: note = Human gut metagenome

SEQ ID NO: 3250 - protein, 437 aa, Streptomyces sp.
MPCHPARARELLARGRAVVARRVPFVIRMKDRTRAESGVHGLQLRIDPGSEGTGLVLTDEKTEVGERGAVVTVRRGLFAIELRHRGDQIRTCMQQRAGYRRRRRSANNRYRAPRSRNRTHPAGWLSPSVRHRVDTTFSLAARLSRYAPVTEIHVERVAFSMRQEEHQARGTVRTRLRAKWNSTCAYCGATGVRLNVEHVRPLSRGGSSRISNLVLACVPCNRAKGSESVEDFLAHRPEQLATVLGQIESPLDDAAAMNALSPRLSEALNALGKPVHCWSGRLTKTNRDFCGMRKTHTLDALSVGRLDRESGDRIVRFTGRVLVAKATGRGSYARTTPDRYGFPRLRRSRTKQHFGFVTGDLVRATLPTGTWAGTWTGRVSVRARGQHSVTVPVGRINVSHKHLSLLQRGDGYQYSACAESGALPLSKKEVDRSPVRS

SEQ ID NO: 3251 - protein, 423 aa, Arthrospira sp.
MSNHVFVLDTNRKPLRPCKPGVARSLLKAGKASVFRRYPFTIILNKEVDANPEPLELKLDPGSKVTGIALKQGNHIIFAAELQHRGQQIKEALLSRRQLRRSRRNRKTRYRPARFLNRTRSKGWLAPSLQHRVDTLMTWVHRFRRLAPVGRITQELVRFDLQLMENPEISGVEYQQGELQGYEVREYLLEKWGRTCAYCGAQNVPLEVEQIQPRSKGGSDRVSNLTMACHSCNQAKGNGDIRDFLSGQPDVLSRLLRQAKSPLKDAAAVNSTRWALFKALKATGLPVTTGTGGQTKFNRLRLNLPKAHWLDAACVGPVESLEVLTSKPLLILAKGHGTRQMCGTNKYGFPNRHRSRRQIHKGFQTGDMVTALVTAGKKIGSYLGRVLCRASGSFDITTASVRVAGISHKYCQPIHRKDGYAYA

SEQ ID NO: 3252 - protein, 430 aa, unidentified
  REGION 1..430: note = Human gut metagenome
MPKVYVLNRHGRPLMPCTPAKARHLLDAGKAKVRHRTPFTIQLLYGSTGYTQEVILGVDAGSKTIGLSAATETEELFSAEVKPRNDVVELMSARRQFRRARRNRTTRYRKPRFDNRVRSKHKGWLAPSVEVKIQEHMTAIRRACAILPVSKVVVETAEFDLQLLKAVAEGKPVPQGEDYQKGEMYGHYNVRQYVLWRDSYTCRICGAHGSVRKGVPLHVHHLESRRVGGDAPDNLVTLCTACHDKLHKGIIMVADIKKRKRRSTRDTTFMGIMRMTLLRRLWEQLPVPVVETRGYITKATREKLLVLPKSHTNDALAIAHGPQGFRAEYLPNIRQADRLYTIRPVRHHNRQLHKATILKGGVRKANQAEKYICGFRLYDKVLYNGIECFVWGRRTSGSFLLRQLNGEKVKDGVSYKHLKLLERSQSYLVA

SEQ ID NO: 3253 - protein, 423 aa, Moorena sp.
MSNHIFVLDTNRKPLTPCKPGVARSLLKAGKASVFRRYPFTIILNKEVDANPEPLELKLDPGSKVTGIALKQGNHIIFAAELQHRGQQIKEALLSRRQLRRSRRNRKTRYRPARFLNRTRSKGWLAPSWQHRVDTLMTWVQRFRRLAPVGRIAQELVRFDLQLMENPEISGVEYQQGALQGYEVREYLLEKWGRTCAYCGAQNVPLEVEHIQPRSKGGSDRVSNLTMACHSCNQAKGNGDIRDFLSGQPDVLSRLLRQVKSPLKDAAAVNSTRWALFNALKATGLPVTTGTGGQTKFNRLRLNLPKAHWLDAACVGPVESLEVLTSKPLLILAKGHGTRQMCGTNKYGFPNRHRSRRQIHKGFQTGDMVTALVTAGKKIGSYLGRVLCRASGSFDITTASVRVAGISHKYCQPIHSTDGYAYA

SEQ ID NO: 3254 - protein, 346 aa, Moorena sp.; identical to SEQ ID NO: 2872

SEQ ID NO: 3255 - protein, 428 aa, unidentified
  REGION 1..428: note = Ga0315279_10055842
MLEQERAIVLNGDGQPLGTTKSGRAGYLIRKGKARFVQPMPFTIQLTYTVPNPVMQKHTLGIDDGAKTAGIVVIAHNQTGDAVVLKTEVALRSDVTYLMGFRRSRRQGRRSHLRHRQPRSRRGNKKGQMPPSIQVRKDNVLRVARDQARLLPITRIVYEEGQFDTRAVWNPGVKNYQEGPNSGFENRKKAVLWRDKYTCRYCGVNCVEAGVVAEVDHVLPRSRGGTDAWRNLVCACRDCNQKKDNRTAAEFGHPEVKGTQFKYPAHLQVGKTYIKEELAKLAPVEVVYGWQTSARRKRLGLDKSHVNDAIGMAAVSPSVKDDATEYRVVARRRRRSMQNLRHEDGYAGFRHWDVVRWERRDGQRPIGTVRSFVPGRNTVKCRFDFDDNVGVSAGRLRLVYRPRRLVYVPQSNRKEPVPQSARRQGNTV

SEQ ID NO: 3256 - protein, 406 aa, unidentified
  REGION 1..406: note = Human gut metagenome
MVYVQDIDGSPLMPTTRYGKVRRLLKANKATVISLCPFTIKLLYKTSDYKQEIVLGVDAGTKHVGLSATTKSKELYASEVILRSDVVDLLSTRRELRRTRRSRLRYRKPRFMNRIKSKKRGWIAPSVRHKIDSHIRIISFVYSILPVSKLIVEVAQFDTQKIKNPDISGDEYQEGDQLGFWNVREYILARDGHKCQHCKGKSKDPILNIHHIESRKTGGDSPSNLITLCETCHKEYHKGNIDLKVKRGKSLRDAAVMGIMKWKLYEELKSRYDNVSMTFGYITKYNRINHGIEKSHVSDAFVISGNFDSYRLGYYYKRKLVRRHNRQIHKMKILKGGIKKPNQAPFKVFGFRLFDKVRYQDNVYFVYGRRTSGCFNIRDIDGDNNKNPTFKKLTYISHGLISVETG

SEQ ID NO: 3257 - protein, 408 aa, unidentified
  REGION 1..408: note = Human gut metagenome
MVYVQDINGKPMMPTTRHGKVRRLLKDKKAVVVNLCPFTIRLTYVTSDYKQEIVLGVDAGTKHVGLSATTKSKELYSSEVILRSDIVDLLSTRRELRKTRRNRLRYRKLRFDNRVKSKRSGWIAPSVKYKIDAHIRIVDNVCSILPISRIVIEVAQFDTQKIKNPNISGKEYQEGDQLGFWNVREYVLARDGHKCQYCKGKSKDKILNVHHIESRKTGGDSPSNLITLCETCHKEYHKGNIDLKIRRGKSLRDAAVMGIMKWRLYEELKSKYDNISMTFGYVTKYNRIKHGIEKSHVSDAFVISKNFNAIRLGYYYKVRLVRRHNRQIHKQKIPKGGVKRLNQSPFEVFGFRLFDRVMFENSYYFIFGRRKTGRFNIRDIDGKNQRDITYKKLKLSRCKCFMVQNEMN

SEQ ID NO: 3258 - protein, 423 aa, Moorena sp.
MSNHIFVLDTNRKPLTPCKPGVARSLLKAGKASVFRRYPFTIILNKEVDANPEPLELKLDPGSKVTGIALKQGNHIIFAAELQHRGQQIKEALLSRRQLRRSRRNRKTRYRPARFLNRTRSKGWLAPSLQHRVDTLMTWVHRFRRLAPVGRITQELVRFDLQLMENPEISGVEYQQGELQGYEVREYLLEKWGRTCAYCGAQNVPLEVEHIQPRSKGGSDRVSNLTMACHSCNQAKGNGDIRDFLSGQPDVLSRLLRQAKSPLKDAAAVNSTRWALFKALKATGLPVTTGTGGQTKFNRLRLNLPKAHWLDAACVGPVESLEVLTSKPLLILAKGHGTRQMCGTNKYGFPNRHRSRRQIHKGFQTGDMVTATVTAGKKIGSYLGRVLCRASGSFDITTASVRVAGISHKYCQPIHSTDGYAYA

SEQ ID NO: 3259 - protein, 423 aa, Moorena sp.; identical to SEQ ID NO: 2900

SEQ ID NO: 3260 - protein, 423 aa, Moorena sp.
MSNHIFVLDTNRKPLTPCKPGMARSLLKAGKASVFRRYPFTIILNKEVDANPEPLELKLDPGSKVTGIALKQGNHIIFAAELQHRGQQIKEALLSRRQLRRSRRNRKTRYRPARFLNRTRPEGWLAPSWQHRVDTLMTWVHRFRRLAPVGRIAQELVRFDLQLMENPEISGVEYQQGELQGYEVREYLLFKWDRTCAYCGAQNVPLEVEHIQPRSKGGSDRVSNLTMACHSCNQAKGNGDIRDFLSGQPDVLSRLLRQAKSPLKDAAAVNSTRWALFKALKATGLPVTTGTGGQTKFNRLRLNLPKAHWLDAACVGPVESLEVLTSKPLLILAKGHGTRQMCGTNKYGFPNRHRSRRQIHKGFQTGDMVTALVTAGKKIGSYLGRVLCRASGSFDITTASVRVAGISHKYCQPIHSTDGYAYA

SEQ ID NO: 3261 - protein, 604 aa, Nocardiopsis sp.; identical to SEQ ID NO: 3140

SEQ ID NO: 3262 - protein, 551 aa, Moorena sp.
LTGLSCELYRSYVVRKLKTHPGMLPQFQALKPAAADKLWVGAKRAARMGCRIPKGTRSRRLRATLARGAQPQGCRYKARKGRKGIITMAVFVIDRQGRPLMPCTEKRARLLLARARARVHRVVPFVIRLTDRRAQDSSFQSLRLKLDPGSQTTGIALVQEKADGIAVLNLMELVHRGRQISQALRQRRAFRRRRRGANLRYRAPRFDNRTRAAGWLAPSLQHRVDSTMSWVWRVMRWAPVSALSMELVRFDMQAMQNPDISGVGYQQGELFGYEVREYLLEKWGRKCAYCDAAGVPVQIEHILARARGGSNRVSNLTLGCAPCNIGKGARDVREFVKDEARLRRILSKAKAPLRDAAAVNSTRWALLNALKETELALETGSGGRTKWNRARLEIAKAHALDAVCVGEVKAVCGWPRPTLEVRCTGRGSYQRTRLTAQGFARGYLTRKKRVHGFQTGDRVRAMVPKGKKAGVHVGRVAVRASGSFNIQTPTGVVQGIAHRHCTMVQRADGYGYSTVPLTKEGNSGNGTKAWLAAQAALSHPGMNAEVSRANG

SEQ ID NO: 3263 - protein, 414 aa, unidentified
  REGION 1..414: note = Human gut metagenome
MPCSPAKARLLLKEKKAIVVRRTPFTIQLTIATGEAKQPVSLGVDAGYKHVGLSASTEKAELYASEVELRQDVSDLLSARRALRQSRRSRNTRYRAPRFDNRIRTKRKGWLAPTVENRINVHLSRIETVLRLLPVTKITVETASFDTQLLKNPDIAGKEYQEGEQLGFWNVREYVLFRDGHVCQHCHGRSKDPVLNVHHLESRRTGGDSPGNLITLCETCHKALHRGEIKLKAKRGRSFRAETFMGIMRWGVLNRLKASHPKLEVHNTYGYRTKHARIANGIAKSHCADAFCIAGNFGAKRLGEFFFQKQTRRNNRQIHKLSILKGGIRKRNQAPFEVNGFRLFDKVACKGEEGFIFGRRSSGFFDVRKLDGTCISAGISYKKLHLLEKRRTYLTEIRKEEALPPPPEGRGLRA

SEQ ID NO: 3264 - protein, 420 aa, unidentified
  REGION 1..420: note = Human gut metagenome
MVYVLNINGQPLMPTNRHGKVKCLLKQGKAKVIRRCPFTIKLLYQSTAYTQNLTLGVDTGSGIIGTAVSKDNGNIVYMSETIVRNDITDKMTQRAKYRRNRRNRKTRYRKTRWLNRKNSIKTDRFSPTMQSKLHSHVKEIEYIKSILPVTTMVLETGQFDTHLMKNPSLANPNVKHWGYQKGANYGFENTKAMVLNRDNYTCQCCKGKHKDSKLEVHHIVFRSQGGSDEESNLITLCHTCHKDLHSGKINPKLKGKVKGTLKYATQMNSIRKQLFRVYPDAIETFGYVTKANRLALGIDKKHYYDACTIATQGNIFIVKSNLYKKKCVSDGDFQKTKGIRSEQSIVTDKICGFRKFDKVKYFGKEYFIKGRMSTGYAILMDIDGHKINFSTMPKGYKIPKLSNCKRVTARTSQMLQAVVI

SEQ ID NO: 3265 - protein, 389 aa, unidentified
  REGION 1..389: note = Human gut metagenome
MCAICLKSKKRESYKVIRLPSKNKEAKYTNRERPEGWLTPTANQLLQTHVNLVKKVQKLLPISDVVLEVNKFAFMRLDNPDIQKWQYQQGPLYKKESLESAVSEMQEHHCLFCKKPIDHYHHVVPKSENGSNTIANIVGLCAEHHNLVHKDVAWQEKLAEEKTGLNKKYGALSVLNQIIPALTNKLSVLFPKHFFVTAGKSTHDYRAAHGVSKDHWLDAYCIACSVLPSNVCDSNINNHVPYELKQFRRHDRRVLHKANMSRVYTLNGKAVATNRHKAIKQTTDSLEEFRQNYPDDVYKLKVKEHHPAYRNLNRNYPGSVFLVGKQAHVMQGIASSKDGKTTKYNDTNATTITAGKCKFVAKNSGILFVQCKFRKALSDGTTKKLQYPV

SEQ ID NO: 3266 - protein, 229 aa, Anabaena sp.
VKDVPFQVEHIHPRAKGGSNSITNLTLSCEKCNTKKGTKDIKDFLKKDPSKLEKILKQAKRPLADAAAVNTTRLALLFVVKATGLPVETGSGGLTKFNRSQQNLEKTHWIDAACVGQSTPILNIKGVKPLLITANGHGTRQSCRTDKYGFPSRYVPRFKFVNGFQTGDIVKAVVTKGKKIGAYIGRVAVRTSGSFNISTVPGLIQGISYKYCKSIHKKDGYEYGKSKIC

SEQ ID NO: 3267 - protein, 400 aa, unidentified
  REGION 1..400: note = Human gut metagenome
MRVFVLNMRGEPLMPCSQRKARLLLKSNKAVIYKYNPFTIQLTYATGEARQDCHIGIDTGAKHIGAAVTSKDKVLWKCEIELRQDVKSNIDAKRIYRRSRRNRKTRHRKPRFLNRKRNDDWLPPSLQNRINHTFHWIDALSSLVPKPILHIEVGKFDTAKMINPEIHGVDYQHGRTYGFFDERYYVFARDNYTCQCCGKSKGKILQTHHIIYRSNGGTDRVDNLITVCTDCHTSQNHKKGGIFYKWQEQHKKVKQYKEPPFMNTLRKRIFAAYPSAEITYGAETTPKRKAMKLDKTHYNDAIVISGINKINENPEEWLLIKQFRKKKRSLHEATARKGRRMPNRNQVRNCKNMPYYKGFYLNDKVSIFGKSGHVTGFTTNGAYVKDDNGNYITLPNKSYI

SEQ ID NO: 3268 - protein, 471 aa, Caldicellulosiruptor sp.
LVIFTVDKHGRPGHPTRRFDMVRKLVKQGRAKIIGGGASGKPPVVMFLDREFDYSKTIERRLFVVLDPGYHHIGFAVCELRWGVLIVYCIGVLETRIPEIKDLMTKRRGYRRNRRYHSRCRKKRMSKRHSRVLTKFKAPRNVRTKDRTNATLRHGIETHLNLYKKLLKFFPFPAEQVVFVMEDNIFDVRTMTWGKTYGTGYQKSPRVPAEKKCIICGTEDNLQKHHLIQRKCGGTDVQENLVYLCRDCHEDVHAGRVYIPVEGVRQWRALGTMNAIIGQLREIPWLKFVPASDAAQMRKKLGLKKGHANDALATAAVFCSCTEADRTHMIELTLVKFRRHNRARIHAVRDRLYKVDGKIVAKNRRKRTDQKEPSFADISPLPPEIQRKLKVYPGTKILNPLRKETPTIAGDVWIHEPTGKRFVTTGVVSQKYLYSPQLKKIVGKMYVQPEECRQVLHNEGMVVMYNSLYHS

SEQ ID NO: 3269 - protein, 351 aa, unidentified
  REGION 1..351: note = Human gut metagenome
NRKRCPDWITPTVQHLVQTHLNIIRKISRYLPVTDIAFEVNRFAFMHMENPEAMGVDFQNGPLKGYGDVKEAIRTQQHGKCLMCKKPIAHFHHIVPRSRGGSDTIQNLAGLCPECHTKVHTDTTFRKDFDRKKSGQLKKYGALSALNQAVPFICKKLLEEYGEEHVHFCGGLDTSLIRTALGFEKTKKNQMHEVDAYCIGLAALEVNEVETPAFDHTFQIRQFRRQDRSIIHHQTGRSYYQGKEKVAQNRKPGFEQKTTALSQWYKEQVRIHGEKEAEKLRSQLRVEKSCRHYNDMDRFLPGAVFLYEGKRYVLSGRITNGKYLRACGQGMKNFPAAECTFIRHNAGLVFI

SEQ ID NO: 3270 - protein, 425 aa, unidentified
  REGION 1..425: note = Human gut metagenome
MVYVISQDGQPLMPTDRHGKIRRLLKSDKAKVVKHCPFTIQLLYGSTDYTQEISLGIDAGSKYIGISATTQNRVLYESDVELRNDIVSLLSARRQNRRTRRNRKTRYRKPRFNNRISCKKKGWLAPSVRQRVNTHLTVVAKGHQILPVTRIIVETASFDIQKIKNPTISGTDYQQGDQLGFWNVREYVLFRDGHVCQCCKGKSKDKILNVHHIESRKTGGDSPDNLITLCKTCHTGYHRGTIKLPKTIHRGMFFRDASFMGIMRWSFYDELKTLYPDVNLTFGYITKNTRIKNNLPKEHYIDARCISGHPLAVSDETYYYQKKVRCHNRQIHKNTILKGGVRKRNQAPYFVKGFRLFDKVMYQGQECFIFGRRSTGRMDLRLLDRTHINASVSYKKLKLIESRKNYITERRTAVPPTGKSVDFPA

SEQ ID NO: 3271 - protein, 423 aa, Arthrospira sp.
MSNHIFVLDTNRKPLTPCKPGMARSLLKAGKASVFRRYPFTIILNKEVDANPEPLELKLDPGSKVTGIALKQGNHIIFAAELQHRGQQIKEALLSRRQLRRSRRNRKTRYRPARFLNRTRPEGWLAPSLQHRVDTLMTWVHRFRRLAPVGRITQELVRFDLQLMENPEISGVEYQQGELQGYEVREYLLFKWGRTCAYCGAQNVPLEVEHIQPRSKGGSDRVSNLTMACHSCNQAKGNGDIRDFLSGQPDVLSRLLRLAKSPLKDAAAVNSTRWALFKALKATGLPVTTGTGGQTKFNRLRLNLPKAHWLDAACVGPVESLEVLTSKPLLILAKGHGTRQMCGTNKYGFPNRHRSRRQIHKGFQTGDMVTALVTAGKKIGSYLGRVLCRASGSFDITTASVRVAGISHKYCQPIHSTDGYAYA

SEQ ID NO: 3272 - protein, 401 aa, Ferroplasma sp.
LIPCKPAKARHLLSDRKARVISSNPFTIQLLWHCEENVETITLGIDSGYKHIGFSAVTDNKELISGEVVIRTDIPKLNEEKAMYRRKKRNKLWYRKPRFMNRGNNKEGWFAPSIEHKLETHIRLIEKLKRILPVSNTVIEVASFDTQKMKNPEISGIEYQQGELQGYEIREYLLEKFHHICVYCSKTGVPLEIEHLTPRSRDGPDTVNNLAISCHECNQKKNNLTAEEFGYPEVRKRALITMRDAAFMNTVRWKLTQLAGSEHTLGFITKKNRISLSLDKTHVNDAFVIAGGTVQIRTSPFTITQRRRNNRSIQTNRKGFRPSIIRKRYAFQPGDMVLHDHERFSVVGMHNYGKSIVIKGGEKKMDINTKKVKLVKYGKGLQFAPQFLPTLSDGVSLGEVR

SEQ ID NO: 3273 - protein, 372 aa, Moorena sp.; identical to SEQ ID NO: 3022

SEQ ID NO: 3274 - protein, 337 aa, Oscillatoria sp.
LSKVFVLDTKSQPLNPIHPGRARMLLSQRKAAVFRSFPFTLILKEEVSSPDIEPLRIKIDPGAKTTGLALVNDKTGEVVWVAELQHRGFQIRDALTSRRQLRRSRRSRKTRYRKPRGLNRTHPKGWLPPSLNSRVANILTWVKRLSLLCQINAISQELVRFDTQKMENPEISGIAYQQGTLAGYEVREFLLSKWNRTCAYCGAKDVPLEIEHIQPRSKGGSNRVSNLCLACVPCNQEKGNQDIKDFLKGKPDLMKRILAQAKRPLADAAAVNTTRWNLYENLKKLGLPVEVGTGGRTKYNRTIRGLEKTHYIGRGLRWRIHSRAANNYWNKTLTDCC

SEQ ID NO: 3275 - protein, 450 aa, Clostridium sp.; identical to SEQ ID NO: 2935

SEQ ID NO: 3276 - protein, 509 aa, Streptomyces sp.; identical to SEQ ID NO: 3085

SEQ ID NO: 3277 - protein, 411 aa, unidentified
  REGION 1..411: note = Human gut metagenome
MVYVQDIDGKPMMPTTRHGKVRRLLKDNKAVVVNTCPFTIKLTYKTSDYKQEIVLGVDAGTKHVGLSATTKSKELYSGEVILRNDIVELLSTRRESRRTRRNRLRYRKPRFENRVKSKRLGWVAPSVRHRIDAHIRIINNVCSILPVSRVIVEVAQFDTQKIKNPEISGKEYQEGDQLGFWNVREYVLARDGHKCQHCKGKSKDPILNIHHIESRKTGGDSPSNLITLCETCHKEFHKGNIKLKVKRGKSLRDAAVMGIMKWRLYDKLKSLYPNVRMTFGYITKHDRINHGIEKSHVSDAFVISRNFDSERLGYYYKLKLVRRHNRQIHKMKIPKGGKKRMNQSPFKVFGFKLFDKVMFQGEERFIYARRLSGQFKIKDIDGNNERNISYKKLRYVSHGLISIKTNLFLSQ

SEQ ID NO: 3278 - protein, 423 aa, Arthrospira sp.
MSNHVFVLDTNRKPLRPCKPGVARSLLKAGKASVFRRYPFTIILNKEVDANPEPLELKLDPGSKVTGIALKQGNHIIFAAELQHRGQQIKEALLSRRQLRRSRRTPKTRYRPARFLNRTRSKGWLAPSLQHRVDTLMTWVHRFRRLAPVGRIAQELVRFDLQLMENPEISGVEYQQGELQGYEIREYLLFKWGRTCAYCGAQNVPLEVEQIQPRSKGGSDRVSNLTMACHSCNQAKGNGDIRDFLSGQPDVLSRLLRQAKSPLKDAAAVNSTRWALFKALKATGLPVTTGTGGQTKFNRLRLNLPKAHWLDAACVGPVESLEVLTSKPLLILAKGHGTRQMCGTNKYGFPNRHRSRRQIHKGFQTGDMVTALVTAGKKIGSYLGRVLCRASGSFDITTASVRVAGISHKYCQPIHRKDGYAYA

SEQ ID NO: 3279 - protein, 380 aa, Moorena sp.; identical to SEQ ID NO: 3156

SEQ ID NO: 3280 - protein, 439 aa, unidentified
  REGION 1..439: note = Wastewater metagenome
LVFVIDKQKNQLLPTTNAKARILLNANKAVIHKIYPFVIRLKTSKTINANNKCAIKLDPGANTTGVAIVDKEKCLFLMEIIHRGKEIRKALFQRKVVRRNRRQRNTRYRQARFQNRIKRNGWLAPSVKSRADNIINIVNKLSKYIPLTNVAIENVSFNTTDMTEGIKLYGKEYQNGNLKDTKLRKFLMEKYNNRCNYCGSIEKLEVEHILSKSKGGTDSIKNLTLSCRKCNELKNNLSLKQFGKLINRDLSHLEPLQTPKSAAIIQSARNYTIAQLAKSFEIETGEGWETSFNRKEVNLPKEHYYDALCVGKDYDYRIVANTVLVIKARGRGSRQMCLMDKYGFPRTSPKSSKSVKGFQTGDIIKAKVPDGKKQGKYFGKVAVRTNGYFNITTDTQTIQGIGHKHCKVIQRGDGYAYFMKGASGFLSGLEDRVSTAILR

SEQ ID NO: 3281 - protein, 426 aa, Moorena sp.; identical to SEQ ID NO: 3182

SEQ ID NO: 3282 - protein, 423 aa, Moorena sp.
MSNHVFVLDTNRKPLRPCKPGVARSLLKAGKASVFRRYPFTIILNKEVDANPEPLELKLDPGSKVTGIALKQGNHIIFAAELQHRGQQIKEALLSRRQLRRSRRNRKTRYRPARFLNRTRSKGWLAPSLQHRVDTLMTWVHRFRRLAPVGRIAQELVRFDLQLMENPEISGVEYQQGELQGYEVREYLLEKWGRTCAYCGAQNVPLEVEQIQPRSKGGSDRVSNLTMACHSCNQAKGNGDIRDFLSGQPDVLSRLLRQAKSPLKDAAAVNSTRWALFKALKATGLPVTTGTGGQTKFNRLRLNLPKAHWLDAACVGPVESLEVLTSKPLLILAKGHGTRQMCGTNKYGFPNRHRSRRQIHKGFQTGDMVTALVTAGKKIGSYLGRVLCRASGSFDITTASVRVAGISHKYCQPIHRKDGYAYA

SEQ ID NO: 3283 - protein, 427 aa, Moorena sp.
MSKVFVLAPNKKPLNPVHSGQARRLLNQGKAAIFRRIPFSIILKKEVNNSANPLRVKIDPGAKTTGLSLVNDQTGEVIWAGELTHRGFAIRESLTSRRQLRRSRRGRKTRYRQPRFNNRKRVDKSLPPSLMSRVHNILTWVRKLTRLAIITAISSELVRFDTQALENPEIRGTEYQQGELAGYEVREYLLEKFNRKCIYCSQTDTRLEIEHLTPRSKGGSNRVSNLGIACQPCNQKKGNRDVLSFLKGKQDLAKKILDQAKKPLADTAAVNATRWELFNQLKQFNLPVEVGTGGLTKFNRCRQNLDKTHWLDAACVGQSTPEQLIIKGVRPLLIKANGHGTRQMCGTNKYGFPIRHRSRIKIHKGFQTGDIVKAIVTSGKKIGIHAGRVLCRASGSFDIASKSGRVTGISHKNCRVVHKNDGYAYEF

SEQ ID NO: 3284 - protein, 409 aa, unidentified
  REGION 1..409: note = Human gut metagenome
MENTLKVFVLNMRGQPLMPCSPPKARKLLRAGKAVPVRRTPFVIQLTVPTGETKQPITLGVDAGYKHVGLSATTAKEELLASEVELRQDVTGLLSNRLALRRARRNRKTRYRAPRFDNRIRSKHKGWLAPSVENRIQAHISRIEAVCRVLPITKIVIETASFDIQKIKNPEVEGTDYQQGEQLGFWNVREYVLFRDGHVCQACKGRSKDLILNVHHIESRKTGGDAPGNLITLCEACHKAYHAGKLKQFSPRRGASFRAETFMGIMRWTVLNRLRERHPELPVTNTYGYLTKHKRIVAGLPKTHCADAFCIAGVLDAKRRGEYLFQKQTRRHNRQIHKLTILKGGVRKRHQAPYLVHGFRLFDKVLCKGEVGFIFGRRSSGAFDVRRLDGTKISAGISYKKWLFVHSCG

SEQ ID NO: 3285 - protein, 398 aa, unidentified
  REGION 1..398: note = Human gut metagenome
MQYVYVLNKHGEPLMPCSQRKARLLLKQKKACVIKRTPFTVKLLHGSAGYKQPVTLGVDAGSKHIGISATTEKHELYREEATPRNDVVDLLSARRAFRRSRRNRKTRYRAPRFNNRVHSKHKGWLAPSVEVKIQEHITLIKHVFRILPVTLVRVETAEFDTQRLKAMLEGKPLPVGTDYQLGEMYDEYNVRQYVLKRDNYTCQCCGAHSTKTKGVKLHVHHIETRRTGGNAPNNLITLCKACHKALHAEKVTLDGKKRGKPLKDAAFMGIMRKTLMERLRKELKIPVQGTYGYITKYLREKNGIPKSHTNDARCISKNPLAIPCDTCYYTKAVRHHNRQLHKATILKGGIRKANQAPYIVKGYRLWDKVAYNGTECFITGRRTSGYFALKELDDTVVS

SEQ ID NO: 3286 - protein, 553 aa, Nocardiopsis sp.
MDVPDYVRSEITSCDRPPLPAPAITLGEVTSMATFRAGQKTHQAVLPQRPALESAPADTRRISDETGRGHRSRNSSAVPGAEHVRGETGTASPGGSGVTPEPFGAGEKGREAHTRQSDPYVFVLDRSGTPSQPCHPTRARKLLATGRAVVHRHTPFVIRLRDRTIEDSEVDGVELGIDPGSKHTGIAVFTHQGGERRGRYAIQLDHRGSRIRKKLAQRANYRRRRRTSDLRYRPPRFDNRTRPRGWLPPSLQHRVDTTTSWVDRHTRWAPVEAVHVERVAFDTHVLSVAEPLEGAEYQQGTLHGYEVRDYLLSKCGRACLYCGATNVPLNIDHVHPRSRGGTDRVSNLVLACVPCNQAKNDRPVEEFAPGAATRVHQRAKAPLADAAAVNATRWALWLALDARLPTRVGTGGRTKWNRTLNQLPKSHTLDALCVGKVEKVTQTVRTVLVAGCAGRGTYARTRPDKHGFPRLRLPRTKGFFEFATGDLVRAVVPKGKKAGAHTGRVAVRASGSFSITTAHGIVQGINHRHLRLLQRADGYAYTIREEEGVSSRP

SEQ ID NO: 3287 - protein, 465 aa, unidentified
  REGION 1..465: note = Human gut metagenome
MSTCVCVLSNSGERLMPTFRLGKVRRLLKDGKAKIVKHHPFTIQLLYDSKTNTQPIEICEDVGYNYIGISVKSQSHEYVSAQYDTLQDEKACHDSCRKLRRSRRNRLRYRQKRFNNRKHDKGWLAPSLRHKKELNVNVVKMYCAVMPITHATIEVGSFDTMLVKAIQEGKAIPEGADYQKGPRYNLATLREAVFYRDNYVCKVCGRKATEGAILHMHHMFYWKGRHGNSLSELITVCEKCHTPANHQKGGKLYGFGENVKFADLSGAAFMNTVRWQIVNELYAAFGKDFVTITYGAMTKEKRIALRLEKSHNNDAYAMGEFHPNHRCTFEHYEKVRRNNRTLEKFYDSRYIDIRTGEIATGKELFNGRINRNHKKDSENLHRYRGKRTYAGHRALLRKKVNLNPGDLVSLNGEVLIVHGTHTNKKGAVNVEFKVPAKNGQKSASLKKLKIVKTTDSMHSAWKKIS

SEQ ID NO: 3288 - protein, 420 aa, unidentified
  REGION 1..420: note = Human gut metagenome
MQYVYVLNKHGEPLMPCSPRKARLLLKQKKACVIKRTPFTVKLLYGSTGYKQPVTLGVDAGSKHIGISATTEKHELYREEATPRNDVVDLLSARRAFRRSRRNRKTRYRAPRFDNRVHSKHKGWLAPSVEVKIQEHITLVEHVCRILPVTLVRVETAEFDTQRLKAMLEGKPLPVGTDYQLGEMYDEYNVRQYVLKRDNYTCQCCGAHSTKTKGVKLHVHHIETRRTGGNAPNNLITLCTACHKALHAGKVTLDGKKRGKPLKDAAFMGIMRKTLMERLRKELKIPVQGTYGYITKCLREKNGIPKSHTNDARCISKNPLAIPCDTCYYTKAVRHHNRQLHKATILKGGIRKANQAPYIVKGYRLWDKVSCNGTECFITGRRTSGYFALKKLDGTVVSNSISYKKLRLLEAATNYITERK

SEQ ID NO: 3289 - protein, 380 aa, Moorena sp.; identical to SEQ ID NO: 3156

SEQ ID NO: 3290 - protein, 413 aa, unidentified
  REGION 1..413: note = Human gut metagenome
MTSYAFVLDANGKQLAPTKEQKAWFLIRKKRAALVSKYPMVIQLKKEIQENEICKDEIRCGIDDGGLHVGIALVQKCKTKNKVVFKGTIEQRNDVKHLMEVRRGYRRYHRYHKRYRQARFNNRKSSKREGRIAPSILQKRQATIRVINQLNKWINITNYWLEDVSIDIRVLTDGYKSYRWQYQKSNRLDENIRKATILRDGGKCMECGKSNCRLEVHHIKPKRRNGSNTLDNLITLCESCHQKTEGQEELYMDRYFSLLKSSDNKNLNYAQHVMIGKMWLRKQLSGLGVLYLTSGGDTANKRIDWNIEKSHANDAVCITDLQPDTYDMKEWTMKPMRRQSKAKTDHVLGIKHRDLVEYTFKNGETHRGYVTALYPEQKAINFQSPTKHCKKVNARKCKLLWKYSKIYWFENAS

SEQ ID NO: 3291 - protein, 396 aa, unidentified
  REGION 1..396: note = Human gut metagenome
VVRRTPFTIQLTIATGESKQPVSLGVDAGYKHVGLSASTEKAELYASEVELRKDITDLLSARRALRQSRRNRKTRYRAPRFDNRIRTKRKGWLAPSVENRINAHLSRIEAVLRLLPITKITVETASFDMQRLKNPDISGKEYQEGEQLGFWNVREYVLFRDGHVCRHCHGRSKDPVLNVHHLESRRTGSDSPDNLITLCVTCHKALHRGEITLKAKRGQSFRAQAFMGIMRREVLNRLKASYPELKVHETYGYLTKHARIANGIVKSHGADAFCIAGNLGAERLGEFFFQKQTRRNNRQIHKLSILKGGIRKRNQAPFEAKGFRLFDKVACQGEEGFIFGRRSSGSFDVRKLDGTRISAGISCKKLRLLEKRRTYLTEIRKEEALPPLPEGRGLRA

SEQ ID NO: 3292 - protein, 522 aa, Nocardiopsis sp.
LATFRAGQQTHQAVLPQRPALESAPADTPWIWNETGRGHRREAVPGAEHGRGETGAASPGGTGVTPEPSRAGEQGREAHTIEQVHPAVFVLDKRGTPLQPCHPARARNLLRKERAVVARHTPYTIRLKDRTVADSQVEGVEVGIDPGSKHTGITVFTEQAGQRRGRYAIQLDHRGARIRKKMGQRSGYRRRRRSTNLRHRPPRFDNRIRPRGWLPPSLRHRVDTTVSWADQLTRLAPVRAVHVERAAFDTHALSAGRSLEESEYQQGTLCGFEVREYLLAKFDRSCVYCGATNTPLNIDHVHPRSRGGSDRISNLVLACVPCNQDKDDQPVEEFVKNARTLARVKAQAKSPLKDAAAVQSTRWALWRALDIRLPAHVGSGGRTKWNRTRNHLPKSHTLDALCVGKAETVTEVVHTVLVVGCAGRGSYARTRPDRHGFPRLRLPRTKGFFGFATGDLVRAVVPKGKKAGTHTGRVAVRASGSFNITTGHGTVQGIGHRYLRLLQRADGYAYTTRKESGVSSRS

SEQ ID NO: 3293 - protein, 456 aa, unidentified
  REGION 1..456: note = Human gut metagenome
MSTCVCVLSNSGKRLMPTFRLGKVRHLLKDGKAKIVKHHPFTIQLLYDGKTNTQPIEICEDVGYNYIGISVKSQSHEYVSAQYDTLQDEKACHDSCRKLRRSRRNRLRYRKPRFDNRKRGEGWLAPSLKHKKELNVNVVKMYCAVMPITHATVEVGSFDTMLVKAIQEGKAIPEGADYQKGPRYNLATLREAVFYRDNYVCKVCGRKATEGAILHVHHMFYWKGRHGNSLSELITVCEKCHTPANHQKGGKLYGFGENVKFADLSGAAFMNTVRWQIVNELYAAFGKDFVTVTYGAMTKEKRIALHLEKSHNNDAYAMGNCHPAHRCEFGHYQKRCRNNRVLEKFYDATYIDTRTGDKAKGKELFNGRISRNHKKDSEDLHKYRSKKVSKGRRSIRRQRYAIQPYDTVRLESKSYITSGCHNKGTRLLIPANGKSKSVAISKVQVVCHAGAWIQII

SEQ ID NO: 3294 - protein, 426 aa, Moorena sp.
LKGVGMMSEIKKVDYIYVVDSNGTPLMPTSRLGMVRRWLKTGQAKWFGNSRNTIQFVRPVTTNTQELTLGVDAGFHLGLSVVGNNREYYVSESLRKSEKDRITSRRELRRTRRNRLRYRKARFNNRRRKDGWLAPSIQHRLDFTIKEIKRLYKFLPITNLVVEVTPFDNQKLLNPDIQGWQYQKGKMYGFKTIKDYLLARDNYRDALDGKQYPASQLRVHHLVQRKDGGSNQPDNLVLLSDINHNQANHNNGILAKLRENRQKTLDYRGAYFMSILATRLSNYFEHYTTTQGYLTANLRQKLRNNNRVLQKFYDAKYIDSRDGKQKAGKELSSGRTRRSQELNYDNLRQLRKEKVKKGRVSIRRGHYQLRPHDVVLNTRTNRIETVKGVQNSGTVIKFQTGKTCSIKSVVSLYHVNGILEKKMKNI

SEQ ID NO: 3295 - protein, 413 aa, unidentified
  REGION 1..413: note = Human gut metagenome
MTNYAFVLDANNKQLAPTKEQKAWFLIRKKRATLVSKYPMIIQLKKKIPDKKICKDEVRCGIDDGGLHVGIALIQKCQTRNKVVFKGVIEQRNDVKHLMDVRRGYRHYHRYHKRYRPARFNNRKSSKREGRIAPSILQKRQATIRIINQLNKWINITNYWLEDVAIDIRALTDGYKPYRWQYQKSNRLDENIRKAVILRDGCKCMECGKSNCRLEVHHIKPRRLKGSSTLDNLITLCTKCHQKTEGVEELYMDRYFALLNSSDNKSLNYAQHVMIGKKWLREQLSNLGILYLTNGGDTANKRIDWDIAKSHSNDAICITDLRPDTCEIKELTIKPMRRQSKVKTDNVLGIKHRDLVEYTFRNGETHRGYVTALYPEQNALNFQSPTKHCKKVNASKCRLLWKYSKIYWLDNVS

SEQ ID NO: 3296 - protein, 429 aa, Ktedonobacter sp.
VSNVFVIDSDYKPLNPVHPGHARRLLRQGKAAVFRRYPFTIVLKRVVEQPEVQPLRLKLDPGSKTTGIALVNDTNGHIVFAAELSHRGHAIKDSLDSRRASRQGRRQRKTRYRKPRFDNRRRKKGWLPPSLESRLANILTWVARLCRYAPIAALSQELVKFDMQLMENPDIAGVQYQQGTLQGYEVREYLLEKWERTCAYCGKQDVPLQVEHIHPRARSGTNRISNLTLACQACNTAKGTQEIEVFLQKKPDVLKRLLAQVKKPLKDASTVNSTRCALLERLKALGLPVECGSGGLTKWNRTTRGLPKTHWLDAACVGKSTPDVLVQKGVIPLRIKATGHGRRQMCVPDKYGFPKQHKERKKKFLGYQTGDMVKAITPKGPFEGRIAIRHRPSFRLEKVDIHPKYMRCVQRSDGYEYTQKGVRHAPPHG

SEQ ID NO: 3297 - protein, 414 aa, unidentified
  REGION 1..414: note = Human gut metagenome
LKGLSRTCGSLRFKEKTLKVFVINKRGKPLMPCKPAKARHLLRDGKARVVRRTPFTIQLTIATGENVQPIHLGVDAGSKHIGLSATTEKEELFSSEVELRKDITDLLSSRREMRRARRNRKTRYRAPRFDNRVHAKNKGWLAPTLENKISAHLSRIKAIRAILPVSRITIEVASFDIQKIKNPEIEGEQYQQGEQLGFWNVREYVLFRDGRKCCHCHGKSKDPILNVHHIESRKTGGDAPNNLITLCETCHKAYHAGKIQLTAKRGEKFTDATHMGIMRWELFKRAKEANLGIPVKTTFGYITKVRRIQFGIAKTHCADAFCIAGNLNAKRLGEYGEFQKFEKRGVGRHDHSPLSLMSEWRIIVVLKIQNPTFRHGDILPQIQRPAVSFLQSAYGWFFAPSPEQKRSRGIPWYR

SEQ ID NO: 3298 - protein, 463 aa, unidentified
  REGION 1..463: note = Human gut metagenome
CRENIRIKGGQLMSVAVISKTGERLMPTSEYRARKLLKSGKAIKYSYHPFTIQLTERKTGNIQPIELCMDTGYIHIGISVKSEKHEYLTEQIDTLTDERSRHNARRMYRSQRRNRKRYRQPRFNNRKKDKGWIAPSLEHKKNIHVQAISRINNVMPLTDITMEMGNFDTQVLKAKEEGRPLPQGVDYQHGERYSIATLREAVFARDGYKCQCCGRTIKDGAILHVHHIKYRSQGGTNSISNLATVCDKCHTPKNHKPGGKLYGWKPKLPSFKGATFMTTIRWQLYNEAKALFPDIDIHITYGAATKERRRELNIDKSHINDAFVMGQFHPRHRIKAVLYKKKRRNNRCLEKFYDAKYIDSRDGKKRSGQELFNGRINRNHKKDSENLHQYRLQKVTAGKRTVRKQHYSVQPHDIIIYESRKRETTGCHCNGARVMLLPDKKSVSIKKIKIYRYASGYFKSTFN

SEQ ID NO: 3299 - protein, 423 aa, Moorena sp.
MSNHVFVLDTNRKPLTPCKPGMARSLLKAGKASVFRRYPFTIILNKEVDANPEPLELKLDPGSKVTGIALKQGNHIIFAAELQHRGQQIKEALLSRRQLRRSRRNRKTRYRPARFLNRTRPEGWLAPSWQHRVDTLMTWVHRFRRLAPVGRITQELVRFDLQLMENPEISGVEYQQGELQGYEIREYLLEKWGRTCAYCGAQNVLLEVEHIQPRSKGGSDRVSNLTMACHSCNQAKGNGDIRDFLSGQPDVLSRLLRQAKSPLKDAAAVNSTRWALFKALKATGLPVTTGTGGQTKFNRLRLNLPKAHWLDAACVGPVESLEVLTSKPLLILAKGHGTRQMCGTNKYGFPNRHRSRRQIHKGFQTGDMVTALVTAGKKIGSYLGRVLCRASGSFDITTASVRVAGISHKYCQPIHRKDGYAYA

SEQ ID NO: 3300 - protein, 426 aa, Parasutterella sp.; identical to SEQ ID NO: 3045

SEQ ID NO: 3301 - protein, 423 aa, Arthrospira sp.
MSNHIFVLDTNRKPLTPCKPGVARSLLKAGKASVFRRYPFTIILNKEVDANPEPLELKLDPGSKVTGIALKQGNHIIFAAELQHRGQQIKEALLSRRQLRRSRRNRKTRYRPARFLNRTRSKGWLAPSLQHRVDTLMTWVHRFCRLAPVGRIAQELVRFDLQLMENPEISGVEYQQGELQGYEVREYLLFKWDRTCAYCGAQNVPLEVEHIQPRSKGGSDRVSNLTMACHSCNQAKGNGDIRDFLSGQPDVLSRLLRQAKSPLKDAAAVNSTRWPLFKALKATGLPVTTGTGGQTKFNRLRLNLPKAHWLDAACVGPVESLEVLTSKPLLILAKGHGTRQMCGTNKYGFPNRHRSRRQIHKGFQTGDMVTALVTAGKKIGSYLGRVLCRASGSFDITTASVRVAGISHKYCQPIHRKDGYAYA

SEQ ID NO: 3302 - protein, 406 aa, unidentified; identical to SEQ ID NO: 2752
  REGION 1..406: note = Human gut metagenome

SEQ ID NO: 3303 - protein, 428 aa, Moorena sp.; identical to SEQ ID NO: 3139

SEQ ID NO: 3304 - protein, 432 aa, Moorena sp.
MQTNYVFLLNADKTPLDLIHPARARELQSKGKARVFRHYPYVLILQHQIINPFTKSYSIKIDPGSVWTGFVLQCGDEILFRMELKHRSLNIKSDLEQRAGFRRGRRSRNLRYRQKRFNRKRPQGWLAPSLMHRVLTVETWIKRFIRYCPVNCIEIEQVHFDMQKIMNPEISGTGYQQGTLMGYEVRQYLLEKWGRECAYCGAKNVPLEIEHVYPKSKGGSDRVSNLTLACHQCNQAKGNQDIQDFLSGKPDLLKQILGQMKRPLNHAAAVNSTRFAIVAMAKKLCGAVKCWTGGRTKFNRTQQGLGKSHSIDAACVGESGASIKLQTHQPLMVFCKGHGNRQARRVNASGFPAVEKAKDIFHHVTAGDIVKVQITKDRKKVKAGIYTTRVKTPTCKGCEVLIDGSRVTLSTMKDIVFVHRSDGYSYGLLKNS

SEQ ID NO: 3305 - protein, 634 aa, Nocardiopsis sp.
MTRAPSSARSSLGGASSTFPMGTPASVRVPVPPLVPAPPSTTVIPVLSRYGWLVTPSETWFRGPSAKDNHLRPQPTSRGNAFPARRRGFRPPGRGPGVTSTSQHQGGDQLATFHTGEKTHQAVLPQRPALESASADIPRNGNETGRGSHVRGAPGVEHVRGETTGGSPTAGGVAPVPPGAGEQAREDRPPKTTPREGHPYVFVPDRHGTPLQPTHPARARRLLARGRAIAARHTPFVIRLKDRTTAESGVDGVETGIDPGSKRAGTAVFTDRRGERRGRCAIRPDHRGGQIAKRMRQRAAYRKGRRSRNLRYRTARFDNRTRPRGWPPPSLRHRVDTTLAWVGRPARWAPVRAVRVERVAFDVHALGAGRPAEGVEYRHGTLHGYEVREYLLAKWGRACAYCGATGTPLNIDHVRPRSRGGTDRVADLALACVPCNRAKADQPVEEFVTNPRALAGISAQTKAPLRDAAAVDATRWALWRSLDECPPTRVGSGGRTKWNRTRDHLPESHTLDALAVGRVEAVTTAVSTVLVVGAAGRGPYARTRADRHGFPRLRLPRRKRFFGFQTGDLARAAVPSDMNAGTHTGRVAVRSSGSHTLQTSYGPIKTSWKNLCLLQRADGYGYTTQKEAGAPSTA

SEQ ID NO: 3306 - protein, 465 aa, unidentified
  REGION 1..465: note = Human gut metagenome
MSTCVCVLSNSGERLMPTFRLGKVRHLLKDGKAKIVKHHPFTIQLLYDSKTNTQPIEICEDVGYNYIGISVKSQSHEYVSAQYDTLQDEKACHDSCRKLRRTRRNRLRYRKPRFDNRKRGEGWLAPSLRHKKELNVNVVKMYCAVMPITHATVEVGSFDTMLVKAIQEGKAIPEGADYQKGPRYNLATLREAVFYRDNYTCQVCGRKVADGAILHMHHMFYWKGRHGDSLNELLTVCEKCHTPANHQKGGKLYGFGENVKFADLSGAAFMNTVRWQIVNELYAAFGKDFVTVTYGAMTKEKRIALRLEKSHNNDAYAMGEFHPNCRCTFEHYEKVRRNNRILEKFYDSRYIDIRTGEIATGKELFNGRINRNHKKDSENLHRYRGKRTYAGHRALLRKKVNLNPGDLVSLNGEVLVVHSTHTNKKGAVNVEFKTPGKSGQKSASLKKLKIVKAADSMHSAWEKIS

SEQ ID NO: 3307 - protein, 535 aa, Nocardiopsis sp.
VLPQQHALEFESADTPRIGDETGLEHRTTVPGAGHGRGETPGSSPGSRGVTPEPSRDGEQGREAYTLDPFVFVLDRYGTPLQPCSPARARKLLTKGRAVVARHTPFTIRLKDRTAGDSEVDGVEIGIDPGSKHTGIAVFTTEAGERRGRYSLQVDHRGSSVRKRLRQRSAYRRRRRSANLRYRSPRFKNRTRPRGWLAPSLRHRVDTTMGWVHRLARWAPVRAVHVERVAFDTHALSAGKPLENAEYQFGTLHGYEVREYLLAKWDRTCCYCGATGVPLNIDHIYPRSRGGFDRVSNLTLACMPCNQAKGDRLIGESASSPKTLARITAQAKAPLLDAAAVSSTRWALWRALDARLPTHTASGGRTKWNRFRTGLSKSHSFDALAVGKLDSITEVVGRVLHVACTGRGRYARTTSDKHGFPRLRLSRRKQFYDFGTGDLVRAVVPSGKRQGTHTGRVLVRAKGSFDITTATGRQAGINHRHVRLLQRADGYGYALREESPVHNPSLTADQPVLADLSRSEFLPAVNNGASFKGAQ

SEQ ID NO: 3308 - protein, 532 aa, unidentified; identical to SEQ ID NO: 3169
  REGION 1..532: note = Human gut metagenome

SEQ ID NO: 3309 - protein, 470 aa, unidentified; identical to SEQ ID NO: 2825
  REGION 1..470: note = Human gut metagenome

SEQ ID NO: 3310 - protein, 425 aa, Aphanothece sp.
MSNYVLVIDSNKQPLNPCHPSVARKLLKSKNAAIFRQYPFTIVLKKEILDVVIEPIEIKIDPGSQTTGIALVQGDKVIFGAELSHRGSTIKDSLESRRSLRRGRRSRKTRYRQARFLNRKKPSCWLAPSLQHRVDTTLTWIKKLIKFAPIVGISQELVRFDLQQLENPEISGVEYQQGELVGYEVREYLLNKWDRKCSYCSIENVPLQVEHIHPKAKGGTNRISNLCLACESCNLKKGTKDINVFLAKKPDVLKRILSQAKRPLKDAVAVNSTRWTLFNALKNTGLPITTGSGGKTKFNRTRLNLPKQHWIDAACVGIVDTLKVLTNKPLLIKATGHGTRQSCRTDKYGFPSRYVPRFKFIKGFQTGDIVKAVVTKGKKIGTYVGRVAVRSIGSFNISSPNGLIQGISYKNCTHIHKKDGYSYAT

SEQ ID NO: 3311 - protein, 437 aa, Moorena sp.; identical to SEQ ID NO: 3245

SEQ ID NO: 3312 - protein, 540 aa, Streptomyces sp.; identical to SEQ ID NO: 3207

SEQ ID NO: 3313 - protein, 544 aa, unidentified
  REGION 1..544: note = Human gut metagenome
MKQKKQKVMVYILNKKGKPLMPTTRCGHVRKLLDSKKAVVVNSNPFTIRLKYDTPNGVQDVFAGIDSGRENIGSGVSNEDGDCLYLGELRTSNKSIKMKMTERVGFRRERRKHDRQNKQRKARKDHTEIQNGKDDICRATISCKSVQISYPTAEESVTHKIIRGKEGKFANRHRDEGWITPSARQLVQMHMNDLKSMCKILPISHVTLERVAFDFQKLENENIKVWEYGKGKLYGYDSPEEYIHDVQNGKCLVCGKPHIDYLHHIIPRSKGGSDKVSNIAGLCYDCHYGPMGVHNCQNTQDRLPELKSEANKQYKVSLLNSVMPVLIEEMDKFCKANSIMFSICEGHDTAKVRDMYDLQKDHCIDGFAISLVDRNVKSVDVMPDRIYQKQRYKKKSKNIIQKRNCREYYDDKKLVAVNRHKGTDQKADSLEEYMNTYAETHTADECKMHFESLTVKPARRTYTFHKEGRICPLHIGDKVRYEKKNKIKGNTKVDTFICEGIYFSKDENKAKVEHNKTKSKKMKFCRAIESGCIPYIDYIKLALI

SEQ ID NO: 3314 - protein, 418 aa, unidentified
  REGION 1..418: note = Human gut metagenome
PLMPCSPAKARHLLDDGKAKVVKRTPFTIKLLYGSTEYTQPVILGVDAGSKTIGLSASTTKEELFAAEVMPRNDVVENLSTRREFRRARRNRTTRYRKPRFNNRVHSKNNGWLAPSVEVKIQEHITSIKRVCAILPISKIVVETAEFDLQLLKAVQDGKPVPEGEDYQKGEMYGSYDVRQYVLWRDNYTCTCCGVKGTDKKPVKLHVHHFESRKHGGNAPDNYGTLCEDCHKKLHLGIITDISRKTRKRPSTRDAAFMGIMRKTLMQRLITGLSIPVAETKGYITKAAREEILKLPKTHTNDALAIAQGRHGFGIREQAYVKPTNRIYTVRPVRHHNRQLHKATMLKGGIRKLNQASKYIFGFRLYDKVLYQGGECFVWGRRRSASFLLRTIDGTKVKDGVGYRNLTLLERSTNYLIA

SEQ ID NO: 3315 - protein, 380 aa, Arthrospira sp.; identical to SEQ ID NO: 3196

SEQ ID NO: 3316 - protein, 572 aa, Nocardiopsis sp.; identical to SEQ ID NO: 2991

SEQ ID NO: 3317 - protein, 423 aa, Moorena sp.
MSNHVFVLDTNRKPLTPCKPGMARSLLKAGKASVFRRYPFTIILNKEVDANPEPLELKLDPGSKVTGIALKQGNHIIFAAELQHRGQQIKEALLSRRQLRRSRRNRKTRYRPARFLNRTRPEGWLAPSWQHRVDTLMTWVHRFRRLAPVGRITQELVRFDLQLMENPEISGVEYQQGELQGYEIREYLLFKWDRTCAYCGAQNVPLEVEQIQPRSKGGSDRVSNLTMACHSCNQAKGNGDIRDFLSGQPDVLSRLLRQAKSPLKDAAAVNSTRWALFKALKATGLPVTTGTGGQTKFNRLRLNLPKAHWLDAACVGPVESLEVLTSKPLLILAKGHGTRQMCGTNKYGFPNRHRSRRQIHKGFQTGDMVTALVTAGKKIGSYLGRVLCRASGSFDITTASVRVAGISHKYCQPIHRKDGYAYA

SEQ ID NO: 3318 - protein, 456 aa, unidentified
  REGION 1..456: note = Human gut metagenome
WLYQAVYNLGEGFLPSSEERTAFYWLLIYRKEHGIMQYVYVLNKHGEPLMPCSPGKARLLLKQQKACVVKRTPFTIKLLYGSAGYKQPITLGVDAGSKHVGLSASTEKRELYREEFTPRNDVVDLLSTRRQNRRSRRNRKTRYRAPRFDNRVHSKHKGWLAPSVEVKIQEHITVIKRICRILPITLVRVETAEFDTQRLKAMLKGKPLPVGTDYQLGEMYDEYNVRQYVLKRDNYTCQCCGAHPTEKKPVRLHVHHLESRHVGGNAPNNLITLCVACHKALHEGKITLDKGKKRGKPLRDAAFMGIMRNTLLARLKDELNIPVKQTYGYITKLLREKNKIPKSHVNDARCIAKAPNAKPCDTMLYTRALRHHNRQIHKAKILNGGIRKKNQAPYLVKGFRLWDKVRYNGEECFITGRRSSGYFALKKYDGTVISNSASYKKLMLLEAATNYITERS

SEQ ID NO: 3319 - protein, 416 aa, unidentified; identical to SEQ ID NO: 3007
  REGION 1..416: note = Human gut metagenome

SEQ ID NO: 3320 - protein, 540 aa, Streptomyces sp.; identical to SEQ ID NO: 3207

SEQ ID NO: 3321 - protein, 431 aa, unidentified
  REGION 1..431: note = Human gut metagenome
MPDKVYVISRLGHPLMPCSPAKARHLLDDKKAKVVKRMPFTIRLLYGSTKYIQPIILGVDAGSKTIGLSASTAKEEVFAAEVMPRNDVVENLSTRREFRRARRNRTTRYRKPRSDNRVRSNHERWLAPSVKVKIQEHITSIKRVCTILPISKVVIETAEFDLQLLKAIQEGKPIPEGEDYQKGEMYGSYNVCQYVLWRDNYTCICCGVRGTPKNPVRLHVHHFESRKYGGNAPDNHGTLCDDCHKKFHLGIITDVKLKTRRRQSTRDAAFMGIMRKTLMWRLRTELFIPVAETMGYITKATREKLLVLPKSHTRDALAIAQGRHGFGIKEYAYVEPANHIYTVRPVRHHNRQLHKASILKGGIRKRNQASKYVFGFRLYDKVLYQGKACFVWGRRTSGTFLLRTIDGIKVKDGVSYRNLTLLERSSNYLIA

SEQ ID NO: 3322 - protein, 452 aa, Lactobacillus sp.
MSEVQKVNYIYVVDSNGTPLMPTSRLGMVRRWLKTGQARWFGNSRKIIQFVRPVTTNTQELTLGVDAGFHLGLAVIGNKREYYASESLRQSEKDRITSRRELRRTRRNRLRHRQARFDNRRRKESWLAPSVQHRLDFTIREIKRLYTFLPIAKLVVEVTPFDNQKLLNPNIKPWEYTQGKLHGFKTIKAYLLARDNYRDVLDGKQYPASQLRVHHLVPRKDGGTNQPDNLVLLSDINHSQANHNNGILAKLRENRQKALDYRGAYYMSILATRLSDYFDNYTTTQGYLTANLRQKYGIEKSHLNDAFIIAGGTDTTLRTNNVYSRQKLRNNNRILQKFYDAKYIDSRDGKKKPGKELSSGRTRRSRELNYTKLRQFRKTKIKKGWVSIRKNHYQLRPHDVVLNTKTNKIETVTGVQNSGTVIKFQTGKTGSIKNVVSLYHVNGMLEKKIKDI

SEQ ID NO: 3323 - protein, 543 aa, Streptomyces sp.; identical to SEQ ID NO: 3211

SEQ ID NO: 3324 - protein, 470 aa, unidentified; identical to SEQ ID NO: 2825
  REGION 1..470: note = Human gut metagenome

SEQ ID NO: 3325 - protein, 452 aa, unidentified
  REGION 1..452: note = Ga0315295_10005350
MSKQTLQREFQNVPTGAPLACSSTTLPLNRDERTSVVGIVLSCNNPEVGQRKQVSGLKVTVPVLSITGSPLMPCSLTKARHLLERRRAKIVSLNPFAIKLTFECENKTQEVSLGVDTGYKHIGFSAITKTKELVSGEIVLDDKTSKRLTERKMYRSNRRSRLRYRKPRFNNRKTPKGWLPPSVQRRLDTHINIINRLKELTPVKKMTVEIGAFDIQKLMDPEISGKEYQQGNLYGYNNLKAFLFSREHGKCQLCGKEIVKGEKAHLHHIKPRSETGTDRPSNIALLHEDCHDKLHKKGLYKKLKAPKQYKSETFMSIVADRLKKVLDCDVTYGYETAIKRNVLGIEKSHVNDALVIAGGTNQDRCLPYSVEQKRINNRVLQTNRKGFAPSIRKQRHKIQNRDFVWIGGRRCVCGGVACKGAMIYYFYGTEKKTIYYKKVSRFFSTGSLVWMN

SEQ ID NO: 3326 - protein, 469 aa, Desulfonema sp.; identical to SEQ ID NO: 3149

SEQ ID NO: 3327 - protein, 522 aa, Nocardiopsis sp.; identical to SEQ ID NO: 2662

SEQ ID NO: 3328 - protein, 430 aa, Moorena sp.
MQIQANYVFLLNHDRTFLNMVHPARARELLTKQKAAVYRSYPFAIVLKQQILNPTLKPYRLKIDPGSKWTGFAIQCGEDIVFGMELKHRGLQISADLKQRASVRGSRRSRNLRYRAKRFNRKQPTGWLAPSLRHRVQTVETWIKRFMRYSPITEIEIEQVRFDTQLMQNPEISGVQYQAGELAGYEVKQYLLEKWEQKCSYCGATDTPLEVEHIQAKSKGGSNRVSNLALSCVPCNQKKGNRDIQDFLSGKPDLLQRILAQAKQPLKDAAAVNSTRFAIVRMAKELCDTVKCWTGGRTKFNRTQQGLEKSHSIDAACVGKSGRSIQLRTTQPLIVTCFGHGTRQEIRVNKHGFPAVKNTRVRYKHVKTGDTVKFTLDTDRKNSRAGTYTARVKKPTAKGFEVLINQFRIGVSTIKNVKFIHRQDGYSYRF

SEQ ID NO: 3329 - protein, 534 aa, Micromonospora sp.; identical to SEQ ID NO: 3092

SEQ ID NO: 3330 - protein, 470 aa, Blautia sp.; identical to SEQ ID NO: 2925

SEQ ID NO: 3331 - protein, 423 aa, Arthrospira sp.; identical to SEQ ID NO: 2900

SEQ ID NO: 3332 - protein, 396 aa, Massilia sp.; identical to SEQ ID NO: 3212

SEQ ID NO: 3333 - protein, 442 aa, Anaerostipes sp.
MVTVQQSTHHLPFGRVFIRRNLFMVYVISQDGKPLMPCSDPIARLLLKQGKAKVKKRDPFTIKLTYETTNYTQGLTLGVDTGSGTIGTAVSKDNGDIVYMSEVVVRNDITDKMTQRAKYRRNRRNRKTRYRKARWLNRASSIKKDRFSPTMQSKLHSHVREIEYIQSILPITEMVFETGQFDMQLMKNPSLANPKVRPWGYQKGANYGFENTKAMVLNRDNYTCQCCKGKHKDSKLEVHHIVFRSQGGSDEESNLLTLCHTCHKDLHSGKINPKLSGKVKGNLKYATQMNSIRKQLFRFYPNAIETFGYVTKANRLHLGVDKEHYYDACTIATQGNAFNVKSNLYKKKCVSDGDFQKTKGIRSEQPIVTDKICGFRKFDKVRYFGNDYFIKGRMSTGYAILMDIDGNKIDFSTMPRGYKTPKLSNCKRITARSTVMTQVKVV

SEQ ID NO: 3334 - protein, 443 aa, Caldicellulosiruptor sp.; identical to SEQ ID NO: 2385

SEQ ID NO: 3335 - protein, 420 aa, unidentified
  REGION 1..420: note = Human gut metagenome
MQYAYVLNKRGEPLMPCSPGEARLLLKQQKACVVKRTPFTIKLLFGSAGYKQPITLGVDADSKHVGLSASTEKRELYSEEFTPRSDVVELLSTRRQNRRSRRNRKTRYRAPRFNNRVHSKHKGWLAPSVEVKIQEHITVIKRICRILPVTLVRVETAEFDTQRLKAMLAGKPLPVGTDYQLGEMYDEYNVRQYVLKRDNYTCQCCGAHTTAKKTVKLHVHHLESRKVGGNAPSNLITLCTTCHNNLHKGKITLDGKKRGKTLRDAAFMGIMRNTLLTRLRNELNIPVQNTYGYITKLLREQNDIKKSHVNDARCISKHPLAKPCSVCYRTKAIRHHNRQIHKAKILKGGIRKANQAPYIVKGFRLWDKVLYNEQECFISGRRSSGYFALRKFDGTTITNSISFKKLRLLEPATNYLIERK

SEQ ID NO: 3336 - protein, 410 aa, Singulisphaera sp.
MLAFVLNHKGEPLMPCSPAKARHLLKQGKAKVIRRDPFTIKLLFGASGYRQEVVAGMDAGSKSIGAAAVANGKVVYQAEVQIRDDVSGKMKQRVMYRRNRRSRKTRYRPARWNNRAAMRADGRLAPSIRSKIESHLRERNFIASILPVTRWKVELASFDTHKITNLAVDGAGYQDGAQKGYYNIKAYVLHRDDYACQSGRKVKHSQKLNVHHVTFRSNGGTDTPSNLLTLCESCHDDLHAGKFVILAKKSKTKHATEIGIVKASLKKSGWSFEEMFGYETKYKREQCLGWPKSHAADAVAICCGDGEVVEPRPVTYRKRHVSKGDYQQTSGKRGEKRTPTGKLFGLRKFDLVESPKGVGFVKGKRSSGYFAIATLDGIAIHNSAKATACKRIAARSTTLTTRIHAAPSHA

SEQ ID NO: 3337 - protein, 519 aa, Nocardiopsis sp.; identical to SEQ ID NO: 3114

SEQ ID NO: 3338 - protein, 438 aa, Oscillatoria sp.
MSNFVFVLDTNKQPLEPVAPGQARRLLKLTQAAVYLRYPFTIILKYAVDHPKTQPAQLKIDPGSKTTGLAIVQGNQVIWGAELTHRGQQIKNDLESRRAIRRNRRNRKTRYRKPRFLNRTRAPGWLPPSLESRVKNIVTWVNRIRRYVPVTGISQELVLFDLLAMQNPEISGKEYQQGELAGYEVREYLLAKWGRKCAYCGVENVPFEVEHIHPKSKGGSDRVSNLTLACRGCNQAKGNQDIRDFLSKKPDILSRILKQASQPLKDANAVNSTRWALFQQLKQTGLAIEVSTGGKTKYNRSRLGLPKTHWLDAACVGNVEVLQVFTKQPLLIAAKGWGSRQMCTTNKYGFPVKHRTRCKTFFGFGTGDMVSAILLFGKFAGTHIGRLTVRESGVFEMRTPLGKVSPVRHKYCKSIHRNDGYMYAFSTNVRPMNQRLEA

SEQ ID NO: 3339 - protein, 515 aa, unidentified
  REGION 1..515: note = Human gut metagenome
MTALEEKLSKTEYIYVLGFDGKPQMPTRRKRHVLKLLKTGRARIAEDIPFTIRLTYRNAPVLQPVTLAEDPGRTNIGAAVLSPLGDLLFAAVIETRNKEIKKLMADRQKSRQASRRGERKARQRLAKRYGSMVKSGMVMRKLPMYAADKFVICKFIRNTQARFCNRKRCPDWITPTVQHLVQTHLNIIRKISRYLPVTDIAFEVNRFAFMHMENPEAMGVDFQNGPLKGYGDVKEAIRTQQHGKCLMCKKPITHFHHIVPRSRGGSDTIQNLAGLCTECHTKVHTDTAFRKDFDEKKSGQLKKYGALSALNQAVPFICKKLLEEYGEEHVHFCRGLDTSLIRTAFGFEKTKKNQMHEVDAYCIGLAALEVNEVETPAFDHTFQIRQFRRQDRSIIHHQTGRSYYQGKEKVAQNRKPGFEQKTTALSQWYKEQIRIHGEKEAEKLRSQLRVEKSCRHYNDMDRFLPGAVFLYEGKRYVLSGRITNGKYLRACGQGMKNFPAAECTFIRHNAGLVFI

SEQ ID NO: 3340 - protein, 431 aa, unidentified
  REGION 1..431: note = Human gut metagenome
MVYVLNKNGQPLMPTNRHGKVRRLLKINKAKVIKRCPFTIQLLYNTTNCIQNITLGVDAGSKHIGLSATTKDKVLFEADVELRNDITKLLEARRKFRHSRRNRKTRYRKRRFNNRVSSKHKGWLAPSIEHKIQTHFAMVEKVHKMLPITKIVVETASFDMKLLKAQLEGEPIPKGTDYQKGELTGWNIREYIFHRDNYTCQWCKGKSKDLILVTHHHAYWKGDHTNKPSSLITLCNTCNDSKYHKKEANRLWGWEPKITNSYKHAAFMNVMRWVFYNRLKEIYANVSMTYGYITKNTRIKNNLPKTHYLDARCISGNPKAKSSGEYFYYKKVRCHNRQLYKANTLKGGIRKRNQAEYTVKGFKLFDRVEYQNHEYFIFGRRASGFFDIRNLNGQKVNKGSVSFKKLKLKETNKTYLIERCTVDTRDDLAPL

SEQ ID NO: 3341 - protein, 425 aa, Nodularia sp.; identical to SEQ ID NO: 3165

SEQ ID NO: 3342 - protein, 456 aa, unidentified
  REGION 1..456: note = Ga0315294_10013537
MSKQTLQREFKNVPTGAPLTCNSTSTPLNRDERTSVASGILSCNNPEVGLRKRVSGRKVIVPVLSITGSPLMPCTPAKARHLLERRKAKVVSLNPFAIKLTFECENKTQEVSLGIDSGYKYIGFSAVTKTKELVSGEVELDDKTSKRLTERKMYRGHRRNRLRYRKPRFNNRKTPEEWLPPSVQRRFDTHVNMIAKLKELTPVKKVTVEIGAFDIQKLMDSEISGKGYQQGDLYGYNNLKAFLFYREQGKCQFCGKKIDKGEKAHLHHIKLRSETGTDRPSNMALLHEDCHDKLHKKGLYKKLKAPKEYKAETFMSIMAARLKKALNCDVTYGYETAIKRNLLGIEKSHVNDAFVIAGGTNQERCLPCRVEQKRINNRTLQTNRKGFAPSIRKQRHKIQNRDFIWIGDKKYLCGGIASKGAMIYYFDGIEKKTIYYKEVNKFYSTGSLAWINYVSL

SEQ ID NO: 3343 - protein, 413 aa, Moorena sp.; identical to SEQ ID NO: 2600

SEQ ID NO: 3344 - protein, 512 aa, unidentified
  REGION 1..512: note = Human gut metagenome
MSTVYVLNKDGKPLMPTTRGGHVRYLLKEKKARVVTSKPFTIQLLYETDDVVQPLYLGIDPGRTNIGVAVVKADSTAVFTAHLETRNEEIPKLMQGRKKARRARRTNGRRCRRQRRAKANGTISKKCVKQTTAQNGSASKRAKEIGVIKRHLPGCEKDVLCIGIKNKEAKFSNRTRPEGWLTPTANQLLQTHINLIKKIRKFLPVNDVVLEINKFAFMQLDNPNIQKWQYQQGPLYQKASLEEAASEMQEHHCLFCKKSIAHYHHVVPQSENGSNTIGNIVGLCTKHHDFVHKDTAWQKKLAKKKTGLNKKYGALSVLNQIIPALTKELSSLFPKHFFATNGKSTHDYRIAHGVSKDHWLDAYCIACSVLPNDTCDRTINSRVPYELKQFRRHDRRALHKENMSRVYTLNGKSVATNRHKAAEQTTDSLEKFRQRQPNDVCKLKVKEHHPTYRNMNRNYPGSIFLIGKQVHVMQGIAGSKDGEATTYKDTNANSIAAGKCKFVAKNSGILFV

SEQ ID NO: 3345 - protein, 325 aa, unidentified
  REGION 1..325: note = Human gut metagenome
RKTRYRAPRFDNRIRTKRKGWLAPSVENRINAHLSRIEAVLRLLPVTKITVETASFDLQLLKNPDISGKEYQEGEQLGFWNIREYVLCRDGHVCQHCYGRSKDPVLNVHHLESRRTGGDSPGNLITLCEMCHKALHRGEITLKAKRGQSFRAEAFMGIMRWEVQNRLKASHPELEVNNTYGYRTKHARIANDIAKSHCADAFCIAGNLGAERLGEFFFQKQTRRNNRQIHKLSILKGGIRKRNQAPFEVNGFRLFDKVACKGEEGFIFGRRSSGFFDVRKLDGTRISAGISYKKLHLLEKRQTYLMEIRKEEAFPPLPEGRGLRA

SEQ ID NO: 3346 - protein, 432 aa, Moorena sp.
MSCVFVVDANRTPLDPVHPGRARWLLKQKKAAILRRYPFTILLKTEHTDEPGQLLRLKIDPGSKTTGIAVVNDTTGQVVFAAEVHHRGQVIKKRLDDRRGVRRSRRQRKTRYRPARWANRRKKEGWLAPSIESRIHNVITWVNRIRRWCPIGAISQELVKFDLQKMEHPEITGREYQQGTLYGYELREYLLQKWQRRCSYCQQENVPLQVEHIVPRAKGGTNRASNVCLACDACNKAKGTQDLAVFLAKKPDLLKKIQAQAKAPLKDAAAVNATRWHLYQRLKATGLPIECGSGGLTKYNRTQRGLEKTHWLDSCCVGMSTPKLLGTTHVRPLFIQAMGHGSRQMCVTDATGFPKQHKARCKHSFGYQTGDIVKAIIPKGKYRGTYEGRIIIRHRPSFRLGTFDVHPQYLRCIHRADGFRYAQKGDGNSSHP

SEQ ID NO: 3347 - protein, 417 aa, unidentified
  REGION 1..417: note = Human gut metagenome
MPCSPAKARLLLKEKKAIVKRRTPFTIQLTIATGEAKQPITLGVDSGYKHIGLSATTEKAELYASEVELRQDITDLLSARLALRRSRRSRKTRYRAPRFNNRVASKRKGWLAPSVENRITAHMSRVEAVMRVLPVTAITVETAAFDTQLLKNPDIAGEAYQQGEQLGFWNVREYVLFRDGHVCQHCRGKSKDPILNVHHIESRRTGGDAPNNLITLCETCHKAFHRGEIELKVRRGKSFKAATFMGIMRWTLFERLKKAHPELSVRNTYGYLTKHKRISHGIAKSHCADAYCIADNLGAKRLEGFFFQKQTRKHNRQIHKLSILKGGLRKKNQAPYEVKGFRLFDKVICKGEEAFIFGRRTSGSFDVRRLDGTRISAGISYKKLRLLEPRTTYLTEFRKEAALPPLHKCRGFRAEFL

SEQ ID NO: 3348 - protein, 453 aa, Nostoc sp.
MSKVFVIDSEKAPLNPIHPAQARQLLRNKKAAIYRQFPFTLILVESFPDSPIGFSSFDSTGTAFAERLAEKTRTASPISPLRLKIDPGAKVTGIALVNDSTGEVVFAAELKHRGFTIRDALASRRQLRRSRRARKTRYRKPRFLNRTRPPGWLAPSLQSRVKNIKTWIEKLRRFAPITAISQELVRFDMQLMRNPDIQGSLYQQGTLAGYETREYLLEKWGRQCAYCGVKDVPLQIEHIYPRAKGGSNSITNLSLSCEKCNTKKGTKDIKEFLKTDPSRLEKILKQAKRPLADAAAVNTTRFALLNTLKTTGLPVETGSGGLTKFNRSQQNLEKSHWLDAAAVGVSTPILNIRGVKPLLITANGHGSRQSCRTDKHGFPSRYVPRFKFVKGFQTGDIVKAVVTTGKKVGQYVGRVAVRSSGSFNLSTKQGLVQGISYKYCKTVHKKDGYSYAS

SEQ ID NO: 3349 - protein, 441 aa, unidentified
  REGION 1..441: note = Freshwater metagenome
MSVFVLNQRSQPLMPTSSRKARTLLKEKKAKVVTVKPFTIQLLTATGETKQDVTLGIDSGYLNIGFSAVIEKKELISGEVKLLQKMKERIAEKVQYRRIRRQRLRYRKARWNNRTKSKSEGWLAPSIQHKLNSHIRFIDKLKSILPITKTIIEVANFDIQAIKNPEISGVEYQQGEQVGFWNLREYILHRDNHKCKNPNCKNSDKEAILQLHHIIFQENGGADTANNLITLCTKCHTSPNHKIGKFLYDWQSKKPKIRGFKDATFMSIVRWRLVNQIDCKHTYGYITKNTRIKLKLEKTHYNDAFCISGGNTQQRAEPIIFTQTRRNNRSLEKFYDSKYIDIRTGEKVSGGELNCGRRTRNKNENSENLHQFRGEKISKGQRRIRKQRYFYQPNDLVKYDGQIYTVKGTQSKGASVVLKEIKKVHRVGLLSPYKFRKGIAC

SEQ ID NO: 3350 - protein, 423 aa, Arthrospira sp.
MSNHVFVLDTNRKPLTPCKPGVARSLLKAGKASVFRRYPFTIILNKEVDANPEPLELKLDPGSKVTGIALKQGNHIIFAAELQHRGQQIKEALLSRRQLRRSRRNRKTRYRPARFLNRTRSKGWLAPSLQHRVDTLMTWVHRFRRLAPVGCIAQELVRFDLQLMENPEISGVEYQQGELQGYEVREYLLFKWDRTCAYCGAQNVPLEVEQIQPRSKGGSDRVSNLTMACHSCNQAKGNGDIRDFLSGQPDVLSRLLRQAKSPLKDAAAVNSTRWALFKALKATGLPVTTGTGGQTKFNRLRLNLPKAHWLDAACVGPVESLEVLTSKPLLILAKGHGTRQMCGTNKYGFPNRHRSRRQIHKGFQTGDMVTATVTAGKKIGSYLGRVLCRASGSFDITTASVRVAGISHKYCQPIHRKDGYAYA

SEQ ID NO: 3351 - protein, 424 aa, unidentified
  REGION 1..424: note = Human gut metagenome
MRVFVFNMRGRPLMPCSQRKARLLLRENKAKIYKYHPFTIQLTYTTGETKQDCHIGIDTGSKYIGAAVRSEDKVFWKGEIELRQDIRSNLDTKRIYRRSRRNRKTRYRKPRFLNRKRRDEWLPPSLQSRINHTFHWIDTLSSLVPNPILHIEVGKFDVAKMINPEIHGVDYQHGQTYGFFDERYFVFARDNYTCQCCGKSKNKILNTHHIIYRSNGGTNRVDNLITVCTDCHTSQNHRKGGIFYQWQEQHKKVKQYKEPPFMNTLRKRIFVAYPDAEITYGSETTPKRKAMKLDKTHYNDAIVISGINEIKENPEEWLLIKQFRKKKRSLHEATARKGRKKPNRNQTRNSKNTPYYKGFYLNDKVSVFGKSGYITGFTSNAAYIKDENNDYITLPNKTYKQVSINKMKLECHNNNWQYIIKNAV

SEQ ID NO: 3352 - protein, 438 aa, Nocardiopsis sp.; identical to SEQ ID NO: 2664

SEQ ID NO: 3353 - protein, 421 aa, Ktedonobacter sp.; identical to SEQ ID NO: 2376

SEQ ID NO: 3354 - protein, 403 aa, Moorena sp.
  SITE 17: note = misc_feature - Xaa can be any naturally occurring amino acid
MLLSMFCSWRRILAAKXTPFVIQLTVPTGETKQPITLGVDAGYKHVGLSATTAKEELLASEVELRQDVTGLLSDRLALRRARRNRKTRYRAPCFDNRVRSKHKGWLAPSVENRIRIHLSRIEAVLRLLPVTSVTVETAAFDMQKIKNPEIEGEGYQQGEQLGFWNVREYVLFRDGHVCQACKGRSKDLILNVHHIESRKTGGDAPGNLITLCEACHKAYHAGKLKQFSPRRGASFRAETFMGIMRWTVLNRLRERHPELPVTNTYGYLTKHKRIVAGLPKTHCADAFCIAGVLDAKRRGEYLFQKQTRRHNRQIHKLTILKGGVRKRHQAPYLVHGFRLFDKVLCKEEVGFIFGRRSSGAFDVRRLDGTKISAGISYKKLSLLEKRKMFLTELRKEGRDSSRV

SEQ ID NO: 3355 - protein, 590 aa, Streptomyces sp.
VTSPSHRRRGGDLDGYVPCRCADPPVRASSAGCSGTYTCRHLREQRRNGVRGPACVRQGNRYGTWARGYPHAITFASGSHSALTSLGARAHAVGDDSITSKDHLMHDDEALDIPGLRERPPKPGPGAPRVLVLDRKGRPLMPCHPARARELFRKGRAVVARHTPFTIRIKDRVLEDSEVGGVAVRIDPGSKVTGIAVTDDIARTSANGEAAVLRRGLYAVELVHRGAAIKAGMEQRASHRRRRRVANTRYRAPRFDNRRRRRGWLPPSLQHRVDTTWAQVERLSRLAPLTTVHIERVAFDTHVMSAGRELTGVEYQQGALATYELRNYLLEKWGRRCAYCGKSGVPLQVEHIQPKSSGGTSRISNLTLSCAPCNQAKASRPVEDFLKGRPQLVAQLKKLAQAPLRDAAVMNATRWQLAERLEDLGHPVSCWSGGRTKYNRALFGLVKSHTLDALAVGEIGPGCRIVRYPSHVLVAAATGRGGYARTRTDRYGFPRLALPRTKNHHGFQTGDLVRAVVPNGKKTGVHQGRVAVRASGRFNIRTRRGLVQGIGHQRVRLLQRADGYGYSVRIEEQSRQSPAGAAGVHTGGVR

SEQ ID NO: 3356 - protein, 419 aa, Geobacillus sp.; identical to SEQ ID NO: 2623

SEQ ID NO: 3357 - protein, 397 aa, unidentified
  REGION 1..397: note = Human gut metagenome
MPCSAAKARILLKEKKAVVNRRTPFTIQLTIATGETKQPVSLGVDAGYKHIGLSASTEKAELYASEIELRQDVSELLAGRRALRHARRSRKTRYRAPRFDNRKREKGWLAPSVENRIGAHVSRVEAVLRILPVTKIIVETASFDVQRLKNPDIQGVEYQQGEQLGFWNVREYVLFRDGHECQHCHGKSKDKVLNVHHIESRRTGGDAPNNLITLCETCHKAFHRGEIELRVKRGRSFQAETFMGVMRWTFFERLRARHSEIEVRNTFGYLTKNTRITHGIEKTHCADAFCIAGNLKAKRLGYYFFQKQTRRHNRQIHKLTIKGGVRKRHQTPYEIKGFRLYDKVLYRGKVAFIFGRRSSGYFDIRTLDGERISASVSYKKLRLLEKRRTYLIELRRN

SEQ ID NO: 3358 - protein, 574 aa, Nocardiopsis sp.
VVRPQRTAISDPNLRAEVTGSPPEGGAFSPRGWRPAVTSTSQHQGGDSLATFHTGEKTHQAVLPQRPALESTSADHPGNRDETGRGGRARVAPGVEHVRGETTDGSPAAGGVTPGHPVREQAREGHPPREGTSPRQGHRCVFVLDAHGTPLQPTHPARARKLLAKGRAVVARHTPFVIRIKDRTTAESEVGGVEVGVDPGSRHTGLAVFTAQAGQRRGRYALRLHHRGDQITRRMRQRAAYRKGRRSRNLRYRSPRFDNRTRPDGWLPPSLRHRVDTTLAWVDRLARWAPVRAVHAERVAFDTHALSAGRSLEGVEYQHGTLHGYEVREYLLTKWGRSCAYCGAIDTPLNIDHIHPRSQGGSDRISNLVPACVPCNRAKGDQPVEEFVTTPRILAGIKGQAKIPLRDTAAVNATRWALWHALNKRLRAHAASGGRTKWNRTRNKLPKSHTLDALAVGKVDAITAAVSTVLVIGCSGRGTYTRTRTDRYGFPRSYLPRRKAFFGFRTGDLAQASIPSGKHAGSHTGRVAVRSSGSHTLQTPHGPVKTSWKNLRLLQRADGYGYTTQKEARVSSPV

SEQ ID NO: 3359 - protein, 512 aa, unidentified
  REGION 1..512: note = Human gut metagenome
MSAVYVLNKDGKPLMPTTRCGHVRHLLKEQKARVVASKPFTIQLLYKTNDVVQPLYLGIDPGRTNIGVAVVKADGTAVFTAHLETRNKEIPKLMKKRKDSRRARRTNGRRCRRQRRAKANGTISKKCVKHDTAQNGSVSKRAKEIGVIKRHLPGCEKDVLCIGIKNKEAKFSNRTRPEGWLTPTANQLLQTHINLVKKIRKFLPISDAVLEINKFAFMQLDNPNIQKWQYQQGPLYQKANLEEAVSEMQEHHCLFCKKPIAHYHHVVPQSENGSDTIGNIVGLCTKHHDLVHKDTAWQKKLAKKKTGLNKKYGALSVLNQIIPALTKELSSLFPKHFFATNGKSTYDYRSAHGVSKDHWLDAYCIACSVLPNDVCDSGINNRVPYELKQFRRHDRRALNNENMSRVYTLNDNVVATNRHKATKQTTDSLEEFRKNHPDDVCKLKVKEHHPTYRNMNRNYPGSVFLIGKQVHVMQGIAGSKDGEATTYKDTNTNSIAAGKCKFVAKNSGILFV

SEQ ID NO: 3360 - protein, 364 aa, Nocardiopsis sp.
LAGERRGRYATQLDHRGQTIRKKLAQRANYGRRRRSANLRYRPPRFDNRSRPRGWLAPSLRHRVETTASWAGRLARLAPVRVAHVERAAFDTHALSAGRPLEGAAYQQGTLRGFEVREYLLAKFGRTCVYCGATDTPLNIDHVHPRSRGGSDRVANLVLACIPCNQAKADRPVEEFVTDPKTLAMIRAQAKAPLRDAAAVNATRWALWRSLDERLPTRVGSGGRTKWNRTRNRLPKSHTLDALAVGKLDTITEAARTVLSVACTGRGSYARTTPDKHGFPRLRRSRSKQYFGFATGDLVRALVPVGKRKGSHSGRVLVRARGNFDITTAHGRQAGINHRYVRLLQRVDGYAYTLRKEMGVSSPA

SEQ ID NO: 3361 - protein, 442 aa, unidentified
  REGION 1..442: note = Human gut metagenome
MSTSVFVLDKKHRPLMPCRPARARRLLRAGRARVVKRFPFVIRLVDRTVEQSEVQPVLIKLDPGSRETGAAVVRDDGKKRHHALAFFVIEHRGGAIRDALKARSAFRRRRRSQNLRCRSPRFLNRVKPKGWLPPSLRHRVETTLSFVRRMCRYLPVSGIAAELVKFDSQKLQNPEVSGVKYQQGTLFEYEVREYLLEKFGRKCVYCGAEGVPLNIDHVVPRAKGGSNRVSNLVLACVSCNQKKGARSLEDFLKGKPEVLARVRRELKTPLRDAAAVNATRWVLFNELKATGLPVETGSGALTKFNRHAFGVEKEHWLDALCVGRLNGAVTRKGLNVLEIRCMGRGSRQRTRLTKYGFPRGYLMRQKCVHGFATGDMVEANVPKGKKAGLWRGRVAVRVSGSFNIQTPKGVIQGVGWKHCRLISHNDGYGYAWLGHAPHSSPA

SEQ ID NO: 3362 - protein, 477 aa, Moorena sp.
VVDEKPSVNIDEENITWETRGPMRARRLLLSNVFVVDTNKKPLDPVHPGEARRLLSQGKAAVWRRFPFTIILKSEGRTSTIQPLRIKLDPGSKTTGIAIVNDASGEVVFAAELSHRGQAIKASLDDRRAVRRSRRQRKTRYRKARWANRKRKPGWMPPSLESRIANIVTWVSRFSRYAPIQAISQELVKFDMQLMENAEISGVHYQQGTLQGYEIREYLLEKWNRTCSYCGKKDIPLQIEHIHPRANGGTNRISNLCLACEKCNSAKDTRDIKDFLKKKPEVLKKILAQAKSPLKDAAVVNVTRWALHEHVKATGLPVECGSGGLTKFNRTTRTLPKTHWIDAANVGRSTPADLIIKGVKPLVIKATGNGRRKMCVTDAYGFPKQHKERKGFSMGYRTGDVVRAITPKGTYQGRIAIRHRPSFRLGKIDVHPKYMRRLHRVDGYEYVHERSASCSSPWVNRGVPASRDFKDGSQHGM

SEQ ID NO: 3363 - protein, 418 aa, Oscillatoria sp.
MVLNNLGVQECQSRMMRKCHVRFVGERDTATYALLPDLKVEVTAPQKPITLKLDPGSTTTGIALVQGEEVIFGAQLAHRGQSIKASLESRRSLRRGRRNRHTRYRKARFLNRTRSQGWLAPSLQHRVETILTWVTRLMKVAPISSIAQELVRFDLQQLENPEISGLEYQQGVLCGYEVREYLLNKWERKCAYCGVTDTPLQVEHIHPKAKGGSNRISNLCLACEKCNVKKGTQDIEQFLSKKPDVLKKILSQAKRPLKDAAVVNSTRWALFNRLGMTGLPVSTGSGGLTKFNRTRLQLPKSHWLDAACVGRVEELKVLTSQPLLIKAAGHGTRQMCGTDRFGFPIRHRSKKQIHLGFQTGDIVGATVTAGKKVGSYVGRILCRASGSFDIATMKGRVAGISHKYCKPIHKKDGYSYGF

SEQ ID NO: 3364 - protein, 431 aa, unidentified
  REGION 1..431: note = Human gut metagenome
MDAWDIIVVLNKRGKPLMPCSPAKARLLLKEKKAIVKRRTPFTIQLTIATGETKQPVSLGVDAGYKHVGLSASTEKAELYASEVELRQDITDLLSARRALRQSRRNRKTRYRAPRFDNRIRTKRKGWLAPSVENRINAHLSRIEAVLRLLPVTKITVETASFDTQLLKNPDIAGKEYQEGEQLGFWNVREYVLFRDGHVCQHCHGRSKDPVLNVHHLESRRTGGDSPGNLITLCETCHKALHRGDITLKAKRGKSFRAEAFMGIMRWEVHNRLRALHPGIEVSNTYGYRTKHARIANGIAKSHCADAFCIAGNLGAERLCEFFFQKQTRRNHRQIHKLSILKGGIRKRNQAPFEVKGFRLFDKVACQGEEGFIFGRRSSGFFDVRKLDGTRISAGISCKKLHLLEKRRTYLTEIRKEEALPPLPEGRGLRA

SEQ ID NO: 3365 - protein, 472 aa, Massilia sp.
MTVLVLDKKKRPLMPCTPKRARKLLAAGRARIHRLFPFCIRLVDRCLEQSTVQPLRLSIDPGSKATGMAIARIEAANAYGVVEPVIHILFLLELAHRGQAIRDSLHARSAMRHRRRSNLRYRAPRFSNRTRPRGWLPPSLRHRLDTTVSWVTRLRRLAPVTHLAQELVYFDTQLMQDPEISGVAYQQGTLAGSEVREYLLEKFHRTCTYCDATDVPLQVEHIHAKARGGSDRVSNLTLACIPCNRKKSAQDIRVFLGKDPVRLARILKQAKAPLHDAAAVNATRWVLFCALKKAGLPVETGTGGQTKWNRSRHGVIKTHALDAACVGVVGEVQGTKVPTLHVKCTGRGSRCKTRLDKYGFPRAYLTRKKTAFGFRTGDMVMATVLTGKHKGQYRGRVAVRMTGNFNIQLGIAGIPTVQGVAHRYCRVLQRADGYGYVWQPTNIFQIKAKATAASRSAPFLTALNGGVFRSTS

SEQ ID NO: 3366 - protein, 424 aa, unidentified
  REGION 1..424: note = gut metagenome
MVYVLSKEGTPLMPTNRHGRVRHLLDAGEAKAVKRCPFTIQLLYQSTTYTQEITLGVDAGSKTIGLSASTEKKELYASETRLRMDITDLLSVRRQFRRTRRNRKTRYRKARFNNRVHAKHKGWLAPGIEAKIGTHFRAVRDVCRILPVTEIIVETASFNLQKIKALEKGEPVPEGTDYQKGDQLGFWNVREYVLWRDGYKCRCCNGKSKDQVLNVHHIESRKTGGDAPNNLATLCGYCHKQYHKGTILLPKSVRRGNSFRDAAFMGIMRRTFYNRLKEQYPRVAMTYGYITKNTRIRNSLPKTHYADARCIAGHPQAAPLEVYYFQKKVRCHNRQIHKSNILKGGKKKRNQAEYLVKGYRLYDRVRYQNREYYVFGRRASGFFDIRTLGGNKGNKGSVSCKKLRFLEPRKTMLIERRMQEREAV

SEQ ID NO: 3367 - protein, 418 aa, Moorena sp.
MSDVFVYVVNQNGKPLMPCTPAKARKLLRDQRATVLKRTPFTIKLLWDCEEHVQDITVGIDKGSHVTGFSCVGNGQVLLSGEIHHRLDVKEKMDGRRLHRRSRRNRLWYRPARFSNRGASKRSGRLPPSIKTNVEEIIRVIRRLPLPISDIVIEDVQVDIARINDPTLAGSRYQDPTRLDENVRMACLMRDGYQCQHCKKKQVRLEAHHIQFREHGGKDTLANVLTLCDDCHHQVHQGKIQIHVIGVGGHLDQIAQRTMQGKNHLYATLGARTPLSMLYGYQTATWRKAQDLPKEHDVDALCLATYATGELVPYQRERFFSIRFRPRQTRRQYLDVPQKGKGRVKYQVNEQLGGFHKGDIVRVKGRFVKQINSIYANGYLAFPRVKGEPATARPKDCCLLERGRTIIWERNPRQDRQT

SEQ ID NO: 3368 - protein, 431 aa, unidentified; identical to SEQ ID NO: 2952
  REGION 1..431: note = Human gut metagenome

SEQ ID NO: 3369 - protein, 414 aa, unidentified
  REGION 1..414: note = Human gut metagenome
MPCSPAKARLLLKEKKAIVKRRTPFTIQLTIATGETKQPVGLGVDAGYKHVGLSASTDKAELYASQVELRQDITDLLSARRALRRARRNRKTRYRAPRFNNRIRTKRKGWLAPSVENRINAHLSRIEAVLRLLPVTKITVETASFDMLLLKNPDIAGKEYQEGEQLGFWNVREYVLFRDGHVCQHCYGRSKDPVLNVHHLESRRTGGDSPGNLITLCETCHEALHRGEIALKTKRGHSFRAEAFMGMMRWEVLNRLKASHSELEVNNTYGYRTKHARIVNGIDKSHCADAFCIAGNLGAERLCEFFFQKQTRRNNRQIHKLSILKGGIRKRNQAPFEIKGFRLFDKVACKGEESFIFGRRSSGYFDVRKLDGTRISASISYKKLRLLEKRRTYLTEIRKEEALPPLPEGRGLRA

SEQ ID NO: 3370 - protein, 415 aa, Moorena sp.
MSNFVFLIDANKTPLNPIHPSHASKLLDSGKAAVFRRYPFVLIMNRVVENIVTYPINLKIDPGSKFTGISLVNNKEEVIWGMELQHRGAVIKSELETRSWVRRSRRNRHTRYRKPRFLNRKRTINWLAPSLKHRVLTTNTWVKRLIKYAPITAITQELVRFDLQQLENPEISGIEYQQGELQGYEVREYLLEKWERKCSYCDAKDIPLQVEHIQPKAKGGSNRISNLCLSCEKCNQKKGTQDIEKFLAKKPELLKRIKSQSKRPLKDAVAVNSTRWDLFQTLKETGLPITTASGGRTKFNRRKLNLPKEHWIDAACVGVVKNLNILTTNIFKVKSTGLGTRRLCRINKFGFPCSQPRQKYEHKWNTGDIAYCKGVSGRVVVQSATRLEIRVDGKRIGGKLTDFKKLHSKDAYSYF

SEQ ID NO: 3371 - protein, 523 aa, Micromonospora sp.
LYTGQTTHSGVLPQPRTLESASVDTAPRSHETGRGRHPAAGVRHGRGETGGRRRHPEPAPAGTGAGREAHTHPVVFVLDRHHRPLQPTTPARARKLLTSGRAVVHRHTPFVIRLKDREVASSEVDGVEVGIDPGSRFTGIAVFLAETAGDNLVRTGLFGIEVRHRGNQIRDRLFARAALRRARRSRKLRYRAPRYANRRRPHGWLAPSLRHRVDNTMSWIERLRRWTPVKLLHVERVAFDTQLMQEPDISGVEYQHGTLHGYEVREYLLARRGRKCVYCGAVGVPLNIDHVVPRSRGGSDRVSNLTLACVPCNQAKGATPIDTFLADQPAVLARIRRQQKLPLRDTAAVSATRWALWRALVATGLSVQVATGGRTKWNRHRTDVPKSHTLDALHVGVLTTVRSYPGQVLVATATGRGRYARTRADRYGFPRLRLPRIKTVCGFQTGDLVRAVVPTGKNIGKREGRVAVRTSGRFAIRTGQTLIQSVHHRYVHLLQRADGWAYTREEERRFDPVVTDRVPTPHT

SEQ ID NO: 3372 - protein, 430 aa, Cylindrospermum sp.
MSKIFVIDTDRQPLNPIHPAQARQLLRNKKAAIFRRFPFTLILKESRTNSPSSPLRLKIDPGAKHTGIALVNDSTGEVVFAADLEHRGFAIRDSLTTRRQLRRSRRNRKTRYRQPRFMNRNRPQGWLAPSLQSRVENIKTWVNKLVKFAPIEAISQELVRFDMQLISNPDIQGKEYQQGTLAGYETREFLLEKWNRQCAYCGVKDVPLQIEHIHPRARGGSNSITNLTLSCEKCNRKKGTKDIKEFLQKDPSRLEKPIKQVKRPLSDAAAVNTTRLALLFVLKSTGLPVEIGSGGLTKFNRSQLKLEKSHWLDAACVGKSTPVLKVKGIKDLLIKANGHGTRQSCRTDKFGFPSRYVPRFKYVLGFQTGDIVKAIVTRGKKIGEYIGRIAVRTSGSFNISTQSCLVQGISYKACKHIHKKDGYEYGKSRI

SEQ ID NO: 3373 - protein, 412 aa, Moorena sp.
MTQLVYVINQNGHPLMPCKPSKARKLLRDGRAKVKHRAPFTIQLRWDCEEQVQDVVVGIDKGSSTTGFACVGRGEILLSGEILHRKDVKEKLDARRAHRRSRRNRRWYRPCRILNRASSKRSGRLPPSIKTNVEEVIRVVRRLPLPITRIVIEDVQVDIARLNDPTVQGSRYQDPKRLDENLRIACLLRDCYQCQHCGKREVRLEAHHVQYRQHGGKDTLSNLLTLCESCHHGVHAGKITLEVSGVSGHLDHIAQRSMQGKTYLYTTLGSALPLSTLFGYQTATWRKQQELPKEHDSDALCIATYDTGELVPWQRERFYRIGFRPRQTRRQYHDLPRKGQGRVRYQLNTELEGFRKGDVVRVKGTWIKQINSIYSTGYLAFSRKKGEPANARPKDCVLLERGTTILWQRPQR

SEQ ID NO: 3374 - protein, 425 aa, Moorena sp.; identical to SEQ ID NO: 2826

SEQ ID NO: 3375 - protein, 471 aa, Caldicellulosiruptor sp.
LVIFTVDKHGRPGHPTRRFDMVRKLVKQGRAKIIGGGASGKPPVVMFLDREFDYSKTIERRLFVVLDPGYHHIGFAVCELRWGVLIVYCIGVLETRIPEIKDLMTKRRGYRRNRRYHSRCRKKRMSKRHSRVLTKFKAPRNVRTKDRTNATLRHGIETHLNLYKKLLKFFPFPAEQVVFVMEDNIFDVRTMTWGKTYGTGYQKSPRVPAEKKCIICGTEDNLQKHHLIQRKCGGTDVQENLVYLCRDCHEDVHAGRVYIPVEGVRQWRALGTMNAIIGQLREIPWLKFVPASDAAQMRKKLGLKKGHANDALATAAVFCSCTEADRTHMIELILVKFRRHNRARIHAVRDRLYKVDGKIVAKNRRKRTDQKEPSFADISPLPPEIQRKLKVYPGTKILNPLRKEMPTIAGDVWIHEPTGKRFVTTGVVSQKYLYSPQLKKIVGKMYVQPEECRQVLHNEGMVVMYNSLYHS

SEQ ID NO: 3376 - protein, 292 aa, unidentified
  REGION 1..292: note = Human gut metagenome
LSRIEAVLRLLPVTKITVETASFDMQLLKNPDISGKEYQEGEQLGFWNVREYVLFRDGHVCQHCHGGSKDPVLNVHHLESRRTGGDSPGNLITLCETCHKALHRGEITLKAKRGQSFRAEAFMGIMRWEVLNRLKASHPELEVNNTYGYRTKHARISNGIAKSHCADAFCIAGNLGAKRLGEFFFQKQTRRNNRQIHKLSILKGGIRKRNQVPFEVNGFRLFDKVACKGEEGFIFGRRSSGFFDVRKLDGTRISAGISCKKLHLLEKRRTYLTEIRKEEALPALPEGRGLRA

SEQ ID NO: 3377 - protein, 425 aa, Nodularia sp.; identical to SEQ ID NO: 3165

SEQ ID NO: 3378 - protein, 396 aa, unidentified
  REGION 1..396: note = Human gut metagenome
VVRRTPFTIQLTIATGESKQPVSLGVDAGYKHVGLSASTDKAELYASQVELRQDITDLLSARRALRQSRRNRKTRYRAPRFDNRIRTKRKGWLAPSVENRINAHLSRIEAVLRLLPVTKITVETASFDMQRLKNPDISGKEYQEGEQLGFWNVREYVLFRDGHVCRHCHGRSKDPVLNVHHLESRRTGSDSPDNLITLCETCHKALHRGEITLKAKRGQSFRAQAFMGIMRREVLNRLKASYPELKVHETYGYLTKHARIANGIVKSHGADAFCIAGNLGAERLGEFFFQKQTRRNNRQIHKLSILKGGIRKRNQAPFEAKGFRLFDKVACQGEEGFIFGRRSSGSFDVRKLDGTRISAGISYKKLRLLEKRRTYLTEIRKEEALPPLPEGRGLRA

SEQ ID NO: 3379 - protein, 443 aa, Anoxybacillus sp.
MVEENMTCFMQRKGENPMVFVLDTNKRPLAPCHEAVARKLLKQGKAAIYRRFPFTIILKKSVDESEIKATYRLKIDYGSRHTGLAILRGQEVVWLGQLDHRTDIKERIDKRRAFRRVRRNRKTRYRKPRFLNRKRKEGWLPSSLESRVQNIQTWVNRLKKLCPIGYISYENAKFDTQLMRNPEINGVEYQQGTLQGYEVREYLLEKFGRKCCYCGKENVPLEVEHIIPKSRGGTDRVDNLCLACHDCNQRKGSKTAEEFGYPHIQKQVKESLKDASAINSTRWKAYEVLKQTGLDVECGTGARTKMNRIRLDLPKTHYFDACCVGESTTNHLYFKTKEVLFIKAKGRGSRSRTNLDRYGFPRGYLARQKFFFGFQTGDMVKAVVPRGKYQGVWFGEVACRKNGSFDMKDKDGKRIAQGISYKYFNIIQRFDGYTYRREGMNIA

SEQ ID NO: 3380 - protein, 451 aa, Burkholderia sp.
MSAFVLDRNGRPLMPCSEKRARHLLARGRARVHRVMPFVIRLVDRMADSCALQPLRIKLDPGSKVTGVALVREADSGIAVINLFELIHRGRQISEALTARRGFRRRRRGANLRYRAPRFLNREKPEGWLPPSLQHRVDTTMAWVQRIRRWAPVTALSSELVRFDLQQLENPEISGLEYQQGTLAGYEVREYLLEKWKRTCIYCDAKDRPLQIEHLTARARQGSNRVGNLGLACGDCNQDKGALDVRAYVKDSKRLARILATASRPLRDAAAVNTTRWALTDTLRATGLPLELASGGRTKFNRITHDLPKTHALDAVCVGRVDAINDWKRPSLSIKATGRGSYQRTRLTRRGFPRGYLMRQKQVQGFRTGDHVRADVPTGKRAGIHVGRVAVRATGSFNIQTASTVVQGINHRHCKLVQRGDGYAYSLQSTDSYQGDAGICGAAHAALSLPG

SEQ ID NO: 3381 - protein, 424 aa, Microcoleus sp.
MSNQIFVLDINRRPLTPCTPGIARSLLKAGKAAVFRQYPFTIILKKEVNATPEAITLKLDPGSKTTGIALVQGTVVLFGAELTHRGQTIKASLESRRVLRRGRRSRHTRYRQARFLNRTRPKGWLAPSLQHRVKTTLTWVNKLIKLAPINSIAQELVRFDLKQLENPEISGIEYQQGTLLGYEVREYLLEVWERKCAYCSIENVPLQIEHIHSKAKGGSNRISNLCLACDTCNKKKGTQDIKQFLAKKPDILKRIQAQRKRPLKDATAVNSTRWALLNRLKETGLPVTTGSGGQTKFNRTRLQLLKSHWLDAACVGKVEELKVLTAQPLLIKTAGHGTRQICGTNKFGFPIRHKSRKQIHFCFQTGDIVSATVTAGKKIGSYTGRVLCRASGSFDIVTTTGRVAGISHKYCRPIHKKDGYSYGF

SEQ ID NO: 3382 - protein, 545 aa, Actinoplanes sp.; identical to SEQ ID NO: 2907

SEQ ID NO: 3383 - protein, 420 aa, unidentified
  REGION 1..420: note = Human gut metagenome
MQYVYVLNKHGEPLMPCSPRKARLLLKQKKACVVKRTPFTIKLLYGSTGYKQPITLGVDAGSKHIGISAATEKYELYCEEATPRNDVVDLLSARRAFRRSRRNRKTRYRAPRFNNRVHSKHKGWLAPSVEVKIQEHITLIKRVCRILPVTFVRVETAEFDTQRLKAMLEGKPLPVGTDYQLGEMYDEYNVRQYVLKRDNYTCQCCGAHPAKIKAVKLHVHHIETRRTGGNAPNNLITLCTACHKALHAGKVTLDGKKRGRSLKDAAFMGVMRKTLMERLLKELKIPVQGTYGYITKYLREKHSIPKSHTNDARCISKNPLAIPCDTCYYTKAIRHHNRQLHKATILKGGIRKANQAPYTVKGYRLWDKVSYNGSECFITGRRTSGYFALKKLDGTVVSNSASYKKMRLLEVATNYITERR

SEQ ID NO: 3384 - protein, 406 aa, unidentified; identical to SEQ ID NO: 2752
  REGION 1..406: note = Human gut metagenome

SEQ ID NO: 3385 - protein, 456 aa, unidentified
  REGION 1..456: note = gut metagenome
MSTCVCVLSNSGERLMPTFRLGKVRRLLKDGKAKIVKHHPFTIQLLYDSKTNTQPIEICEDVGYNYIGISVKSKSHEYVSAQYDTLQDEKEHHDDCRKYRRTRRNRLRYRKPRFDNRKRSEGWLAPSLEHKKQLNIRLIERYVSVIPITRATVEVGSFDTMLLQAIQKGESKPEGVDYQKGPRYNLATLREAVFYRDNYTCQVCGRKIADGAILHMHHMFYWKGRHGYQLDELVTACEKCHTPANHQKGGKLFGFGEDKEFANLSGAAFMNAVRWQIVNALYATYGKEFVTITYGAMTKEKRIALQLEKTHSNDAYAMGNCHPAHRCVFRHYQKRRRNNRVLEKFYDATYIDARTGNKAKGKELFNGRINRNHKKDSENFHKYRSKKVSKGRRSIRRQRYAIQPYDTVRLEGKTYITSGCHNKGTRLLIPANGKNKSVAISKVQVVCHAGAWIQII

SEQ ID NO: 3386 - protein, 421 aa, Moorena sp.
MNVVYVLSPDREPLMPCSCAIARLLLKDGKAKVVRRTPFTIKLYAQPEDAHMQPLTLGVDTGSATIGSAVSDECGNVLYLSEVEIRNDIAKTMKERATSRRNRRNRKTRYRLARWLNRKNSIKTGRFSPTMRSKIEAHLREIRFVKSLLPITSVVVETGTFDPHALKNPDVLQNKKLYQKGINYGYANTKAYVLTRDGYACQHCQGKSKDNRLEVHHIIFRREQGSDEETNLLTLCKTCHDGLHAGTITLRRTGKRKGNLLHATQMNSIRVQLFKCIEAEETFGFVTKEHRLLAGLPKEHVFDATMIATRGITPIFRTSMVLSKRCVADGDYQQTKGVRSEQRINTGKIRGFRKFDKVHYEGQDYFIKGRMSTGYAILMDVSGNKVDLKPIPKFDKMKRVSARSSWIMTHKTMASFSSSTT

SEQ ID NO: 3387 - protein, 334 aa, Desulfonema sp.
MPKMPECGWRCASEIRRDSEDTLSTSAVSQGKKNAVIRTVRQIPLPISAIRLEDAYFDFQAMENPDISGDRYQHGELFYHKNFKQAGLVRDKFRCRVCGSESSLQCHHIRSKAEGGTDKLSNLMTLCKDCHGRHHKKGLRLPKQKSSFYISAAHVQQGKHYLQAELSETAFLTRTFGYITSHYRNRAGIEKSHVNDAVIIADKKAVPVTHYIKSKHIQTRKRSLHEATARKGRKIPNRTQKRNCKNVSALKGFRRWDTVRYKGQTGFISGFTGTSSCYIVNVEGDYIRNPGKKYKQVSLGKVVRLHNNKSVVSQRADSSPTFAIAQEGDFSAES

SEQ ID NO: 3388 - protein, 463 aa, unidentified
  REGION 1..463: note = Human metagenome
LSRRDSSNILRHRRRARFFKKGYNMVFVLDKSKKPLDMISNAKARTLLKNKLAVVAKIYPFTIRLRDNSCVSKNRAYTVKLDPGSKTTGIAITDDKNSVVMLAELEHRGHVIKKKLDSRRAVRRSRRQRNTRYREARFLNRTKPEGWLAPSVRSRADNVINFIKKYKKFLNIDKVMIEQVSFDTAQMSSDSYLTGADYQQGNLYDKTLRDFIFSKTNGRCAYCGAKAEEIDHVVARSNGGTNSTYNLVASCRACNERKSNLTLKAFGKLMNKDYSHLEPKKLPKDAAIVQSARNYMKKEISKLVADTSTHDAWLTKYNRDELGLPKQHYYDALSVGNTQDYKFLTDKVLQISAQGRGSRQMCRMDKFGFPRTSPKGSKSVKGFQTGDIVKAVVPSGLKRGEYFGRVAVRSNGYFDIKTNKETAQGIGYKYCHIIQRCDGYSYNYKERDFLSAMNDRVSIAKTK

SEQ ID NO: 3389 - protein, 428 aa, unidentified
  REGION 1..428: note = Human gut metagenome
LKVFVLNMRGQPLMPCSPAKARHLLKAGKAVVRRRTPFTIQLRIATGETKQSVTLGVDAGAKHVGLSAATEKEEVFASEVELRQDITGLLAARLSLRRDRRHRKTRYRAPRFLNRVRSKHKGWLAPSVENRIQAHMSRIDAICGLLPVTKIVIETASFDIQKIKHPNVEGTDYQQGDQLGFWNVREYVLFRDGHVCQHCHGHSKDKILNVHHLESRQTGGDAPNNLITLCETCHKAYHAGKIKLKVKRGQSFRAEAFMGIMRWTLLDRVRKAHPGLPVENTYGYLTKNTRIAMGLPKAHCVDAYCIAGNLKAVRRGVHLYQRQVRKHNRQIHKCTVLSKTLKDGTKIGYRKLNQTPHLVKNFRLFDKVRCLGQTGFIFGRRSSGYFDVRRLDGVKLSSGISYRKLTLLEKRSTYLTELRKEDGASSPV

SEQ ID NO: 3390 - protein, 470 aa, unidentified
  REGION 1..470: note = Human gut metagenome
MSVFVVGLNGCRLMPVSERKARLLLKGGKASVYRKVPFTIKLNYKTGSTVQPGYLGIDTGSQHIGVSVVQKDGTVLHKEEIGLRDSMSKRKLLESRASSRRGRRYRKTRYRHPKWKPKTKRIYNEKADRKGRHWKKQKNTFTSKRQAGWLPPSLQSKTDHHIQWIRKLLHLLPEGYRLSIELGRFDPARMKDPGIHGELYQKGPQYDYENVRAYVLARDGYTCRVCKKKGGKLHVHHILYRSRGASDNPKYMAAVCSKCHTTENHLPGGILYQWMQDQKKFTRCLRDATFMNILKKRLRKAFPDAVFTYGNITKADREKLELPKSHGNDATAIALVKTEVKSVKDEEPVIHIQQVRRKKRSLHEETPRKGRKGPNRTASRSDKNTKSVTVTKGSGEKKASMTACLFDRVELDGKKGWITGFTGTSCYVKDKEDNYICTSPKYKQVSISRLRILHHCGNWAIGAEKPLGKG

SEQ ID NO: 3391 - protein, 451 aa, Burkholderia sp.; identical to SEQ ID NO: 3380

SEQ ID NO: 3392 - protein, 431 aa, Klebsiella sp.; identical to SEQ ID NO: 2435

SEQ ID NO: 3393 - protein, 423 aa, Moorena sp.
MSNHVFVLDANRKPLTPCKPGVARSLLKAGKASVFRRYPFTLILKKEVDANPEPIEIKLDPGSQVTGIALKQGDRIIFGAELQHRSQQIKDALLSRRQLRRSRRNRKTRYRQARFLNRTRPNGWLAPSLQHRIDTTMTWVNRFRRLAPIAHISQELVRFDLQLMQNPEISGIEYQQGELPGYEVREYLLEKWNQKCAYCGAKNVALEVEHIHPKSKGGTDRVSNLTLACHSCNQSKGNQDIRDFLSGKPDLLSRILRQAKSPLKDAAAVNSTRWALLTALKQTGLPVATGTGGQTKFNRTRWELPKAHWLDAACVGKIESLEILTSKPLLIAAKGHGTRQMCGTDKYGFPTRHRSRVQIHKGFQTGDIVTATVMTGKKIGSYVGRVLCRASGSFDITTASGRVAGISHKYCKPIHRKDGYAYA

SEQ ID NO: 3394 - protein, 556 aa, Streptomyces sp.
MTTFPVGEQTHQAVLPQQPALESVGADNVGSSDETAHGHPAAKRDTGRGHGRGETDGPGATARRRHATSAVPAAQEAATGNGDVPTLDRDDRSYTGGIGAGRVFVLSREGHPLMPCHPARARELLHKGRARVVRQVPFVIRLKDRTRDESEVQGVQLRIDPGSKGTGLVLTDEKKESHDQGGAVITVRRGLVAIELQHRGDQIRAGLRQRAGYRRRRRRANLRYRSSRSANRARRAGWLPPSLRHRVETTFSLADRLCRWAPVTEIHVERAAFDTHSLSAGRFLHGTEYQHGPLTGTTVRAHLRARWNAGCAYCGMSGVPLNVEHLRPRSRGGSNRISNLVVACVPCNKAKGNMPVETFLALRPDRLATILSQAKVPLDDAAAMNATSQQLTHALAGLGRPVDGWNSRLTKTNRLATGLDKTHTLDALCVGPLDRAAGDRIVSFSRQVLTAKANGRGSYARTTPDKHGFPRLLRTRAKQHYGYVTGDLVRAVIPTGKWAGTWTGRVSVRARGQHSLTTPTGRINVSHRNLRLLQRGDGYGWGVRPEPSRSTSRKMG

SEQ ID NO: 3395 - protein, 413 aa, unidentified; identical to SEQ ID NO: 2636
  REGION 1..413: note = Human gut metagenome

SEQ ID NO: 3396 - protein, 421 aa, unidentified
  REGION 1..421: note = Human gut metagenome
MRGQPLMPCSPAKARHLLKAGKAVVKRRTPFTIQLRIATGETKQNVTLGVDAGAKHVGLSATTEKEEVFASEVELRQDITGLLAARLSLRRDRRHRKTRYRAPRFLNRVRSKHKGWLAPSVENRIQAHMSRIDAVCRLLPVTKIVIETASFDIQKIKDPSVEGTDYQQGDQLGFWNVREYVLFRDGHVCQHCHGRSKDKILNVHHLESRQTGGDAPNNLITLCETCHKAYHAGKIKLKVKRGQSFRAEAFMGIMRWTLLDRVRKAHPGLPVENTYGYLTKHTRITHGLPKTHCVDAYCIAGNLKAVRRGVYLHQRQMRKHNRQIHKFTVLSKRLEDGTKIGYRKLNQSPYLVHGFRLFDKVRCLGQIGFIFGRRSSGYFDVRRLDGVKLSPSISWRKLTLLEKRSTYLTELRKQDGASSPV

SEQ ID NO: 3397 - protein, 420 aa, unidentified; identical to SEQ ID NO: 3089
  REGION 1..420: note = Human gut metagenome

SEQ ID NO: 3398 - protein, 427 aa, Nostoc sp.
MSKVFVIDTEKRPLDPIHSAQARQLLRNGKAAVYRRFPFTIILKKSHSDLSVTPLRLKLDPGAKTTGIILVNDTTGEVIFAAELKHRGFAIRDALTYRRQLRSSRRSRKTRYRKPRFLNRIRPKGWLAPSLQSRVENIKTWVNKLRKIAQIEAISQELVRFDMQLMRNPDIQGKEYQQGTLTGYEIREYLLEKWSRQCAYCDAKDVPLQIEHIHPRAKGGSNSITNLTLSCEKCNTKKEIKDIKEFLKKDKTRLAKILAQTKKTLTDAAAVNTTRFALLEALKATGLTIETGSGGLTKFNRSQQNLEKTHWLDAACVGKSTPKLIIKGVKPLLIIANGHGTRQLCRTDKYGFPNRHCSRAKFHFGFQTGDIVKAVVKTGKKVGEYIGRIATRATGSFNISTKNGLVQGISHKYCSVIHKKDGYSYTQ

SEQ ID NO: 3399 - protein, 444 aa, unidentified
  REGION 1..444: note = uncultured cyanobacterium
MKVLVINKHGRPLMPTTPRKARIFLRSGRAKIVGRDPFTIQLLCGTSGYTQPITLGIDAGYAHIGYSAITEKEELIGGELELLPEISKRITDRKKYRQTRRNRLRHRIKRFDNRKHPDDWLAPSIQHKLDSHIKLVERLKARMPITKVIIETAKFDGQKLVKPDIKGKEYQQGEQLGYKNLTNYIRHRDGYQCQNPECKNKNPDRVLQVHHLGYWKNPPDRSNRPGNLITLCDKCHTSPNHNKGKLLHGWEPKVKPLKASTFMSTIYRRVRRDLGAEQAFGYVTDFTRHELGLEKSHHNDAFVIAGGTTQKRAEPLMLEQIRRHKRSMEQFYDAKYIDLRTGEKVSGSTLNSGRRTRNKNLNGENLRVYRGQKVSKGQRRIKKQRYPYNPNDYVMFEKKVYCVIGMQNLGTGVKIANYPGVANKVVNVNKVQPIKRRSGLCART

SEQ ID NO: 3400 - protein, 437 aa, Bacillus sp.
MFVYVINKHGEPLMPCSPRRARILLKQQKAKVVKLTPFTIQLLYGSSGYKQPISLGVDAGTKHVGLSATTEKQVLLEGEVQLRTDIQGLLATRSQFRRTRRSRITRYRQPRFLNRTRKVGWLAPSVQNKVDAHIKLVSLIQRILPVTNLTVEVAQFDTQLLKNPTIQGEEYQQGDQMGFWNTREYIFYRDGHTCQWCKGKKKDKILNVHHIESRKTGGDSPDNLLTLCESCHTELHQKGLEHLFQRKSKPLRDASQMTVMRWFIYNGLKNGYPDAQLTYGYMTKHTRISHGLAKEHCIDARCISGHPLAVPTDTTYLWKFVRKNNRQLHKANTLKGGKRKSNKAERFVKGFQLFDKVRYEGQSCFIFGRRSSGYFNLRLLDGTKIHASASYKKLKKMEYATTLLSEREVGQAIPLRLTSLKSGYPRPNIYEYSFNRT

SEQ ID NO: 3401 - protein, 431 aa, unidentified
  REGION 1..431: note = coral metagenome
MRVFVLDKNFKALDPCRPARARLLLKQGRAKVLRRYPFTIILSDLEVENCTTHDYHLKIDPGSKTTGVSYRQDNTVIWGAEITHRGFQIRDALTSRRQLRRSRRSRKTRYRKPRFLNRKRPSGWLAPSLMSRVHNILTWVKKLIRFCPIAGISQELVRFDTQKMENPEISGTEYQQGTLCGYEIREYLLEKWNRKCAYCGARDARLEVEHIKPKSNGGSDRVSNLAIACHYCNQAKGSQEIEQFLSGKPDVLKQVLSQAKRSLTDAAAVNATRWKLYNELKFTGLPVETGSGGQTKYNRRRFNLVKTHWIDAACVGNVQNIYVEDYQFLSIMAKGHGTRQICRTDKFGFPKRYCSRTKIHKGFQTGDIVKAIVTKGKKIGTYVGRVTTRKTGSFNILTSSGLIQGISYKYCTPIHKKDGYAYQINTLSSFS

SEQ ID NO: 3402 - protein, 464 aa, Ktedonobacter sp.; identical to SEQ ID NO: 2824

SEQ ID NO: 3403 - protein, 231 aa, unidentified
  REGION 1..231: note = Human gut metagenome
MPNKVYVINKHGRPLMPCSPAKARHLLDAGKAKVKKRTPFTIQLVYGSSGYTQEVILGVDAGSKTIGVSALTKKEELFAANVIPRNDVVDLLSTRREFRRARRNRKTRYRKPRFDNRVRSKHKGWLAPSVEVKIQEHITTIRRVYGILPVSKVVVETAEFDLQLLKAIADGKPVPQGEDYQKGEMYGHYNVRQYVLWRDNYTCQCCGAHATKKKEVRLHVHHLESRKVGGD

SEQ ID NO: 3404 - protein, 337 aa, Nodularia sp.
MSNFVLVLDTNKKPLTPIHPGDARFLLNQQKAAVFRRFPFTIILKEPKSEVPTQPIELKIDPGSKTTGFALVQNNKVIWGMELQHRGLAIKESLETRKGVRRGRRSRHTRYRQARFLNRTKPQGWLAPSLSHRVLTINTWVKRLCNFAPITDIVQELARFDLQQLENPEISGFEYQQGELQGYEVREYLLNKWNRKCAYCTAENVPLQVEHIKPKAKGGTNRISNLCLACEKCNIKKGTQDIEKFLAKKPELLKQILSQAKRPLKDASAVNSTRWALFNKLKETGLPITTGSGGLTKFNRTRLGLPKTHWIDAACVGKVETLKILTTKILTVKRHGA

SEQ ID NO: 3405 - protein, 448 aa, unidentified
  REGION 1..448: note = Human gut metagenome
MSTGLRAVQAEPAGIRKGDALKVFVLNMRGRPLMPCSPARARHLLKAGKAVVRRRTPFTIQLRIATGETKQSVTLGVDAGAKHVGLSAATEKEEVFASEVELRQDITGLLAARLLLRRERRQRKTRYRAPRFLNRVRSKHKGWLAPSVENRIQAHMSRIDAICGLLPVTKIVIETASFDIQKIKHPDVEGTDYQQGDQLGFWNVREYVLFRDGHVCQHCHGHAKDKILNVHHLESRQTGGDAPNNLITLCETCHKACHAGKIKLKVKRAQSFRAEAFMGIMRWTLLDRMRKAHSGLPVENTYGYLTKNTRITLGLPKTHCVDAYCIAGNLKAVRRGVYLHQRQVRKHNRQIHKCTVLSKTLKDGTKIGYRKLNQTPHLVKNFRLFDKVRCLGQTGFIFGRRSSGYFDVRRLDGVKLSSGISYRKLTLLEKRSTYLTELRKEDGASSPV

SEQ ID NO: 3406 - protein, 431 aa, Anabaena sp.; identical to SEQ ID NO: 2933

SEQ ID NO: 3407 - protein, 438 aa, Ktedonobacter sp.
MSRVLIVDAERKPLMPCTPARARLLLKAGKAAILRRFPFVLMLREARPEAVVEPLRVKLDPGAKTSGIAVLHEQSGEVMWAAELTHRSPQIREALAKRRAVRRSRRSRHTRYRAARFANRRRPKGWLAPSLESRVLHLLTWVKRLSRWCPVGALSLELVRFDLALLQNPSIEGIEYQRGTLWGTEVRQYLLTKWQHRCTYCQASEVPLEIDHVSPRSKDGSDRIANLVIACRPCNQAKGDHPLESFLANRPDVLTRVQAQRRAPLHDAAAVNSTRWQLYERLKALDLPVETGSGGLTKWNRQSRNLPKTHWIDAACTGRSTPERLQIRHVRPWLIQAQGRQARRMVNVDKRGFPRGKAKGPSCICGLRTGDLVRAVVTKGKKIGTYVGRVAIKSDGYLKLRGRPFGMVEGIHARYCRPVHRNDGYAYAQGEAALPPQA

SEQ ID NO: 3408 - protein, 477 aa, Desulfobacter sp.
MQQSRGESSANAKTEPSPASAENGVSRVFVLDKRGKPLMPCHPARARKLLAKDRARVHQQFPFTIRLIDRIREESDVQAVHVKIDPGANTTGMAVVRVEQNVKANHILHLSELTHRGYAVRKKMGQRANYRRRRRSNNLWYRKPRFDNRTRPKGWLPPSLRSRVDNVTSWVKKYQKICPVSGIVLERVRFDIQKLQNPEISGVEYQQGTLFGYEVREYLLERYGRKCVYCDGLSKDPVLEIEHFVPKNPAKGPNGTDRIKNLVIGCRTCNQAKNNYQPEQWAQVLGKSRKKIDKTRLCNVNRLFEGKRPSLAATAAVNATRNAIFFELRQLASVECSTGGRTKYNRCRFNIPKTHCLDAACTGKTNAISGWKQSVLLIKAMGRGSYQRTRVNAAGFPRGYLMRKKAVHGFVTGDIVKAEVSKGKKQGTYIGRVAVRKTGSFNIQTKIETVQGISWRYCQIISRQNGYNLAIQNSSPT

SEQ ID NO: 3409 - protein, 425 aa, Nodularia sp.
MSNFVLVLDTNKKPLTPIHPGDARFLLNQQKAAVFRRFPFTIILKEPKSEVPTQPIELKIDPGSKTTGFALVQNNKVIWGMELQHRGLAIKESLETRKGVRRGRRSRHTRYRQARFLNRTKPQGWLAPSLSHRVLTINTWVKRLCNFAPITDIVEELARFDLQQLENPEISGFEYQQGELQGYEVREYLLNKWNRKCAYCTAENVPLQVEHIKPKAKGGTNRISNLCLACEKCNIKKGTQDIEKFLAKKPELLKQILSQAKRPLKDASAVNSTRWALFNKLKETGLPITTGSGGLTKFNRTRLGLPKTHWIDAACVGKVETLKILTTKILTVKSTGHSCRRFCRINKFGFPCTEPKKIFTHVSTGDFVKATLHKDRKNITSGKYVSRVKTPTKNGCEIVINGFRVEFSTMKNITKVHCSDGYSYV

SEQ ID NO: 3410 - protein, 443 aa, Bacillus sp.
MVEENMTCFMQRKGENPMVFVLDTNKCPLAPCHEAVARKLLKQGKAAIYRRFPFTIILKKSVDESEIKATYRLKIDYGSRHTGLAILRGQEVVWLGQLDHRTDIKERIDKRRAFRRARRNRKTRYRKPRFLNRKRKEGWLPSSLESRVQNIQTWVNRLKKLCPIGYISYENAKFDTQLMRNPEINGVEYQQGTLQGYEVREYLLEKFGRKCCYCGKENVPLEVEHIIPKSRGGTDRVDNLCLACHDCNQRKGSKTAEEFGYPHIQKQVKESLKDASAINSTRWKAYEVLKQTGLDVECGTGARTKMNRIRLDLPKTHYFDACCVGESTTNHLYFKTKEVLFIKAKGRGSRSRTNLDRYGFPRGYLARQKFFFGFQTGDMVKAVVPRGKYQGVWFGEVACRKTGSFDIKGKDGKRIAQGINYRYVQVIQRFDGYAYGKGVAELA

SEQ ID NO: 3411 - protein, 427 aa, Tolypothrix sp.
VSKIFVVDQSKRPLDPVHPAQARQLLRNKKAAVYRGFPFTIIFKESYPDSAVTPLRLKLDPGAKTTGIALVNDTTGGVVFAAELKHRGFAIREALTSRRQLRRNRRARKSRYRQPRFLNRTRLKGLLAPSLQSRVENIKTWVGKLCKLAPIRAISQELVRFDMQLMRNPDIQGKEYQQGTLVGYETREFLLEKWDRQCAYCGVKDVPLQIEHIHPRAKGGSNSINNLALSCEKCNTKKGTKDIKDFLKKDPSKLEKILKQVKRPLSDAAAVNTTRFALLKVLKTTGLPVETGSGGLTKFNRSQQQLEKTHWIDAACVGKSTPSLNIKGIKPLLIAANGHGSRQSCRTDKFGFPNRHVPRKKIHFGFQTGDIVRAIVTTGKKIGNYVGKVAIRSSGSFNISAKTGLVQGISHKFCKRIHAKDGYSYGQ

SEQ ID NO: 3412 - protein, 428 aa, Desulfonema sp.; identical to SEQ ID NO: 2989

SEQ ID NO: 3413 - protein, 274 aa, Moorena sp.
MYPFTIILKTAVNNPTISPCQIKIDPGSKVTGFALVQNNQVIWGMELEHRGGLIKKKLESRRAVRRGRRNRNTRYRKPRFLNRRRPEGWLAPSLEHRVLTIETWVKRLIKFCPVDEIWIERVKFDTQKIQNPEINGVEYQQGELAGYEVREYLLEKWGRECTYCGKQNAPLQIEHIHPKSKGGSNRVSNLCLACEKCNQRKGDKPVEDFLKKKPNLLQKIKTKAKQPLKDAAAVNATRNKLVKVLRSVKPVVTGTGAQTKYNRTKLGLPKQHAY

SEQ ID NO: 3414 - protein, 417 aa, unidentified
  REGION 1..417: note = Fermentation metagenome
MYVYVINKNGNPLMPCTPAKAKHLLKAGKAKVIKRIPFTIKLLWDCEENTQEVIAGMDTGSKTIGCACVSNGKVIYKSEIQVRQDVSKKMEQRRMYRRNRRGRKTRYRKVRWQNRASSRKEGRLAPSIKSKVDSHLREKRFVESILPISKWKIETASFDIHKISNPDVKRWDYQKGQQKGFYNVKAYVLHRDGFQCQKCKTKKGKLHVHHIVFRSKGGPDSPDNLIVFCSICHEKLHNGEFIIKGIKSKTKHATEIGIVKSQLKKRFGEFKECFGYETKFKREQILQLPKTHYNDAVAICCEEGEIVEPYNYVLYQKCVAKGDYQQYKGSRSEKKIPTGKLFGIKKFDYIQTNKGIGFVKGKRSSGYFSIMDIFGNVIHNSVNVKKDVERLQSRKSIIKEVVAIPPVPEGTGFLATT

SEQ ID NO: 3415 - protein, 406 aa, unidentified
  REGION 1..406: note = metagenome
MVYVQDIDGKPMMPTTRHGKVRRLLKANKATVVNLCPFTIQLTYKSTDHKQPVTLGIDAGAKHIGFSATTEKEELFACETTLRTDIVDLLSMRLQNRRTRRSRLRYRKSRFNNRGSSKKKGWVAPSVKQRIDSHLNEVNEIHKILPITKIVIEVAQFDTQKMKNHDISGADYQNGEQLGFWNVREYVLFRDGHKCSHCKGKSKDPVLNVHHLESRKTGGDSPSNLITLCESCHKAFHKGEIELKKKRGKSLRDAAVMGIMKWKLYEELKSRYDNVSMTFGYITKHNRIKYGIEKNHTSDAFVISRNFNAKRIEYQYLKRLVRRHNRQIHKMKILKGGKKKNNQAPFEVFGFRLFDKVLYNNEIFFVYGRRKSGNFNIRDFNGENPKDVSHKKFKLIRGKRHPIILK

SEQ ID NO: 3416 - protein, 280 aa, unidentified
  REGION 1..280: note = Human gut metagenome
LVKFDSQKLQNPEVSGVEYQQGTLFEYEVREYLLEKFGRKCVYCGAEGVPLNIDHVVPRAKGGSNRVSNLVLACMSCKQEKGARSLEDFLKGKPKVLARVRRELKTPLRDAAAVNATRWVLFNELKATGLPVETGSGALTKLNRHAFGVEKEHWLDALCVGRLNGVVTRKGLNVLEIRCMGRGSRQRTRLTKYGFPRGYLMRQKCVHGFATGDMVEANVPKGKKAGLWRGRVAVRVSGSFNIQTPKGVIQGVGWKHCRLISHNDGYGYAWLGHAPHSSPA

SEQ ID NO: 3417 - protein, 407 aa, unidentified
  REGION 1..407: note = Human gut metagenome
MVYVQDINGNPLMPTTRHGKVRRLLKNNKAVVVNLCPFTIRLTYETTNYKQEITLGVDTGTKHVGLSATTKSKELYSSEVILRSDIVDLLSTRREQRRTRRNRLRYRKPRFYNRVGANKSNWIAPSIQQRIDSHIKIVSDVYKILPVSKLIIEVAQFDTQKIKNPDITNIEYQQGDQLGFWNVREYVLTRDNHKCQHCKGKSKDKILNVHHIESRKTGGDSPSNLITLCETCHNEFHKGNIDLKVKREKSLRDAAVMGIMKWRLYEILKSTLPNVSMTFGYITKYNRIHNDIEKSHVSDAFVISKNFNAKRLNFSYKIKLVRRHNRQIHKMKIPKGGTKRPNQSPFEIFGFRLFDRVRFDSKFYFIYGRRKTGSFNIRDINGENKKDVIYKKLKLSRCKRFMIQIEM

SEQ ID NO: 3418 - protein, 426 aa, Ktedonobacter sp.
VFVIDSDYKPLNPVHPARARLLLTQGKAAVFRRYPFTIVLKRVVEQPEVQPLRLKLDPGSKTTGIALVNEGNGKIVFAAELEHRGHKIKGSLDDRRAVRRNRRNRKTRYRKPRYLNRRRKKGWLPPSLESRLANIQTWVARLCRYAPIAAISQELVKFDLQLIENPDITGIEYQQGTLQGYEIREFLLEKWERRCAYCGKQNVPLQVEHIHPRAHGGTNRISNLTLACEPCNTAKGTQDIAVFLTKKPDVLTRILAHVKKPLKDAAAVNATRFALFERLKAVGLPVECGSGGLTKYNRTMRGLPKNHWLDASCVGMNTPVTLSHKGIVPLRIAATGHGRRRMCVPDEFGFPKQHKARKKTFLGYQTGDMVKAITPKGTFEGRIAIRHRPSFRLGKVDIHPKYLRCVHRSDGYEYIQKGVRHAPPHV

SEQ ID NO: 3419 - protein, 433 aa, Geoalkalibacter sp.
VNRIFVLDNQKQPLSPCLPARARMLLREGKAAVYRRFPFTIILKNRTGGETQPVELKLDPGSKTTGIALIAEVKTGKVAVFAAELNHRGAAIKKVLLDRRMFRRNRRARKTRYRAPRFDNRTRRNGWLPPSIQSRVDNSLTWAKRLRRLCPITTVAVETARFDMQQMENPDISGVEYQQGTLAGYELREYLLEKWGRRCAYCGAENVPLEIEHVVPRSKGGSNRESNLTLACRDCNEKKGNGPIREFLATKPELLKKILAGLKRPLHDAAVVNAARYALGGALKSLGLPVSFWSGGRTKFNRTGQHYPKAHWIDAACVGETGAAVKLDPKLQPFSVVASGRGSRQMCRMDKYGFPRTGPKGARFVKGFRTGDLVKAVVPAGKKTGTHLGRVAVRSTGSFNVTTAAGTIQGISHKYCRRLHRADGYGYTNKPSA

SEQ ID NO: 3420 - protein, 443 aa, Caldicellulosiruptor sp.; identical to SEQ ID NO: 2385

SEQ ID NO: 3421 - protein, 434 aa, Anoxybacillus sp.
MVFVLDTNKCPLAPCHEAVARKLLKQGKAAIYKRFPFTIILKKSVDESENETTYRLKIDYGSRHTGLAILRGQEVVWLGQLDHRTDIKERIDKRRAFRRARRNRKTRYRKPRFLNRKRKEGWLPPSLESRVQNIQTWVSRLKKLCPIGHISYENAKFDTQLMRNPEISGIEYQQGTLQGYEVREYLLEKFGRKCCYCGKENVPLEVEHIIPKSRGGTDRIDNLCLACRDCNQRKGNQTAEEFGCPHIQKQVKESLKDTSIINATRWKVYEVLKQARLDVECGTGARTKMNRIRLGLPKTHYFDACCVGESTPNHLYFKTKEVLFINAKGRGSRSRTNLDRYGFPRGYLARQKFFFGFQTGDMVKAIVPRGKYKGVWFGEVACRKTGNFDIKGKDGKRIAQGISYKYIQVIQRFDGYTYRKEEAELAQGAIPPRA

SEQ ID NO: 3422 - protein, 515 aa, unidentified
  REGION 1..515: note = Human gut metagenome
MIPNERRHLMPYIYVIGMDGKPQMPTKRRRHVQKLLDTGKARITERVPFTIQLLYDNDPVLQPVILAEDPGRTNIGLAALDLKGNLLLSAAVETRNKEIAKLMEKRRQCRRASRNGERKARQRLAKKYGTMIRGGMRMRKLPQYAADAFITCKVIRNTQARFCNRRRPDGWLTPSARHLVQTHINLVHKVQKYLPVTDVVIEVNRFAFMQLEDPAICGVDFQTGPLKGYDDRDAAVYDLQDGKCLMCKHEITQYHHIVPRSRNGSNTIGNIAGLCDQCHDRVHKDADFAEQMKEKKEGMDKKYGALSVLNQAIPFICKQLETEFGRGHVHYCTGRETSLVRRSTGYQKTKKNQLHEVDAWCIGALALAEIPENVPDFKEVHLIQQFRRQNRSLVNAQTERVYKLGGKMVAKNRKKRTGQEIYALEDWYNRQVETYGKQEADCMRSRLKVTKSERRYNNPGRMMPGAVFLYEGVRYVMRGQHCNGAYLQAVGMGNRDFPARKCKILTRNTGLVFVS

SEQ ID NO: 3423 - protein, 371 aa, Moorena sp.
MHVFVLDKDKNPLAPCHPAKARRLLKSGRASVFRRYPFTLILHEIEAKDCVVPETQLKASAPLASTSLSDESERSGGLKIDPGSQTTGLAILSENRIIWASELSYRGQQIKNDLEKRRKARRSRRHRKTRYRKPRCLNRTRPKGWLPPSLNASAPLASTSLASTSLASTSLASTSLASTSLASTSLASTSLASTSLSVESERSRGLNHRVETTMTWVNRLRKLLKETGLPVEVGTGGQTKFNRTRLGLPKTHGFDAACVGKSTPDRLDVAIEKPLLVAAKGHGVRQRCRPDKYGFPRTHAPKAKSFQGFQTGDIVKATIPQGKFAGNYTGRIAIRFRPSFRLNAGVKPFDVHPKYLTTVHQSDGYEYRFSK

SEQ ID NO: 3424 - protein, 442 aa, Moorena sp.
MGEGLQPTERSRRQNLRVFVLNKRGQPLMPCSPAKARLLLKEKKAVVRHRTPFTIQLTQATGETVQPVTLGVDAGSKFIGLSASTEKAEHYASEAELRTEVVDLLSSRREMRRARRNRKTRYRAPRFDNRIHSKNKGWLAPSVENKINTHLSCVDNVRKCLPVTKIVVETAAFDIQKIKNPDIEGTDYQQGDQLGFWNVREYVLCRDGHQCCHCHGKSKDPILNVHHLESRKTGGNAPNNLITLCETCHKAYHDGKITLKQKRGQVFRDAAFMGIMRWTFFNRLKAQCPEIEVRNTYGYLTKNTRIRHGLEKSHHTDAFCIAGNLEAKRLGVYFFQKQTRKHNRQIHKMSILKGGVRKLQQAPYEVKGFRLFDKVRYDGREAFIFGRRSSGYFDIRLLTGEKVSAGVSYKKLVLLEKRKTFLTQLIKENAIPPATEVAGFLA

SEQ ID NO: 3425 - protein, 425 aa, Nodularia sp.; identical to SEQ ID NO: 3165

SEQ ID NO: 3426 - protein, 443 aa, Bacillus sp.
MVEENMTCFMQRKGEYPMVFVLDTNKCPLAPCHEAVARKLLKQGKAAIYKRYPFTIILKEIVDNFRPKTPYRLKIDHGSKHTGLAILRGQEVVWLGQLDHRTDIKERMDKRRAFRRARRNRKTRYRKPRFLNRRRKDGWLPPSLESRVQNIQTWVNRLKKLCPIGYISYENTKFDTQLMRNPEISGIEYQQGTLQGYEVREYLLEKFGRKCCYCGKENVPLEVEHIIPKSRGGTDRVDNLCLACHDCNQRKGSKTAEEFGYPHIQKQVKESLKDASAVNSTRWKVYEVLKQSGCEVECGTGARTKMNRIRLDLPKTHYFDACCVGESTPNHLYFKTKEVLFIRAKGRGSRSRTNLDRYGFPRGYLARQKFFFGFQTGDMVKAVIPRGKYQGVWFGEVSCRKTGSFDIKGKDGKRIAQGINYRYVQVIQRFDGYAYRKEEAELA

SEQ ID NO: 3427 - protein, 426 aa, unidentified
  REGION 1..426: note = Human gut metagenome
MVYVQDINGKPMMPTTRHGKVRRLLKDKKAVVVNLCPFTIKLTYVTSDYKQEIVLGVDAGTRHVGLSATTKSKELYSSEVILRNDIVDLLSTRRESRRTRRNRLRYRKPRFDNRVKNKRQGWVAPSVRHRIDAHIRVIDNVCSILPISRIVIEVAQFDTQKINNPEISGKEYQEGNKLGFWNVREYVLCRDGHKCQYCKGKSKDSILNVHHIESRKTGGNSPSNLITLCETCHKEYHKGNIDLKIKRGKSLRDAAVMGIMKWRLYEELKSKYDRVSMTFGYVTKYNRINHDIEKSHVSDAFVISKNFNAIRLGYYYKVKLVRRHNRQIHKQKIQKGGIKRLNQSPFEVFGFRLFDRVMFENSYYFIFGRRKTGSFDIRDIDGKRQKNITYKKLKLSRCKRFMIQMELNKKTRTCFENERNSDRDAA

SEQ ID NO: 3428 - protein, 425 aa, Nodularia sp.; identical to SEQ ID NO: 3113

SEQ ID NO: 3429 - protein, 428 aa, Moorena sp.
MPCTPKRARLFLERKKAAVFRCYPFTIILKDREDGETQPLELKVDPGSKTTGIALVVHGKNKRKVVVGINLQHRGQSIKNRLLQRRGVRRSRRNRHTRHRESRFLNRHRRDGWLPPSLMSRVHNIETWAKRIQRLSPLSFCAVETVRFDMQKMQDPEMSGVEYQQGELLGYEVREYLLEKWGRKCAYCGKENVPIEVEHIQPKSKGGTNRISNLTLACRECNEKKRDQNVREFLKRKPGALERILRDAKAPLKDAAAVNATRLVCGNAVQSIGLPSTFWSGGRTKKNRISQGYPKDHWIDAACVGETGEKIHLTSLRAKSVKATGHGDRQLCLVDKHGFQRSKAMPIRVVNGFKTGDIVVAHVTTGKKIGIYRGKVAVRTSGFFNVSTENGVVQGISHRFCRKQHNADGYSYLCCRDGAGSGQLGVGM

SEQ ID NO: 3430 - protein, 198 aa, unidentified
  REGION 1..198: note = metagenome
DNHGTLCDDCHKKFHLGIIADVKLKTRRRQSTRDAAFMGIMRKTLMWRLRTELFIPVAETKGYITKATREKLLVLPKSHTRDALAIAQGRHGFSIKEYAYVEPANHIYTVRPVRHHNRQLHKASILKGGIRKRNQASKYVFGFRLYDKVLYQGKACFVWGRRTSGTFLLRTIDGIKVKDGVSYRNLTLLERSSNYLIA

SEQ ID NO: 3431 - protein, 443 aa, Actinomadura sp.
MGREVRIRQPAVFVLDKNGRPLQPTTPPRARKLLSSGRAVVARHTPFVIRLRDRTVRESRVDGVEIGIDPGSRHTGMAVFTSRRGERRARFGVRLDHRGSAIGKKLRQRAAYRRRRRTANLRHRAPRFDNRVRTDGWIAPSVRHRLETTVSWVDRLSRWAPVTAAHLERTAFDTHAMAAGRPLEGAEYQHGTLHGYEVREYLLAKFGRTCVYCDATGVPLNIDHVVPRSRAGSDRVSNLVPACIPCNRAKGDLPVEHFAPAKAASIKVRALAPLRDAAALNTARRALWKALDARMPVRASSGGRTKWNRTRHHLPKSHTLDALAVGELDSITEILTVFLAVGCTGRGTYARTRPDRHGFPRLRLPRRKDVFGFRTGDLARAVVPSGKNAGTHTGRIAVRSSGTFTVRSRGGLFTARHIRFRLLQRADGYAYTTGKEAGTAARP

SEQ ID NO: 3432 - protein, 337 aa, unidentified
  REGION 1..337: note = uncultured Candidatus Competibacteraceae bacterium
MNKVFVLSSTKEPIMPTRPARARQLLTRGRAAVYRMQPFTIILKDRETGDTQPVEVKVDPGSKATGIALVGHFEQQGAVVLWGANVNHRGQTMKNNLESRASLRRGRRGRKTRYRQARFLNRTRNAGWLPPSVESRVGNTESVINRLATRCPITEVSIEIVKFDMQAMVNPEISGTEYQQGTLAGYELREYLLEKWHRTCAYCGAKDVPLQIEHIQPKALGGSNRVSNLTLACKPCNQKKGSQPITVFLKTKPELIKKIQAQAKAPLKDAAAVNASRWALKNRLEKRWPVSCGTGGRTKFNRTKQGYEKDHWRDAACVGESGERVLIREGMKPLIIT

SEQ ID NO: 3433 - protein, 429 aa, Ktedonobacter sp.
LSNAFVIDSDYKPLNPVHPAQARRLLTQGKAAVYRRYPFTIVLKRVVEQPEVQPLRLKLDPGSKTTGIALVNDANGKVIFAAELEHRGHAVKDSLERRRTVRRSRRNRNTRYRKPRFQNRRRKKGWLPPSLESRLANILTWVARLCRYAPIAALSQELVKFDMQLIENPNIAGVEYQQGTLQGYEIREYLLEKWGRACAYCGAQNVPLQIEHIHPRANGGTKRISNLTLACEPCNTAKGTQDIRVFLAKKPEVLKRILAQVKKPLRDASAVNTTRLALLERLKRFGLTVECGSGGLTKYNRTTRRLAKTHWLDAACVGKSTPAGLSQKGIVPLHILATGQGKRQMCTTDKYGFPKQHKERKKKFLGYQTGDLIKAISPKGRFEGRIAIRHRPSFRLGNVDIHPKYIRCVQRADGYEYKQKGVRHAPPHV

SEQ ID NO: 3434 - protein, 424 aa, unidentified
  REGION 1..424: note = Human gut metagenome
MRVFVFNMRGRPLMPCSQRKARLLLRENKAMIYKYHPFTIQLTYTTGETKQDCHIGIDTGSKYIGAAVRSEDKVFWKGEIELRQDIRSNLDTKRIYRRSRRNRKTRYRKPRFLNRKRRDEWLPPSLQSRINHTFHWIDTLSSLVPNPILHIEVGKFDVAKMINPEIHGVDYQHGQTYGFFDERYFVFARDNYTCQCCGKSKNKILNTHHIIYRSNGGTNRVDNLITVCTDCHTSQNHRKGGIFYQWQEQHKKVKQYKEPPFMNTLRKRIFVAYPDAEITYGSETTPKRKAMKLDKTHYNDAIVISGINEIKENPEEWLLIKQFRKKKRSLHEATARKGRKKPNRNQTRNSKNTPYYKGFYLNDKVSVFGKSGYITGFTSNAAYIKDENNDYITLPNKTYKQVSINKMKLECHNNNWQYIIKNAV

SEQ ID NO: 3435 - protein, 537 aa, unidentified
  REGION 1..537: note = Human gut metagenome
MQYVYVVDKHGKALMPTTRYRHVHKLLKSGKAVAICNKPFTIRLKYESSTYTQDLWEGIDTGRQNIGDAVSNEKGKNVYLADVRTNNKSIKSNMQDRAGFRRERRRHDRQSKQRKAKHDGTEIQNGDDDTVRTKHSCKSIKISYPTADKPVIHKIIRGKEGKFANRKRPEGWITPSARQVIQITMNEIRQTARILPVNHINLERVSFDFQKLENQDIRRWEYGKGALYGYKTYKDYIWDEQHGKCACCGKPITQYHHIIHRAEGGIDSVKNIIGLCNGCHNKIHASKDAENKLKGLKEGVRQRYYVGLLNSVIPALIEEVSAYCDEHGIEFTVTDGKTTAEIREKYGLSKDHCTDAYAISLANRDVKSVSISDRIYEKRRFKKKSGNIIAKHNQRVYKFDGKIIAYNRHKATNQKDDSFEEYMTKYAETHTDKECRQHVAQIEIIPAKRTYTYHKQGLVAPCHAGDIVRYEKHNKIKGNTKKDTFVATSVEMNGEGHIKYGDACGSRKIKFCRPIDSGCLQAVHNYQADEYLRKIAE

SEQ ID NO: 3436 - protein, 394 aa, Arthrospira sp.
MSNHIFVLDTNRKPLTPCQPGVARFLLKAGKASVFRRYPFTIILNKEVDANPEPLELKLDPGSKVTGIALKQGNRIIFAAELQHRGQQIVEALRSRRQLRRSRRNRKTQYRPARFLNRTRPQGWLAPSLQHRVDTLMTWVNRFRRLAPVGRIVQELVRFDLQLMENPEISGVEYQQGALQGYEVREYLLEKWGRTCAYCGAKHVPLEVEHIQPRSKGGSDRVSNLTIACHSCNQAKGNGDIRDFLSGQPDVLSRLLRQAKSPLNDAAAVNSTRWALFKALKATGLRVTTGTAGQTKFNRLRLNLPKAHWLDAACVGDVESLDIVTSKPLLILAKGHGTRRMCGTNKYGFPTRHRSRKQIHKGFQTGDIVTATVTAGQENWLLCRTGSLPCLWQF

SEQ ID NO: 3437 - protein, 438 aa, unidentified
  REGION 1..438: note = Human gut metagenome
LAKVVVLMDAWDIIVVLNKRGKPLMPCSPAKARLLLKEKKAIVKRRTPFTIQLTIATGESKQPVTLGVDAGYKHVGLSASTEKAELYASEVELRQDITDQLSARLALRRSRRNRKTRYLAPRFDNRIRTKRKGWLAPSVENRINAHLSRIEAVLRLLPVTKITVETASFDMQLLKNPDIAGKEYQEGEQLGFWNVREYVLFRDGHVCHHCYGRSKDPVLNVHHLESRRTGGDSPGNLITLCETCHKALHRGEIKLKAKRGRSFRAETFMGIMRWGVLNRLKASHPKLEVHNTYGYRTKHARIANGIAKSHCADAFCIAGNFGAKRLGEFFFQKQTRRNNRQIHKLSILKGGIRKRNQAPFEVKGFRLFDKVACHGEEGFIFGRRSTGYFDVRKLDGTCISAGISYKKLHLLEKRRTYLTEIRKEEALPPLPEGRGLRA

SEQ ID NO: 3438 - protein, 483 aa, Streptomyces sp.
VRGETLSGALTTGRVTPDRPVREAGRKAQPAVFVLDKHGAPLQPTTPARARKLLKQGRAAVHRHTPFVIRMKDRTVTQSSVHGVELGIDPGSQYTGFAVFATTRTEAGATRRGLYAIELAHRGNQIRDKLARRAAYRRGRRTRNLRYRTPRFLNRRRPKGWLAPSLKHRLDTVLSWANRLARWAPISKVHIENTSFDTHALSVGRPLESTDYQKGSLYYCEAREYLSVKWGRACAYCGVRAVRLNIDHIHPRSRGGADRVSNLVLCCVPCNQAKSNRPVEEFLAHNPPALRRVLSQVKAPLRDAAAVNATRWAIQQTLATAFPVVCSASGGRTKWNRQRLGLPKTHTLDALCVGSLDELSQYPAVFLSVTATGRGTYARTSADKYGFPRLYRPRTKLVHGYATGDLAQAVVPSGKKAGTHVGRISVRTRGNFNIRTSQGLLQGIRHTYFHLLQRADGYGYTARPEGAPSSPPEAARTDQRRLR

SEQ ID NO: 3439 - protein, 431 aa, unidentified
  REGION 1..431: note = Human gut metagenome
MPNKVYVINKHGRPLMPCSPAKARHLLDAGKAKVKKRTPFTIQLVYGSSGYTQEVILGVDAGSKTIGMSVSTTKEELLSAEVKPRNDVVDLLSTRREFRRARRNRKTRYRKPRFDNRVRSKHRGWLAPSVEVKIQEHITSIKRVCRILPVSKVVVETAEFDLQLLKAIADGKPVPQGEDYQQGEMYGHYNVRQYVLWRDGYTCKCCGTHPSKKKEVRLHVHHLESRKVGGDAPDNQVTLCESCHEKLHKGLIAEKDFKKRKRKSTRDATFMGIMRKTLMQRLCSELPIPVIETRGYITKATREKLLVLPKSHTNDALAIAQGKQGFNVGYLPGIVQIDKICTIRPVRHHNRQLHKATILKGGIRKSNQTEKYVFGYRLFDKVQFNGQDCFIWGRRTTGIFTIKTINGKMIKDGISFKKLKLLEKSTSYLIA

SEQ ID NO: 3440 - protein, 529 aa, Burkholderia sp.
LEVAAADKPRVGTKRAATGELTLTLCCTTWSRGAAPQGARHQARKGNAPDVFRRHNKELGLAVCVLDRSGKALMPCSEKRARLLLARGRARVHRVVPFIIRLVDRRAHASRFQPLRIKVDPGSRTTGLALVRDTQLVDATSGEIQRGAAVLNLFELVHRGRQISEALSARRAMRRRRRGNLRYRAPRFLNRTRPAGWLAPSLEHRVATTMAWVNRLMDWTPVAALSSELVRFDMQALENPEIASVEYQQGTLAGYEVREYLLAKWGRRCAYCDQEHVPLQIEHILARASGGTNRISNLTLACACCNAKKAARPIEAFLARDPKRLAVILAQAKRPLKDAAAVNATRWALANALRATGLPVELASGGCTQFNRKQLGLPKTHALDAVCVGKVASVSVWYKPTLAVKCTGRGSYQRTRLDRYGFPRGYLTRSRRVHGFQTGDLVRAEVPTGKKAGRHTGRVAVRATGSFNIQVAGNVVQGIAHRHCRLIQRSDGYGYSRIALLKGDASDGTASLSALSLPAVNDGVSRAAG

SEQ ID NO: 3441 - protein, 414 aa, unidentified
  REGION 1..414: note = Human gut metagenome
MPCSPAKARLLLKEKKAIVVRRTPFTIQLTIATGESKQPVSLGVDAGYKHVGLSASTEKAELYASEVELRQDITDLLSARRALRQSRRNRKTRYRAPRFDNRIRTKRKGWLAPSVENRINAHLSRIETVIRLLPVTKISVETTSFDMQLLKNSDIAGKEYQESEQLGFWNVREYVLFRDGHVCQHCHGRSKDPVLNVHHLESRRTGGDSPGNLITLCETCHKELHRGEITLKAKRGQSFRAETFMGIMRWEVLDRLKASHPKLEVQNTYGYRTKHARIVNGIAKSHCADAFCIAGNLGAERLGEFLFQKQTRRNNRQIHKLSILKGGIRKRNQVPFEVKGFRLFDKVACKGEEGFIFGRRSSGYFDVRKLDGTRISAGISYKKLRLLEKRQTYLTEIRKEEALPPLPEGRGLRA

SEQ ID NO: 3442 - protein, 385 aa, unidentified
  REGION 1..385: note = Human gut metagenome
TIRLLYDSTHYTQDIVLGVDAGSKHIGLSATTETKELYASDVELRNDIVDLISTRRQNRRSRRNRKIRYRKARFQNRVSGKKNWLAPSIRQKVDTHMTVVSRVCMILPVTKIIVETASFDIQKIKDPDISGTGYQQGEQLDFWNVREYVLSRDGHTCQCCKGKSKDPVLNVHHIESRKTGGDAPNNLITLCETCHKSYHSGAVQLPKAIHRGMRFKDAAFMGIMRWAFYNKLKEVYEPQDIEIRMTFGYLTKNTRIRHHLPKEHYIDARCISGHPEAIPSNEVFYQKKVRCHNRQIHKNTILKGGIRKRNQTGYLVKGFRLFDKVAYKGREYFIFGRRQSGFFDLRNLSGCKVNKGSLSYRKIGFLEPRQYYLCERRVMDTQGCA

SEQ ID NO: 3443 - protein, 412 aa, Moorena sp.
MTQLVYVINQNGHPLMPCKPSKARKLLRDGRANVKHRAPFTIQLRWDCEEQVQDVVVGIDKGSSTTGFACVGRGEILLSGEILHRKDVKEKLDARRAHRRSRRNRRWYRPCRILNRASSKRSGRLPPSIKTNVEEVIRVVRRLPLPITRIVIEDVQVDIARLNDPTVQGSRYQDSKRLDENLRIACLLRDRYQCQHCGKREVRLEAHHVQYRQHGGKDTLSNLLTLCESCHHGVHAGKITLEVSGVSGHLDHIAQRSMQGKTYLYTTLGSALPLSTLFGYQTATWRKQQELPKEHDSDALCIATYDTGELVPWQRERFYRIGFRPRQTRRQYHDLPRKGQGRVRYQLNTELEGFRKGDVVRVKGTWIKQINSIYSTGYLAFSRKKGEPANARPKDCVLLERGTTILWQRPQR

SEQ ID NO: 3444 - protein, 347 aa, Lactobacillus sp.
VKKLLDTRRSYRRGRRNRNTRYRSPCFLNRTKPSGWLPPSIASKIHHNINWIQRIQAVMPKAELHIEVGKFDMAKMKQPDITGLGYQQGDKYGYETTKQYVLDRDNYTCQICHGKTKDPELKIHHIIYRSNGGTNQVSNLLTVCATCHTQANHQPGGKLYALLAKKFQSYRSLKGATFMNILRRRLFKAFPEAKFQYGAQTTLDRAKLDLPKAHYNDAVTISGIQKIAQRPTAVVMFHQFRKKKCSLHEATARKGRKIPNIMSKRNAKNKKFSKGFYLNDYVQLPDGQKGNVSGFSGKIKCFVKAGDGYYLAISSKYKHINLSILKVIRHQNNWNVTEIEVKTHQMA

SEQ ID NO: 3445 - protein, 420 aa, unidentified
  REGION 1..420: note = Human gut metagenome
MQYVYVLNKHGEPLMPCSPGKARLLLKQQKACVVKRTPFTIKLLFGSAGYKQPITLGVDAGSKHVGLSASTEKRELYSEEFTPRNDVVELLSTRRQNRRSRRNRKTRYRAPRFNNRVHSKHKGWLAPSVEVKIQEHITVIKHICRILPTTLVRVETAEFDTQRLKAMLAGKPLPVGTDYQLGEMYDEYNVRQYVLKRDNYTCQCCGAHTTAKKTVKLHVHHLESRKVGGNAPSNLITLCTTCHNNLHKGKITLDGKKRGKTLRDAAFMGIMRNTLLTRLRNELNIPVQNTYGYITKLLREQNDIKKSHVNDARCISKHPLAKPCSVCYRTKAIRHHNRQIHKAKILKGGIRKANQAPYIVKGFRLWDKVLYNEQECFISGRRSSGYFALRKFDGTTITNSISFKKLRLLEPATNYLIERK

SEQ ID NO: 3446 - protein, 404 aa, Nodularia sp.
MHVFLLNQQKAAVFRRFPFTIILKEPKSEVPTQPIELKIDPGSKTTGFALVQNNKVIWGMELQHRGLAIKESLETRKGVRRGRRSRHTRYRQARFLNRTKPQGWLAPSLSHRVLTINTWVKRLCNFAPITDIVQELARFDLQQLENPEISGFEYQQGELQGYEVREYLLNKWNRKCAYCTAENVPLQVEHIKPKAKGGTNRISNLCLACEKCNIKKGTQDIEKFLAKKPELLKQILSQAKRPLKDASAVNSTRWALFNKLKETGLPITTGSGGLTKFNRTRLGLPKTHWIDAACVGKVETLKILTTKILTVKSTGHSCRRFCRINKFGFPCTEPKKIFTHVSTGDFVKATLHKDRKNITSGKYVSRVKTPTKNGCEIVINGFRVEFSTMKDITKVHCSDGYSYV

SEQ ID NO: 3447 - protein, 416 aa, unidentified
  REGION 1..416: note = Human gut metagenome
MTNCENYAFVLDAEGKQLSPTKEKKAWYLIRKKRAILVSKYPMVIQLNKIVSNDNICKDEIRCGIDDGGLHVGIALVQKCQTKNKTLFKGTIEQRNDVKHLMKVRWDYRRCRRYHKRYRPKRINNRSSSKRTDRIAPSILQKRQATLRVITQLNKWINITSYWLEDVAIDVRVLTDGFSSYGWQYQKSNRLDENIRKAVILRDGCRCMECGQSNCRLEVHHIKPRRLNGSNTLGNLITLCESCHQKTEGKEEQYMQHYFNILESSDNKNLNYASYVMIGKTWLRKQLSQLGVLNLTTGGNTANKRIDWNIEKSHSNDAVCIIDLQPDSCNVKDWIIKPMRRQSKAKTDNVLGIKHRDLVSYVYKNGELHTGYVTALYPELNALNFQSPTKHCKKVNVRKCRVLWKYNKIYWLDSVS

SEQ ID NO: 3448 - protein, 431 aa, unidentified
  REGION 1..431: note = Human gut metagenome
MPNKVYVINKHGRPLMPCSPAKARHLLDAGKAKVKKRTPFTIQLVYGSSGYPQEVILGVDAGSKTIGMSASTTKEELLSAEVKPRNDVVDLLSTRREFRRARRNRKTRYRKPRFDNRVRSKHKGWLAPSVEVKIQEHITAIRRVCGILPVSKVVVETAEFDLHLLKAIADGKPVPQGEDYQKGEMYGHYNVRQYVLWRDDYTCQCCGAHATKKKEVRLHVHHLESRKVGGDAPDNQVTLCESCHEKLHKGLIAEKDFKKRKRRSTRDATFMGIMRKTLMQRLCSELPIPVVKTRGYITKATREKLLVLPKSHTNDALAIAQGKRGFNVGYLPEIAQIDKIYTIRPVRHHNRQLHKATILKGGIRKSNQTGKYVFGYRLFDKVQFNGQDCFIWGRRTTGIFTIKTINGKMIKDGISFKKLKLVEKSTSYLIA

SEQ ID NO: 3449 - protein, 442 aa, unidentified; identical to SEQ ID NO: 3161
  REGION 1..442: note = Human gut metagenome

SEQ ID NO: 3450 - protein, 634 aa, Nocardiopsis sp.
MTRAPSRARSSLGGASSTFPMGTPASVRVPVPPLVPAPPSTTVIPVLSRYGWLVTPSETWFRGPSAKDNHLRPQPTSRGNAFPARRRGFRPPGRGPGVTSTSQHQGGDQLATFHTGEKTHQAVLPQRPALESASADIPRNGNETGRGSHVRVAPGVEHVRGETTGGSPTAGGVTPVPSGAGEQAREGRPPKTTPRKGHPYVFVLDRHGTPLQPTHPARARRLLAKGRAIVARHTPFVIRLKDRTTAESEVDGVETGIDPGSKRTGIAVFTDRHGERRGRYAIRLDHRGGQIAKRMRQRAAYRKGRRSRNLRYRTARFDNRTRPRGWLPPSLRHRVDTTLAWAGRLARWAPVRAVHVERVAFDVHALSAGRPVEGVEYQHGTLHGYEVREYLLAKWGRACAYCGATGAPLNIDHVRPRSRGGSDRVANLALACVPCNRAKADQPVEEFVTNPRALAGISAQTKAPLRDATAVNATRWALWRSLDGCLPTRVGSGGRTKWNRTRNHLPKSHTLDALAVGRVEAITTAVSTVLVVGAAGRGSYARTRADRHGFPRLRLPRRKRFFGFQTGDLARAAVPSGMNAGTHTGRVAVRSGGSHTLQTSYGPIKTSWKNLCLLQRADGYGYTTQKEAGAPSTA

SEQ ID NO: 3451 - protein, 353 aa, Arthrospira sp.
MPNYQNYVFVVDTLGQPLSPTHPAIARKLLKQGLAAVFRTYPFTIILKKTVENPGNEALRLKLDPGASVTGIALVNQSRDTVIWAAELTHRGDRIRAKLTARRVVRRHRRCRKTRYRQARFNNRKRQEGWLAPSLKHRVETTLTWVNRLISSRPITDISMELVRFDTQKLPNPEISGVEYQQGVLFGYELREYLLTKWQHQCAYCGGQNIPLEIEHIQPKSQGGFDRVSNLGIACHKCNQKKGSQPVEQFLLPKPEILKRCSVQAQAPLKNAAAVNSTRWALFNRLKPTGLPIEIGTGGLTKYNRTVQGLPKTHWLDAADCVGKSTHPPVENQNSPAITNYLFWARWPSKSGS

SEQ ID NO: 3452 - protein, 451 aa, unidentified; identical to SEQ ID NO: 3061
  REGION 1..451: note = Human gut metagenome

SEQ ID NO: 3453 - protein, 431 aa, Moorena sp.
MEGLMSKTLVLDTNKRPLDPIHPAQARQLLRNKKAAVFRQFPFTIILKESRPDSPVSPLRLKIDPGAKFTGMALVNDSTGEVVFAAELKHRGFVIRDALTSRRQLRRSRRARKTRYRQPRFLNRTRPNGWLAPSLQSRVENIKTWVKKLRKFAPIEAISQELVRFDMQLMANPDIQGKEYQQGTLAGYETKEYLLEKWNRQCAYCGVKDVPFQVEHIHPRAKGGSNSITNLTLSCEKCNTKKGTKDIKDFLKKDPTRLQKILKQAKRPLADAAAVNATRWALFRVLKDTGLPVETGSGGLTKFNRSQQNLAKTHWINAACVGQSTPILTIKGIKPLLIAANGHGSRQSCRTDKFGFPSRYVPRFKFVKGFQTGDIVKAVVTAGKKVGEYFGRVAIRTSGTFNISTNSGLVQGISHKYCLATHKKDGYSYAN

SEQ ID NO: 3454 - protein, 451 aa, Moorena sp.; identical to SEQ ID NO: 2390

SEQ ID NO: 3455 - protein, 464 aa, unidentified
  REGION 1..464: note = Human gut metagenome
MYVFVIGLDGTRLMPCKPRKARKLIEAHKAEIYKKQPFTIRLLYKTGCASQPITLGIDTGSQHIGIAVTSENKVLYQAEIELRSTMDKRSLMETRYSYRRSRRYRKTRYRSPKFRFHTKRTYSETLVKRKTTGIMTHWVKHTNSMSTNRPDGWLAPSMQSKVDHHIRWINRFLDVLPPDTKLRLEIARFDMARMKNPEVHNELYQHGPQYDYENLKAYVFNRDHYKCVVCKRKLGSKQPDGHSLKGMMHHITFRSKGATDNPDQLVTVCEYCHTPQAHKEGGVLWDLKEKHKSVQRGLRDATQMNIIRTRLVKAFPDAELTYGNITAADRKKMHLPKSHAGDAVAIAMKGEDVNICEPTVYIKQIRKKKRSLHEATPRKGRKRPNTQAVRNPKNTKSIGIYHIYDTVRFQNETGFISGFTGKSAYVQDFDGNYITMPGKSYKQINLSSLELVKHNNNWIQKTRN

SEQ ID NO: 3456 - protein, 448 aa, Moorena sp.; identical to SEQ ID NO: 3040

SEQ ID NO: 3457 - protein, 419 aa, Ktedonobacter sp.
MESSIIYVLSISGQPLMPTTRHNKVWYWLRRGLARVVRREPFTIQLCFETSIHTQPVSVGVDTGSKTVGVAATTNGEVVYQAEVHLRTDISEKMTQRRIYRRNRRARKTRYRAARFANRRRQAGWLAPSLRSKAEATVKAVRLVASLLPVGKVNVEVGSFDTQKLQNPEITNLQYQQGELQGYLLREYVLEKWQRTCAYCGVRGVPLELEHIVPKSRWGSNRVSNLTLACRPCNERKGQKTAAEFGFPQIQAQARVPLKDAAHVSAIKTSVLQQLRSFFGATQVSVTYGYETKYKRIQVLGLPKSHTNDAVAIACEIGERVTPREEVYQIRCLPRGQYQRFNGHHSEHKCWAPRKVRGFKLSEVVKAKGMVGYIRGRREKGAFLIKEVSSGKKLIQVVPSKLERVARPTQGWMIMRKPT

SEQ ID NO: 3458 - protein, 451 aa, unidentified; identical to SEQ ID NO: 2424
  REGION 1..451: note = Human gut metagenome

SEQ ID NO: 3459 - protein, 420 aa, unidentified
  REGION 1..420: note = Human gut metagenome
MQYVYVLNKHGEPLMPCSPGKARILLKQQKACVVKRTPFTIKLLYGSAGYKQPITLGVDAGSKHVGLSASTEKRELYSEEFTPRNDVVELLSTRRQNRRSRRNRKTRYRAPRFNNRIHSKHKGWLAPSVEVKIQEHITVIKRICRILPITLVRVETAEFDTQRLKAMLSGKPLPVGTDYQLGEMYDEYNARQYVLRRDNYTCQRCGAHTTKKKTVKLHVHHLESRKTGGNAPSNLITLCVDCHKAFHAGKVKLDGKKRGKSLKDAAFMGAMRNTLLTRLRNELNIPVQNTYGYITKLLREQNDIKKSHINDARCISKHPLAEPCSVCYRTKAIRHHNRQTHKANFSKGGIRKRSQMPYVVEGYRLWDKVLYKGQECFVSGRRASGSFTLKKLDGTRISKGVTFKKLRLLEPATNYLIERM

SEQ ID NO: 3460 - protein, 444 aa, Moorena sp.
MHIFVLDKDKKPLAPCHPAKARRLLKSGRASVFRPYPFTLILHEIEAKDCVVPETQLKIDPGSQTTGLAILSENRVIWASELSHRGQQIKNDLEKRRALRRSRRHRKTRYRKPRFLNRTRPKGWLPPSLNHRVETTMTWVNRLRKLCPIVSIAQELVRFDTQKLQNPEVSGIEYQQGELLGYEVREFLLEKWDRKCASLGARSLAPCDGAGSHRYCGAENLPLEVEHIHPKSQGGSDRVSNLTLACHTCNQAKGNRDIREFLSGKPTVLNRILKQAKAPLKDAAAVNATRWKLYQQLKETGLPVEVGTGGQTKFNRTRLGWPKTHWLDAACVGKSTPDRLDVAIEKPLLVAAKGHGVRQRCRSDKYGFPRTHAPKAKSFQGFQTGDIVKATIPQGKFAGNYTGRIAIRFRPSFRLNAGVKPFDVHPKYLTTVQKSDGYEYRFSK

SEQ ID NO: 3461 - protein, 529 aa, Burkholderia sp.; identical to SEQ ID NO: 3440

SEQ ID NO: 3462 - protein, 508 aa, unidentified
  REGION 1..508: note = Wastewater metagenome
MQTKGKGSKVLVATRKSRSRLLTFPRGDWSQGQRNKSRKGERFEMAVFVLDRSGRPLMPCTEKRARLLLERGRACVHLVMPFTIRIVDLKAENCAFQALRVKLDPGSKATGIALVRETEGKGVAVVNLFELVHRGRQISEALTARRGHRRLRRSKLRYRPPRFDNRGNKQRGWLAPSLQHRVDTSMAWVSRIQRLAPVSAISTELVRFDMQAMENPEIEGAQYQQGTLAGYEVREYLLEKWDRTCAYCGAKDVPLQVEHIQPKAKGGSNRISNLALACQCCNQKKAALPVEMFLAKKPELLKRILAQAKRPLKDAAAVNSTRWALVNALKATGLPVETASGGQTKFNRNQLGIPKTHALDAVCVGNINTVTDWQKPTLSIKAMGRGSYQRTRLDKFGCVRGYMTRSKSIHGFQTGDMVKAIVLKGKKIGTYMGRVAVRASGSFNIQTGNGLVQGVSYRCCTVVQRGDGYGYSQVAKMDVTGTPPQHRDASHPALYLPGLKAGVSRANS

SEQ ID NO: 3463 - protein, 334 aa, Desulfonema sp.; identical to SEQ ID NO: 3387

SEQ ID NO: 3464 - protein, 233 aa, unidentified
  REGION 1..233: note = Human gut metagenome
VWLYQAVYNLGEGFLPSSEERTAFYWLLIYRKEHGIMQYVYVLNKHGEPLMPCSPGKARLLLKQQKACVVKRTPFTIKLLYGSAGYKQPITLGVDAGSKHVGLSASTEKRELYREEFTPRNDVADLLSTRRQNRRSRRNRKTRYRAPRFDNRVHSKHKGWLAPSVEVKIQEHITVIKRICRILPITLVRVETAEFDTQRLKAMLKEKPLPVGTDYQLGEMYDEYNVRQYVLKT

SEQ ID NO: 3465 - protein, 422 aa, unidentified
  REGION 1..422: note = Human gut metagenome
LNKRGKPLMPCSPAKARLLLKEKKAIVKRRTPFTIQLTIATGETKQPVSLGVDAGYKHVGLSASTEKAELYASEVELRQDITDLLSARRALRQSRRNRKTRYRAPRFDNRIRTKRKGWLAPSVENRINAHLSRIEAVLRLLPVTKITVETASFDLQLLKNPDISGKEYQEGEQLGFWNIREYVLCRDGHVCQHCYGRSKDPVLNVHHLESRRTGGDSPGNLITLCETCHKALHRGEITLKAKRGQSFRAEAFMGIMRWEVHNRLRALHPGIEVSNTYGYRTKHARIANGIAKSHCADAFCIAGNLGAERLCEFFFQKQTRRNNRQIHKLSILKGGIRKRNQAPFEVKGFRLFDKVACQGEEGFIFGRRSSGFFDVRKLDGTRISAGISCKKLHLLEKRRTYLTEIRKEEALPPLPEGRGLRA

SEQ ID NO: 3466 - protein, 429 aa, unidentified
  REGION 1..429: note = Human gut metagenome
LKDGKAKIVKHHPFTIQLLYDSKTNTQPIEICEDVGYNYIGISVKSKSHEYVSAQYDTLQDEKEHHDDCRKYRRTRRNRLRYRKPRFDNRKRSEGWLAPSLEHKKQLNIRLIERYVSVIPITHATVEVGSFDTMLLQAIQKGESKPEGVDYQKGPRYNLATLREAVFYRDNYTCQVCGRKIADGAILHMHHMFYWKGRHGYQLDELVTACEKCHTPANHQKGGKLFGFGEDKEFANLSGAAFMNAVRWQIVNALYATYGKEFVTITYGAMTKEKRIILGIEKTHSNDAYAMGDYHPAHRCVFRHYQKRRRNNRVLEKFYDATYIDARTGNKAKGKELFNGRINRNHKKDSENFHKYRSKKVSKGRRSIRRQRYAIQPYDTVRLEGKTYITSGCHNKGTRLLIPANGKSKSVAISKVQVVCHAGAWIQII

SEQ ID NO: 3467 - protein, 425 aa, Nodularia sp.; identical to SEQ ID NO: 3165

SEQ ID NO: 3468 - protein, 431 aa, unidentified
  REGION 1..431: note = Human gut metagenome
MPNKVYVINKHGRPLMPCSPAKARHLLDAGKAKVKKRTPFTIQLVYGSSGYTQEVILGVDAGSKTIGVSALTKKEELFAANVIPRNDVVDLLSTRREFRRARRNCKTRYRKPRFDNRVRSKHKGWLAPSVEVKIQEHITAIRRVCGILPVSKVVVETAEFDLQLLKAIADGKPVPQGEDYQKGEMYGHYNVRQYVLWRDDYTCQCCGAHATKKKEVRLHVHHLESRKVGGDAPDNQVTLCESCHEKLHKGLIAEKDFKKRKRRSTRDATFMGIMRKTLMQRLYSELPIPVIETRGYITKATREKLLVLPKSHTNDALAIAQGKRGFNVGYLPEIAQIDKIYTIRPVRHHNRQLHKAAILKGGIRKSNQAGKYVFGYRLFDKVQFNGQDCFIWGRRTTGIFTIKTINGKMIKDGISFKKLKPVEKSTSYLIA

SEQ ID NO: 3469 - protein, 423 aa, Arthrospira sp.
MSNHVFVLDTNRRPLTPCQPGVARSLLKAGKASVFRRYPFTIILNKEVHGNPEPIELKLDPGSKVTGIALKQGNRIIFAAELQHRGQQIVEALRSRRQLRRSRRNRKTQYRPARFLNRTRPQGWLAPSLQHRVDTLMTWVNRFRRLAPVGRIVQELVRFDLQLMENPEISGVEYQQGALQGYEVREYLLEKWGRTCAYCGAKHVPLEVEHIQPRSKGGSDRVSNLTIACHSCNQAKGNGDIRDFLSGQPDVLSRLLRQAKSPLNDAAAVNSTRWALFNALKATGVPVTTGTGGQTKFNRLRLNLPKAHWLDAACVGDVESLDIVTSKPLLILAKGHGTRRMCGTNKYGFPTRHRSRKQIHNGFQTGDIVTATVTAGKKIGSYVGRVLCRASGSFDMTTASGRVTGINHKYCQPIHRKDGYAYA

SEQ ID NO: 3470 - protein, 477 aa, unidentified
  REGION 1..477: note = Human gut metagenome
MIIALDKYKRPLGFLTERRCRILMERKRAVLYRVFPTVVILMDVDARTIPDLPSFRIKIDPGSKYTGIAIIRNDTDEFVYAMQIEHRGDAVRAALNKRKNARRNRRSRETGYRRAKWGNRCLSEKDKRSYDSSREDGWLPPSIRSAADNVISWVRRLGRWINLTECSFEAVRFDTQLMEDPDIEGEEYQHGTLFGLEIKEYLMEKFGHTCQYCGGKSGDPVLEWEHMRPKSRGGSDRVKNALLSCSSCNKDKGNRTPEEWLELIKARLPREKGKRKELDEERVELIQKVIDGKPQGSALRYAAWVSSSRRYLEKALFGIFGDVECSSGGRTKYNRTELGYPKEHHYDALCVGTVPEKGYHDRTNGYYLYAKAAGRGTRLRGHLNKCGVIATKWTDRKKGFFGFQTGDIVVAEVPHKTPKPYKYEGRFVGRVMVRATGSFDIKTTDGKLVTVKEQYCRLLQANSGYHYTMKRAIPLGH

SEQ ID NO: 3471 - protein, 442 aa, unidentified
  REGION 1..442: note = Human gut metagenome
MSTTVFVLDKKHRPLMPCRPARARRLLRAGRARVVKRFPFVIRLVDRTVEQSEVQPVLIKLDPGSRETGAAVVRDDEKKRHHALAFFVIKHRGGAIRDALKARSAFRRRRRSQNFRCRSPRFLNRVKPKGWLPPSLRHRVETTLSFVRRMCRYLPVSGIATELVKFDSQKLQNPEVSGVEYQQGTLFEYEVREYLLEKFGRKCVYCGAEGVPLNIDHVVPRAKGGSNRVSNLVLACVSCNQKKGARSLEDFLKGKPKVLARVRRELKTPLRDAAAVNATRWVLFNELKATGLPVETGSGALTKLNRHAFGVEKEHWLDALCVGRLNGVVTRKGLNVLEIRCMGRGSRQRTRLTKYGFPRGYLMRQKCVHGFATGDMVETNVPKGKKAGLWRGRVAVRVSGSFNIQTPKGVIQGVGWKHCRLISHNDGYGYAWLGHAPHSSPA

SEQ ID NO: 3472 - protein, 421 aa, unidentified
  REGION 1..421: note = Human gut metagenome
MRGQPLMPCSPAKARHLLKAGKAVVRRRTPFTIQLRIATGETKQSVTLGVDAGAKHVGLSATMEKEEVFASEVELRQDITGLLAARLSLRRERRHRKTRYRAPRFLNRVRSKHKGWLAPSVENRIQAHMSRIDAVCKLLPVTKIVIETASFDIQKIRNPTVEGTDYQQGDLLGFWNVREYVLFRDGHVCQHCHGHSRDKILNVHHLESRQTGGDAPNNLITLCETCHKAYHAGKIKLKVKRAQSFRAEAFMGIMRWTLLDRVRKAHPGLPVENTYGYLTKNTRITLGLPKTHCVDAYCIAGNLKAVRRGVYLYQRQVRKHNRQIHKCTVLSKTLKDGTKIGYRKLNQTPHLVKNFRLFDKVRCLGQTGFIFGRRSSGCFDVRRLDGVKLSSGISYRKLTLLEKRSTYLTELRNEDGASFPV

SEQ ID NO: 3473 - protein, 401 aa, Nodularia sp.
FLLNQQKAAVFRRFPFTIILKEPKSEVPTQPIELKIDPGSKTTGFALVQNNKVIWGMELQHRGLAIKESLETRKGVRRGRRSRHTRYRQARFLNRTKPQGWLAPSLSHRVLTINTWVKRLCNFAPITDIVEELARFDLQQLENPEISGFEYQQGELQGYEVREYLLNKWNRKCAYCTAENVPLQVEHIKPKAKGGTNRISNLCLACEKCNIKKGTQDIEKFLAKKPELLKQILSQAKRPLKDASAVNSTRWALFNKLKETGLPITTGSGGLTKFNRTRLGLPKTHWIDAACVGKVETLKILTTKILTVKSTGHSCRRFCRINKFGFPCTEPKKIFTHVSTGDFVKATLHKDRKNITSGKYVSRVKTPTKNGCEIVINGFRVEFSTMKDITKVHCSDGYSYV

SEQ ID NO: 3474 - protein, 334 aa, Anabaena sp.
MEGLMSKTLVLDTNKRPLDPIHPAQARQLLRNKKAAVFRQFPFTIILKESRPDSPVSPLRLKIDPGAKFTGMALVNDSTGEVVFAAELKHRGFVIRDALTSRRQLRRSRRARKTRYRQPRFLNRTRPNGWLAPSLQSRVENIKTWVKKLRKFAPIEAISQELVRFDMQLMANPDIQGKEYQQVTLAGYETKEYLLEKWNRQCAYCGVKDVPFQVEHIHPRAKGGSNSITNLTLSCEKCNTKKGTKDIKDFLKKDPTRLQKILKQAKRPLADAAAVNATRWALFRVLKDTGLPVETGSGGLTKFNRSQQNLAKTHWIDVKGTFLLGANHHPMTPN

SEQ ID NO: 3475 - protein, 406 aa, unidentified
  REGION 1..406: note = Human gut metagenome
MVYVQDINGKPMMPTTRHGKVRRLLKDKKAVVVNLCPFTIKLMYVTSDYKQEIVLGVDAGTKHVGLSATTKSKELYSSEVILRNDIVDLLSTRRELRRTRRNRLRYRKPRFDNRIKSRRPGWVAPSVKYKVDAHIRVVENVCSILPISRIVIEVAQFDTQKIKNPNISGKEYQEGDQLGFWNVREYVLARDGHKCQYCKGKSKDHVLNVHHIESRKTGGNSPSNLITLCETCHKEYHKGNIDLKIKRGSSLRDAAVMGIMKWRLYEELRSKYDRVSMTFGYVTKYNRINHDIEKSHVSDAFVISKNFNAIRLGYYYKVRLVRRHNRQIHKQKIPKGGIKRLNQSPFEVFGFRLFDRVMFENNCYFIFARRKTGSFNIRDINGKNKRDITYKKLKLSRCKRFMIEKS

SEQ ID NO: 3476 - protein, 413 aa, unidentified
  REGION 1..413: note = Human gut metagenome
MTSYAFVLDANGKQLAPAKEQKAWFLIRKKRAALVSKYPMVIQLKKEIPENEICKDEIRCGIDDGGLHVGIALVQKCKTKNKVVFKGTIEQRNDVKHLMEVRRSYRHYHRYHKRYRPARFDNRKSSKRKKRIAPSILQKRQAIIRVIHWLNKWINITNYWLEDVSIDIRALTDGYKPYRWQYQKSNRLDENIRKAAILRDGGKCMECGKLNCRLEVHHIKPRRRNGSDTLDNLITLCKSCHQKTEGQEELYMDRYFSLLKSSDHKNLNYAQHVMIGKEWLRKQLSSLGVLYLTNGGDTANKRIDWNIEKSHANDAVCITNLQPDTYDMKEWTVKPMRRQSKAKTDNVLGIKHRDLVEYTLKNGETHRGYVTALYPEQKAINFQSPTKHCKKVNARKCKLLWKYSKIYWFENAS

SEQ ID NO: 3477 - protein, 427 aa, Fischerella sp.
MSKVFVIDSEKRPLDPVHPAQARQLLRNKKAAVYRQFPFTLILKESWSEAPVQALRLKIDPGAKHTGIALVNDLTGEVVFAAELKHRGFAIRDSLTSRRQLRRSRRNRKTRYRQPRFLNRTRPNGWLAPSLQSRVENIKTWVEKLRRFAPIKAISQELVRFDMQLMRNPDIQGKEYQQGTLAGYETREFLLEKWNRQCAYCGIKDIPLQIEHIHPRAKGGSNSITNLTLSCDKCNTKKGTKDIKDFLKKDQSRLEKILKQAKRPLADAAAVNTTRFALLEVLKATGLPVETGSGGLTKFNRNQQKLTKTHWLDAACVGKSTPILNIKVIRPLLIAANGHGSRQSCRTDKLGFPNRHIPREKIHFNFQTGDIVKAIVTTGKKVGNYVGRVAIRSTGSFNISTKNGLVQGVSHKFCKRIHSKDGYSYAQ

SEQ ID NO: 3478 - protein, 443 aa, unidentified
  REGION 1..443: note = Human gut metagenome
LTKDENRPSGRTTGLRAEQAEPAGIRKGDTLKVFVLNMRGKPLMPCSPAKARHMLKAGKAVVVRRTPFTIKLTIATGETKQDVTLGVDAGARHVGISATTEKEEVFASEVALRQDITGLLADRLAFRRARRNRKTRYRAPRFNNRVRSKHKGWLAPSVENRIQAHISRIEAVCRLLPVTKIVIETASFDIQKIRNPEVEGTGYQQGDQLGFWNVREYVLFRDGHICQHCRGRSKDPILNVHHLESRKTGGDAPNNLITLCETCHKAYHAGKIKLKVKRGQSFRAEAFMGIMRWTLLDRVRKTHPELPVENTYGYLTKHKRIALGLPKTHCADAFCIAGNLKALRRGDFLFQQQTRKHNRQIHKCSILKGGVRKLNQAPFLVKGFRLFDKVRIGGQIGFVFGRRVRGTFNIRRLDKTVIGTDINCKKLSLLETRKTFLTELRKE

SEQ ID NO: 3479 - protein, 442 aa, Lactobacillus sp.
MKHENANRVFLLNRDGKPLMPCRPRKARLLLKSGKAFVVKKYPFTIQLKYGSYGYKQKVSLGVDTGQRHIGFAVVSQEKVLCQSEVELRQDVHKNLYTRKIYRGGRRNRKTRYRQSRFLNRVHGKRDGLWLPPSVKGKVNHNIAWIKRYLAVLPNPDLHVEVGKFDMAKMLNPQISGKQYQEGSLKDWKNYEYYVLARDEYTCQLCHKHGEGVKLVVHHIVYRSQGGTNRVDNLITLCTDCHTTKNHQPGGKLYKWMKVKKKVTKQLKGATFMNILRKRIMTAFPEASFQYGSQTYVDRKNLLLPKGHFMDAIAISGIKSVGQMPDTVTLISQFRKKKRSLHEATARKGRKQPNTSSKRNEKNTNHARGLWLNDYVRVIGNHAKGYVKGFKSNGYYVYLTNGLGNYVLNNGKNYINGQQCRLIMHNGNWQKAEQKLSLNEFK

SEQ ID NO: 3480 - protein, 452 aa, unidentified
  REGION 1..452: note = Human gut metagenome
MVFVLSSTNKKLMPTNEYRARKLLKSGKAAVYKHRPFTIILTKRKDGYTQPIEYCCDTGYQHIGISIKSQKHEYVNEERILLKDETERHNDCRKYRRTRRNKLRYRKARWSNRHNNLICKDGFAPSIRNKRDVHINLFKMYHEVCPITSATFEMGQFDTQLLKTVENGDNVPQGTDYQHGERYGYSTLREAVFARDNYKCVCCKKSTIKSGLILKMHHLGYRIGDRSNRMSNLATVCSNCHTSKNHQKGGKLYDLKPKLKTFKGATFMTMVRYDMFSKLKESAPDIKFNMTYGALTKLKRKDYSIKKSHSNDAYCMGVFHPKHRTDFKCYQKLRRNNRILSKFYDAKYIDLRDGTVKSGKQLSCNRTNRRELRNSNKNERIYRGPKISKGKTVVRKQHYQYRPYDFVWYKNVKYAVKGVQDKGKRIALQNHLPVSISKIKRSVHVNGWKLVI

SEQ ID NO: 3481 - protein, 425 aa, Nodularia sp.; identical to SEQ ID NO: 3165

SEQ ID NO: 3482 - protein, 419 aa, Moorena sp.
MLVYVINRHGKPLMPCKPQKARKLLKEQKAKVVKRTPFTIQLLYGSSGYKQDVILGVDAGSKTIGLSATTENREVFSAEVELRTDIVDLLSTRRMLRRSRRNRKTRYRQSRFLNRKKPEGWVAPSVQNKIDTHIKVVKMVHDILSITKVIVEVAQFDIQKIKNPDILGEDYQQGEQLGFYNVREYVLFRDKHTCQYCNGKSKDPVLNVHHIESRKSGGNSPDNLITLCETCHRKYHKGEIELKVKRNSSFRDAASMNIMRWAFYNKLKELYSNVSLTFGYITKNVRIKHNLEKSHRIDARCISGNASTKESDCWYFFKQVRKQNRQLHKTNPKKGIRRENKAPGYVHGYQLFDKVEYLGRECFVFGRRSSGYFDLRTLDGEVVSRSASVGKLKLVERASSLLCERREASFLTALKHGVS

SEQ ID NO: 3483 - protein, 509 aa, unidentified
  REGION 1..509: note = metagenome
MPDTDYIYVLGVDGKPQMPTKRKRHVKRLLDTGKARIACHVPYTIQLLYENTSVLQPIMLAEDPGRTNIGMAVLSVKGELLMSAVVETRNREIVRLMNHRRGYRRASRNGERKARQRLAKRFSTMLKAGMLMRKLPKFAADKFITCHCIKNTESRFCNRKRPDGWLTPTSRQLVETHINLIHKIQKYLPVTDIAMEVNRFAFLSLENPSVSGADFQNGPLKGFDSLHDAVNELQHGKCLLCNKKIEHYHHIVPRSMNGSNTIGNIAGLCMECHDKVHKYASHQKKLNDVKKGLDKKYGALSALNQAVPFICKRLEAEFGKEHVSYCTGRDTAKMRNSFGFQKTKDNQMHETDAWCIGILALNRISDGVPDFGQTYCIRQFRRQDRSFIYAQTERVYKLDGVIVAKNRKKRTEQKTDSLEDWYNRQVVLYGKKEADFMRSRLTVIKSKRRYNDLTRVMPGAVFMYNGVCHVLSGRLTEGQYFRAVGDAKTNYPASKCKIIRHNEGLVFVC

SEQ ID NO: 3484 - protein, 428 aa, unidentified
  REGION 1..428: note = Human gut metagenome
LKVFVLNMRGQPLMPCSPAKARHLLKAGKAVVKRRTPFTIQLRIATGETKQNVTLGVDAGAKHVGLSAATEKEEVFASEVELRQDITGLLAARLSLRRDRRHRKTRYRAPRFLNRVRSKHKGWLAPSVENRIQAHMSRIDAVCRLLPVTKIVIETASFDIQKIKDPSVEGTDYQQGDQLGFWNVREYVLFRDGHVCQHCHGRSKDKILNVHHLESRQTGGDAPNNLITLCETCHKAYHAGKIKLKVKRGQSFRAEAFMGIMRWTLLDRVRKAHPGLPVENTYGYLTKHTRITHGLPKTHCVDAYCIAGNLKAVRRGVYLHQRQMRKHNRQIHKFTVLSKRLEDGTKIGYRKLNQSPYLVHGFRLFDKVRCLGQIGFIFGRRSSGYFDVRRLDGVKLSPSISWRKLTLLEKRSTYLTELRKQDGASSPV

SEQ ID NO: 3485 - protein, 443 aa, Caldicellulosiruptor bescii; identical to SEQ ID NO: 2385

SEQ ID NO: 3486 - protein, 428 aa, Sutterella sp.
LKVFVLNMRGRPLMPCSPAKARHLLKAGKAVVRRRTPFTIQLRIATGETKQSVILGVDAGAKHVGLSAATEKEEVFASEVELRQDITGLLAARFSLRRERRQRKTRYRAPRFLNRVRSKHNGWLPPSVENRIQAHLSRIDAICGLLPVTKIVIETASFDIQKIKHPDVEGTDYQQGDQLGFWNVREYVLFRDGHVCQHCHGHAKDKILNVHHLESRQTGGDAPNNLITLCETCHKACHAGKIKLKVKRGQSFREEAFMGIMRWTLLDRVRKAHPGLPVENTYGYLTKNTRITLGLPKAHCVDAYCIAGNLKAVRRGVYLHQRQVRKHNRQIHKCTVLSKTLKDGTKIGYRKLNQTPHLVKNFRLFDKVRCLGQTGFIFGRRSSGYFDVRRLDGVKISSCINYRKLTLLEKRSTCLTELRKEDGASSPV

SEQ ID NO: 3487 - protein, 782 aa, Streptomyces sp.
LFPQDCRINAGRLPERAAGPPTRPAPRPVHSVRSPRTRAAPRTAARPRSPPAHTSRSPRHPAHAHAPARSRTAPYRTPAPGAPAAHVRSRWPPPPPAAARWSTRRARPPRRRSPAGTAPPAPGRPPPTWRRPAPRRCARAATVRASRHPRRPLSEDHSCEQLYQPRRPPVRKSREIRNSGRLARDRRPSPIALSLASPAYTRREVIRSPVHGPSGDQPQSSGSEDQGGAPMTTFPAGEQTHQAVLPQQPALESVRADTPGSRDETAHGHPAAARGTGGEHGRGETDGHGTANRRRHAKSAARPAQAAANGSGDAPPDNRPYSGGTGNPRVLVLAADARPLMPCHPARARELLRKGRAVVARQVPFAIRLKDRTSAGSEVDGVQLRIDPGSHGTGLALTDEKKEISENGTATTVRRGLLSVELRHRGAQIQTCMRQRAGYRHRRRSANCRYRAPRAKNRARPDEWLPPSLRHRVDTVSSVATRLCRYAPVTEIHLEHTAFDTHALSAGGPLHGPEYAQGTLAGTTARAHLRARWGDACAYCGATGVPLNIEHVRPRSRLGSSRIANLVIACAPCNKAKGSRSVESFLADRPGLLARILGQTKASLRDAAAMNVIPCRLGTALEALGKPVHAWSGHLTKANRDAMGLPKTHTVDALSVGLLDHQGGDLIARVPDRVLIARATGRGSYARTTPDRHGFPRLRRSRTRQHFGYATGDLVAAVVPTGKWAGRWVGRISVRARGQHSLSTRNGRLDVSHLHLRLLQRGDGYGYGVRREGVASMPAKNS

SEQ ID NO: 3488 - protein, 469 aa, unidentified
  REGION 1..469: note = Human gut metagenome
MNVFVVGLNGCRLMPVSERKARLLLDDGKASVYRKVPFTIKLNYKTGSTTQPGYLGIDTGSQHIGVSVVRKDGTVLHKEEISLRDSMTKRKLLEAKASLRRGRRYRKTRYRHPKWRPKTKRVYCEVPDKKGRHWQKQKNTFTSKRPEGWLPPSLQSKTDHHIQWIKKLQNFLPEGYRLSIELGRFDPARMKDPEIHGELYQKGPQYDYENVRAYVLDRDRYTCQVCKKKGGKLHVHHILYRSQGASDNPQYMVTVCSDCHTTENHLPGGILYQWMQEQKKFTRGLRDATFMNLLRKRLMKTFTDAVFTYGNITKVDREKLKLSKNRGNDATAIALVRTGVTSVKDEEPVLYIQQVRRKRSLHEETPRKGRKEPNRTAARNSKNTKAVTVTKRRGGKKVSVTACLFDRVELNGKKGWITGFTGKACRIVDTEGNYVAATDKYTQVNISSIRILHHTGNWVTGLKRNVGKR

SEQ ID NO: 3489 - protein, 442 aa, Lactobacillus sp.
MKHENANRVFLLNKDGKPLMPCRPRKARLLLKSGKAFVVKKYPFTIQLKYGSYGYKQKVSLGVDTGQRHIGFAIVSQNKVLHQSEVELRQDVHKNLYTRKIYRRSKRNRKTRYRQARFLNRVHGKRDGLWLPPSIKGKVSHNIAWIKRYLAVLPNPDLHIEVGKFDMAKMVNPEISGKQYQEGSLKDWKNYEYYVLARDEYTCQLCHKHGEGVKLVVHHIVYRSQGGTDRVDNLITLCTNCHTTKNHQPGGKLYKWMKAKKKVTKQLKGATFMNILRKRIMTAFPEASFQYGSQTYVDRKNLLLPKGHFMDAIAISGIKSVGQLSDTVTMISQFRKKKRSLHEATARKGRKQPNTSSKRNEKNTKHARGLWLNDYVRVIGNHAKGYVKGFKSNGYYVYLTDGLGNYVLNNGKNYINGQQCRLIMHNGNWQKAEQKLSLYKFK

SEQ ID NO: 3490 - protein, 432 aa, Moorena sp.; identical to SEQ ID NO: 3346

SEQ ID NO: 3491 - protein, 414 aa, Sutterella sp.
MPCSPAKARLLLKEKKAIVKRRTPFTIQLTIATGESKQPVTLGVDAGYKHVGLSASTEKAELYASEVELRQDVSDLLSARRALRQSRCNRKTRYRAPRFNNRLRTKRKGWLAPSVENRINAHLSRIEAVLRLLPVTKITVETASFDMQLLKNPDIAGKEYQEGEQLGFWNVREYVLFRDGHVCQHCYGRSKDPVLNVHHLESRRTGGDSPGNLITLCETCHKALHRGDITLKAKRGKSFRAEAFMGIMRWEVLNRLKVSHPELEVNNTYGYRTKHVRIANGIAKSHCADAFCIAGNLGAKRLGEFFFQKQTRRNNRQIHKLSILKHGLRKRNQAPFEIKGFRLFDKVVCKGEEGFIFGRRSSGYFDVRKLDGTRISAGISYKTLHLLEKRQTYLTEIRKEEALPPLPEGRDLRA

SEQ ID NO: 3492 - protein, 431 aa, Anabaena sp.
MSKVFVLDTKKRPLDPINPAQARQLLRNKKAAIFRQFPFTIILKKSCPDSPVSSLRLKIDPGAKFTGMALINDSTGEVVFAAELKHRGFAIRDALTSRSQLRRSRRARKTRYRQPRFLNRTRPERWLAPSLQSRVENIKTWVERLRKLAPIEDISQELVRFDMQLMANPDIQGKEYQQGTLAGYESREYLLEKWGRQCAYCGVKDVPFQVEHIHPRAKGGSNSITNLTLSCEKCNTKKGTKDIKDFLKKDPLKLEKILKQAKRPLADAAAVNTTRLALLFVVKATGLPVETGSGGLTKFNRSQQNLEKMHWIDAACVGQSTPILNIKGVKPLLITANGHGTRQSCRTDKYGFPSRYVPRFKFVNGFQTGDIVKAVVTKGKKIGAYIGRVAVRTSGSFNISTISGLIQGISYKCCKSIHKKDGYEYGKSKIC

SEQ ID NO: 3493 - protein, 512 aa, unidentified
  REGION 1..512: note = Human gut metagenome
MSTVYVLHKDGKPLMPTTRGGHVRHLLKEQKARVVKTKPFTIQLLYETDNVVQPLYLGIDPGRTNIGVAVVKANGTAVFTAHLETRNKEIPKLMKKRKDSRRARRTNGRRSRRQRRAKANGTISKKCVKQTTAQNGSVSKRAKEIGVIKRHLPGCEKDVLCIGIKNKEAKFNNRTRPEGWLTPTANQLLQTHVNLVKKIQKFLPISDVVLEVNKFAFMQLDNPNIQKWQYQQGPLYQKANLEEAVSEMQEHHCLFCKKKIDHYHHVVPQHKNGSNTIDNIVGLCTKHHDLVHKETAWQEKLAKKKTGLNKKYGALSVLNQIIPALTKGLNSLFPKHFFVTTGKSTYDYRAAHDVCKDHWLDAYCIACSVLPNDVCDSNINSHVPYELKQFRRHDRRALHKENMNRVYTLNGKKVATNRHKAIEQTTDSLEEFRQRQPNDVCKLKVKEHHPEYRNPKRSFPGCVFLVGKQTHVMQGTSGSHNGKADGYYNTNGNSYSSGKCKFVAKNEGIVFA

SEQ ID NO: 3494 - protein, 425 aa, Nodularia sp.; identical to SEQ ID NO: 3165

SEQ ID NO: 3495 - protein, 456 aa, unidentified
  REGION 1..456: note = Human gut metagenome
MSTCVCVLNNSGERLMPTIRLGKVRHLLKDGKAKIVKHHPFTIQLLYDSKTNTQPIEICEDVGYNYIGISVKSESHEYVSAQYDTLQDEKEHHDDCRKMRRARRNRLRYRKPRFDNRKRSEGWLAPSLEHKKQLNISLIERYVSVTPITRATVEVGSFDTILLQAIQKGKSKPEGVDYQKGARYNLATLREAVFYRDNYTCQVCGRKIADGAILHMHHMFYWKGRHGYQLDELVTACEKCHTPANHQKGGKLFGFGEDKEFANLSGAAFMNAVRWQIVDALHATYGKEFVTITYGAMTKEKRIILGIEKTHNNDAYAMGDYHPVHRCVFRHYQKRRRNNRVLEKFYDATYIDARTGNKAKGKELFNGRINRNHKKDSENFHKYRSKKVSKGRRSIRRQRYAIQPYDTVRLEGKTYITSGCHNKGTRLLIPANGKSKSVAISKVQVVCHAGAWIQII

SEQ ID NO: 3496 - protein, 412 aa, Moorena sp.; identical to SEQ ID NO: 3373

SEQ ID NO: 3497 - protein, 515 aa, unidentified
  REGION 1..515: note = Human gut metagenome
MIPNERRHLMPYIYVIGMDGKPQMPTKRRRHVQKLLDTGKARITERVPFTIQLLYDNDPVLQPVILAEDPGRTNIGVATLDLKGNLLLSAAVETRNKEIAKLMEKRRQCRRASRNGERKARQRLAKKYGTMIRGGMRMRKLPQYAADAFITCKVIRNTQARFCNRRRLDGWLTPSARHLVQTHINLVHKVQKYLPVTDVAIEVNRFAFMQLEDPAICGVDFQTGPLKGYDDRDAAVYDLQDGKCLMCKHEITQYHHIVPRSRNGSNTIGNIAGLCDQCHDRVHKDADFAEQMKEKKEGMDKKYGALSVLNQAIPFICKQLETEFGRGHVHYCTGRETSLVRQSTGYQKTRKNQLHEVDAWCIGALALAELPENVPDFKEIHLIRQFRRQDRSLVNAQTERVYKLGGKMVAKNRKKRTGQEIYALEDWYNRQVETYGKQEADCMRSRLKVTKSRRRYNNPNRMMPGAVFLYEGVRYVMRGQHSKGAYLQAVGMENRDFPVRKCKILTRNTGLVFVS

SEQ ID NO: 3498 - protein, 406 aa, unidentified
  REGION 1..406: note = metagenome
MVYVQGIDGSPLMPTTRHGKVRRLLKSKKAAVVNLCPFTIRLLYDTTSYNQEIVLGVDAGTKHVGLSATTKSKELYASEVILRSDVVDLLSTRRELRRIRRNRLRYRKPRFMNRIKSKKRGWVAPSVRQKIDSHIRIIGFVYSILPVSKLIIEVAQFDTQKIKNPEISGKEYQKGEQLGFWNVREYVLARDNHKCQHCKGKSKDPILNVHHIESRKTGGNSPSNLITLCETCHKEFHKGNIKLKVKRSDSLRDAAVMGIMKWKLYDKLKSLYPNVKMTFGYITKYNRINHGIEKSHVSDAFVISRNFDSERLGYYYKRKLVRRHNRQIHKMKIMKGGIRKMNQAPFKVFGFRLFDKVIFQNKVYFIYARRVRGVFDIRDINKENKKDIYYKKLRYISHGLISVEID

SEQ ID NO: 3499 - protein, 427 aa, Nostoc sp.; identical to SEQ ID NO: 3237

SEQ ID NO: 3500 - protein, 415 aa, unidentified
  REGION 1..415: note = Human gut metagenome
MENRIEYCFVVDKNNRPLTPTKVNKGWYLVRKSRAKLKSKYPMVIQLEKEVKSDEDDESHIVCGIDDGSAHVGLAIVQKCPTKNKVVFKGTIEQRQDVKHLMDVRRGHRRYHRYHKRYRQARFNNRSSSKRTCRLAPSIKQKKDAILRVLYQLNKWVNIQEYHLEDVCIDIRTLTDDYKPYRWQYQKSNRLDENLRKATILRDECRCQECGKSNCVLEVHHIRARKYGGADTIGNLITLCSGCHQKTEGRERDFEDRYFNMIKSKPKRFDYAMHVMQGKTYLREKISELGSLHLTNGGETANKRIEWNMEKSHGNDAICVTDCIPDNCDVKEWIIKPMRRKSKAKTNNLLGIRHRDLVSYTYKNGETHTGYVTALYPEQLVLNFQSKTKHCKKVNARKCRLLWKFNKIYWLEQCV

SEQ ID NO: 3501 - protein, 429 aa, Moorena sp.
MAVFVIDRQGRPLMPCTEKRARLLLARARARVHRVVPFVIRLTDRRAQDSSFQSLRLKLDPGSQTTGIALVQEKADGIAVLNLMELVHRGRQISQALRQRRAFRRRRRGANLRYRAPRFNNRTRAAGWLAPSLQHRVDSTMSWVWRVMRWAPVSALSMELVRFDMQAMQNPDISGVGYQQGELFGYEVREYLLEKWGRKCAYCDAAGVPLQIEHILARARGGSNRVSNLTLGCAPCNIGKGARDVREFVKDEARLRRILSKAKAPLRDAAAVNSTRWALLNALKETELALETASGGRTKWNRARLEIAKAHALDAVCVGEVKAVCGWPRPTLELRCTGRDSYQRTRLTAQGFARGYLTRKKRAHGFQTGDRVRAIVPKGKKAGVHVGRVAVRASGSFNIQAPTGVVQGIAHRHCTMVLRADGLDIQLCL

SEQ ID NO: 3502 - protein, 463 aa, Blautia sp.
LPGKYKNKGGQLMSVAVISKTGERLMPTSEYRARKLLKSGKAIKHSYHPFTIQLTERKTGDIQPIELCMDTGYIHIGISVKSEKHEYLAEQIDTLTDERGRHDACRMYRRQRRSRKRYRQARFNNRKRDQGWIAPSLEHKKKIHIQAISRINNVMPITDITLEMGNFDTQVLKAKEEGKPLPQGADYQHGERYGIATLREAVFARDGYKCQCCGRTIKDGAILHVHHIKYRSQGGTNSMSNLATVCDKCHTPKNHKPGGKLYNWKPKLSSFKGATFMTTIRWQLYSEAKALFSDIDIYITYGAATKERRRELDIDKSHVNDAFVMGQFHPNHRIKAVLCKKKRRNNRCLEKFYDAKYIDSRDGSKKTGQELSNGRINRNHKKDSENLRQYRLQKVTAGKRTVRKQHYKIQPHDIVIYENRKRETAGCHCNGTRVMLLTDKKSASIKKVKVYRYAGGYFKSAFN

SEQ ID NO: 3503 - protein, 464 aa, Moorena sp.
MAVFVIDRQGRPLMPCTEKRARLLLARARARVHRVVPFVIRLTDRRAQDSSFQSLRLKLDPGSQTTGIALVQEKADGIAVLNLMELVHRGRQISQALRQRRAFRRRRRGANLRYRAPRFDNRTRAAGWLAPSLQHRVDSTMSWVWRVMRWAPVSALSMELVRFDMQAMQNPDISGVGYQQGELFGYEVREYLLEKWGRKCAYCDAAGVPVQIEHILARARGGSNRVSNLTLGCAPCNIGKGARDVREFVKDEARLRRILSKAKAPLRDAAAVNSTRWALLNALKETELALETGSGGRTKWNRARLEIAKAHALDAVCVGEVKAVCGWPRPTLEVRCTGRGSYQRTRLTAQGFARGYLTRKKRVHGFQTGDRVRAMVPKGKKAGVHVGRVAVRASGSFNIQTPTGVVQGIAHRHCTMVQRADGYGYSTVPLTMEGNSGNGTKAWLAAQAALSHPGMNAEVSRANR

SEQ ID NO: 3504 - protein, 420 aa, unidentified
  REGION 1..420: note = Human gut metagenome
MQYVYVLSKHGEPMMPCSPGKARLLLKQQKACVVRRTPFTIKLLYGSAGYKQPITLGVDAGSKHVGLSASTEKRELYREEFTPRNDVVELLSTRRQNRRSRRNRKTRYRAPRFDNRVHSKHKGWLAPSVEVKIQEHITIIKRICKILPISLVRVETAEFDTQRLKAMLAGKPLPVGTDYQLGEMYDEYNVRQYVLKRDNYTCQCCGAHTTAKKLVKLHVHHLESRKTGGNAPSNLVTLCTTCHKNLHKGKVTLDGKERGKPLRDAAFMGIMRKTLMARLKEELPIPVQGTYGYITKMRREQNDIKKGHTNDARCISKHPLAEPCSVCYRTKAIRHHNRQTHKANFSKKGIRKRSQMPYLVEGYRLWDKVLYKEQECFVSGRRSSGSFTLKKLDGTSVSKGVTFKKLRLLEPATNYLIERM

SEQ ID NO: 3505 - protein, 456 aa, unidentified
  REGION 1..456: note = Human gut metagenome
MSTCVCVLSNSGERLMPTFRLGKVRRLLKDGKAKIVKHHPFTIQLLYDSKTNTQPIEICEDVGYNYIGISVKSESHEYVSAQYDTLQDEKACHDSCRKLRRTRRNRLRYRKPRFDNRKRGEGWLAPSLEHKKQLNIRLIERYVSVIPITHATVEVGSFDTMLLQAIQKGKSKPEGVDYQKGPRYNLATLREAVFYRDNYTCQVCGRKIADGAILHMHHMFYWKGRHGYQLDELVTACEKCHTPANHQKGGKLFGFGEDKEFANLSGAAFMNAVRWQIVDALHATYGKEFVTITYGAMTKEKRIILGIEKTHNNDAYAMGDYHPVHRCVFRHYQKRRRNNRVLEKFYDATYIDTRTGNKAKGKELFNGRISRNHKKNSEDLHKYRSKKVSKGRRSIRRQRYAIQPYDTVRLESKTYITSGCHNKGTRLLIPANGKSKSVAISKVQVVCHAGAWIQII

SEQ ID NO: 3506 - protein, 425 aa, Arthrospira sp.; identical to SEQ ID NO: 3231

SEQ ID NO: 3507 - protein, 431 aa, Moorena sp.
MSKVFVVDTNSQPLDPVHPARARILLHGGKASVFRMYPFTIILKTEVLEPEVQPLRIKLDPGSRTTGIALVNDASAEVVFAAELDHRGQTVKASLDDRRAVRRSRRQRKTRYRKARWQNRTRAQGWFPPSLESRLANVLTWVNRLSWYAPISAISMELVRFDMQLMENPEVSGVEYQQGSLAGYEIREYVLEKWQRACAYCEAKDVPLQIEHIHPRAKGGTNRVSNLCLACEKCNTAKGTQDIAVFLKKKPEVLKKIQAQAKKPLKDATAVNSTRWKLFERLKATGLPVECGSGGLTRYNRTTRNLPKTHWLDAANVGTSTPVVLITKGIKPLKIKATGHGRRKMCVTDADGFPKHHKERKSSYMGYRTGDMVKAITPKGTYWGRIAIRHRPSFRLGKTDVHPKYMRRLHRADGYEYTYETKGVRDAPPHG

SEQ ID NO: 3508 - protein, 416 aa, unidentified
  REGION 1..416: note = Human gut metagenome
MPCSPAKARHLLDEGKAKIKKRTPFTIQLVYGSSGYTQEVILGVDAGSKTIGMSASTKKEEVFAADVTPRNDVVDLLSTRREFRRARRNRKTWYRKPRFNNRVRSKHKGWLAPSVEVKIQEHITSIKMVCRILPVSKVVVETAEFDLQLLKAIEEGKPVPQGEDYQQGEMYGHYNVRQYVLWRDNYTCQCCGAHATKKKEVRLHVHHLESRKVGGDAPDNQVTLCESCHEKLHKGLIAEKDFKKRKRRSTRDATFMGIMRKTLMQRLCSELPIPVIETRGYITKATREKLLVLPKSHTNDALAIAQGKRGFNVGYLPEIAQIDKIYTIRPVRHHNRQLHKATILKGGIRKSNQTEKYVFGYCLFDKVQFNGQDCFIWGRRTTGIFTIKTINGKMIKDGISFKKLKPVEKSTGYLIA

SEQ ID NO: 3509 - protein, 398 aa, Moorena sp.
MNDASLGGPCIGENRKETMSRVLIVDQQRRPLMPCTPARARLLLKQKKAAVLRRCPFTLILHESRPEAVVQPLRLKIDPGSKVSGLALVNDTSGEVVWAAEVTHRGGQVHKDLQKRAGVRRGRRQRHTWYRPARYLNRRRPKGWLPPSLESRVQNVETWTQRLIFWAPVGSLSYEAVRFDTQALQNPEIEGTQYQHGTLAGLEVKEYLLLKWGQRCAYCEKMGLPLQLEHIIPKIRGGSNRVTNLTLACEQCNGKKGNQTAEEFGFPHLQAQAKAPLKDAAAVNSTRRVLHQRLVRTGLPIEASSGGRTKWNRRERDIAKTHWLDAANVGPSTPARLLFQHVRPWLIEANRRQDRQLCLVNALGFPRSKPKKKSPKHDFRTGDIVRAVVPAHLENPGI

SEQ ID NO: 3510 - protein, 473 aa, unidentified
  REGION 1..473: note = Synthetic metagenome
VVDIPEGREASASVTRPVRAFIERKVMSVFVLDRRKHPLMPCTERRARLLLDRGRAVVVRAYPFTIRLKDRIGGIIQPVRIKIDPGSKTTGIAVVRESGQKQHVLALMELAHRGRPISKSLEQRRAFRRRRRNQLRYRAPRFLNRTKPKGWLAPSLQHRVDTTRSLVNRLRALAPVTAISQELARFDTQKMENPEVSGVEYQQGTLLGYEVREYLLEKWGRECAYCTDKDTPLQIEHIDPKANGGSNRISNLTLACRPCNQEKDRQSLVSFFATSKRLKNHQARLDRILKQCKKPLRDASAVNSTRWALHQTLKQTGLPVEVGTGGRTTFNRQRLGISKTHALDAACVGEVEIVEGWDVPTLAIKATGRGSYKRTRLTKHGFPRGYLMRQKQVQGFQTGDMVRALVPTGTKTGTWVGRVAVRKTGSFNIQTNSGAIQGISHRHCVLTQRADGYGYHIQPNQPKEEGDRKNESR

SEQ ID NO: 3511 - protein, 477 aa, Moorena sp.; identical to SEQ ID NO: 3362

SEQ ID NO: 3512 - protein, 429 aa, Arthrospira sp.; identical to SEQ ID NO: 3105

SEQ ID NO: 3513 - protein, 423 aa, unidentified
  REGION 1..423: note = coral metagenome
MRVFVLNSNRQPLDPCKPARARILLSTGKAKVYRRYPFTIILTEEIQEPITHGSQLKIDPGAKTSGLAIVQGNRIVWGGELTHRGFQIRDALTSRRQLRCARRNRKTRYRKPRFLNRSRPEGWLAPSLMSRVHNILTWVKKLTRLCPIAGISQELVRFDTQKLQNPEISGIEYQQGTLYGYELREYLLEKWNRTCAYCGTTGTQLEIEHIKPLSKGGSNRVSNLAIACHSCNQSKSAQEIEQFLSGKPDVLKRVLSQAKRPLTDAAAVNTTRWKLYHELKSIGLPVEVGSGGLTKFNRCRQNLPKTHWLDAANVGKVDTLIIEGYQPLLIAAKGHGTRQICRTNKYGFPIRYCSRTKIHKGFQTGDIVRAVVTKGKKIGTYVGRVATRKSGSFNISTKSGLVQGISHKYCQCIHRKDGYAYRH

SEQ ID NO: 3514 - protein, 425 aa, Nodularia sp.; identical to SEQ ID NO: 3113

SEQ ID NO: 3515 - protein, 416 aa, unidentified
  REGION 1..416: note = Human gut metagenome
LRVFVLNKRGQPLVPCSPAKARLLLKERKAIVKRRTPFTIQLTIATGEAKQPVTLGVDSGYKHIGLSATTEKAELYASEVELRQDITDLLSARLALRRSRRSRKTRYRVPRFDNRVASKRKGWLAPSVENRITAHMSRVEAVMRVLPVTAITVETAAFDTQLLKNPDITGAAYQQGEQLRFWNVREYVLFRDGHVCQHCRGKSKDPILNVHHIESRRTGGDAPNNLITLCETCHKAFHRGKIKLKVRRGKSFKAETFMGIMRWTLFERLKKAHPELNVHNTYGYLTKHKRISHGIAKSHCADAYCIADNLSAKRLKGFFFQKQTRKHNRQIHKLSILKGGLRKKNQAPHEVKGFRLFDKVICKGEEAFIFGRRTSGSFDVRRLDGTRISAGISYKKLRRLEPRTTYLTEFRKEAAL

SEQ ID NO: 3516 - protein, 436 aa, Moorena sp.
MSHVFVVDTNRTPLNPVHPGEARRLLSHGKAAVLKRYPFTIILKQAIITPQVTGLRVKVDPGSRTTGIAVVNDTSGQVVFAAELTHRGQAIKANLDARRRVRRSRRQRKTRYRKARWRNRRIKKGWLPPSLGSRLENICTWVRRLCQLCVVTASSMELVRFDMQRMENPDIAGVEYQQGTLMGYEVREYLLEKWGRQCAYCGVKDVPLEIEHIHSRAHGGTNRIANLTVACVPCNRAKGNRDITNFLHQKPEVLARILTQAKHPLKDAAAVNTTRWALLDRLTATGLPVETGSGGVTKFNRTQREIPKTHWSDAACVGASTPPVLKTTGVVPLLIRATGHGSRQMCLMSAYGFPRTAAKGARRVQGFQTGDLVKAVVPTGKKQGTYWGRVAVRSSGSFNIKTSTATIQGISYRHCQMLQRSDGYTYTTGGALPPHA

SEQ ID NO: 3517 - protein, 532 aa, unidentified
  REGION 1..532: note = Human gut metagenome
MSTVYVLNKDGKPLMPTTRCGHVRRLLKEQKAQVVTSKPFTIQLLYETDDVVQPLYLGIDPGRTNIGVAVVKADGTAVFTAHLKSRNKEIPKLMQDRKRARRARRTNGRRHRRQRRAKANGTISKKCVKQTTTQNGSVSKRAKEIGIIKRHLPGCEKDVLCIGIKNKEAKYTNRERPEGWLTPTANQLLQTHVNLVKKVQKLLPISDVVLEVNKFAFMRLDNPDIQKWQYQQGPLYKKESLESAVSEMQEHHCLFCKKPIDHYHHVVPKSENGSNTIANIVGLCAEHHNLVHKDVAWQEKLAEEKTGLNKKYGALSVLNQIIPALTNKLSVLFPKHFFVTAGKSTHDYRAAHGVSKDHWLDAYCIACSVLPSNVCDSNINNHVPYELKQFRRHDRRVLHKANMSRVYTLNGKAVATNRHKAIKQTTDSLEEFRQNYPDDVYKLKVKEHHPAYRNLNRNYPGSVFLVGKQAHVMQGIASSKDGKTTKYNDTNATTITAGKCKFVAKNSGILFVQCKFRKALSDGTTKKLQYPV

SEQ ID NO: 3518 - protein, 427 aa, Nostoc sp.; identical to SEQ ID NO: 3398

SEQ ID NO: 3519 - protein, 415 aa, unidentified
  REGION 1..415: note = Human gut metagenome
MVYVLANDGQPLMPTERHGKVCRMLKSGIAKVVKKCPFTIQLQYESERNVQPVALGIDAGSKHVGVSATTKAKVLYESDVELRDDIVKLLATRRQLRRRRRSRKTRYRPARFDNRRRKEGWLTPSIRQKIESHLTVVANVCKILPVSQIIVETASFDIQKIKNPDIQGIEYQQGEQMDFWNIREYVLFRDGHTCQCCKGKSKDKVLNVHHIESRKTGGNAPNNLITLCETCHKGYHNGTVTLPKNIKRGMKFKDAAFMGIMRWTFYNTLKEQYEPDIPVHYTYGYITKNTRINHNLPKGHCIDARCISGNPDAVSDGTYYYQKKVRCHNRQIHKQTILKGGIRKSNQAEYLVRGFRLFDKVRYQGREYFIFGRRKSGFFDIRTLSGEKVNKGSISVKKLTFADTRKNYLIERRTV

SEQ ID NO: 3520 - protein, 425 aa, Nodularia sp.; identical to SEQ ID NO: 3165

SEQ ID NO: 3521 - protein, 423 aa, Arthrospira sp.
MSNHIFVLDTNRKPLTPCQPGVARFLLKAGKASVFRRYPFTIILNKEVDANPEPLELKLDPGSKVTGIALKQGNRIIFAAELQHRGQQIVEALRSRRQLRRSRRNRKTQYRPARFLNRTRPQGWLAPSLQHRVDTLMTWVNRFRRLAPVGRIVQELVRFDLQLMENPEISGVEYQQGALQGYEVREYLLEKWGRTCAYCGAKHVPLEVEHIQPRSKGGSDRVSNLTIACHSCNQAKGNGDIRDFLSGQPDVLSRLLRQAKSPLNDAAAVNSTRWALFKALKATGLRVTTGTAGQTKFNRLRLNLPKAHWLDAACVGDVESLDIVTSKPLLILAKGHGTRRMCGTNKYGFPTRHRSRKQIHKGFQTGDIVTATVTAGKKIGSYVGRVLCRASGSFDMTTASGRVTGINHKYCQPIHRKDGYAYA

SEQ ID NO: 3522 - protein, 470 aa, Blautia sp.; identical to SEQ ID NO: 2925

SEQ ID NO: 3523 - protein, 431 aa, unidentified
  REGION 1..431: note = Human gut metagenome
MPNKVYVINKHGRPLMPCSPAKARHLLDEGKAKVKKRTPFTIQLVYGSSGYTQEVILGVDAGSKTIGMSASTTKEELLSAEVKPRNDVVDLLSTRREFRRARRNRKTRYRKPRFDNRVRSKHKGWLAPSVEVKIQEHITAIRRVCGILPVSKVVIETAEFDLQLLKAIADGKPVPQGEDYQQGEMYGHYNVRQYVLWRDGYTCQCCGAHTTKKKEVRLHVHHLESRKVGGDAPDNQVTLCESCHEKLHKGLIAEKDFKKRKRRSTRDATFMGIMRKTLMQRLCSELPIPVVKTRGYITKATREKLLVLPKSHTNDALAIAQGKQGFNVGYLPGIVQINKIYTIRPVRHHNRQLHKATILKGGIRKSNQTEKYVFGYRLFDKVQFNGQDCFIWGRRTTGIFTIKTINGKMIKDGISFKKLKLAEKSTSYLIA

SEQ ID NO: 3524 - protein, 442 aa, unidentified
  REGION 1..442: note = Human gut metagenome
MSTSVFVLDKKHRPLMPCRPARARRLLRAGRARVVKRFPFVIRLVDRTVEQSEVQPVLIKLDPGSRETGAAVVRDDEKKRHHALAFFVIKHRGGAIRDALKARSAFRRRRRSQNFRCRSPRFLNRVKPKGWLPPSLRHRVETTLSFVRRLCRYLPVSGIATELVKFDSQKLQNPEVSGIKYQQGTLFEYEVREYLLEKFGRKCVYCGAEGVPLNIDHVVPRAKGGSNRVSNLVLACVSCNQKKGARSLEDFLKGKPEVLARVRRELKTPLRDAAAVNATRWVLFNELKATGLPVETGSGALTKLNRHAFGVEKEHWLDALCVGRLNGVVTRKGLNVLEIRCMGRGSRQRTRLTKYGFPRGYLMRQKCVHGFATGDMVEANVPKGKKAGLWRGRVAVRVSGSFNIQTPKGVIQGVGWKHCRLISHNDGYGYAWLGHAPHSSPA

SEQ ID NO: 3525 - protein, 455 aa, unidentified
  REGION 1..455: note = Sediment metagenome
MQKFEAKFQNVPMDAPQVHSSTSTLLNRDQNLSEVSIVRTSNNLEVDLLQHKGEQGLRVPATAYVFNQRGRPLMPCSERKAHVLLQKGEAKVIRNYPFVIQLMKATGEQVQQCFLGIDSGYKYVGFSAITDKKEIVCGTFTLDGKTSERLTERRMHRKNRRNRLWYRKPRFNNRMRKVGWLPPSIQRKFNTHITLINILKKLLPTERVTIEVGNFDIQRIENPDIKGIQYQQGSLFEHQNMRSFLMAREHGKCQLCGKEFSKTNPSHIHHIIPRNKGGTDREKNLALLHKKCHDKLHKKSLYNSLKKNKQYKEATFMSIIRNKFRETIVGCRIVFGNETFVKRQQLRLEKSHSNDAFVIAGGTTQIKTIPNDMGQKHKNNRSLQTVRRRLGICVRRKRYSIQPFDLVTVDNLKYVSRGCSNRGKIVLCSRNNIDYKIYIKRVEDVFHTKSIYNII

SEQ ID NO: 3526 - protein, 423 aa, Microcoleus sp.
MSNHVFVLDTNRKPLTPCKPGVARSLLNAGKASVFRRYPFTIILKKEVDANPEPLELKLDPGSKVSGIALKQGNRIIFAAELQHRGQQIVEALRSRRQLRRSRRNRKTRYRPARFLNRTRPEGWLAPSLQHRVDTLMTWVNRFRRLAPVGRIAQELVRFDLQLMENPDISGVEYQQGALQGYEVREYLLEKWGRTCAYCGAKHVPLEVEHIQPRSKGGSDRVSNLTMACRSCNQAKGNGDIRDFLSGQPDVLSRLLRQAKSPLNDAAAVNSTRWALFKALKATGVPVTTGTGGQTKFNRLRLNLPKAHWLDAACVGDVESLDILTSKPLLIVAKGHGTRRMCGTNKYGFPTRHRSRRQIHNGFQTGDIVTATVTAGKKIGSYIGRVLCRASGSFDITTASGRVAGINHKYCKPIHRKDGYAYA

SEQ ID NO: 3527 - protein, 430 aa, Moorena sp.
MSNVFVMDTMYQPLNPIHPGRARLLLKEGKAAVYRRYPFTLILKTEVDHPEIIPLRIKLDPGSKTTGLAIVDDKSGDIVFAAELFHRGDAVKRALDDRRSLRRSRRQRKTRYREPRYTNRKNKKKGWLPPSLESRIANILTWVQRLSRSCPIEAISMELVKFDLQQMENPEISGIEYQQGILQGYEVREYLLEKWNRKCAYCGARELPLQVEHIHPRAKGGTNRISNLALSCEKCNIAKGTQDIAVFLKKKPDVLKRIQAQAKTPLKDATAVNATRWALFEQLKATHLPIECGSGGATKWNRITRGLEKTHWLDACCVGRSTPAILHYQQIKPLLITATGHGNRQMCRPDKYGFPRTSAKGTRRMKGFQTGDVVKAVVPHGKKRGIFVGRVAVRSSGFFNITTKDGTIQGISYRYCQLLQRCDGYRYHIG

SEQ ID NO: 3528 - protein, 428 aa, Moorena sp.
  REGION 29..30: note = misc_feature - Xaa can be any naturally occurring amino acid
MENTLKVFVLNMRGQPLMPCSPSKARQLXXLLRAGKAVPVRRTPFVIQLTVPTGETKQPITLGVDAGYKHVGLSATTAKEELLAFEVELRQDVTGLLSNRLALRRARRNRKTRYRAPRFANRVRSEHKGWLAPSVENRIQAHISRIEAVCRVLPITKIVIETASFDIQKIKNPEIEGEGYQQGEQLGFWNVREYVLFRDGHVCQACKGRSKDLILNVHHIESRKTGGDAPGNLITLCEACHKAYHAGKLKQFSPRRCASFRAETFMGIMRWTVFNRLRERHPELPVTNTYGYLTKHKRIVEGLPKTHCADAFCIAGVLDAKRRGEYLFQKQTRRHNRQIHKLTILKGGVRKRHRAPYLVHGFRLFDKVLCKGEVGFIFGRRSSGAFDVRRLNGTKISAGISYKKLSLLEKRKMFLTELRKEGRDSSRV

SEQ ID NO: 3529 - protein, 425 aa, Nodularia sp.; identical to SEQ ID NO: 3165

SEQ ID NO: 3530 - protein, 437 aa, unidentified
  REGION 1..437: note = Human metagenome
MTKTETQKVTQVCVLDQNGQPLMPTQRLGKVYRLLKTRKAHIVNYEPFTIKLDYEPKTHIIQPMTLGVDSGAIHSGYSLANEHREYYNAEVIARDNISKNLSDRRMYRRTRRSRKTRYRKPRFNNRKNKGEGWIPPSLEQKVDVQVKEIEHLHKYFPISNIIIEVAEFDTQKIINPDISGNEYQQGTLHGYNIRNYLLEKYHHKCFYCAKEVSAFEVEHMIPKARNGSNRIDNLTLSCHDCNQKKGTLTAEEFIEQTLSPQKAAQKLRQLPKTKQLLKYMAHMNATRWVLYNTIKETYDSVSITYGYITKYNRINAGLPKTHHIDAKCITGFSTVPSFDVTVVKTKMRRHNRQLHRATFSKGHIRRAATLPRFVHGFQLYDIVLFNNHRYYIKSRRSSGSFALVSLEGLKNENRNYKKITFLAHTNAYLTNHYVNDK

SEQ ID NO: 3531 - protein, 471 aa, Caldicellulosiruptor sp.; identical to SEQ ID NO: 3268

SEQ ID NO: 3532 - protein, 425 aa, Nodularia sp.; identical to SEQ ID NO: 3165

SEQ ID NO: 3533 - protein, 423 aa, unidentified; identical to SEQ ID NO: 2741
  REGION 1..423: note = Human gut metagenome

SEQ ID NO: 3534 - protein, 456 aa, unidentified
  REGION 1..456: note = Human gut metagenome
MSTCVCVLSNSGKRLMPTFRLGKVRHLLKDGKAKIVKHHPFTIQLLYDGKTNTQPIEICEDVGYNYIGISVKSQSHEYVSAQYDTLQDEKACHDSCRKLRRSRRNRLRYRKPRFDNRKRSEGWLAPSLEHKKQLNIRLIERYVSVIPITRATVEVGSFDTMLLQAIQKGESKPEGVDYQKGPRYNLATLREAVFYRDNYTCQVCGRKIADGAILHMHHMFYWKGRHGYQLDELVTACEKCHTPANHQKGGKLYGFGKDKKFANLSGAAFMNAVRWQIVDALHATYGKEFVTITYGAMTKEKRIALQLEKTHNNDAYAMGDYHPACRCKFRHYQKRRRNNRVLEKFYDATYIDARTGNKAKGKELFNGRISRNHKKDSENLHKYRSKKVSKGRRSIRRQRYAIQPYDTVRLENKTYITSGCHNKGTRLLIPANGKSKSVAISKVQVVCHAGAWIQII

SEQ ID NO: 3535 - protein, 551 aa, Moorena sp.; identical to SEQ ID NO: 3262

SEQ ID NO: 3536 - protein, 425 aa, Nodularia sp.; identical to SEQ ID NO: 3165

SEQ ID NO: 3537 - protein, 423 aa, Arthrospira sp.; identical to SEQ ID NO: 3469

SEQ ID NO: 3538 - protein, 423 aa, unidentified
  REGION 1..423: note = Human gut metagenome
VPIMVYVLNINGQPLMPTNRHGKVKCLLKQGKAKVIRRCPFTIKLLYQSTAYTQNLTLGVDTGSGIIGTAVSKDNGNIVYMSETIVRNDITDKMTQRAKYRRNRRNRKTRYRKTRWLNRKNSIKTDRFSPTMQSKLHSHVKEIEYIKSILPVTTMVLETGQFDTHLMKNPSLANPNVKHWGYQKGANYGFENTKAMVLNRDNYTCQCCKGKHKDSKLEVHHIVFRSQGGSDEESNLITLCHTCHKDLHSGKINPKLKGKVKGTLKYATQMNSIRKQLFRVYPDAIETFGYVTKANRLALGIDKKHYYDACTIATQGNIFIVKSNLYKKKCVSDGDFQKTKGIRSEQSIVTDKICGFRKFDKVKYFGKEYFIKGRMSTGYAILMDIDGHKINFSTMPKGYKIPKLSNCKRVTARTSQMLQAVVI

SEQ ID NO: 3539 - protein, 436 aa, Moorena sp.; identical to SEQ ID NO: 3516

SEQ ID NO: 3540 - protein, 344 aa, Moorena sp.
MAIFVLDKKNQPLMPCSEKRARLLLQRGRAVVHKRYPFTIRLKDRVGGKTQPLRLGIDPGSKTTGLALMRETEGEQRHVLCLFELIHRGFQIKKALQQRAAFRRRRRSANLRYRAPRFNNRTKPKGWLAPSLQHRVDTVMAWANRLSRLAPVTAISQKLVRFDTQKLENPEISGVEYQQGTLLGYEVREYLLEKWGRECAYCGTGDTPLEIEHVVPRSRGGSNRVSNLTLSCHPCNQSKDALPLAGFFAHDEGLRKRLKANGLSADAQLERVQRQLKQPMRDVSAVNATRWALFSALKTTDLPVAVSSGGRTKYNRQRLNIPKTHALDAACVGAFEKLHDWTVP

SEQ ID NO: 3541 - protein, 423 aa, Microcoleus sp.; identical to SEQ ID NO: 3526

SEQ ID NO: 3542 - protein, 422 aa, Sutterella sp.
LRVFVINQRGKPLMPCSPAKARVLLREKKARVKRRTPFTIQLTTATGEARQDVSLGVDAGYRHVGLSASTEKAELYASEAVLRDDITDLLSARLALRRARRSRKTRYRAPRFLNRVHSKNKGWLAPSVEQRIASHLKLVENVCRLLPVTKITVETASFDMQAIKNPDIKGAEYQQGEQLGFWNVREYVLWRDGHQCQHCRGKSGDPILNVHHLESRRTGGDAPNNLVTLCETCHKAYHAGRIDLKLKRGRSMRAEAFMGIMRWTFFNRLKEIYSGKTVENTYGYLTKHTRITHGIEKSHCADAYCIAGNLRAERLPDYLWQKQVRKHNRQIHKLTIGKGGIRKRQQTPFEVKGFRLFDKVRLGDEEGFIFGRRSSGYFDVRRLDGQKLSAGVSFRKLHLLEKRTTYLTVLLPRLKTRVSAPE

SEQ ID NO: 3543 - protein, 332 aa, unidentified
  REGION 1..332: note = Human gut metagenome
LKAREEGKPLPHGADYQHGERYGIATLREAVFTRDDYKCQCCGMTIKDGAILHVHHIKYRSQGGTNRMSNLITVCDKCHTPANHKQGGKLYNWKPKIASFKGATYMTTIRWKLYNEVKALFPDIDIHITYGAETKERRRALDIDKSHVNDAFVMGQFHPKHRSKPICYKKKRRNNRCLEKFYDAKYIDSRDGKKRSGQELFNGRISRNHKKDSENLHQYRLQKVTPGRRAIRRQHYPIQPHDIIVYNGNKIEVSGCQHKVQESFFPKLKSQYRYQKLNYLNTLAVIPNQCLINRKGGSRRNVKPRIPPPPDLRNKEYCFYVGWGTLREKRWI

SEQ ID NO: 3544 - protein, 452 aa, Ktedonobacter sp.
VLYVKPFANIDEAHITLEDRRLNLSNVFVIDSDYKPLNPVHPARARLLLTQGNAAVYRRYPFTIVLKRVVDQPEVHPLRLKLDPGSKTTGIALVNDTNGKVVFAAELEHRGHAIKDSLDSRRGVRRRRRNRKTRYRKPRFQNRRRKKGWLPPSLESRLANILTWVARLCRSAPITALSQELVKFDLQLMENPDITGVEYQQGTLQGYEVREYVLEKWKRTCAYCGKQDVPLQIEHIHPRANGGTHRISNLTLACEPCNIAKGTQDIAVFLAKKPDVLKRILAQVKKPLKDASAVNATRFALLERLKAFGLPVECGSGGLTKYNRTTRGLAKTHWLDATCVGKSTPSAISHKGVVPLLITANGHGRRQMCVPDKYGFPEKHKQRRKTFLGYRTGDMVKAITSKGTFEGRIAIRHRPSFRLGKVDIHPKYMHCIHRADGYEYTQKGVRNAPPHV

SEQ ID NO: 3545 - protein, 438 aa, Ktedonobacter sp.
MSRILIVDQQRRPLMPTTPARARLLLKSRKAAILRRFPLVLILKEARPEAVVEPLRVKLDPGSQTSGIAVVNERSGEVVWAAELTHRSQAVHEALSKRRAARRSRRSRHTRYRAARFANRRRPKGWLAPSLLSRVQHLLCWAKRLARWCPVGALSLELVRFDLALLQTPSLEGVDYQRGTLWGTEVRQYLLAKWEHRCAYCQATGVPLEIDHVVPQSRGGSDRIANLVIACHTCNQCKADQTLEAFLADRPEVLARVQAQRKAPLRDAAAVNSTRWALYENLKTLGMPLETGSGGLTKWNRTSRNLPKRHWIDAACCGRSTPERLRIQHVRPSLIEARGRQARRMVNVDEQGFPVGRAKGPSRVQGFRTGDLVRARVTRGKKVGVYVGRVAIKTDGYFKLTGRPFGMVEGIHARYCTPLHQKDGYAYSQGEAALPPQA

SEQ ID NO: 3546 - protein, 420 aa, unidentified
  REGION 1..420: note = Human gut metagenome
MQYVYVLNKHGEPLMPCSPRKARLLLKQKKACVVKRTPFTIKLLYGSTGYKQPITLGVDAGSKHIGISAATEKYELYCEEATPRNDVVDLLSARRAFRRSRRNRKTRYRAPRFNNRVHSKHKGWLAPSVEVKIQEHITLIKRVCRILPVTFVRVETAEFDTQRLKAMLEGKPLPVGTDYQLGEMYDEYNVRQYVLKRDNYTCQCCGAHPTKTKAVKLHVHHIETRRTGGNAPNNLITLCTACHKALHAGKVTLDGKKRGRSLKDAAFMGVMRKTLMERLLKELKIPVQGTYGYITKYLREKHSIPKSHTNDARCISKNPLAIPCDTCYYTKAIRHHNRQLHKATILKGGIRKANQAPYTVKGYRLWDKVSYNGSECFITGRRTSGYFALKKLDGTVVSNSASYKKMRLLEVATNYITERR

SEQ ID NO: 3547 - protein, 425 aa, Nodularia sp.; identical to SEQ ID NO: 3165

SEQ ID NO: 3548 - protein, 415 aa, unidentified
  REGION 1..415: note = Human gut metagenome
MENEIAYCFVVDKNSRPLAPTKVNKGWYLVRKGRAKIKSRYPMVIQLEKEVEYDKYDESRMVVGIDDGSVHVGLAIVQKCPTKNKVVFKGTIEQRQDVKHLMDVRRGYRRYHRYHKRYRQARFDNRYSSKRSDRLAPSIKQKKDAILRVLYQLNRWIDIQEYCLEDVCIDIRAMTDGYKPNKWQYQKSNRLDENLRKAAIISDGCKCQECGKSNCVLEVHHIRARKYGGADTIGNLITLCSRCHQKTEGREREFEDRYFKIIGSKPKRFDYAMHVMQGKNYLRRKISELGPLYLTNGGETANKRIDWNIEKSHSNDAICITNCIPDTCDVKEWIIRPMRRKSKAKTNNVLGIRHRDLVSYTPRGKSSVVGYVTALYPDSYQLNMTSYNKQYKKISARSCVLKWRFNKIYWLEQCV

SEQ ID NO: 3549 - protein, 630 aa, Nocardiopsis sp.
MTRAPSSARSSLGGASSTFPMGTPASVRVPVPPLVPAPPSTTVIPVLSRYGWLVTPSETWFRGPSAKDNHLRPQPTSRGNAFPARRRGFRPPGRGPGVTSTSQHQGGDQLATFHTGEKTHQAVLPQRPALESASADIPRNGNETGRGSHVRGAPGVEHVRGETTGGSPTAGGVAPVPPGAGEQAREDRPPKTTPREGHPYVFVPDRHGTPLQPTHPARARRLLARGRAIAARHTPFVIRLKDRTTAESGVGGVETGIGPGSKRTGTAVFTDRRGERRGRCAIRPDHRGGQIAKRMRQRAAYRKGRRSRNLRYRTARFDNRTRPRGWPPPSLRHRVDTTLAWVGRPARWAPVLERVAFDVHALGAGRPAEGVEYRHGTLHGYEVREYLLAKWGRACAYCGATGTPLNVDHVRPRSRGGSDRVADLALACVPCNRAKADQPVEEFVTNPRALAGISAQTKAPLRDAAAVDATRWALWRSLDECPPTRVGSGGRTKWNRTRDHLPESHTLDALAVGRVETVTTAVSTVLVVGAAGRGPYARTRADRHGFPRLRLPRRKRFFGFQTGDLARAAVPSDMNAGTHTGRVAVRSSGSHTLQTSYGPIKTSWKNLCLLQRADGYGYTTQKEAGAPSTA

SEQ ID NO: 3550 - protein, 427 aa, Moorena sp.
MSKVLVIDTNKRPLDPIHPAQARQLLRNDKAAILYRFPFTLILKESRPEVSVQPLRFKIDPGAKTTGLALLNDKTGEVVWAAELQHRGFAIRESLISRRQLRRSRRNRKTRYRAPRFNNRTKPKGWLPPSLMSRVYNIETWVKRLCKLAPITGISQELVKFDTQLIQNPEISGKEYQQGTLAGYETREYLLDKWLRQCAYCKIKDVPLQIEHIHPRSLGGSNRISNLCLACEKCNLKKGNKPIELFLKNKPDLLKKILSQAKKPLADTTAVNATRFKLLEVLKATELPVETGSGGLTKFNRTQQGLDKTHWIDAACVGLSTLTLVVKYVKPLLLKATGHGTRQMCGTDKYGFSTRHHERKVLHFGFRTGDIVKAVVESGKKTGKYVGRVLCRKSGSFDISTKSGRVSGISYKCCTHIHKNDGYNYAF

SEQ ID NO: 3551 - protein, 427 aa, Nostoc sp.
MSKVFVIDQNKRPLDPIHSAQARQLLRNKKAAVHRQFPFTIILKKSCPSPEVRPLRLKIDPGAKTTGIALVDDASGEVVFAAELKHRGFAIRDAINSRRQLRRSRRNRKTRYRQPRFLNRTRPQGWLAPSLQSRVDNIKTWVQKLCRFAPIAAISQELVRFDMQLMRNRDIQGNEYQQGTLQGFETREYLLEKWNRECVYCGIKDVPLQIEHIHPRAKGGSNSITNLTLSCEKCNTKKGTKDIKDFLKKDPSRLEKILKQAKKPLADAAAVNTTRFALLNVLKSTGLPVETGSGGLTKFNRSKHYIPKSHWADAATVGKSTPILIIKGIKPLLMTSNGHGTRQMCGTDKFGFPNRHRTNKQIHFGFQTGDIIKSVVTNGKKVGVYVGRVLCRATGSFDIATKTGRISGISHKYCSPIHKKDGYSYGF

SEQ ID NO: 3552 - protein, 431 aa, unidentified
  REGION 1..431: note = Human gut metagenome
MPNKVYVINKHGRPLMPCSPAKARHLLDAGKAKVKKRTPFTIQLVYGSSGYTQEVILGVDAGSKTIGMSASTKKEEVFAADVTPRNDVVDLMSTRREFRRARRNRKTRYRKPRFDNRVRSKHKEWLAPSVEVKIQEHITAIRRVCGILPVSKVVVETAEFDLQLLKAIEEGKPVPQGEDYQKGEMYGHYNVRQYVLWRDDYTCQCCGAHATKKKEVRLHVHHLESRKVGGDAPDNQVTLCESCHEKLHKGLIAEKDFKKRKRRSTRDATFMGIMRKTLMQRLCSELPIPVIETRGYITKATREKLLVLPKSHTNDALAIAQGKRGFNVGYLPEIAQIDKIYTIRPVRHHNRQLHKATILKGGIRKSNQTEKYVFGYRLFDKVQFNGQDCFIWGRRTTGIFTIKTINGKMIKDGISFKKLKPVEKSTSYLIA

SEQ ID NO: 3553 - protein, 426 aa, Tolypothrix sp.
MSKVFVIDQNKRPLDPIHSAQARQLLRNKKAAVYRQFPFTIILKKLCPNPEVQSLRLKIDPGAKFTGIALVNDASGKVVFAAELKHRGFAIRDALTSRRQLRRGRRARKTRYRKPRFLNRTRPGLLAPSLQSRVDNIKTWINKLRRFAPITAISQELVRFDMQLMRNSDIQGSEYQQGTLQGYEAREYLLEKWNRECAYCGIKDVPFQVEHIHARARGGSNSITNLTLSCEKCNVKKGTKDIKDFLKKDPSKLEKILKQAKRPLADAAAVNTTRWALFRELESTGLQVETGSGGLTKFNRSQQMLQKTHWLDAACVGKSTPILNIKGIKPLLITANGHGSRQSCRTDKFGIPNRHVPREKIHFGFQTGDIVKAIVTTGKKIGNYVGKVAIRSSGSFNISTKNGLIQGISHKFCKRIHAKDGYSYAT

SEQ ID NO: 3554 - protein, 537 aa, Planomonospora sp.
MATSDVRRQTHRRVLPQPAALESTGADTPGRDETARGDTIGDDCVPGIGPGRGETRVRRTRVRGRHPEAAAAAEGERGGNAPSVFVLDKHGEPLMPCPPARARKLLSSGRAVVHRHTPFVIRLKDRTVAESVVPGVEAGIDPGSRHTGLSLFTATSEGVRRGLFALQLDHRGGKIRDRLAARAAYRRGRRSRNLRYRAPRFHNRTRPDGWLAPSLRHRLDGTLSWVTRLSRWAPVRALHVERVAFDTFALSAGRPLAGVEYQQGTLHGYEVRAYLLEKWNRTCAYCGAQNIPLNIDHIQPRARGGSDRISNLTLACVPCNQAKDARPVEEFLKRDPKRLARLLAQAKAPLRDAAAVNTTRQALGRTLTGIGVPVHAASGGRTKWNRSRTGAPKSHTLDALHVGALKTVTAWPATVLVTTATGRGTYARTRTDSYGFPRLTLPRIKQVRGFTTGDLVRAVVPSGKKVGTHTGRVAVRTTGNFNIRTARGLVQGIGHRHVRLLQRADGYGYTTAEEATVTGRSAFPPRPEDRGLHAGGK

SEQ ID NO: 3555 - protein, 430 aa, Tolypothrix sp.
MSNFVFLIDANKQPLDPIPPGQARRLLNQGHAAVYRRYPFTLILKKIISDPKVKPHQLKIDPGSKVSGLAILQEDKVIWGAELTHRGQQIKNDLESRRAIRCNRRNRKTRYRQPRFLNRTRQKGWLPPSLESRIKNILTWVNRIIRYVPITGISQELVKFDLQATENPEISGKEYQQGTLAGYETREYLLEKWNRKCAYCGVENVPFEVEHIHPKSKGGTDRVSNLTLACHECNQAKGNLDIKEFLAKKPAILSRILSQAKQPLKDAAAVNSTRWALFDRLKKTELPLEIGTGGRTKYNRVRLELPKKHWIDAAAVGMVESLQLLASQPLLITAKGWGSRQMCTPNKYGFPIRHKTRCKTFFGFQTGDMVRAILPSGKFAGTHIGRLTVRESGVFEMKTPKQKVSPVRYKYCKSVHRNDGYMYFFSTNVQ

SEQ ID NO: 3556 - protein, 518 aa, unidentified
  REGION 1..518: note = Human gut metagenome
MTPKKRKEASRMSEYIYVLGMDGDPQMPTKRKRHVEKLLQVGRARVFRQIPFTIQLTYENKPVLQPITIAEDPGRSNIGMAVVSLSGELLSAAVVQTRNKEIVKLMEKRKQHRRASRNGERKARQRLAKKCHTIIKTGFLMRKLPMYGKDKRVRCNVIKNTEAKFCNRKREDGWMTPSAEHLVRTHINLIHKMQKFLPITDVAIEINRFAFLSLEDPSISGVDFQNGPLKGYDDLNAAIEDLQDGHCLMCNSPIEHRHHIVPRSMQGSNTIGNIAGLCCKCHERVHKDARFEDRLKKKKAGLNKRYAAVSVLNQAIPFICKRLEQEFGKEHVHYCSGRDTSMVRRSIGYHKTKEEQLHEVDAWCIAVLALQHVPEKAPEFDHVHEILQFRRQDRSRIKAQTSRAYYHEGKKIAKNRKKAEGQREDSLQEWRKRQVERYGKEQTRKMISQLEVKESIRRYNRLDRLMPGAVFYYQGVRYVMRGQHSNGQYLQAVGMGDKDFPAKKCKIVVHNQGLVFVS

SEQ ID NO: 3557 - protein, 425 aa, Nodularia sp.; identical to SEQ ID NO: 3165

SEQ ID NO: 3558 - protein, 413 aa, unidentified; identical to SEQ ID NO: 3290
  REGION 1..413: note = Human gut metagenome

SEQ ID NO: 3559 - protein, 403 aa, Nodularia sp.
  REGION 360..379: note = misc_feature - Xaa can be any naturally occurring amino acid
MSNFVLVLDTNKKPLTPIHPGDARFLLNQQKAAVFRRFPFTIILKEPKSEVPTQPIELKIDPGSKTTGFALVQNNKVIWGMELQHRGLAIKESLETRKGVRRGRRSRHTRYRQARFLNRTKPQGWLAPSLSHRVLTINTWVKRLCNFAPITDIVQELARFDLQQLENPEISGFEYQQGELQGYEVREYLLNKWNRKCAYCTAENVPLQVEHIKPKAKGGTNRISNLCLACEKCNIKKGTQDIEKFLAKKPELLKQILSQAKRPLKDASAVNSTRWALFNKLKETGLPITTGSGGLTKFNRTRLGLPKTHWIDAACVGKVETLKILTTKILTVKSTGHSCRRFCRINKFGFPCTEPKKIFXXXXXXXXXXXXXXXXXXXXISKSSSRGSKFHSVCDAKNCRRLH

SEQ ID NO: 3560 - protein, 420 aa, unidentified
  REGION 1..420: note = Human oral metagenome
MLVYVLKQNGQPFMPTGRFGKVRRLLKEGKAKVVRREPFTIRLLYEPETDVVQECYCGVDTGSKHVGVAVVGNDKVLYQSQTELRNDIKKKMERRKSFRQLKRSRKTRYRKPRFLNRKNSTKLNRLPPSVKHKVQAHIDEIEFCKKILPVSDLILEVSQFDTALMKNPALISEKVRHWGYQQGFNYSYSSRRSAILHRDNYTCQCCGKKNCRLEVHHIRFKSDGGTDDEENLITLCKECHDSVHAGIVELNKKPKKSKNLKYATHMSIIRSWLLKEYPDAIETFGFVTSENRHRLNLEKDHYIDACVIASGGLEFKELDVIYRKRRVPVQDRILTKGIHDEKKLPTGKIFGFKKFDKVEYLGETCFIKGRRSSGAFVLMDINNNTINFVDREGKQNPSYKSLKMINTRRGILYINEKVER

SEQ ID NO: 3561 - protein, 416 aa, Nostoc sp.
MSNFVFVLDTNKQPLNPVPPGQARRLLKASLAAVYRRYPFTIILKYAVPNSEAEPHQLKIDPGSKTTGLAIVQGEKVIWGAELTHRGQQIKNDLESRRAIRRNRRNRKTRYRQARFLNRTRYKGWLAPSLNSRVENILTWVNRITRYVPITGISQELVKFDTQAMQNPEVSGVQYQHSELMGFEIREYLLEKWGRKCAYCGVENVPFEVEHILAKSRGGSDRVSNLALACHDCNQAKGNRDVKEFLAKKPDILSRILRQAKQPLKDAAAVNSTRWTLFNRLKAICLPIEVGTGGRTKYNRVRLSIPKTHWLDAACVGIVESLKILTSLPLLITAKGWGSRQMCTPNKYGFPVKHRTRCKTFFGFQTGDMVRAILPKGKFAGTHVGRLTVRESGVFEMRTAHGKISPVRHKYCKSIH

SEQ ID NO: 3562 - protein, 473 aa, unidentified
  REGION 1..473: note = uncultured beta proteobacterium
MSVFVLDKRKRQLMPCSENRARKLLDSGRARVHKLFPFCIRLTDRLIEDSALQPMRLSLDPGSKETGLAVSRIAETIDVRTGEIAPVMHICFLIELVHRGAAIKKSLEARAAMRGRRRSANLRYRAPRFGNRPRAKGWLAPSLKHRVDTTCSWVRRLTCLAPITHLAKELVRFDMQLMQNPEICGVEYQQGSLQGYEVREYLLEKFHRTCAYCDAKDIPLQMEHIHPKANGGSNRVSNLTLACGPCNSKKAARDIKDFLAKDSVRLKRILAQAKAPLRDAAAVNSTRWALFNALKATGLAVETGTGGQTKWNRSRLGIVKTHALDAACVGTVYDVQGVNAPALRVTCTGRGSRCKTRLDQYGFPRTYLSKQKTAFGFKTGDMVIANVTKGIKTGVHKGRLAIRLSGSFNVQSGLKGIPAVQGISYKYCRITQRADGYGYSQPEQPKKGSRDQGRASHAALYLPGLNAQVSRAF

SEQ ID NO: 3563 - protein, 437 aa, Clostridium sp.
MVYVLNKEGKPLMPTNRYAKIRVLLKSKKAIVVNSKPFTIKLLYDTKNFTQSITLGIDSGYLNIGFSTITKEKELISGEVKLLKGMSERLREKAMYRRQRRSRLRYRKPRFDNRKRSKDWLAPSIQHKYDSHIRFIDKLKNLLPITNTIIEVANFDTHKLKDPSIEGAAYQNGEQKDFFNLREYILHRDGHKCQNPNCKNKSTEPILQVHHIGFWKQDRSDRPGNLITLCNKCHTPKNHKEKSFLYGWKPKVKSFKEATFMSMIRWRLVNTLSCKYTYGYITKSNRIILKLDKTHYNDAFCIAGGSNQNRVKPLIFEQIKRNSRSLEKFYDAKVIDIRTNTKVSGVELFNGRRTRNKSLNSENLRKYRGAKISKGQRRIRTKRYFYQPGDLVKYEDKVYIVKGTQNKGKYIALKELKKVPKVELLTPYKFRKGLVCV

SEQ ID NO: 3564 - protein, 310 aa, Moorena sp.
LNRTRPEGWLAPSLQSRVENIKTWVKKLRQFAPIGAISQELVRFDMQLMTNPDIQGKEYQQGTLAGYETREYLLEKWNRQCAYCGVKDVPFQVEHIHPRAKGGSDSITNLTLSCEKCNTKKGTKDIKDFLKKDPSKLEKILKQAKRPLADAAAVNTTRFALLFVLKATGLPVETGSGGLTKFNRSQQKVEKTHWIDAACVGQSTPILNIKGVKPLLITANGHGTRQSCRTDKHGFPNRHCSRTKFHFGFQTGDIVKSVVKTGKKIGEYIGRIATRAIGSFNISTRNGLVQGISYKTCKTIHQKDGYGYSN

SEQ ID NO: 3565 - protein, 483 aa, unidentified
  REGION 1..483: note = Human gut metagenome
VNNPQKWRICHKAEGVDLSERAKLRKGGYSMMTAVLSSIGVRLMPTTCFRARKLIKSGKAVIHSYDPFTIRLTQRENGGTQPIEYCCDTGYQHIGISIKSAKHEYVGVQVDAVKDEKKHHQDAATYRRTRRNRKTRYRVARFNNRKATKSKGWLAPSIRHKKDIHLAQVQKYVKVFPITSIVFEMGEFDTQKLKAIEEGRPAPAGIEYQHGEQCGFDDVRNAVFTRDDYRCVYCGKGIEDGAILHAHHLNYRSLGGTNRMGNLVAVCDRCHTPANHQKGGLLWKLMDKYKVKNFKGATFMTAVRWQMYDELKAMFPDTEIRPTYGSRTKEARRQLGVRKSHINDAYCMGNFHPKHRSEHWLYTKKRRNNRVLAKFYDAKYIDSRDGKKKSGQELFSGRTKRNRELNAENQHRYRQLKASKGRVSIRRQHYSIQPGDTIIYEGRKHITKGIQNLGAYLKISEKVVPVRKICIHHYAGGYIRQRM

SEQ ID NO: 3566 - protein, 490 aa, unidentified
  REGION 1..490: note = Human gut metagenome
MNYVYVLDKKGKPLMPTTRYGKVRRMLKSGQAKPIQNLPFTIQLTYIPKTTVCQPVIVGFDPGRTNIGISAVREDGTCLNLTHCETRNREIPKLMQKRKEHRQTSRRGERLVRKRLAKRHGTVSSKPLERILPGCEKPLKVKDIINTESRFNNRLRSEGWLTPTATQLLRTHVNLLKRMCQILPATDVVMEVNRFAFMQLDQPNVKKCGIDFQHGPLFGTDGIKEAVSIQQDGRCLLCEKRTIEHYHHIVPRAYRGSDTAENIAGLCAGCHKLVHTSREASNKLKHKKDGINKKYGGISVLNQVIPFLFMEFEQMFPGHTYATNGWNTKQFREKYRLAKDHSVDAYCIAASILPEPKVELPEDTHEIVQYRRHDRARIKRQTERTYCLGKKGVCKNRHKRFEQKTDSLEEYVEKYPNFLSNLTVKKSQRSYNDLKRVLPGAVILYQGKRYILSGRSSGGKQYRMLGYGNQNFTASKCTIVQQNTGLVYVS

SEQ ID NO: 3567 - protein, 406 aa, unidentified
  REGION 1..406: note = Human gut metagenome
MVYVQDIYGRPLMPTTRHGKVRRLLKSKKATVVNLCPFTIRLLYDTTGYKQEITLGVDTGTKHVGLSATTKSKELYASEVILRSDVVDLLSTRRELRKIRRYRLRYRKPRFMNRIKSKKRGWIAPSIRQKIDSHIRIIGFVYSILPVSKLIIEVAQFDTQKIKNPEISGKEYQEGEQLGFWNVREYVLARDEHKCQHCKGKSKDPVLNVHHIESRKTGGDSPSNLITLCKTCHKEFHKGNIKLKVNRGESLRDAAVMSIMKWELYDELKSLYPNVKMTFGYITKYNRINHGIEKSHVSDAFVISRNFDSERLGYYYKRKLVRRHNRQIHKMKAPKGGNKRMNQSPFKVFGFRLFDKMMFQGKERFIYARRLRGIFNIRDINGENKKDISYKKLEYVSHGLISIVAG

SEQ ID NO: 3568 - protein, 514 aa, Nocardiopsis sp.; identical to SEQ ID NO: 3215

SEQ ID NO: 3569 - protein, 428 aa, unidentified
  REGION 1..428: note = Human gut metagenome
LKVFVLNMRGKPLMPCSPAKARHMLKAGKAVVVRRTPFTIKLTIATGETKQDVTLGVDAGARHVGISATTEKEEVFASEVALRQDITGLLADRLAFRRARRNRKTRYRAPRFNNRVRSKHKGWLASSVENRIQAHMSRIDAVCRLLPVTKIVIETASFDIQKIKDPSVEGTDYQQGDQLGFWNVREYVLFRDGHVCQHCHGRSKDKILNVHHLESRQTGGDAPNNLITLCETCHKACHAGKIKLKVKRAQSFRAEAFMGIMRWTLLDRVRKAHPGLPVENTYGYLTKNTRITLGLPKTHCVDAYCIAGNLKAVRRGVYLHQRQMRKHNRQIHKFTVLSKRLEDGTKIGYRKLNQSPYLVHGFRLFDKVRCLGQIGFIFGRRSSGYFDVRRLDGVKLSPSISWRKLTLLEKRSTYLTELRKQDGASSPV

SEQ ID NO: 3570 - protein, 437 aa, Moorena sp.
MSKVFVLDTNTRPLDPVHPGYARFLLKQGKAAVYRRYPFTLILQKVVEYPPVKPLRVKLDPGSRTTGIAIVNDVSGEVVFAAELSHRGQAVKAALDARRAVRRSRRQRKNRYRKARWANRKNQKKDWLPPSLESRIANILTWVRRLSRYCPIQAISQEVVRFDMQLMERPEMKGMEYQQGTLAGYEAREYLLEKWQRACAYCGEKDIPLQIEHIHPRAKGGTNRMSNLCLACEKCNRAKGTQDIAVFLKKKPEVLKRIQAQARQPLKDAAAVNATRWALFERLQATGLPVEFGSGGLTKYNRTTRKLPKTHWLDAVCVGKSTPERLQVNGIVPLLITATGHGSRQMCGVNKYGFPIRHRQRQKRYFGYQTGDMIRAVVTSRKNKGVYVGRVLVRATGSFDIRTKQGRVQGISHRFCTPIHRCDGYSYQQGAGHSFPA

SEQ ID NO: 3571 - protein, 449 aa, Anoxybacillus sp.
MVEENMTCFMQRKGENPMVFVLDTNKRPLAPCHEAVARKLLKQGKAAIYRRFPFTIILKKSVDESEIVDESEIKATYRLKIDYGSRHTGLAILRGQEVVWLGQLDHRTDIKERIDKRRAFRRARRNRKTRYRKPRFLNRRRKDGWLPPSLESRVQNIQTWVNRLKKLCPIGYISYENAKFDTQLMRNPEINGVEYQQGTLQGYEVREYLLEKFGRKCCYCGKENVPLEVEHIIPKSRGGTDRVDNLCLACHDCNQRKGSKTAEEFGYPHIQKQVKESLKDTSAINSTRWKVYEVLKQTGLDVECGTGARTKMNRIRLDLPKTHYFDACCVGESTTNHLYFKTKEVLFIKAKGRGSRSRTNLDRYGFPRGYLARQKFFFGFQTGDMVKAVVPRGKYQGVWFGEVACRKTGSFDIKGKDGKRIAQGINYRYVQVIQRFDGYAYGKGVAELA

SEQ ID NO: 3572 - protein, 544 aa, unidentified
  REGION 1..544: note = Human gut metagenome
MKQKKQKVMVYILNKKGKPLMPTTRCGHVRKLLNSKKAVVVNSNPFTIRLKYDTPNGVQDVFAGIDSGRENIGSGASNEDGDCLYLGELKTSNKSIKLKMTERAGFRKERRRHDRQNKQRKARKDHTEIQNGNADICRTTISCKSVQISYPAAEKSVTHKIIRGKEGKFANRHRDEGWITPSARQLVQMHMNDLKSMCKILPISHVTLERVAFDFQKLENENIKVWEYGKGKLYGYDSPEEYIHDVQNGKCLVCGKPHIDYLHHIIPRSKGGSDKVSNIAGLCYDCHYGPMGVHNCQNTQDRLPELKSEANKQYKVSLLNSVMPVLIEEMDKFCKANSIMFSICEGHDTAKVRDMYDLQKDHCIDGFAISLVDRNVKSVDVMPDRIYQKQRYKKKSKNIIQKRNCREYYDDKKLVAVNRHKGTDQKADSLEEYMNTYAETHTTDECKKHFDSLVVKPARRTYTFHKEWRICPFHIGDKVRYEKKNKIKGNTKVDTFICEGIRFVKDENKAEVKHNKTKSKKMKFCRVLESGCTPYVDYRKLALM

SEQ ID NO: 3573 - protein, 310 aa, Fischerella sp.
MSNYVFLIDGNQTPLNPVHPAQARKLLDCGKAAVFRRYPFTLVLKRVIENPNVYPLTLKIDPGSKFTGIALVTNQGDVIWAMELQHRGQQIKDALLHRLAVRRGRRNRNTRCRQARFLNRKRPDGWLAPSLRHRVLTTETWVKRLKKFAPIGSIAQELVRFDTQAMQNPEISGTEYQQGTLHGYECREYLLEKWNRQCAYCGVKDVPLEIEHIHPKSKGGSERISNLCLACHKCNQRKGNKDVKDFLKGKPEVLNRVQKLAKAPLKDAASVNSTRWMLFNTLKSFGLPVTTGTGGQTKFNRTRFELPKAH

SEQ ID NO: 3574 - protein, 482 aa, Nodularia sp.
  REGION 420..440: note = misc_feature - Xaa can be any naturally occurring amino acid
MSNFVLVLDTNKKPLTPIHPGDARFLLNQQKAAVFRRFPFTIILKEPKSEVPTQPIELKIDPGSKTTGFALVQNNKVIWGMELQHRGLAIKESLETRKGVRRGRRSRHTRYRQARFLNRTKPQGWLAPSLSHRVLTINTWVKRLCNFAPITDIVQELARFDLQQLENPEISGFEYQQGELQGYEVREYLLNKWNRKCAYCTAENVPLQVEHIKPKAKGGTNRISNLCLACEKCNIKKGTQDIEKFLAKKPELLKQILSQAKRPLKDASAVNSTRWALFNKLKETGLPITTGSGGLTKFNRTRLGLPKTHWIDAACVGKVETLKILTTKILTVKSTGHSCRRFCRINKFGFPCTEPKKIFTHVSTGDFVKATLHKDRKNITSGKYVSRVKTPTKNGCEIVINGFRVEFSTMKDITKVHCSXXXXXXXXXXXXXXXXXXXXXLGKLCHRKIFVSLQTHFYFPEINLCHFFVLAHQLLHQQYLYH

SEQ ID NO: 3575 - protein, 429 aa, Salipiger sp.
MSNYVFVLDDARRPLSPTSPARARQLLRDGKAAVFRRYPFTIILKRKVPDAEPAPVEVKIDPGSKVTGLALVQGDKVVWGGELTHRGHQIRERLQMRRERRRGRRNKLRYRKPRYRTKAQINNADRKRKKGWLAPSLMHRVETIMTWMDRFRRYAPASSIAMELVRFDLQQMQNPEISGVEYQQGDLAGFEVKEYLLAKWGRECAYCGAEGRPLEVEHIQPRSRGGSNRVSNLTLACEPCNQKKGNRPVEDFLSGRPDLLARIRKQAKQPLRDAASVNSTRWAMFTALKMTGLPVTTGTGGRTKYNRKRMGWAKAHWLDAAAVGNVDALTLRTDKPLLISAKGQGGRQKGVFDKHGQPRRNKAGAAQIRPLKPIHGWRSGDIAKARGLEGRISPRTRGNFELRAAGQKPRSFPPRDFKAIHRNDGYAYQ

SEQ ID NO: 3576 - protein, 423 aa, Moorena sp.
MSNFIFVVDTNKKPLTPCKSSMARKLLTAGKAAIFRRFPCTIILKKAVTATIESITLKLDPGSKTTGIALLQGEKVIFGAELTHRGQTIKASLESRRSLRRGRRNRHTRYRQARFLNRTRKKGWLAPSLQHRVETTLTWVEKLRRLAPIGLIVQELVRFDLQQLENPEISAIEYHQGELQGYEVRQYLLNKWNRKCAYCDAENVPLQVEHIHPKSQGGSNRISNLCLACQKCNQKKGTQNIEQFLAKKPDILSRILTQSKRPLKDAAAVNSTRWTLFGRLKETGLPVLTGSGGLTKFNRSRLQLPKTHWLDAACVGQVEALELLTNKPLLIKATGHGTRQMCRTDKFGFPSRYVPRNKFVKGFQTGDIVKAIVISGKKIGEYVGRVAVRTTGSFNISASELVQGISHKYCKIVHKKDGYSYAY

SEQ ID NO: 3577 - protein, 427 aa, Moorena sp.
MRVFVLDKNRKPLDPCHPAKARKLLKLGRAKVLRRYPFTIIVQDLDVDNCITHQHQLKIDPGAKTTGLAIVQGDRVIWGAELTHRGEHIREALTSRRQLRRSRRNRKTRYRQPRFLNRTRPKGWLPPSLMSRVHNILTWVNKLIKFCPVTGISQELVRFDTQKMLNPEVSGIEYQQGTLYGYELREYLLEKWNRTCAYCGANNTRLEIEHIKPKSKGGSDRVSNLAIACHNCNQAKGNLEIEEFLSSKPNILKRILSQAKKPLADAAAVNATRWKLHDELKSIGLPVEVGSGGLTKYNRCRQNLPKTHWLDAANVGKVDTLYIEDYQPLLITAKGHGKRQVCGTNKYGFPIRHNSRKKIHKGFQTGDIVRAVVTKGKKIGTYVGRIATRKTGSFDITTAKGRVSGISYKYCQAIHRKDGYSYQFHGG

SEQ ID NO: 3578 - protein, 410 aa, Singulisphaera sp.; identical to SEQ ID NO: 3336

SEQ ID NO: 3579 - protein, 428 aa, unidentified
  REGION 1..428: note = Human gut metagenome
LKVFVLNMRGRPLMPCSPAKARHLLKAGKAVVRRRTPFTIQLRIATGETKQSVILGVDAGAKHVGLSAATEKEEVFASEVELRQDITGLLAARLSLRRDRRHRKTRYRAPRFLNRVRSKHKGWLAPSVENRIQAHMSRIDAVCRLLPVTKIVIETASFDIQKIKDPSVEGTDYQQGDQLGFWNVREYVLFRDGHVCQHCHGHSKDKILNVHHLESRQTGGDAPNNLITLCETCHKACHAGKIKLKVKRAQSFRAEAFMGIMRWTLLDRMRKAHSGLPVENTYGYLTKNTRITLGLPKAHCVDAYCIAGNLKAVRRGVYLHQRQVRKHNRQIHKCTVLSKTLKDGTKIGYRKLNQTPHLVKNFRLFDKVRCLGQTGFIFGRRSSGYFDVRRLDGVKISSCINYRKLTLLEKRSTCLTELRKEDGASSPV

SEQ ID NO: 3580 - protein, 408 aa, Moorena sp.
MPCSAVVARLLLKEGKAKVIRRTPFTLKLFTMPEKSYTQPLTLGVDTGSTMIGSAVANEQGHISYLSEVKIRNDIATTMKARAKARRNRRNRKTRYRKARWLNRRNSIKTGRFSPTMRSKIEAHLREIRFVQALLPISAIVLETGTFDLHALKNPEVLQKKWLYQRGINYGFANTKAYVLTRDGYQCQHCQGESKDQHLEVHHIVFRSQNGSDEERNLLTLCKTCHDGLHAGTVILKKPGKRKGNLAHATQMNSIRVQLLQQVEGAEETFGFVTKEHRFLAGLPKTHTNDAAMIATRGNQPLFQVKTVLAKKCVSDGDYQQTKGVRSERRIPTGKIKGFRKFDKVRHRKQEYFIKGRMSTGYVILMGIDGEKVDLKPIPKFEKMKRVSARSSWIMQQRIMGRSSYSPI

SEQ ID NO: 3581 - protein, 451 aa, unidentified
  REGION 1..451: note = Human gut metagenome
MSVAVISKTGERLMPTSEYRARKLLKSGKAIKYSYHPFTIQLTERKTGNIQPIELCMDTGYIHIGISVKSEKHEYLTEQIDTLTDERSRHNARRMYRSQRRNRKRYRQPRFNNRKKDKGWIAPSLEHKKNIHVQTISRINNVMPLTDITMEMGNFDTQVLKAKEEGRPLPQGVDYQHGERYSIATLREAVFARDGYKCQCCGRTIKDGAILHVHHIKYRSQGGTNSISNLATVCDKCHTPKNHKPGGKLYGWKPKLPSFKGATFMTTIRWQLYNEAKALFPDIDIHITYGAATKERRRELNIDKSHINDAFVMGQFHPRHRIKAVLYKKKRRNNRCLEKFYDAKYIDSRDGKKRSGQELFNGRINRNHKKDSENLHQYRLQKVTAGKRTVRKQHYSVQPHDIIIYESRKRETTGCHCNGARVMLLPDKKSVSIKKIKIYRYAGGYFKSTFN

SEQ ID NO: 3582 - protein, 415 aa, unidentified
  REGION 1..415: note = Human gut metagenome
MVYVLANDGQPLMPTERHGKVCRMLKSGIAKVVKKCPFTIQLQYESERNVQPVALGIDAGSKHVGVSATTKAKVLYESDVELRDDIVKLLATRRQLRRRRRSRKTRYRPARFDNRRRKEGWLTPSIRQKIESHLTVVANVCKILPVSQIIVETASFDIQKIKNPDIQGIEYQQGEQMDFWNIREYVLFRDGHTCQCCKGKSKDKVLNVHHIESRKTGGNAPNNLITLCETCHKGYHNGTVTLPKNIKRGMKFKDAAFMGIMRWTFYNTLKEQYEPDIPVHYTYGYITKNTRINHNLPKGHCIDARCISGNPDAVSDGTYYYQKKVRCHNRQIHKQTILKGGIRKSNQAEYLVRGFRLFDKVRYQGREYFIFGRRKSGFFDIRTLSGEKVNKGSINVKRLTFVDTRKNYLTERRTV

SEQ ID NO: 3583 - protein, 431 aa, Klebsiella sp.; identical to SEQ ID NO: 2435

SEQ ID NO: 3584 - protein, 416 aa, unidentified
  REGION 1..416: note = Human gut metagenome
MVYVLDKNGQPLMPTDRHRKVRLMLQSGQAKVIKRCPFTIQLNYDSGHQTQEISLGIDAGSKHIGVSATTKIKVLYEADVELRNDIVDLLSSRRELRRGRRNRKIRYRQAKFNNRRRGNGWLAPSIRQKIGTHLTVVENICKILPISRIMVETASFDIQKIKNPDIQGAEYQQGDQLEFWNVREYVLFRDGHTCQCCKGKSKDKILNVHHIESRKTGGNAPNNLITLCETCHTGYHKGTVQLPKAIKRGMRFKDAAFMGIMRWAFYEALKQQYEPVGTPVHNTYGYITKHTRIAYNLPKEHYVDARCISGNPEASSNGEYYYQKKVRCHNRQIHKLTVLKGGIRKQNQATYLVKGYRLFDKVSYQGKGYFVFGRRQSGFFDIRTLSGEKVNKGSLSCKKLKFIATRTYYLTERRAV

SEQ ID NO: 3585 - protein, 425 aa, Nodularia sp.; identical to SEQ ID NO: 3165

SEQ ID NO: 3586 - protein, 443 aa, Oligella sp.
MAVFVLGKNKRPLMPCSEKRARLLLERGRARVHRLVPFTIRLVDRTVADCVLQPLELKIDPGSKTSGLALVRTRQSVNAQSGEITATAHVLNLFELIHRGTQISQALTARSQMRRRRRSANLRYRAPRFLNRTRPTGWLAPSLQHRVDTIQSWVQRIRRYAPVMQLAQELVRFDMQQLENPEIAGVEYQQGELAGYEVREYLLEKWQRQCAYCDAINVPLQIEHIQPKARGGSNRISNLTLACAPCNTKKGAQSVSSFLANDPKRLAHTQAQAKRPLRNAAAVNTTRWKLLNALKATGLPVNTGSGGLTKFNRTRLQMPKTHALDAVCVGEVGHVKQWQKPTLVIKATGRGSYQRTRLNRFGFPRGYLTRQKQIHGFQTGDRVKAVVTQGKKIGTYVGRVAVRASGSFNIQTAQRLIQGISHRYCTLIQRGDGYGYSLRTDSN

SEQ ID NO: 3587 - protein, 413 aa, unidentified
  REGION 1..413: note = Human gut metagenome
MTNYAFVLDVNGKQLAPTKEQKAWFLIRKKRATLISKYPMVIQLKKEISDEQICKDEICCGIDDGGLYVGVALVQKCKTKNKVVFKGTIEQRNDVKHLMEVRKGYRGYHRFHKRYRQARFNNRKSSKRKERIAPSILQKRQATIRVIKQLNKWINIANYLLEDVAIDIRALTDGYKLYRWQYQQSNRLDENIRKTVILRDDCKCMECGKSNCRLEVHHIKPRRLNGSNTLDNLISLCETCHQRTEGQEELYMDRYFSILNSTDNKNLNYAQHVMIGKKWLREQLSELGTLILTTGGDTANKRIDWNIEKSHSNDAICITGLQPDTCNVKEWTIKPMRRQSKAKTDNVLGIKHRDLVEYTFRNGETHRGYVTALYPEQNALNFQSPTKHCKRVNAKKCKLIWKYSKIYWLDNVS

SEQ ID NO: 3588 - protein, 437 aa, Moorena sp.; identical to SEQ ID NO: 3570

SEQ ID NO: 3589 - protein, 512 aa, unidentified
  REGION 1..512: note = Human metagenome
MSTVYVLNKDGKPLMPTTRGGHVRHLLKEQKARVVRAKPFTIQLLYETNDVVQPLYLGIDPGRTNIGVAVVKANGMAVFTAHLETRNKEVPKLMQDRKKARRARRTNGRRCRRQRRAKANGTISKKCVKQDTAQSKNPSKRAKEIGIIKRRLPGYKKDVLCIGIKNKEAKYTNRTRPEGWLTPTANQLLQTHINLVRKIQKFLPISDVVLEVNKFAFMRLDNPDIQKWQYQQGPLYQKGSLENAVSEMQEHHCLFCDKPIDHYHHVVPQSENGSNTIANIVGLCAEHHNLVHKDAAWQKKLAEEKVGLNKKYGALSVLNQIIPALTNKLSVLFPKHFFVTAGKSTHDYRATHGVSKDHWLDAYCIACSVLPSDVCDSNINNHMPYELKQFRRHARRALNNENMNRVYTLNDKAVAINRHKATEQEAASLEEFRKEHPNDVCKLKVKEHHPTYRNMNRNYPGSIFLVGKHVHIMQGIAGSKDGKATTYKDSNANSITASKCKFVAKNSGILFV

SEQ ID NO: 3590 - protein, 552 aa, unidentified
  REGION 1..552: note = Human gut metagenome
MTSCTCTVFPACNHAKASSSQGKHNLLLRQERLIVKEVAYMSTIYVLNKDGKPLMPTTRGGHVRHLFKEQKARVVQSNPFTIQLLYETNDVVQPLYLGIDPGRTNIGVAVVKADGTAVFAAHLETRNKKIPKLMQDRKKARRARRTNGRRCRRQRRAKANGTISKKCVKQDTAQSKNPSKRAKEIGVIKRHLPGCKKDVLCVGIKNKEAKYTNRARLEGWLTPTANQLLQTHINLVKKIQKFLPISDVVLEVNKFAFMRLDNPNIQKWQYQRGPLYQKGSLENAVSKMQEHHCLFCEKPIEHYHHVVPKSENGSNTIANIVGLCAEHHNLVHKDVAWQEKLVEEKTGLNKKYGALSVLNQIIPALTKELSFLFPKHSFMTNGKSTHDYRAAHGISKDHWLDAYCIACSVLPIDVCDSTINNCVPYELKQFRRHDRRALNNENMNRVYTLNDKVVATNRHKATEQEAASLEEFRKEHPNDVCKLKVKEHHPTYRNMNRNYPGSVFLVGKQIHVMQGIASSKDGKATKYNDTRATTIAAGKCKFVAKNSGILFV

SEQ ID NO: 3591 - protein, 429 aa, Ktedonobacter sp.
LSNVFVIDSDYKPLNPVHPARARLLLTQGKAAVFRRYPFTIVLKRVVEQPEVQPLRLKLDPGSKTTGIALVNEGNGKIVFAAELEHRGHKIKGSLDDRRAVRRNRRNRKTRYRKPRYLNRRRKKGWLPPSLESRLANIQMWVARLCRYAPIAAISQELVKFDLQLIENPDITGIEYQQGTLQGYEIREFLLEKWERRCAYCGKQNVPLQVEHIHPRAHGGTNRISNLTLACEPCNTAKGTQDIAVFLTKKPDVLTRILAHVKKPLKDAAAVNATRFALFERLKAVGLPVECGSGGLTKYNRTMRGLPKNHWLDASCVGMNTPVTLSHKGIVPLRIAATGHGRRRMCVPDEFGFPKQHKARKKTFLGYQTGDMVKAITPKGTFEGRIAIRHRPSFRLGKVDIHPKYLRCVHRSDGYEYIQKGVRHAPPHV

SEQ ID NO: 3592 - protein, 449 aa, Scytonema sp.
MMITNSVFVFSKNGKILKPTTPARARILQSIGKAKKLKSFPFTLILDKDVDENVESYLELRIDPGSRYTGMSLVDLNKNEVVWAMELEHRGLAIKMELIKRAGVRRSRRTRRLRYRKKRFDRKKPDGWLAPSLRHRLLTTQTWIKRLLKIAPIKSIAIESVKFDLQKMETPDIEGIEYQQGTLRGYTLREALLEHWGRECVYCGNTDVPLQIEHINARSKGGSDRFSNLTLSCEKCNQKKGNKPVEQFLKEQPEILQKIKSHQKKSLSDAAAVNSTRKAIFEMAQQFGLPVISGDGASTKMIRIQSGLLKAHWIDSSCVATLSIVKLRICQPLRVTCTGHGTRQVQRVNAKGFPAIASIKNNPITGKKEVKLVSKNQKYTHATAGDYVICNLLKDRKHIKAGIYRARIKTPTPKGVEVLISTRRISVDRQYVKLIHRSDGYEYSFTTID

SEQ ID NO: 3593 - protein, 425 aa, Nodularia sp.; identical to SEQ ID NO: 3165

SEQ ID NO: 3594 - protein, 470 aa, unidentified; identical to SEQ ID NO: 2949
  REGION 1..470: note = Human gut metagenome

SEQ ID NO: 3595 - protein, 425 aa, Nodularia sp.; identical to SEQ ID NO: 3113

SEQ ID NO: 3596 - protein, 427 aa, Fischerella sp.
MSKIFVIDSEKRPLDPIHPAQARQLLRNKKAAVYRRFPFTLVLKELRSEAPVQPLRLKIDPGAKHTGIALVNDSTGEVVFAAELKHRGFAIRDSLTSRRQLRRSRRNRKTRYRQPRFLNRTRPNGWLAPSLQSRVENIKTWVNKLRKLAPIKAISQELVRFDMQLMRNPDIQGKEYQQGTLAGYETREFLLEKWNRECAYCGIKDVPLQIEHIHPRAKGGSNSITNLTLSCSKCNTKKGTKDIKDFLKKDPSRLEKILRTSKRPLADAAAVNTTRFALLEVLKRTGLPVETGSGGLTKFNRSQQNLKKTHWLDAACVGKSTPTLNIKGVKPLLITANGHGTRQSCRTDKFGFPNRHCSRIKFHFGFQTGDIVKSVVTSGKKVGEYVGRIATRATGSFNISTKNGLVQGISFKNCFHIHKKDGYSYSN

SEQ ID NO: 3597 - protein, 491 aa, Pseudomonas sp.
MLAKGKAPKVPTAATAGAGCRHSRGERAARLRHQARKGTVQRRIAVAVYVLDKTGTPLMPCSEKRARLLLERGRARIHRQVPFVIRLVDRRQADSALQSLTLKFDPGSKFTGIALVRQKGQRVSVLSLMELAHRGAAIRQAMQQRAAFRRRRRGQNLRHRAPRFDNRTRPEGWLPPSLRHRLDTTLGWVGRMRNWAPISDLAVERVKFDMQAIQNPEISGVQYQQGELAGYEVREYLLEKWGRCCAYCDAENTPLEIEHIVPRSAGGSDRVPNLTLACRPCNQRKGNQPVEVFLKARPELLARIKAKAKAPLRDAAAVNATRNALFRGLLDTGLSVTTGTGAQTKYNRRRLDLPKTHALDAACVGEIRAIEHWHRPTLAIKATGRGDYQRTRLTTHGFPRGYLTRQKRHFGFQTGDQVRAEVPTGKKAGTHLGRVAVRKTGSFNIQTSDGVVQGVHHRHFTLIQRADGYAYSHIQTDSPQSQKEAARAEVR

SEQ ID NO: 3598 - protein, 431 aa, Ktedonobacter sp.
MSKVFVLDIYEKPLEPVHPGRARILLSQRKAAVFRTFPFTIILKIKGEPLQIEPLRIKLDPGSRTTGIAIVNDRSGEVVFAAELSHRGHKIKESLDSRRAVRRSRRRRKTRYRKARFLNRRHHASWLPPSLESRVANVQTWVNRLARYAPISAMSMELVRFDMQLMENAEISGVEYQQGALAGYEVREYLLEKWNRKCAYCLKQGISLQIEHIVPRAKGGTNRVSNLTLSCEKCNTAKGTLDSAVFLKKKPAVLQRILAQVKKPLKDASAVNTTRWALYERLKATGLPIECGSSGLTKFNRTRKELPKAHWLDAANVGKSTPDVLFVKNIVPLLITATGHGRRQMCVTDSHAIGFPKQHKERHKTFLGYRTGDIVKAVTPKGTIRGRIAIRHRPSFRIGKVDIHPKYMRRLHRADGYEYQVKGVVALPPHS

SEQ ID NO: 3599 - protein, 436 aa, Moorena sp.
VSNVFVIDRSGIPLDPVHPGYARLLLKQGKAAVYRRYPFTLILKKEIEQPHVKPLRIKLDPGSKTTGIALVDDASGEVAFAAELSHRGHAIKDALTSRRALRRNRRQRRTRYRKARWANRKRKQGWLPPSVESRIANILTWVRRLSRVAPIEAMSLELVRFDTQLMENPEVKGVEYQQGTLAGYEVREYLLEKWNHHCSYCGKTDVPLHVEHIRPRAHGGTNRVSNLCLACEKCNTAKGTKDIAAFLKKKPDVLQRIQAQAKAPLKDAAAANASRWALFDRLKATGLPVEVGSGGLTKFNRTSRELPKTHWLDATCVGKSTPEKLLVQQVVPLLITATGHGNRQMCLPDTYGFPRTSAKGAKKVKGFQTGDMVKAIVTRGKKKGTYVGRVAVRRTGSFNIKTRRETIQGVSYHYCHMLHQSDGYSYIQGGVLPPHA

SEQ ID NO: 3600 - protein, 425 aa, Nodularia sp.; identical to SEQ ID NO: 3165

SEQ ID NO: 3601 - protein, 411 aa, Ktedonobacter sp.
MSNHVFVVNHNGHPLMPCQPAKARKLLREGRATVMRRSPFTIQLGWECEEHVQEVVLGLDKGSHVTGFSCIGNGQILLSGEIQHRLDVKDKMQERRNNRRHRRKRKWYRPARFLNRASSKRSGRLPLSIKTNIEEVIRVVKHLPLPINAIIIEDVQVDIALLGNPTVQGSHYQDPTRLDENLRIACLMRDGYACQHCGKQKVRLEAHHLIFKGEGGKDTLTNLLTLCEACHKKLHQGKIQLKVAGVSGHLDQVAQRTMQGKSYLYATLGASTSLSTLFGYQTATLRKARELPKAHDADALCLATYETGKLVPYDREHFYKVSFRPRRTRRRYHTLPRKGQGRVRYQVNDELGGLRKGYIVRVKGRYIKQINSIYSNGYVAFARVKGEPNKALPRDCQLLERERTILWEKAS

SEQ ID NO: 3602 - protein, 512 aa, unidentified
  REGION 1..512: note = Human metagenome
MSTVYVLNKDGKPLMPTTRGGHVRHLLKEQKARVVRAKPFTIQLLYETNDVVQPLYLGIDPGRTNIGVAAVKANGTAVFTAHLETRNKEIPKLMQDRKKARRARRTNGRRCRRQRRAKANGTISKKCVKQTTAQNGSVSKRAKDIGVIKRRLPGCEKDVLCIGIKNKETKFTNRTRPEGWLTPTANQLLQTHINLVKKIQKFLPISDVVLEVNKFAFMRLDNPNIQKWQYQQGPLYKKESLESAVSEIQEHHCLFCKKPIDHYHHVVPQHKNGSDTIGNIVGLCAKHHDLVHKDSAWEKKLAKKSTGLYKKYGALGVLNQIIPTLTNELSSLFPKHSFVTNGKSTYDYRAAHGVSKDHWLDAYCIACSVLPSNVCDSNINNHMPYELKQFRRHDRRVLNNENMNRVYTLNNKAVAINRHKAKDQKTVSLEEFRKEHPDDVCKLKVKEHHPTYRNMNRNFPGSVFLVGKQIHVMQGIASSKDGKATKYNDTSATAIAAGKCKFVAKNTGILFV

SEQ ID NO: 3603 - protein, 465 aa, unidentified
  REGION 1..465: note = Human gut metagenome
MSTCACVLSKNGERLMPTIRLGKVRHLLKDGKAKIIKHHPFTIQLLYDSETNIQPIEICEDVGYNYIGISVKSQSHEYVSAQYDTLQDEKDCHDSCRKMRRTRRNRLRYRKPRFDNRKHDKGWLAPSLEHKKELNVNVIKMYCEVMPITHATVEVGSFDTMLVKAIEEGKATPESTDYQKGPRYNLASLREAVFYRDNYTCQVCGRKANEGAILHVHHMFYWKGRHGNSLNELVTVCEKCHTPANHQKGGKLYGFGENIKFANLSGAAFMNTVRWQIVNELYAAFGKPFVTFTYGAMTKEKRIALHLDKSHSNDAYAMGNFHPVDRCAFEHYEKVKRNNRILEKFHDSRYIDIRTGKEAKGKELFNGRISRSHKKDSENLHKYRGKRIRKGYRALRRKKVALNSGDLVSLNGETLIVHGTHTNKKGNVRVEFKVAALNGKKSASLKKLKIVKTSTPMHSAWAKVS

SEQ ID NO: 3604 - protein, 426 aa, unidentified
  REGION 1..426: note = Cyanobacteria bacterium UBA11153
MCKILVIDQDKRPLNPIHPARARQLLSHKKAAIFRRLPFTLILKKSLPDSSVSELRLKIDPGAKHTGIALVNDATGEVVFAAELKHRGFTIRDALTSRRQLRRSRRNRKTRYRQARFLNRKRPNGWLPPSLQSRIYNIKTWVKRLRKFAPITAISQELVRFDMQLMRNPDIQGKEYQQGTLAGYETRQYLLEKWSRQCAYCGVKDVPLQIEHIQSRAKGGTNSITNLTLSCKKCNIKKGTKDVKDFLKKNPTRLEKILKQAKHPLADAAAVNTTRLALLEILKATGLPVETGSGGLTKFNRYQQNLEKTHWLDAACVGISTPKLIIKGIKPLLITASGHGSRQSCRTDKFGFPIRYCPRIKVHFGFQTGDIVKANMTSGKYIGQFLGRITIRSRPSFSLKTTANKFDVHPKYLRKIHQADGYSYEF

SEQ ID NO: 3605 - protein, 425 aa, Nodularia sp.; identical to SEQ ID NO: 3165

SEQ ID NO: 3606 - protein, 551 aa, Moorena sp.; identical to SEQ ID NO: 3262

SEQ ID NO: 3607 - protein, 469 aa, Burkholderia sp.
VAVFVLDRKGKALMPCTERRARLLLARGRARVHRVVPFVIRLVGRTADSCQFQPLRIKLDPGSKTTGMALVRDTEEVDASTGDVLRGAAVLNLFELVHRGRQISEALSARRAMRRRRRGNLRYRAPRFLNRTRRAEWLPPSLQHRVDTTVAWVRRLMRWAPITSLSSELVRFDMQSIGNPEIVGVQYQQGTLAGYEVREYLLEKWGRACAYCDRRDVPLQIEHIVAKARGGSNRVSNLTLGCQPCNHKKAALPVEVFLAQDPRRLARILAQAMHPLKDAAAVNATRWVLANALKATGLPVELASGGRTRFNRMTLGVPKTHALDAACVGDVGHLRDWNQPTLQAKCSGRGSYQRTRLDRYGFPRGYLTREKQHFGFQTGDMVRAVVCAGKKAGTHTGRVAVRASGSFNIQSGGMVVQGIAHRHCRLVQRSDGYAYSRIATPEGAAETGATLRPALSLPGLKAGGSRETR

SEQ ID NO: 3608 - protein, 424 aa, Lentibacillus sp.
MIVFVINKHGKPLMPCKPRKARLLLKEKKAKIVSRNPFGIQLLYETNSYTQEVKIGIDLGAKYVGIAITSEDKVLAKGEVELRQDVKSAIDTRRTYRRSRRNRKTRYRKPRFQNRTRGKRWLPPSIQSRVENTFFWIDKFCDLVPNPKLTMEVSKFDVQKMIDPAIQGVAYQEGQTYGYHDVRYFVLARDHYTCQVCKKKGKILNTHHIIYRTHGGSNRADNLITVCTDCHTHDNHQRGNILWKWMVEGKRLPQYKEGPFMNIVRKRVFTKYPHARITYGSVTTPKRKALELEKTHANDAIAISGISSIKENAKTTFKIKQFRKKKRSLHEATARKGRKSKNITSKRNEKNKKYLKGFYLNDKVRLYEKTGYITGFTGTSGAYVKSIDGDYIIMPNKSYKQVSLKKLTQISHHNNWQFEYKAFG

SEQ ID NO: 3609 - protein, 413 aa, unidentified; identical to SEQ ID NO: 2636
  REGION 1..413: note = Human gut metagenome

SEQ ID NO: 3610 - protein, 412 aa, Moorena sp.
MTQLVYVINQNGHPLMPCKPSKARKLLRDGRAKVKHRAPFTIQLRWDCEEQVQDVVVGIDKGSSTTGFACVGRGEILLSGEILHRKDVKEKLDARRAHRRSRRNRRWYRPCRILNRASSKRSGRLPPSIKTNVEEVIRVVRRLPLPITRIVIEDVQVDIARLNDPTVQGSRYQDSKRLDENLRIACLLRDRYQCQHCGKREVRLEAHHVQYRQHGGKDTLSNLLTLCESCHHGVHAGKITLEVSGVSGHLDHIAQRSMQGKTYLYTTLGSALPLSTLFGYQTATWRKQQELPKEHDSDALCIATYDTGELVPWQRERFYRIGFRPRQTRRQYHDLPRKGQGRVRYQLNTELEGFRKGDVVRVKGTWIKQINSIYSTGYLAFSRKKGEPANARPKDCVLLERGTTILWQRPQR

SEQ ID NO: 3611 - protein, 430 aa, unidentified
  REGION 1..430: note = Human gut metagenome
VEQNLRVFVLNKRGKPLMPCSPAKARHLLKEKKAIVVRRTPFTIKLTIATGESKQPVSLGVDAGYKHVGLSASTEKAELYVSEVELRQDITDLLSARLALRRSRRNRKTRYRAPRFDNRIRTKRKGWLAPSVENRINAHLSRIEAVLRLLPVTKITVETASFDMQLLKNPDIAGKEYQEGEQLGFWNVREYVLFRDGHVCQHCHGRSKDPVLNVHHLESRRTGGDSPGNLITLCETCHKALHRGEIKLKAKRGRSFRAETFMGIMRWGVLNRLKASHPKLEVHNTYGYRTKHARISNGIAKSHCADAFCIAGNLGAERLGEFFFQKQTRRNNRQIHKLSILKGGRRKRNQASFEVKGFRLFDKVACKGEESFIFSRRSSGYFDVRKLDGTRISAGISYKKLRLLEKRRTYLTEIRKEAFPPLPEGRSLRA

SEQ ID NO: 3612 - protein, 423 aa, Tolypothrix sp.
MSNYVFLIDQNKAPLNPVHPAQARKLLDSGKAAVFRRYPFTLILKRVIENPNVYPLALKIDPGSKFTGIALVTNQGDVIWGMELQHRGQQIKDALQHRQAVRRGRRNRNTRYRQSRFLNRKRPNGWLAPSLRHRVLTTETWVKRLQRFAPIGGIVQELVKFDTQAIQNPEISGIEYQQGTLKGYECREYLLEKWNRQCAYCGVKDAPLEIEHIQARSKGGSDRISNLCLACHKCNQRKTDKDIKDFLKGKPDVLNRVLRQAKTPLKDAASVNSTRWSLFNTLKQIGLPVSTGTGGQTKFNRVRFELPKAHWIDAACIGVVETIKLVTTKILKIKATGFGGRQRCQTDKFGYPQKHRPLRPILGFCTGDIVRADVPKGKYAGTFTARVCPMSRGYGEFVIDKKRRSVKLEYLTPVHRRDGYDYA

SEQ ID NO: 3613 - protein, 470 aa, unidentified; identical to SEQ ID NO: 2825
  REGION 1..470: note = Human gut metagenome

SEQ ID NO: 3614 - protein, 426 aa, unidentified
  REGION 1..426: note = Human gut metagenome
MRIFVMNMRGDPLMPCTQKKARILLKEGKAVIYKYDPFTIQLTYATGETKQDCHIGIDTGSKHIGMAITSENKVLFKGEIELRQDVKSNIDTKHIYRRSRRNRKTRYRQPRFLNRKRSDKWLPPSLQNRVDHTFHWIDTFCSLVSDPILHIEVGKFDTAKMINPEINGVDYQHGQTYGFFEERYFVFARDNYTCQCCGKSKDKILQTHHIIYRSNGGTDRVDNLITVCTDCHTSKNHQKGGILYKWQEQHKKVKQYKEPPFMNAIRKRIFARYPNAHTTYGSETTPHRKELGLEKTHYNDAITISGITNIKEDPKEWLLIKQFRKKKRSLHEATARKGRKEPNCFQKRNSKNTPFYRGFYLNDKVKVFGHGQIGYITGFTSGGAYVKNVDGEYITIPNKSYKQVSIKYLKLLSHNNNWQYVVKSAV

SEQ ID NO: 3615 - protein, 425 aa, Nodularia sp.; identical to SEQ ID NO: 3165

SEQ ID NO: 3616 - protein, 413 aa, Blautia sp.
MTNYAFVLDANGKQLAPTKEQKAWFLIRKKRATLVSKYPMVIQLKKEISDEQICKDEICCGIDDGGIHVGLALVQKCKTKNKVVFKGTIEQRNDVKHLIEVRKGYRNYHRFHKRYRQARFNNRKSSKRKGRIAPSIFQKRQATIRVIKQLNKWINIANYSLEDVAIDIRALTDGYKSYRWQYQQSNRLDENIRKAVILRDGCKCMECGKSNCRLEVHHIKPRRLNGSNTLDNLISLCEKCHQRTEGQEELYMDRYFSILSSTDNKNLDYAQHVMIGKKWLREQLSELGTLILTTGGDTANKRIDWNIEKSHANDAICITGLQPDACNVKEWTIKPMRRKSKAKTDNVLGIKHRDLVEYTFKNGETHRGYVTALYPKQNAINFQSPTKHCKKVNAKKCKLIWKYSKIYWLDNVL

SEQ ID NO: 3617 - protein, 420 aa, unidentified
  REGION 1..420: note = Human gut metagenome
MQYVYVLNKHGEPLMPCLPGKARVLLKQQKACVVKRTPFTIKLLYGSTGYKQPITLGVDAGSKHVGLSASTEKRELYCEEFTPRNDVVDLLSTRKQNRRSRRNRKTRYRAPRFDNRVHGKHKGWLAPSVEVKIQEHITVIKRICRILPITLVRVETAEFDTQRLKAMLAGKPLPVGTDYQLGEMYDEYNVRQYVLKRDNYTCQCCGAHTTAKKVVKLHVHHLESRKVGGNTPSNLITLCTTCHNNLHKGKITLDGKKRGKTLRDAAFMGIMRNTLLTRLHNELNIPVQNTYGYITKLLREQNDIKKSHVNDARCISKYPLAEPCSVCYHTKAIRHHNRQIHKAKILKGGIRKANQAPYIVKGFRLWDKVLYNGQECFISGRRSSGYFALRKLDGTAITNSISFKKLQLLEAATNYLIERM

SEQ ID NO: 3618 - protein, 429 aa, Ktedonobacter sp.; identical to SEQ ID NO: 3433

SEQ ID NO: 3619 - protein, 427 aa, Parasutterella sp.; identical to SEQ ID NO: 2603

SEQ ID NO: 3620 - protein, 413 aa, unidentified
  REGION 1..413: note = Fermentation metagenome
MIKNNNYSFVIDNKGNKLSPCKTNKAWYLIRKSRAIQVNKYPMIIQLKKEIKDKKDESEFVSGIDDGSAHVGISVIQKCKTKNKVIFKGTIEQRQDVKHLMDVRRGYRRYKRYHKRYRKARFNNRSNSKRKNRIAPSIKQKKDATLRVINRLNKYINITEYHLEDVAIDIRALTEGKKLYRWQYQKSNRLDENIRKAVILRDDCKCQECGKSNYILEVHHIVPKRLHGSNNIGNLITLCSKCHQKTEGKEELFIKHYQDMIQGKNIRFDYAQHVMQGKIYLRNELSKLDKLILTTGGDTANKRIQWDIEKTHSNDSLVINDLKINSKDCNIKDWIIKPMRRKNKGNIDECLGFKHRDLVKCTKKNGESYIGYITALYPQKKQCNITTLEGKILKRYGIKSCKLLWRFNKIYWF

SEQ ID NO: 3621 - protein, 413 aa, unidentified
  REGION 1..413: note = Human gut metagenome
MTSYSFVLDANGKQLAPTKEQKAWFLIRKKRAALISKYPMVIQLMKEIPEKEICQDEIRCGIDDGGLHVGIALVQKCKTKNKVVFKGTMEQRNDVKHLMEVRRGYRRYHRYHKRYRQARFDNRKSSKREGRIAPSILQKRQATIRVIHWLNKWINITNYWLEDVSVDIRALTDGYQSYRWQYQKSNRLDENIRKAAILRDGGKCMECGKSNCRLEVHHIKPRRRNGSNTLDNLITLCESCHQKTEGQEELYMDRYFSLLKSSDNKNLNYAQHVMIGKMWLRKQLSGLGVLYLTSGGDTANKRIDWNIEKSHANDAVCITDLQPDTCDVKEWTMKPMRRQSKAKTDHVLGIHHRDLVEYTFKNGETHRGYVTALYPEQKAINFQSPTKHCKKVNARKCKLLWKYSKIYWFENAS

SEQ ID NO: 3622 - protein, 430 aa, unidentified
  REGION 1..430: note = Human gut metagenome
MPKVYVLNRHGRPLMPCTPAKARHLLDAGKAKVRHRTPFTIQLLYGSTGYTQEVILGVDAGSKTIGLSASTETEELFSTEVKPRSDVVELMSARRQFRRARRNRTTRYRKPRFDNRVRSKHKGWLAPSVEVKIQEHMTAIRRACAILPVSKVVVETAEFDLQLLKAVAEGKPVPQGEDYQKGEMYGHYNVRQYVLWRDGYTCRVCGAHGSVKKGVPLHVHHLESRKVGGDAPDNLVTLCTACHDKLHKGIITAADLKKRKRRSTRDATFMGIMRMTLLRRLREQLPVPVVETRGYITKATREKLLVLPKSHTNDALAIAHGPQGFRAGYLPNIRQADRLYTIRPVRHHNRQLHKATILKSGVRKANQAETYICGFRLYDKVLYNGIECFVWGRRTSGSFLLRQLNGEKVKDGVSHKHLKLLERSQSYLVA

SEQ ID NO: 3623 - protein, 425 aa, Nodularia sp.; identical to SEQ ID NO: 3165

SEQ ID NO: 3624 - protein, 482 aa, unidentified
  REGION 1..482: note = Human gut metagenome
LVWNVQAPWDVYPSPTLCGLCLKVLRGRNGDADKKPIPTLTKDENRPSGRTTGLRAEQAEPAGIRKGDTLKVFVLNMRGKPLMPCSPAKARHMLKAGKAFVVRRTPFTIKLTIATGETKQDVTLGVDAGARHVGISATTEKEEVFASEVALRQDITGLLADRLAFRRARRNRKTRYRAPRFNNRVRSKHKGWLAPSVENRIQAHISRIEAVCRLLPVTKIVIETASFDIQKIRNPEVEGTGYQQGDQLGFWNVREYVLFRDGHICQHCRGRSKDPILNVHHLESRKTGGDAPNNLITLCETCHKAYHAGKIKLKVKRGQSFRAEAFMGIMRWTLLDRVRKTHPKLPVENTYGYLTKHKRIALGLPKTHCADAFCIAGNLKALRRGDFLFQQQTRKHNRQIHKCSILKGGVRTLNQAPFLVKGFRLFDKVRIGGQIGFVFGRRVRGTFNIRRLDKTVIGTDINCKKLSLLETRKTFLTELRKE

SEQ ID NO: 3625 - protein, 466 aa, Ralstonia sp.
MAVFVLDRHGKSLMPCSEKRARLLLERGRARVHRLVPFAIRLTDRRLVDSELQPLRLKLDPGSKETGVAIVREMASHAGGAPDAFVLSLAEIIHRGRQINEALTARRAMRRARRGRMTRYRAARFDNRRKPEGWLAPSLRHRVETTAAWVRRFRKLAPITALSMELVRFDMQAMENPEISGVEYQQGTLLGYEVKEYLLAKLGRTCAYCDATDRPLETEHIVAKAKGGSNRVSNLTLACRPCNQKKGNLPLEVFLRKDPDRAKRILARAKAPLRNAAAVNATRFALLNALKSFGLPVETGSGGQTKYNRRRLDIPKSHALDAACVGNVHSVWPWQRPILRIKCAGRGSYQRTRVTAHGFPRGYLMRSKRVFGFQTGDMVKAVVPSGKKAGTHIGRVAIRATGSFNIQTVAGAVQGISYKHCNLLQRGDGYGYFFITPTTKESETRGDASRRALSLPDLKAEVSRAN

SEQ ID NO: 3626 - protein, 447 aa, unidentified
  REGION 1..447: note = Human gut metagenome
VPAYRFKHITKKEVPYMVYVLDIDGQPLMPTSRHGKVRRLLNSHLAKVVKRCPFTIQLLYQSTKETQPVSLGVDAGSRHVGLSATTEREVVYQEELVPRNDIVKLLSARRALRRSRRNRKTRYRRVRFNNRVHSKHKGWLAPSVEVKIQEHITATKRICQILPIFDIHVETAEFDLQRLKAMEEGRLLPAGTDYQLGEQYDFYNTRQYVLHRDEYTCQCCGTHDNNVKLHVHHVESRQTGGEAPNNLITLCEHCHKSIHAGKMMLPKGKKRGKSYRDAAFMGIMRNTLLERLRKEVNVPVTMTYGYITKYWREKAGLEKSHINDAICISKHPYARPLETYYLTKAVRHHNRQIHKTKFSKGGIRKRNQAPYLVKGFRLFDKVLYQGESYFIFGRRITGYFDIRTLDGTKVNKGSTSYKKLRIQDTAEAYLTEVRAIPHMNEFTCVLA

SEQ ID NO: 3627 - protein, 425 aa, unidentified
  REGION 1..425: note = Human metagenome
MVYVINKEGQALMPTERFGKVRRLLKNGLAHVICRIPFTIQLDYETTHFVQPISLGVDAGSKHIGISATTSEKELYAADVELRNDIVEKLSTRREQRRTRRNRLRYRKTRFNNRVSSKHKGWLAPSVENKIQTHLTVVEKIHKFLPITKIIVETASFDIQKIKNPSISSKEYQQGEQLGFFNVREYVLFRDNHTCQHCKGKSKDHILNVHHIESRKTGGNSPSNLITLCESCHKAYHNGKIDIKVKRGASFRDAAFMGIARWTTYERLKNIYPNVSMTFGYITKNTRITNGLPKEHYVDARCISGNPKSKPLGYYFYQKKVRCQNRQIHNANFLKGGRKKLNQSPFLVKGYRLFDLVEYQKKLYYIFGRRDSGFFDIRRLDGIKVNKGSISCKHIRLVDIRKGIIIERRNSCSIPPHELKFCGFP

SEQ ID NO: 3628 - protein, 419 aa, unidentified
  REGION 1..419: note = Human gut metagenome
MVYVINKQGQALMPTERFGKVRRLLKNSLAHVVCRIPFTIQLDYDTTDYTQPVSLGVDAGSKHIGISVTTSEKELYAADVELRNDIVDKLSTRRELRRTRRSRLRYRKARFNNRVSSKRKGWLAPSVENKIQTHLTVVEKIHKFLPITNIVVETAAFDIQKINNPSISGSEYQQGEQLDFFNVREYVLFRDNHTCQHCKGKSKDKVLNVHHIESRKTGGDSPNNLITLCETCHKAYHRGEFKLNVKRGRSFRDAAFMGIMRWSFYEKLKNIYPNVSMTFGYITKNTRITNNLPKEHYVDARCISGNPVAKPLGYYFYQKKVRCQNRQIHKANFLKGGRKKLNQAPFLVKGFRLFDLVEYQNDLYYIFGRRDSGFFDIRKLNGTKVNKGSINCKHLRLMATRKSILIEKRMQINYENTGF

SEQ ID NO: 3629 - protein, 436 aa, Pseudomonas sp.
MAVYVLDKSGKPLMPCSEKRARLLLVRGRARVHRLMPFAIRLTDRKQAESLLQPLAIKVDPGSRYTGMALVRQQAKCVSVLSLMELAHRGAAIRKALEQRAGYRRRRRSQNLRHREARFDNRSRPDGWLPPSLQHRVDTTLPWVQRLRRLAPVCELAVERVKFDMQAMHNPEISGVEYQQGELAGYEVREYLLEKWGRCCAYCFAENTPLEVEHIQARSNGGSDRVSNLTLACHPCNQRKGNQPVELFLKGKPELLARIQANAKVPLRDAAAVNATRNTLFQALLTTGLPVATGTGAQTKYNRRRLGIPKTHALDAVCVGEVDTVTGWQRPTLSIKATGRGEYQRTRQSKHGFPRGYLTREKRHFGFQTGDQIIATVPSGKKAGVHKGRVAVRKSGSFNVQMLSTVIQGIHHRHCRIIQRADGYSYAQISTQDSQP

SEQ ID NO: 3630 - protein, 438 aa, Tolypothrix sp.
MGGQSMSNFVFVIDTNFQPLNPVPPGQARRLLKAKQAAVYRRYPFTIILKYAVPIPDTDPYRLKIDPGSKTTGLAIVQGEKVIWGAELAHRGQQIKNDLESRRAIRRSRRNRKTRYRKPRFLNRTRQKGWLAPSLNSRVENILTWVNRITRYVPITGISQELVKFDLAAMQNPEISGKEYQQGELAGYEVREYLLEKWGRKCAYCGVENVPFEVEHIHPKSRGGSDRISNLTIACHACNQVKGNRDVKDFLAKKPDILSRILRQAKLPLKDAAAVNSTRWALFNRLKETGLPVETGTGGRTKYNRVRLNLPKAHWLDAACVGNVESLQMLTSAPLLIAAKGWGNRQMCTTNQYGFPVRHRTRCKTFFGFQTGDMVRAILPTGKFAGVHVGRLTVRESGVFEMKTPTSKVSPVRHKYCKSIHRNDEYMYTFSTNVHALP

SEQ ID NO: 3631 - protein, 327 aa, Nodularia sp.
  REGION 303..323: note = misc_feature - Xaa can be any naturally occurring amino acid
MELQHRGLAIKESLETRKGVRRGRRSRHTRYRQARFLNRTKPQGWLAPSLSHRVLTINTWVKRLCNFAPITDIVQELARFDLQQLENPEISGFEYQQGELQGYEVREYLLNKWNRKCAYCTAENVPLQVEHIKPKAKGGTNRISNLCLACEKCNIKKGTQDIEKFLAKKPELLKQILSQAKRPLKDASAVNSTRWALFNKLKETGLPITTGSGGLTKFNRTRLGLPKTHWIDAACVGKVETLKILTTKILTVKSTGHSCRRFCRINKFGFPCTEPKKIFTHVSTGDFVKATLHKDRKNITSGXXXXXXXXXXXXXXXXXXXXXWADI

SEQ ID NO: 3632 - protein, 470 aa, unidentified; identical to SEQ ID NO: 2949
  REGION 1..470: note = Human gut metagenome

SEQ ID NO: 3633 - protein, 425 aa, Nodularia sp.; identical to SEQ ID NO: 3165

SEQ ID NO: 3634 - protein, 426 aa, Leptolyngbya sp.
MSNYVFLIDANKKRMNPIHPAHAQKLMDAGKAAVFRRFPFTLIMNRVVENIVTYPLKLKIDPGSKVTGISLVNDQDQVIWGMELEHRGNTIKSNLDSRRSVRRGRRNRNTRYRKPRFLNRKRSKGWLAPSLMHRVLTTETWVKRLIKFAPVTEIVQELVRFDLQKMENPEISGAEYQQGTLHGYEIREYLLNKWGRKCTYCGKSDVPLQVEHIQAKANGGSDRISNLCLACEPCNLRKGTQDIKDFLKIKSDLLFRILRQAKAPLKDAAAVNSTRWKLYETLKETGIPVSTGSGGKTKFNRIKLGLEKAHWIDAACVGNVEKLTILTTRILRVKATGMGGRQKCQTDKYGYPQKHRPLKPIHGFCTGDIVKVQIPKGVNKGNYIARLCPYSDGNGEIYPRSGKKRIGIKLKYIVKAIHRKDGYSYA

SEQ ID NO: 3635 - protein, 415 aa, unidentified
  REGION 1..415: note = Human gut metagenome
MENEMAYCFVVNKNNRPLAPTKVNKGWYLVRKGRAKIKSRYPMVIQLEKEVEPDKYDESRMVVGIDDGSAHVGLAIVQKCPTKNKVVFKGTIEQRQDVKHLMDVRRGYRRYHRHHKRYRQARFNNRHSSKRSGRLAPSIKQKKDAILRVLYQLNRWIDIQEYCLEDVCIDIRAMTDGYNPYKWKYQKSNRLDENLRKAAIIRDGCKCQECGKSNCVLEVHHIRARKYGGADTIGNLITLCSGCHQKTEGREREFEDRYFKIIGSKPKRFDYAMHVMQGKNYLREKISELGPLHLTNGGETANKRIDWNIEKSHSNDAICITGCIPDTCDMKEWIIKPMRRKSKAKTDNVLGIRHRDLVSYTYKNGEIHTGYVTALYPELLALNFQSKTKHCKKVNARKCRLLWKFDKIYWLEQRV

SEQ ID NO: 3636 - protein, 574 aa, Nocardiopsis sp.; identical to SEQ ID NO: 3358

SEQ ID NO: 3637 - protein, 411 aa, unidentified
  REGION 1..411: note = Human gut metagenome
MVYVQDIDGKPMMPTTRHGKVRRLLKDNKAVVVNTCPFTIKLTYKTSDYKQEIVLGVDSGTKHVGLSATTKSKELYASEVILRSDVVDLLSTRRGLRRTRRSRLRYRKQRFNNRVKSKKDGWIAPSVRHKIDSHIRIISFVYSILPVSKLIVEVAQFDTQKIKNPEISGKEYQEGEQLGFWNVREYVLARDGHKCQHCKGKSKDPILNIHHIESRKIGGDSPSNLITLCETCHKEFHKGNIKLKVSRGKSLRDAAVMGIMKWKLYEELKSRYDNVSMTFGYITKYNRINHGIEKSHVSDAFVISRNFNSCRLGYYYKRKLVRRHNRQIHKMKILKGGIRKRNQAPFKVFGFKLFDKVMFQGEEHFIYARRPSGQFNIRDINGENKKDVSCKKLKYVSHGLVSVKTNLFLSQ

SEQ ID NO: 3638 - protein, 453 aa, Moorena sp.; identical to SEQ ID NO: 2687

SEQ ID NO: 3639 - protein, 480 aa, unidentified; identical to SEQ ID NO: 2726
  REGION 1..480: note = Human gut metagenome

SEQ ID NO: 3640 - protein, 380 aa, Ktedonobacter sp.
MSSHQIGRRLCLALLRLPVCCSKRERPKSSAQPERTYTQPLTLGVDTGSAVIGSAVADEQGSILYLSEVEVRNDIATTMKERATHRRDRRNRKTRYRPARWLHRRNSIKTGRFSPTMRSKIDAHLREIHFAHSFLPISSIVLETATFDPHALKNPEVVRKKWLYQKGINYGFANTKAYVLTRDGYTCQHCQGKSKDQRLEVHHIIFRSQHGSDEESKLLTLCKTCHDALHAGTITLKRTGKKKGDLLHATQMNSIRVQLLKLVEAEETWGFVTKEHRLLAGLPKEHCFDAAMIATRGNRPVFQIQTVFVKKCIPDGEYQQTKGKRSEQRIPTGKIQGCAQMRQSALSRSGILYQRPYVYWLCYFDDDRREKGRFETHSQV

SEQ ID NO: 3641 - protein, 1304 aa, Nocardiopsis sp.
MATFRVGQQTHPPVLPQQVALESESADKPRIGHETGLRDRRQAVPGADPVRGETTSTSPGAGGVTPNPVGERGREAHTKNTALYAFVLDKNGVPLQPCPPARARKLLTKGRAVVARHTPFTIRLTDRTAAESEVDGVQVGIDPGSKHTGIALFTHQAEERRGRYSIQLNHRGAAIRKKLDQRSAYRRRRRSANLRHRTPRFSNRTRPRGWLAPSLRHRVDTTLSWVERLCRWAPVNAVHVERVAFDTHALSAGKPLEGVEYQQGTLAGFEVREYLLAKFDRACVYCGTVNVPLNIDHVYPRSRGGSDRVSNLVLACVPCNQAKAGRPVEEFVTSKRTLARVLARAKAPLRDAAAAQSTRWALWRALDRSLPTHVASGGRTKFNRTRNLLPKTHTLDALAVGKIGPSPRPWTGYWSPGARAGAPTHAPAPTSTDSPGCVCPAPNTSSPSPPVIWCGPWCPGARRRARTPGGSRYAPRAASTSPPSRALSRASTTGMCVCSSGRTAMPTPGRRRAFPPGLEGPGFHAQKIDDRPPDRTPGSTESAGGRTAPHPRRLRPAGQARHRRLLHRPAAGLRHDPAPAGAARPEPRLPAVGPGRRDRRGGRDGRLRRRHRVPGRLRRRELRLRRGPAQARPQTPGRGHPHRAPGAELRACGDHRERAAVGPGGGTGPAPAAVGRGRRGAVPGRVRPVLLGAEDQLPGVPGTLPHRTGCRLGPGPLRAARRAGRRVRRRPGADLRGRPDDLRPVLQHQRRRRGPVRRADHRRRAGLVPHQHGLHRRAHRGGDPAGHRFAPGRCRPVVVPCRPAARHRPARGPTVHRVRPRRHPARPPHGHPHPPGHGGAAHRRQPARPVPARDVGVSAPVDVAVVGAGPAGLATAHLLAAAGHTVRVLEAADAVGGRMRTLRTDGHLVDTGAEMLPSADAYPATWRLIRAVGLDADPRAVPLVREALSVWWQGRSRPHAGRPLGLLTGMGLPLRARLDLARLQLRLGRAGLDPDRPERAALPERTVADLLQHHHPHLRERLLGPLASGFFGWPVERAAAAPFAAHLVASGSTATWRTYRDGMDTLTRALAARLDVRTDHPVTGVDPGPGGVRLDSPRGALTARSAVLAVPAPVAARLHPGAPPAEREYLTSCGYAPMLRLSLMLDAPLSPRGARRGFAHLVPGDPLLAVVTVDHAKHPGRAPRGRGLVSLIATPSGTEELLDAPDDVVVRRLVERAERILPGVGARVRGALTHRFRHGLPLPEPRTLAARPAFAARPPAAVDYAGDWTSLRPCSEGAVTSAFTAAERVSAFLAATREPTPIEI

SEQ ID NO: 3642 - protein, 425 aa, Nodularia sp.; identical to SEQ ID NO: 3165

SEQ ID NO: 3643 - protein, 418 aa, unidentified; identical to SEQ ID NO: 2710
  REGION 1..418: note = Human gut metagenome

SEQ ID NO: 3644 - protein, 535 aa, Moorena sp.
MRVRAAVTRPSQHLREVNQLATFRVGQQTHQPVPHQQTALEFASADTPRIGNETGREHHDVVPGAGHGRGGTAPVSPSGRGVTPEPCGVGEQHREVRPVVFVLDQHHTPLQPCHPARARTLLAKGRAVVHRHTPFVIRLKDRTRKKSEVAGVEVGIDPGSQHTGLAVFTHQGGQRRGRFSVQLTHRGGQIRKRMGQRATYRRGRRSRDLRYRAPRFNNRTRTPGWLPPSLYHRVVTTTSWVDRLARWSPVRAIHLERVAFDVHALTAGRPLEGVEYQHGTLHGYEVREYLLAKWNHACAYRGATNTALNIDHIHPRSAGGSNRVSNLALACIGCNETKNNHPVGEFLKNKPARLKTVLAQAKAPLRDAAAAQSTRWALWRELDQRFPVHVASGGRTKYNRTRNHLAKSHTVDALAVGKLDTITQTVSTVLTAGCTGRGSHARTRADRHGFPRLRLPRTKQVHGFHTGDLVRAVVPTGKKNGTYTGRVAVRTTGSFNITTAEGPVQGINHRYVRLLQRSDGYAYTTRKEDGVSFPA

SEQ ID NO: 3645 - protein, 420 aa, unidentified
  REGION 1..420: note = Human gut metagenome
MQYVYVLNKHGEPLMPCSPGKARLLLKQQKARVVKRTPFTIKLLHGSAGYKQPITLGVDAGSKHVGLSASTEKRELYSEEFTPRNDVVELLSTRRQNRRSRRNRKTRYRAPRFNNRVHSKHKGWLTPSVEVKIQEHITVIKRICRILPITLVRVETTEFDTQRLKAMFSGKPLPVGTDYQLGEMYDEYNARQYVLKRDNYTCQCCGSHTTAKKVVKLHVHHLESRKVGGNAPSNLITLCITCHNNLHKGKITLDGKKRGKTLRDAAFMGIMRNTLLTRLRNELNIPVQNTYGYITKLLREQNDIKKSHVNDARCISKHPLAEPCSVCYRTKAIRHHNRQIHKAKILKGGIRKANQAPYIVKGFHLWDKVLYNGQECFISGRRSSGYFVLKKLEGTTITNSISFKKLRLLEPATNYLIEKM

SEQ ID NO: 3646 - protein, 461 aa, Parasutterella sp.
MVKSSERQERCCRLETPSNIGEGSQPVERPRRENLRVFLLNKRGKPLMPCSPAKARLLLKEKKAIVVRRTPFTIQLTIATGESKQPVSLGVDAGYKHVGLSASTEKAELYASEVELRPDVSDLLSARRTLRQSRRNRKTRYRAPRFDNRIRTKRKGWLAPSVENRINAHLSRIGAILRLLPVTKITVETASFDTQLLKNPDISGKEYQEGEQLGFWNVREYVLFRDGHACQHCHGRSKDPVLNVHHLESRRTGGDSPGNLLTLCETCHKALHRREIKLKTKRGQSFRAEAFMGIMRWEVLNRLKASHPELEVHNTYGYRTKHTRIVNGIDKSHCADAFCIAGNLGAKRLGEFFFQKQTRRNNRQIHKLSILKHGLRKRNQAPFEVKGFRLFDKVVCQGEEGFIFGRRSSGSFDVRKLDGTRISAGISYKKLRLLEKRRTYLKEIRKEEALPPLPEGRSLRA

SEQ ID NO: 3647 - protein, 418 aa, Exiguobacterium sp.
MFVFVLNYHGEPLMPCKPSKARKLLNNGKAKLIKQTPFTIQLLFGSSGYKQEISLGVDAGTKHIGFSATTSTKVLLEGEVQLRTDIQDLLATRRAMRSARRSRKTRYRQARFLNRKKPNGWLAPSVQHKVDSHLKLIRMIHRLLPIKHLTIEVAQFDIQKIKSPDISGDLYRKGDQLGFWNVREYVFFRDKHMCQHCKGKSKDKILNVHHIESRRTGGDAPDNLITLCETCHKKIHKENLEHLFQRKSRSFRDASQMTVMRWFIYNAVKETYPYVKLTYGFLTKNRRIQNGLEKRHAVDARCISGNPLAEEPKVSYLFRQVRANNRQLHKMTVGKKGKRKANKAERLVHGYQLFDKVQYEEQTCFVFGRRKNGYFDLRTLAGFSIHKSASYKKLILLEKAKTWLVDIQPEGGEGRSHP

SEQ ID NO: 3648 - protein, 448 aa, Moorena sp.
MSNVFVVDTYQRPLNPVHPGRARILLSEGKAAVFKRYPFTIILKIEVQEPAVQPLRIKLDPGSKTTGLAIVNDATGEVVFAAELSHRGQKIKAALDDRRTVRRSRRQRKTRYRKPRFNNRKNKKKGWLPPSLESRIANVLTWVNRMSRSCRITAISMELVRFDMQLMQNAEVSGVEYQQGTLAGYEIRHYLLEKWDRTCSYCGSKDMPLQIEHIQPRANGGTNRISNLCLACEACNTAKGTLDIAVFLKKKPEVLKRIQSQAKKPLKDAAAVNATRWALFERLKATGLPIECGSGGLTTFNRTTRAFQKTHWLDAANVGKSTPDVLIVKDIVPVLITATGHGSRQMCRPDRYGFPRTSAKGNKKVKGFQTGDIIKAIVTTGIKKGTYIGRVAVRSSGSFTIVTSTQTIQGISYRFCRMVHHSDGYSYTKGSALLPMHECRGIRALEKR

SEQ ID NO: 3649 - protein, 402 aa, Dactylococcopsis sp.
MSNFVFVLDKNKQPLDPTHPAKARKLLKAGRAKVFRRYPFTIIMQDLEVQNCVTHNHQLKIDPGSKTTGLAILQDNKVLWGAELTHRGSQIRDALTSRRQLRRTRRSRKTRYRKPRFNNRKRPEGWLPPSLQSRVENTMTWVNRLAKFCPITGISQELVKFDLPKLENPEISGIQYQQGELQGYEVREYLLEKWGRQCAYCAVKDVPLEIEHIKPKSRGGTNRISNLTLACHECNQDKGNQEIEDFLSGKPNLLKRIQSKTKKPLADATAVNVTCWKLYESLQQTGLPVETGSGGLTKFNRTHRGISKTHWLDASCVGKSTPENLKIKTKKPLLITATGHGSRQMVRTDKHGFPKRYVPRYKFVEGFQSGDIVKAYVTFMKEKRRICWKSSSKNFRKFQHKN

SEQ ID NO: 3650 - protein, 425 aa, Nodularia sp.; identical to SEQ ID NO: 3165

SEQ ID NO: 3651 - protein, 408 aa, Moorena sp.
MSKIFLIDANKKPLNPIHPAQARQLLRNKKASIFRRFPFVLILSEPYEDPIISPLRLKIDPGAKTTGIALVNDATGEVVFAAELKHRGFAIRDALTSRRQLRCSRRNRKTRYRKPRFLNRTRSKGWLAPSLQSRIENIKTWVNKLQRFAPIIAISQELVRFDMQLMQNPDIQGKEYQQGTLAGYETREYLLEKWDRQCAYCGVNGVPLQIEHIHPRAKAGTNSIANLALSCEKCNIKKGIKDIKDFLKKDTNRLEKILKQAKRPLANAAAVNATRFALLDALKATGLPVETGSGGLTKFNRNQQGIDKTHWVDAACVGKSTPKLIIKNIKPLLITANGHGSRQSCRTDKYGFPKRYVPRFKFVKGFQTGDIVKAIVSTGKKVGEYIGSVKKFPLTVQDADTLPTVVKE

SEQ ID NO: 3652 - protein, 439 aa, unidentified
  REGION 1..439: note = Human gut metagenome
LMPTSEYRARKLLKSGKAIKYSYHPFTIQLTERKTGNIQPIELCMDTGYIHIGISVKSEKHEYLTEQIDTLTDERSRHNARRMYRSQRRNRKRYRQPRFNNRKKDKGWIAPSLEHKKNIHVQAISRINNVMPLTDITMEMGNFDTQVLKAKEEGRPLPQGVDYQHGERYSIATLREAVFARDGYKCQCCGRTIKDGAILHVHHIKYRSQGGTNSISNLATVCDKCHTPKNHKPGGKLYGWKPKLPSFKGATFMTTIRWQLYNEAKALFPDIDIHITYGAATKERRRELNIDKSHINDAFVMGQFHPRHRIKAVLYKKKRRNNRCLEKFYDAKYIDSRDGKKRSGQELFNGRINRNHKKDSENLHQYRLQKVTAGKRTVRKQHYSVQPHDIIIYESRKRETTGCHCNGARVMLLPDKKSVSIKKIKIYRYASGYFKSTFN

SEQ ID NO: 3653 - protein, 424 aa, Moorena sp.
MSNYTLVLDTNKQPLSPCHPSVARKLLDSGKAALFRRYPFTIILNKSCSDVVNQAIELKIDPGSKTTGIALVQGEKIIFGGELSHRGNAIKASLESRRSLRRGRRNRHTRYRQARFLNRTRTKNWLAPSLQHRVETTLTWVNKLIKFIPITRISQELVRFDLQQIDNPEISGIEYQQGTLSGYEVREYLLEKWQRKCAYCGIENVPLQVEHIHPQARGGTNRISNLCLACEKCNIKKGTQDIKDFLAKKPDLLKCILAQAKRPLKDAAAVNSTRWALFSRLQETGLPVFTGSGGQTKFNRTRLNFPKTHWLDAACVGQIGELEILTNKPLLIKATGHGTRQMCRTDKFGFPSRYVPRIKFVKGFQTGDIVKAIVTTGKKIGKYIGRVAVRATGSFNISASKLVQGISYKYCKIIHRKDGYDYAF

SEQ ID NO: 3654 - protein, 421 aa, unidentified; identical to SEQ ID NO: 3396
  REGION 1..421: note = Human gut metagenome

SEQ ID NO: 3655 - protein, 425 aa, Moorena sp.
MPCNEKRARLLLARGRARVHRVMPFVIRLVDRQIGVCSFQPLRLKLDPGSRVTGMALVRETDDAIAVLNLFELVHRGRQIGEALTARRACRRRRRTNLRYRTPRFLNRTRPSGWLPPSLMHRVHITIAWVNRMRRWAPVTALSSEQVRFDMQALANPEISGVMYQQGTLAGYEVREYLLGKWSRTCIYCDATDRPLQVEHLTARARNGSNRIGNLGLACGECNQDKGALDVREYVKDPKRLARILATASRPLNDAAAVNATRRALSSALRTTGLPLELASGGQTKFNRVTHNIPKTHALDAVCVGEVAALRGWQRPSLTIRATGRGSYQRTRLTRHGFPRGYLMRQKQVQGFQTGDHVRADVPHGKKAGVHTGRVAVRATGSFNIQTAMTVVQGISHRYCKLVQRGDGYAYSLQPNDSFRQDGGG

SEQ ID NO: 3656 - protein, 429 aa, Parasutterella sp.
LRVFVLNKRGKPLMPCSPAKARHLLKEKKAIVVRRTPFTIQLTIATGESKQPVSLGVDAGYKYVGLSASTEKAELYASEVELRQGITDLLSARRALRRARRNRKTRYRAPRFDNRIRTKRKGWLAPSVENRINAHLSRIETVLRMLPVTKITVETASFDMQLLKDPDISGKEYQEGEQLGFWNVREYVLFRDGHVCQHCHGRLKDPVLNVHHLKSRRTGGDSPGNLITLCETCHKALHRGEITLKAKRGQSFRAETFMGIMRREVLDRLKASHPKLEVQNTYGYRTKHARISNGIAKSHCADAFCIAGNLGAKRLGEFLFQKQTRRNNRQIHKLSILKGSLRKRNQAPFEVKGFRLFDKVAYQGEEGFIFGRRSSGFFDIRRLDGTRISAGINYKKLRLLEKRRTYLTEIRKEEARRPLPEGRGLRAQM

SEQ ID NO: 3657 - protein, 418 aa, Moorena sp.; identical to SEQ ID NO: 3367

SEQ ID NO: 3658 - protein, 442 aa, unidentified
  REGION 1..442: note = Human gut metagenome
MVTVQQSTHHLPFGRVFIRRNLFMVYVISQDGKPLMPCSDPIARLLLKQGKAKVKKREPFTIKLTYETTNHTQGLTLGVDTGSGTIGTAVSKDNGDIVYMSEVVVRNDITDKMTQRAKYRRNRRNRKTRYRKARWLNRASSIKKDRFSPTMQSKLHSHVREIEYIQSILPVTEMVFETGQFDMQLMKNPSLANPKVRPWGYQKGANYGFENTKAMVLNRDNYTCQCCKGKHKDSKLEVHHIVFRSQGGSDEESNLLTLCHTCHKDLHSGKINPKLSGKLKGNLKYATQMNSIRKQLFRFYPNAIETFGYVTKANRLHLGVDKEHYYDACTIATQGNAFNVKSNLYKKKCVSDGDFQKTKGIRSEQPIVTDKICGFRKFDKVRYFGNDYFIKGRMSTGYAILMDIDGNKIDFSTMPRGYKTPKLSNCKRITARSTVMTQVKVV

SEQ ID NO: 3659 - protein, 435 aa, Moorena sp.
VFVLDQHHNPLQPCHPARARKLLTKGRALVHRRVPFVIRLTARTSTESEVEGVEIGIDPGSTHTGVAVFTESSGERRGRFALQITHRGGQIRANLAKRSAHRRRRRSANLRYRSPRFANRTRSEGWLAPSLAHRVETTLTWVERLARWAPLRQAHVERVAFDVHALAAGKPLNGVEYQQGTLAGYEVREYLLATWNRACAYCGTSGVPLNIDHIHPRSQGGSGRIANLALACVGCNQAKSHHPIEEFLACQPARLATILTQAKSPLRNAAAVNATREALWRGLNARLPTRVGSGGRTKYNRTRASLPKTHTQDALAVGTLDTITTHPAWVMVVGCTGRGGYARTRSDRYGFPRLRLPRVKAFFGFQTGDLVRAVVPTGKKTGTYVGRVAVRATGSFNIATAQGTVQGIRHKHVRLLQRADGYTHTRKEEGVSSPT

SEQ ID NO: 3660 - protein, 427 aa, Moorena sp.
MSNFVFVLDTNRQPLAPCHPARARELLAKGKAAVFRRYPFTIVLNRAVGDVPPSCQLKIDPGSQTTGLSIVNRDRLVWGAELEHRGQHIKAKLETRRACRRNRRNRKTRYRKPRFLNRTRPDGWLPPSLQHRVETTMTWVNRLRKLCPIVSISQELVQFDTQKLQNPEVSGVEYQQGELFGYEVREYLLQKWGRKCAYCGAENQPLEVEHIVSKSRGGSDRVSNLTLACHQCNQSKGNRDIHEFLSGKPSVLDRILKQAKTPLKDATAVNATRWKLYQQLKETGLPVEVGTGGLTKFNRTRLGLPKTHWLDAACVGKLTPDRLDVAVKKPLLVAAKGHGVRQRCRLDRYGFPRAVAPKAKSFQGFQTGDLVKAVIPQGKFAGNYMGRIAIRFRPSFRLNAGVKPFDVHPKYLTTVQKSDGYEYSFSK

SEQ ID NO: 3661 - protein, 411 aa, unidentified
  REGION 1..411: note = Human gut metagenome
MIYVRNKEGKALMPTERGGRIGYLLRHGKAHVVSRVPFVVQLDYESTTYTQEVSLGIDAGSKHIGVSASSEKKELLAAQVELRSDVTKLLSSRRELRRTRRNRKTRYRKSRFDNRKRKDGWLAPSVAQKVESHLKVIRLAHKLLPITKTTIEVAQFDAQKIKNPDIKGDEYQQGEQMGFWNVREYVLARDGHKCIHCKGKSRDPILNVHHLESRKTGGNSPSNLVTLCETCHKAYHRGEFELKIKRGSSLRDAAVMNIMRWAVYERAKAEFGNVYLTYGYITKHTRIENDIEKTHAADAFCIAKNVHAIRLGTFFMCRCVPRHTRALHVATPKKGGIRRSCIASHKIGKSRFQRFDMVRWNSKECFIFGSTNGRPILRNVYGNQVAEYPSVNIKTITFLKRLRMNLLIVVV

SEQ ID NO: 3662 - protein, 419 aa, Ktedonobacter sp.; identical to SEQ ID NO: 3457

SEQ ID NO: 3663 - protein, 493 aa, unidentified; identical to SEQ ID NO: 2644
  REGION 1..493: note = Human gut metagenome

SEQ ID NO: 3664 - protein, 419 aa, Moorena sp.
MFVYVINQHGKPLMPCSPRKARNLLKSKKAKVAKRTPFTIQLVHGSAGYIQPISLGVDAGTKHIGISATTEKKVLLEADIKLRTDIQELLATRSQFRRARRSRTTRYRKARFLNRKKPKGWLAPSIQHKVDSHVKIVKFVHNILPVTHIIIEVAQFDTQLLKNPSIQGVEYQQGEQMGFWNVHEYVLFRDKHICQRCKGKKKDKILNVHHIESRKTGGDRPDNLITLCETCHNEIHQKGLEHTISRKSPSLRDASQMTVMRWFIYNGLKEIYPHAKLTYGYIIKNTRIRHGLEKSHMADARCISGHPLAKSNDAVYTMKFVRKNNRQLHTATIGKGGRRKTNKAERFVLGFQLFDKVIYEGQECFIFGRRIRGYFDIRQLDGTKIHTSTSFKKLRKVEYASTLLIERRISDSSPTYSSA

SEQ ID NO: 3665 - protein, 471 aa, Caldicellulosiruptor sp.; identical to SEQ ID NO: 3375

SEQ ID NO: 3666 - protein, 492 aa, Acidithiobacillus sp.
VLRETGSAATGTWPGAGTSDGAFHYSAGGSAAEGFGLAAYAVETGSGQQYYGHRSGPRERIRGDENTGEVSRQAIVLLLLELQHRGHAIRDALTQRRAFRRRRRGNLRYRPARFDNRTRPTGWLAPSLQHRVDTAMAWVHRLRRWTPVTGLSTMIHRFDTQRLQNPEISGMEYQQGELQGYEVREYLLEKWGRKCAYCGAEHAPLTIDHIHPKSRGGSDRVSNLTLACFPCNQRKGNRDVAEFLAHDPKRLARIEAQRKAPLRDAAAINSTRWVLWRDLASTGLDVEVGTSGRTRWNRSRLQIPKAHCLDAACIGHVDAAHGWKQPVLAVKTTGRGSYQRTRLTKYGFPRGYLTRSKSAFGFQTGDLVKAIVTKGKKVGTYLGRVAIRASGSFNIQTASGLVQGVHHRFCTLLQRADGYGYFWTKIASNQGEAGMGRSATAALSLPGINAGVPAQSDENIRPTPIRRSCSSLGVMDIRIQRYLRFCQVYSRL

SEQ ID NO: 3667 - protein, 440 aa, Ktedonobacter sp.
LSNVFVIDSDSKPLNPVHPARARLLLTQGKASVFRRYPFTIVLKRVVEQPEVQPLRLKLDPGSKTTGIALVNDANGKMIFAAELEHRGQAIKDGLDSRRAVRRNRRHRKTRYRKPRFQNRRRKKGWLPPSLESRLANILTWVARLCRLAPITALSQELVKFDLQLIENPDIAGVEYQQGTLQGYEVREYLLEKWERTCAYCGAQNVPLQVEHIHPRAKSGTNRMSNLTLACEPCNTAKGTQDIRVFLAKKPDVLKRILAQVKKPLKDASAVNITRWALLERLKTFGLPVECGSGGLTKYNRTTRGLAKTHWLDAACVGKSTPVTLSWKGLVPLHMKATGHGRRQMCVPDTYGFPKQHKARKKTFLGYQTGDMVKAVTPKGTYEGRIAIRHRPSFRLGKVDIHPKYMRCVQRADGYEYTQKGVRHAPPHVSSQGAPHGAIG

SEQ ID NO: 3668 - protein, 426 aa, Bacillus sp.
MVFVLDTNKCPLAPCHEAVARKLLKQGKAAIYKRFPFTIILKKSVDESEIKTTYRLKIDYGSRHTGLAILRGQEVVWLGQLDHRTDIKERIDKRRAFRRARRNRKTRYRKPRFLNRRGKDGWLPPSLESRVQNIQTWVERLRKICPIEHISYENAKFDTQLMRNPEINGVEYQQGTLQGYEVREYLLEKFGRKCCYCGKEGVPLEIEHIIPKSRGGTDRVDNLCLACHDCNQRKGSKTAEEFGYPHIQEMVKKTLKDASVVNATRWKVYEVLKQSGCEVECGTGARTKMNRIRLGLPKIHYFDACCVGESTPLQLHFKTKEALFIKAKGRGSRSRTNLDKYGFPRGFLARQKFFFGFQTGDMVKAVIPRGKYQGGWFGEVACRKTGSFDIKGKDGKRIAQGINYRYVQVIQRFDGYTYRREGMNIA

SEQ ID NO: 3669 - protein, 400 aa, unidentified
  REGION 1..400: note = Human gut metagenome
LEQRGKPLMPCSPAKARLLLKEKKAIVVRRTPFTIQLTIATGETKQPVSLGVDAGYKHVGLSASTEKAELYASEIELRQDITDLLSARRELRRARRNRKTRYRAPRFDNRIRTKRKGWLAPSVENRINAHLSRIEAVLRLLPVTKITVETASFDMQLLKNPDISGKEYQEGEQLGFWNIREYVLCRDGHVCQHCYGRSKDPVLNVHHLESRRTGGDSPGNLITLCETCHKALHRGEITLKQSADNRSRGSLHGNYALGGAESPEASHPELEVNNTYGYRTKHARIANDIAKSHCADAFCIAGNLGAERLSEFFFQKQTRRNNRQIHKLSILKGGIRKRNQAPFEVNGFRLFDKVACKGEEGFIFGRRSSGFFDVRKLDGTCISAGISYKKLHLLEKREPI

SEQ ID NO: 3670 - protein, 419 aa, unidentified
  REGION 1..419: note = Human gut metagenome
MVYVQDIDGKPLMPTTRHGKVRRLLKDKKAVVVNLCPFTIKLMYVTSDYKQEIVLGVDAGTKHVGLSATTKSKELYASEVILRNDIINLLSTRRELRKARRNRIRYRKPRFNNRIKSKRQGWIAPSVCQKIDSHIKVVSFIHSILPVSRLIIETSQFDTQKIKNPDILGKEYQQGEQLGFWNVREYILFRDGHKCQHCKGKSKNPILNIHHIESRKTGGDSPSNLITLCETCHKEYHKGNIKLKVKRGTSLRDAAAMGIMKWKLFDKLKSLYPNVSMTFGYITKHNRIKHRIEKSHVSDAFVISENFKAKRLGYHFKMKLTRRHNRQIHKMKMQKGGIKRMNQSPFRVFGFRLFDKVMFYGEKRFIYARRLSGSFKIKDIDGENEKNISYKKLKYIGHGLTSIEVDQSYGYKANTHNNE

SEQ ID NO: 3671 - protein, 434 aa, Syntrophaceticus sp.
LLVYVLNKHGRPLMPCKPSKARKLLKQGKAKIVKYEPFTIQLLYGSSGYKQKCVLGIDAGSKNIGLVVTIEDGRVIYKAQATLRQDIRENIETRRRLRRARRYRKTRYRKPKTFTSKWRNGWLPPSIRARIDAHYNIVKKICSIMPIKEIVVEVGQFDVQAIINPDIQGEEYQNGELKGFDSVKEYVKIRDNFQCHYVNLRPDIPCSGKLTVDHIIPRSRGGTDNPTNLVCCCEMHNMAKGNMSYKEFTGHEPTSIRDFRPTVFMNVLMEHLVPRLQELAPTKYTFGYVTRRRRKEWRLEKSYINDAIAIAGIKPRWQDNVWYCIRQVRKKKRSLHEEIPRKGRNKPNREAKRNNKNVKEIVTKSGKWCLWDKVKITTGEIGFISGFTGKWVYVQDIDGNYLQLSDKYKQINPSELVLICRNNNYITQQFISTL

SEQ ID NO: 3672 - protein, 419 aa, unidentified
  REGION 1..419: note = Human oral metagenome
MLNNQKEYAFVLDAEGKKLDPTIIQNAWRLVRQKKATLIAKRPMTIQLKKVVDTPNNDEIRIGIDDGAKYVGLALVQKCKTKNKVIFVATMEHRIDVHKKIVQRHEYRRYRRYLKRYRKDKSLNRANSRKQGWISPTIKQKRHAVIRIVDVLSKYICIDSIYLEDVAIDIRVLTEGHQIYGEQYQISNRLDENLRKATVLRDNCKCQLCGKKNCRLEVHHITPRRMNGSNTIGNLITLCSDCHSKVTGREMEFADQFYSKIGKKRNNYGLIYASHVMIGKTWLREELAKRAQLTLTTGGDTANKRINWNLEKSHEVDAVCITSLRPEFVNVKKWRIKPLRHQIKKRKTIEVLRFRHRDIVSYVYRNGEYHEGYVTAIFPLSKRRKENLSFQSQTKHCCRVAINKCKFICRPNKFYWLSS

SEQ ID NO: 3673 - protein, 461 aa, Moorena sp.
MSNFVFVLDTNKRRLNPVHPREARLMLNQGKAAVFRKYPFTIILKESCPDVLVQDLELLLDPGSKVTGIAIKQGNKVLFGAEVQHRGQQIRDALLSRRQLRRGRRNRKTRYRQPRFLNRTRPSGWLAPSLQHRVLTTLTWVRKFIRLAPIASLAQELVRFDLQLMQNSEVSGVEYQRGELQGYEVREYLLEKWNRRCAYCSVENVPFEVEHIQPKSKGGSERVSNLTIACHDCNQSKGNQDIRDFLSSKSDLLNHVLKQAKSPLKDAAAVNSTRWALFNALKATGLPVTTGTGGQTKFNRTRLNLPKAHWTDAACVGRIDSLLILTSKPLLIAAKGHGTRQMCRTDKYGFPSRYVPRNKFVKGFQTGDIVKAIVEKGKKIGQYVGRVAVRSTGSFNISTNNGLVQGISHKYCSIIHRKDGYNYGFCHDAEFIQRVVLPPRVKTSRFPYSRRFLDEKTRRSH

SEQ ID NO: 3674 - protein, 413 aa, unidentified; identical to SEQ ID NO: 2636
  REGION 1..413: note = Human gut metagenome

SEQ ID NO: 3675 - protein, 425 aa, Moorena sp.
MSNFVLVLDTNKKPLTPIHPGDARFLLNQQKAAVFRRFPFTIILKEPKSDVPTQPIELKIDPGSKTTGFALVQNNKVIWGMELQHRGLAIKESLETRKGVRRGRRSRHTRYRQARFLNRTKPQGWLAPSLSHRVLTINTWVKRLCNFAPITDIVQELARFDLQQLENPEISGFEYQQGELQGYEVREYLLNKWNRKCAYCTAENVPLQVEHIKPKAKGGTNRISNLCLACEKCNIKKGTQDIEKFLVKKPELLKQILSQAQRTLKDASAVNSTRWALFNKLKETGLPITTGSGGLTKFNRTRLGLPKTHWIDAACVGKVETLKILTTKILTVKSTGHSCRRFCRINKFGFPCTEPKKIFTHVSTGDFVKATLHKDRKNITSGKYVSRVKTPTKNGCEIVINGFRVEFSTMKDITKVHCSDGYSYV

SEQ ID NO: 3676 - protein, 456 aa, Halomonas sp.
MAVFVLDKKKQPLMPCSEKRARLLLARGRAVVHKRYPFTIRLKNRVGGEAQPLRLGIDPGSKTTGLALMHEPDSQQRHVLCLFELIHRGFQIKKALQQRAAFRRRRRSANLRYRAPRFNNRIKPKGWLAPSLQHRVDTVMAWVNRLSKSAPITGISQELVRFDTQKLESPEISGVEYQQGTLLGYEVREYLLEKWGRKCAYCGTADTPLEIEHVVPRSRGGSNRVSNLTLSCHPCNAEKDSQTLTDFFATNKGLKKRLKANGLSADAQLERVQRQLKQPMRDASAVNATRWALFSALKTTDLPVAVSSGGRTKYNRQRLNIPKTHALDAACVGAFGKLYDWTVPTLTIKAMGRGSYQRTRLTKHGFPRGFLMRQKQVHGFQTGDMVRAIVPTGKKAGTHTGRVAIRKTGSFNIQAEYGAVQGISHKYCTLIQRSDGYGYYVTLFSNLTGEAGRAVA

SEQ ID NO: 3677 - protein, 479 aa, Moorena sp.
MVFVLDKHHKPLMPCTERRARILLRRGKAVVARVSPFTIRLKDRLQEESILQPLRFKDDPGSKTTGFAILREVSPNESVAILLGEIHHKPGIKQKLDSRRSLRHSRRSRNTRYRIKRFNNRHPQKCASCGKNAKHGSRYCRPCSEAKNFTDNGYRDTWLPPSLDARVNQTLNVLAKLRKLLPITSVSSEHVKFDTQLLQNPDIQGVEYQQGTLFGYEVREYLLERDGHTCRYCSNLSNDPVLEVEHKIPKSRGGSNSIKNLVMACHTCNEKKDDLTPEEWLTALKGKDGPSAVNQKRIANLDEIVKNKVVPLKDAAMMNATRWKLYRKLQETGLPVECGTGTRTKKQRIDHGLPKEHYYDACCVGESTPERLEIATHYVEVWSAKGRGTRKMCNTDKFGFPISHRTRQKQFFGFQTGDLVKATVPKGKYTGIWTGRVMVRAKGNFDIKDASGNRMTISHRYIQLLQRNDGWQYEKTKIS

SEQ ID NO: 3678 - protein, 443 aa, Oligella sp.
MAVFVLGKNKRPLMPCSEKRARLLLERGRARVHRLVPFTIRLVDRTVADCALQPLELKIDPGSKTSGLALVRNNEAINTETGEITATAHVLNLFELIHRGTQISQALTARSQMRRRRRSANLRYRAPRFLNRTRPTGWLAPSLQHRVDTIQSWVQRIRRYAPVMQLAQELVRFDMQQLENPEIAGVEYQQGELAGYEVREYLLEKWQRQCAYCDAIDVPLQIEHIQPKARGGSNRISNLTLACAPCNTKKGAQSVSSFLANDPKRLAHTQAQAKRPLRNAAAVNTTRWKLLNALKATGLPVNTGSGGLTKFNRTRLQMPKTHALDAVCVGEVGHVKQWQKPTLVIKATGRGSYQRTRLNRFGFPRGYLTRKKRIHGFQTGDRVKAVVTQGKKIGTYVGRVAVRASGSFNIQTAQSLIQGISHRYCTLIQRGDGYGYSTRIDSF

SEQ ID NO: 3679 - protein, 263 aa, unidentified
  REGION 1..263: note = metagenome
LKVFVLNMRGQPLMPCSPAKARHLLKAGKAAVRRRTPFTIQLRIATGETKQSVTLGVDAGAKHVGLSAATEKEEVFASEVELRQDITELLAARLSLRRERRQRKTRYRAPRFLNRVRSKHKGWLAPSVENRIQAHMSRIDAICGLLPVTKIVIETASFDIQKIKHPDVESTDYQQGDQLGFWNVREYVLFRDGHVCQHCHGHAKDKILNVHHLESRQTGGDAPNNLITLCETCHKAYHAGKIKLKVKRGQSFRAEAFMGIMRW

SEQ ID NO: 3680 - protein, 512 aa, unidentified
  REGION 1..512: note = Human gut metagenome
MSTVYVLNKDGKPLMLTTRCGHVRYLLKEKKARVVASKPFTIQLLYETDDVVQPLYLGIDPGRSNIGVAVVKTDGMAVFTAHLETRNKEIPKLMKKRKDSRRARRTNGRRCRRQRRAKANGTISKKCVKQTTAQNGSVSKRAKEIGVIKRHLPGCEKDVLCIGIKNKEAKFNNRTRPTGWLTPTANQLLQTHINLVKKIQKFLPISDVVLEVNKFAFMQLDNPNIQKWQYQKGPLYQKESLKSAVSEMQEHHCLFCKKKIDHYHHVVPQHKNGSNTIDNIVGLCTQHHDLVHKDATWQKRLAKKKTGLNKKYGALSVLNQIIPALTKELSSLFPKHFFVTNGKSTYDYRAAHGVSKDHWLDAYCIACSVLPNDTCDKTINSRVPYELKQFRRHDRRALNNENMSRVYTFNGKMVAANRHKATEQTTDSLEEFRQRQPNDVCNLKVKEHHPTYRNMSRNYPGSIFLVEKQVHIMQGIAGSKDGKATTYKDTNANSIAAGKCKFVAKNSGILFV

SEQ ID NO: 3681 - protein, 430 aa, unidentified
  REGION 1..430: note = Human gut metagenome
MVYVLDISGNPLTPTKRHGKVRHLLETGKAVCVKRCPFTIRLTYQNAGPELEGLSLGVDCGSKHIGLSVSSEEQEYYSSEVELRQDIPANLSTRREFRRARRHRKMRYRKPRFLNRIASKKKGWLAPSVRQKVESHLNRIDKAVKMLPIREIKVEVAAFDLQKLQADLKGLKRPKGEEYQQGPQLDFWNVREYVLFRDHHECQCCHGKSGDKVLNVHHLRSRKVGGDAPDNLITLCEYCHGQYHKGELELPESAKKPKPLRDAVFMGIMRWTLYSRLKEIYEPQGIKVKLTYGYITKHTRIENGLEEKSHRLDALCIAGHPKAKRCREWFLQKKVRCHNRKLHKATIQKGGVRKANQLPAVIKGFRLYDKVLFQNRECFIWGRRKTGYFTLKTLDGIMICDGVSSKKLTLLEKRKSYLTERRKQELCNSF

SEQ ID NO: 3682 - protein, 214 aa, unidentified
  REGION 1..214: note = Human gut metagenome
LHVHHFESRKYGGNAPDNHGTLCDDCHKKFHLGIITDVKLKTRRRQSTRDAAFMGIMRKALMWRLRTELFIPVAETKGYITKATSEKLLVLPKSHTRDALAIAQGRHGFGIKEYAYVEPANHIYTVRPVRHHNRQLHKASILKGGIRKRNQASKYVFGFRLYDKVLYQGKACFVWGRRTSGTFLLRTIDGIKVKDGVSYRNLTLLERSSNYLIA

SEQ ID NO: 3683 - protein, 447 aa, Marinobacter sp.
MSVFVLDRRKQPLMPCSEKRSRLLLGRGRALVVRAYPFTIRLKDRAGGITQPVRIKIDPGSKTSGIAVVRESGQKQHVLALMELAHRGRQISKSLEQRRAFRRRRRSQLRYRAPRFLNRTKPRGWLAPSLQHRVDTTKSLVNRLRSLVPVESISQELVRFDTQKMENPEVSGVEYQQGTLLGYEVREYLLEKWGRECAYCTGKDTPLQIEHIDPKANGGSNRVSNLTLACRPCNQEKGRQPLADFFASSKRLKNHQARLDRILKQCKKPLRDASAVNSTRWALHQTLKQMGLSVEVGTGGRTKFNRQRLEIPKTHALDAACVGEVEIVEGWDVPTLAIKATGRGSYQRTRLTRYGFPRGYLMRQKKVQGFQTGDMVRAIVPTGTKAGTWLGRVAVRKTGSFNIQTSSGAIQGISHRHCVLTQRADGYGYHIQPNQPKEEGDREHESR

SEQ ID NO: 3684 - protein, 414 aa, unidentified
  REGION 1..414: note = Human gut metagenome
MPCSPAKARLLLKEKKAIVKRRTPFTIQLTIATGETKQPGSLGVDAGYEHVGLSASTEKAELYASEVELRQDITDLLSARRALRQSRRNRKTRYRAPRFDNRIRTKRKGWLAPSVENRINAHLSRIEAVLRLLPVTKITVETASFDMQLLKNPDIAGKEYQEGEQLGFWNVREYVLFRDGHVCQYCHGRSKDPVLNVHHLESRRTGGDSPGNLITLCETCHKALHRGEITLKAKRGQSFRAEAFMGIMRWEVHNRLRALHPGIEVSNTYGYRTKHARIANGIAKSHCADAFCIAGNLGAERLGEFFFQKQTRRNNRQIHKLSILKGGIRKRNQAPFEVKGFRLFDKVACQGEEGFIFGRRSSGFFDVRKLDGTRISAGISCKKLHLLEKRRTYLTEIRKEEALPPLPEGRGLRA

SEQ ID NO: 3685 - protein, 420 aa, unidentified
  REGION 1..420: note = Human gut metagenome
MQYVYVLNKHGEPLMPCSPGKARLLLKQQKACVVRRTPFTIKLLYGSAGYKQPITLGVDAGSKHVGLSASTEKRELYSEEFTPRSDVVKLLSTRKQNRRSRRYRKTRYRAPRFDNRVHSKHKGWLAPSVEVKIQEHITVIKRICKILPISLVRVETAEFDTQRLKAMLAGKPLPVGTDYQLGEMYDEYNVRQYVLKRDHYTCQCCGAHNTAKKVVKLHVHHLESRKTGGNAPSNLVTLCTTCHKNLHKGKVTLDGKERGKPLRDAAFMGIMRKTLMARLKEELPIPVQGTYGYITKMRREQNDIKKSHTNDARCISKHPLAEPCSVCYRTKAIRHHNRQTHKANFSKKGIRKRSQMPYLVEGFRLWDKVLYKGQECFVSGRRSSGSFALKKLDGTSISKGVTFKKLRLLEPATNYLIERM

SEQ ID NO: 3686 - protein, 423 aa, Marinobacter sp.; identical to SEQ ID NO: 2646

SEQ ID NO: 3687 - protein, 425 aa, unidentified
  REGION 1..425: note = Human gut metagenome
MENTLKVFVLNMRGQPLMPCSPPKARKLLRAGKAVPVRRTPFVIQLTVPTGETKQPITLGVDAGYKHVGLSATTAKEELLASEVELRQDVTGLLSDRLALRRARRNRKTRYRAPRFDNRVRSKHKGWLAPSVENRIQAHISRIEAVCRVLPITKIVIETASFDIQKIKNPEIEGEGYQQGEQLGFWNVREYVLFRDGHVCQACKGRSKDLILNVHHIESRKTGGDAPGNLITLCEACHKAYHAGKLKQFSPRRGASFRAETFMGIMRWTVLNRLRERHPELPVTNTYGYLTKHKRIVAGLPKTHCADAFCIAGVLDAKRRGEYLFQKQTRRHNRQIHKLTILKGGVRKRHQAPYLVHGFRLFDKVLCKGEVGFIFGRRSSGAFDVRRLNGTKISAGISYKKLSLLEKRKMFLTELRKEGRDSSRV

SEQ ID NO: 3688 - protein, 455 aa, Halomonas sp.
MAVFVLDKQKRPLMPCSEKRARLLLARGRAVVHKRYPFTIRLKDRVGGDTQPLRLGIDPGSKTTGMALAREDAEDRHVLCLFDLVHRGFQIRKALEQRRAFRRRRRSKNLRYRAPRFNNRTRPKGWLAPSIQHRVDTVTAWVNRLTRHAPITAISQELVRFDTQKLENPEISGVEYQQGSLLGYEVREYLLEKWGRECAYCGDTDTPLEVEHVVPRAHSGSNRVSNLTLACHVCNQGKGKGTLDAFFTTDKGLKKRLKANSLSVDARLERVQRELKRPLRDASAVNATRWVLFGALKATGLPMTAGSGGRTKYNRQRLGIPKTHALDAACVGPFGRLHGESRPTLVIKATGRGSYQRTRLNKHGFPRGHLMQQKQVRGFQTGDMVKAIVPTGKKAGIHTGRVAVRKTGSFNIQTEQGAVQGISHKHCLLIQRGDGYGYHLTSSIQPKGGAGQAVA

SEQ ID NO: 3689 - protein, 429 aa, Ktedonobacter sp.
VSNVFVIDSDCKPLNPVHPGHARRLLRQGKAAVFRRYPFTIVLKRVVEQPEVQPLHLKLDPGSKTTGIALVNGTNGKIVFAAELSHRGHAIKDSLDSRRASRQGRRQRKTRYRKPRFDNRRRKKGWLPPSLESRLANILTWVARLCRYAPIATLSQELVKFDMQLMENPDIAGVEYQQGTLQGYEVREYLLEKWERTCAYCGKQDVPLQVEHIHPRARSGTNRMSNLTLACEACNTAKGTQEIEVFLKKKPEVLKRLLAQVKKPLKDASAVNSTRCALLERLKAIGLPVECGSGGLTKFNRTTRGLPKTHWLDAACVGKSTPDVLLQKGVIPLRIKATGHGRRQMCVPDKYGFPKQHKERKKTFLGYQTGDLVKAITPKGTFEGRIAIRHRPSFRLEKVDIHPKYMRCVQRSDGYEYTQKGVRHAPPHG

SEQ ID NO: 3690 - protein, 413 aa, unidentified; identical to SEQ ID NO: 3621
  REGION 1..413: note = Human gut metagenome

SEQ ID NO: 3691 - protein, 417 aa, unidentified
  REGION 1..417: note = metagenome
VYVLNKHGEPLMPCSPRKARLLLKQKKACVVKRTPFTIKLLYGSTGYKQPITLGVDAGSKHIGISAATEKYELYCEEATPRNDVVDLLSARRAFRRSRRNRKTRYRAPRFNNRVHSKHKGWLAPSVEVKIQEHITLIKRVCRILPVTFVRVETAEFDTQRLKAMLEGKPLPVGTDYQLGEMYDEYNVRQYVLKRDNYTCQCCGAHPTKTKAVKLHVHHIETRRTGGNAPNNLITLCTACHKALHAGKVTLDGKKRGRSLKDAAFMGVMRKTLMERLLKELKIPVQGTYGYITKYLREKHSIPKSHTNDARCISKNPLAIPCDTCYYTKAIRHHNRQLHKATILKGGIRKANQAPYTVKGYRLWDKVSYNDSECFITGRRTSGYFALKKLDGTVVSNSASYKKMRLLEVATNYITERR

SEQ ID NO: 3692 - protein, 489 aa, unidentified
  REGION 1..489: note = Human gut metagenome
MAMVYVQNKDGKPLMPTTRYCYVRLLLKENKARVVCTTPFTIQLNYDTPDVTQDLILGIDPGRTNIGVAVVKEDGSCVFSAHLETRNKEVPLLMKKRAAFRRQHRTQDRRRKRQRRAIAAGTTVESNTIERLLPGYEKPVVCHYIRNKEARFNNRSRPAGWLTPTANHLLQTHINLIAKVAKFLPITKVVIELNRFAFMAMDNPNIRRWEYQQGPLYGLGSVEDAVYAQQDGHCLFCEKPIDHYHHVVPRHKGGSETLANRCGLCARHHDLVHTDKSWAEKLVTRKGGMNKKYHALSVLNQIIPHLIEHLGSETPYEAYATDGKSTKGFRIAKNVPKEHYTDAYCIACSILDTDIEVSAPTSPFELKQFRRHDRQACIRQMVDRKYLLDGKVVAANRHKAIEQKSDSLQEFREAYGNAAVSLLTVKPHPPQYKDMTRIMPGAVMDFNGTIGVMQSSIVGRFYKSTKGYKAAPRRCVLLAQNAGMVFLPA

SEQ ID NO: 3693 - protein, 468 aa, unidentified
  REGION 1..468: note = Human gut metagenome
MSSNSICVIGKSGERLMPSFRPGRVRHLLKDGKAKIVKHQPFTIQLLYDSNNFVQPIELCEDVGYKYIGISAKSKSHEYVSAQYDTLADEKKNLDDRRKYRRTRRNRLRYREPRFDNRRREKGCLAPSLRHKKELNVNLIKTYVSVMPISRVIVEVGSFDTTLLSAIAQGKVKLEGVDYQQGPRYNIATLREAVFFRDDYKCVVCGRSVIKDTAILHVHHVYYWKGRHGYKLDELAAVCEKCHTPANHQKDGKLFGFGEDQKFKDLSGAAFMNTVRWQIVQALREIYPKDFVQFTYGAMTKAKRIKLKIPKTHNNDAYVMGDYHPSHRCAFTHYQKKHRNNRILEKFYDASYIDARTGNMAKGKELFNGRINRNHKKDSENLHQYRQQKISKGYRAFRRKTTKLNPGDIVCLDGEKLIVHGTHTSKTGNVNVQFKKPSKTGKKSASLKKLAIIKTTGTIRPVWERVLQ

SEQ ID NO: 3694 - protein, 413 aa, unidentified
  REGION 1..413: note = Human gut metagenome
MTSYAFVLDANGKQLAPAKEQKAWFLIRKKRAALVSKYPMVIQLKKEIPENEICKDEIRCGIDDGGLHVGIALVQKCKTKNKVVFKGTIEQRNDVKHLMEVRRSYRHYHRYHKRYRPARFDNRKSSKRKKRIAPSILQKRQAIIRVIHWLNKWINITNYWLEDVSIDIRALTDGYKPYRWQYQKSNRLDENIRKAAILRDGGKCMECGKLNCRLEVHHIKPRRRNGSDTLDNLITLCKSCHQKTEGQEELYMDRYFSLLKSSDHKNLNYAQHVMIGKEWLRKQLSSLGVLYLTNGGDTANKRIDWNIEKSHANDAVCITNLQPDTYDMKEWTVKPMRRQSKAKTDNVLGIKHRDLVEYTLKNGETHRGYVTALHPEQKAINFQSPTKHCKKVNARKCKLRWKYSKIYWFENAS

SEQ ID NO: 3695 - protein, 413 aa, unidentified
  REGION 1..413: note = Human gut metagenome
MTSYSFVLDVNGKPLAPTKEQKAWFLIRKKRAALVSKYPMVIQLMKEIPENEICQDEIRCGIDDGGLHVGIALVQKCKTKNKVVFKGTMEQRNDVKHLMEVRRGYRRYHRYHKRYRQARFDNRKSSKREGRIAPSILQKRQATIRVIHWLNKWINITNYWLEDVSVDIRALTDGYQSYRWQYQRSNRLDENIRKAAILRDGGKCMECGKSNCRLEVHHIKPRRRNGSNTLDNLITLCESCHQKTEGQEELYMDRYFSLLKSSDNKNLNYAQHVMIGKRWLRKQLSGLGVLYLTSGGDTANKRIDWNIEKSHANDAVCITDLQPDTCDMKEWTMKPMRRQSKAKTDHVLGIHHRDLVEYTFKNGETHRGYVTALYPEQKAINFQSPTKHCKKVNARKCKLLWNYSKIYWFENAS

SEQ ID NO: 3696 - protein, 427 aa, Moorena sp.
MRVFVLDKNRKPLDPCHPAKARKLLKSGRAKVLRRYPFTIIIKDLEAENCSTHDHQLKIDPGAKTTGLAIVQGDRVIWGAELTHRGFQIKEALTSRRQLRRSRRNRKTRYRQPRFLNRTRPKGWLPPSLMSRVHNILTWVNKLIRFCPVTGISQELVRFDTQKMLNPEVSGIEYQQGTLYGYELREYLLEKWNRTCAYCGADNTRLEIEHIKPKSKGGTDRVSNLAIACHDCNQAKGNLEIEQFLSRKPSILKRILSQAKKPLADAAAVNATRWKLHDELKLIGLPVEVGSGGLTKYNRCRQNLPKTHWLDAANVGKVDTLYIEDYQPLLITAKGHGTRQICRTDKFGFPRLHCSLKKIHKGFQTGDIVRAVVTKGKKIGTYMGRIATRKTGSFDIAAAKGKVSGISYKYCQAIHRKDGYSYQFYGG

SEQ ID NO: 3697 - protein, 545 aa, Nocardiopsis sp.
VVEGLPLPAPANTQRGDSLATFHTGSKTHQAVLPQRPALESASADTPGNRDETGRGGRARVAPGVEHVRGEMPDAPPGVEHVTPVPARDGERAREGHPPRKGTPPRQGHRCVFVLDAHGTPLQPTHPARARKLLAKGRAVVARHTPFVIRFKDRTTAGSEVDGIEVGVDPGSKHTGLAVFTAQAGQRRSRYALRLDHRGGQITRRMRQRASCRKGRRSRNLRYRSPRFDDRTRPDGWLPPSLQHRVDTTVSWVDRLSRWAPVRAVHAERVAFDTHALSMGHPLEGVEYQHGTLHGYEVREYLLAKWGRSCAYCGAAGTPLNIDHIHPRSKGGSNRVANLAPACIPCDQAKDDRPVEEFVTSPRTLARVRSQAKAPLRDAAAVNATRWALWRALDERLPTHAASGGRTKWNRTRNRLPKSHTLDALAVGKLDTITTTVSTILVVGCSGRGSYARTRTDRYGFPRLRLPRRKAFFGFQTGDLARAVVPSGKHAGTHAGRVAVRSSGGHTLQTPHGPIKTSWKNLRLLQRADGYGYSTQKEAGAFSPA

SEQ ID NO: 3698 - protein, 315 aa, unidentified
  REGION 1..315: note = Human metagenome
DNRIRTKRKGWLAPSVENRINAHLSRIGAILRLLPVTKITVETASFDTQLLKNPDISGKEYQEGEQLGFWNVREYVLFRDGHACQHCHGRPKDPVLNVHHLESRRTGGDSPGNLLTLCETCHKALHRREIKLKTKRGQSFRAEAFMGIMRWEVLNRLKASHPELEVHNTYGYRTKHTRIVNGIDKSHCADAFCIVGNLGAKRLGEFFFQKQTRRNNRQIHKLSILKHGLRKRNQAPFEVKGFRLFDKVVCQGEEGFIFGRRSSGSFDVRKLDGTRISAGISYKKLRLLEKRRTYLKEIRKEEALPPLPEGRSLRA

SEQ ID NO: 3699 - protein, 392 aa, unidentified
  REGION 1..392: note = Human gut metagenome
FTIQLVYGSSGYTQEVILGVDAGSKSIEISASTKKEEVFAADVTPRNDVVDLLSTRREFRRARRNRKTRYRKPRFNNRVRSKHKGWLAPSVEVKIQEHITSIKMVCRILPVSKVVVETAEFDLQLLKAIEEGKPVPQGEDYQQGEMYGHYNVRQYVLWRDNYTCQCCGAHPTKKKEVRLHVHHLESRKTGGDAPGNLVTLCDSCHEKLHKGLITEDDFKKRKRRSTRDATFMGIMRKTLMQRLCSELPIPVIETRGYITKATREKLLVLPKSHTNDALAIAQGKHGFNVGYLPGIEQIDKIYTIRPVRHHNRQLHKATILKRGIRKSNQAEKYVFGYRLFDKVQFNGQDCFIWKRRTSGYFVVKTIDGKIIHNSASFKKLRIAERASNYLIA

SEQ ID NO: 3700 - protein, 464 aa, Moorena sp.; identical to SEQ ID NO: 3503

SEQ ID NO: 3701 - protein, 411 aa, Bacillus sp.
MTEFCFVLDASGKRLSPTKVNKAWYLIRKNKAEQINKIPMVIQLYKTVEVDEIDETPIYLGIDDGSRFTGMALVQDGKTKAKPLFKGEIEHRQDVKDKMDVRRGYRRYKRSHKKYRIKRFNNRSSSKRKGRIAPSIKQKKEATLRVVKQLNKWCRINQIFLEDVQIDIASLTEGKKLYKWQYQQSNRLDENLRKACVLRDHNRCQKCGKTKGKMEAHHITPRRLGGSHSIYNLITLCPSCHHEVTGKEMEYAEIFYQLIKGKTIFTRDAMHVMQGKNYLRTELKSIAPLDLAFGGDTANKRIDWGIDKTHANDALVLCDLEISIKQSQLRSWIIKPMRRKNKANTDLVDGFKHRDYVCYTKRNGNQYFGYITALYPEKKQFNMTTIDGNVLKRYGLKSLTLLWRFNKIYWF

SEQ ID NO: 3702 - protein, 409 aa, Microcoleus sp.
MSKQPNYVFVLDTNRKPLTPCKPSLARKLLTTGKAKVFKLYPFTIILNKEVVDTSRPLTLKIDPGSRVTGLALLSGSTLLWVAELTHRGQAIKVSLESRRSLRRGRRNRHTRYRQARFLNRTRPKGSLAPSLQHRVETTLTWVRRLSKLAPINAVFQELVRFDLQHLENPEISGVEYQQGELAGYEVREYLLNKWDRKCAYCGAQNLPLQVEHIQPKAQGGSNRISNLCLACEPCNIKKGTKDVNIFLAKQPDVLNRILAQSKRPLKDAAAVNSTRWALYNRLKETGLKISTGSGGLTKFNRTQLNLPKTHFFDAACVGDTPELLVLANQPLLIKATGHGSRQMCRTDKFGFPSRYVPRFKFVKGFQTGDIVKAIVTSGKKMGAYTGRVAVRLAWELQYLNNNWVNSRN

SEQ ID NO: 3703 - protein, 429 aa, Ktedonobacter sp.
LSNVFVIDSDCKPLNPVHPGHARRLLKQGKAAVYRRYPFTILLRRVVEQPEVQPLRLKLDPGSKTTGIALVNDANGHVVFAAELEHRGHAMKDSLDSRRASRQGRRQRKTRYRKPRFDNRRRKKGWLPPSLESRLANILTWVARLCRYAPIAALSQELVKFDMQLMENPDIAGVEYQQGTLQGYEVREYLLEKWERTCAYCGKQDVPLQVEHIHPRARSGTNRMSNLTLACEPCNTAKGTQEIEVFLKKKPEVLKRLLAQVKKPLKDASAVNSTRCALLERLKAIGLPVECGSGGLTKFNRTTRGLPKTHWLDAACVGKSTPDVLLQKGVIPLRIKATGHGRRQMCVPDKYGFPKQHKERKKTFLGYQTGDLVKAITPKGTFEGRIAIRHRPSFRLEKVDIHPKYMRCVQRSDGYEYTQKGVRHAPPHG

SEQ ID NO: 3704 - protein, 443 aa, Caldicellulosiruptor sp.; identical to SEQ ID NO: 2385

SEQ ID NO: 3705 - protein, 544 aa, unidentified
  REGION 1..544: note = Human gut metagenome
MKQKKQKVMIYILNKKGKPLMPTTRCGHVRKLLDSKKAVVVNSNPFTIRLKYDTPNGIQDVFAGIDSGRENIGSGASNEDGDCLYLGELKTSNKSIKIKMTERTGFRRERRRHDRQSKQRKAKKDHTEIQNGNDDICRTTISCKSVQISYPVAEESVTHKIIRGKEGKFANRHRDEGWITPSARQLVQMHMNDLKSMCKILPINHVTLERVAFDFQKLENENIKTWEYGKGKLYGYDSPEEYIHDVQDGKCLVCGKPHIDYLHHIIPRSKGGSDKVSNLAGLCYDCHYGPMGVHNCRETQDRLPELKNEANKQYKVSLLNSVMPVLIEEMDKFCKANSIIFSICEGHDTAKVRDMYDLQKDHCLDGFAISLVGRNVKSVDVMPDRIYQKQRYKKKSKNIIQKRNCREYYDGKKLVAVNRHKGTDQKADSLEEYMNTYAETHTADECKKHFDSLTVKPARRTYTFHKKGCICPFHIGDKVRYEKKNKIKGNTKVETFICESIHFYKDENKAKVEHNKTKSKRMKFCRVLEAGCTPYIDYRKLALM

SEQ ID NO: 3706 - protein, 426 aa, unidentified
  REGION 1..426: note = Human oral metagenome
MSKVYVLAMNGQPLMPTTRSGWVYRALRDGKAKVVSKCPFTIKLLYESTNFTQPLTLGVDTGSKYVGSAVINDITSEVVYESQTELRDDIKSKMDRRRVSRRGRRNKLRYRPKRFNNRKASKHKGRYSPTLISKFQGHTREIEFIKSILPISDTILEVGEFDTHLLQDPTLVFHKWDYQRGELYQHENFKQAARARDGYKCQCCGKKNCRLEVHHLLPRSRGGSDKLANLITLCTDCHHLAHSSEEQLLLFQRRFGKKANGTLNHATQMNVLRSMLQMKYPDAKLTYGFITKEVRRIFKLEKTHIIDACCIASRGALFKNNDSNRYKKKCVPKGYYARTGIKGGRFVILPKGKIAGFKRYDKVLYNNKEYFVTGRMSAGCVSLIDIDGNYFKVERVKRYTGEKYTSVAHINSSLVKKICGAKSVVY

SEQ ID NO: 3707 - protein, 572 aa, Nocardiopsis sp.
VVRPQRTAISDPNLRAEVTGSPPEGGAFSPRGWRPAVTSTSQHQGGDSLATFHTGEKTHQAVLPQRPALESTSADHPGNRDETGRGGRARVAPGVEHVRGETTDGSPAAGGVTPDHPVREQAREGHPPREVTPPRQGHRCVFVLDAHGTPLQPTHPARARKLLSKDRAVVARHTPFVIRIKDRTTAESEVGGVEVGVDPGSRHTGLAVFTAQAGQRRGRYALRLHHRGDQITRRMRQRAAYRKGRRSRNLRYRSPRFDNRTRPDGWLPPSLRHRVDTTLAWVDRLARWAPVRAVHAERVAFDTHALSAGRSLEGVEYQHGTLHGYEVREYLLTKWSRSCAYCGAIDTPLNIDHIHPRSQGGSDRISNLVPACVPCNQAKGDQPVEEFVTTPRILAGIKGQAKIPLRDTAAVNATRWALWHALNKRLRAHAASGGRTKWNRTRNKLPKSHTLDALAVGKVDAITAAVSTVLVIGCSGRGTYTRTRTDRYGFPRSYLPRRKAFFGFRTGDLAQASIPSGKHAGSHTGRVAVRSSHTLQTPHGPVKTSWKNLRLLQRADGYGYTTQKEARVSSPV

SEQ ID NO: 3708 - protein, 242 aa, unidentified
  REGION 1..242: note = Human gut metagenome
MPNKVYVINKHGRPLMPCSPAKARHLLDDGKAKVKKRTPFTIQLVYGSSGYTQEVILGVDAGSKTIGISASTKKEEVFAADVTPRNDVVDLLSTRREFRRARRNRKTRYRKPRFNNRVRSKHKGWLAPSVEVKIQEHITSIKMVCRILPVSKVVVETAEFDLQLLKAIEEGKPVPQGEDYQQGEMYGHYNVRQYVLWRDNYTCQCCGAHPTKKKEVRLHVHHLESRKVGGNAPGNLVTLWRC

SEQ ID NO: 3709 - protein, 545 aa, unidentified
  REGION 1..545: note = Human gut metagenome
VQFAWWLCHPKPSDNIEDVNHETALMLLQIKAGTETFGTAPCGSGPKAEGVSPERKAMNTVAVVTNTNKPLMPTSPYRARKLLSSGKAKIVKHRPFTILLVNRSDGNVQEIEYKSDTGYLHVGISVCSEKREFVREQRDLLPDEKEKHNDRRKYRRTRRNRKRYRKARFDNRIGKIRKKEKNEHVWLPPSLEHKVDAQVQLFLRLYQVMPVKRAVFEMGQFDPALMKALEKGEAAPQGIDYQMGERYQIATRRAAVFTRDRYACVFCGRSIKDHAILHVHHIGFWKQDRSNRLDNLATCCEQCHTSENHRPGGILYGVEPKLESLASATYMNVVRFELLRRLKEAAPDVEFHISYGAKTSVIRKQRSISKSHTNDAYCLGQYFPKLRAEEIGFQKIRRNDRILQKFYDAEYLDSRDGTTKKGKELTNGRISRNHKKDHENLHQYRGKKLSKGRITIRRGRSSLNPGSLVRFDGEVLTVHGTHRSRKKNKAGHIKVSVNVEFERPSKTGRKSAALSKCQIISQSYNTGWKKIQLRKEEQGKIAAVV

SEQ ID NO: 3710 - protein, 421 aa, Butyrivibrio sp.
MVYVSNQDGQPIMPTSNYAKVRVLLKNGKAKVVKRCPFTIQLLYPCDNEVQPISLGVDAGSKHIGISATTKGENTGAIVLYEADVTLRNDIVELLSTRRENRRARRNRKTRYRKARFNNRRKGEGWLAPSIREKIDAHLTVIANVHKILPITKITVETAQFDIQKIKNPDIQGIEYQQGEQLDFWNVREYVLWRDNHTCQCCKGKSKDKVLNVHHIESRKTGGNAPNNLITLCEYCHSQYHQGNIKLPKTIKRGTSFKDASFMDVMRWNFYNRLKEIYPNVHMTYGYITKNTRISRNLPKEHYIDARCISDYPEAIHPWNKTVVYYQKKVRCHNRQIHKMSILKGGNRKLNQAEYIVKGYRLFDKVQYHGKNYFVFGRRTSGFFDIRTLDGEKVNKGSISCKKLRLVEMTKGFLIERKVVA

SEQ ID NO: 3711 - protein, 512 aa, unidentified
  REGION 1..512: note = Human gut metagenome
MSTVYVLNKDGKPLMPTTRCGHVRHLLKEQKARVVASKPFTIQLLYKTNDVVQPLYLGIDPGRTNIGVAVVKADGTAVFTAHLETRNKEIPKLMKKRKDSRRARRTNGRRCRRQRRAKANGTISKKCVKHDTAQNGSVSKRAKEIGVIKRHLPGCEKDVLCIGIKNKEAKFSNRTRPEGWLTPTANQLLQTHINLVKKIRKFLPISDAVLEINKFAFMQLDNPNIQKWQYQQGPLYQKANLEEAVSEMQEHHCLFCKKPIAHYHHVVPQSENGSDTIGNIVGLCTKHHDLVHKDTAWQNKLAKKKTGLNKKYGALSVLNQIIPALTKELSSLFPKHFFATNGKSTYDYRSAHGVSKDHWLDAYCIACSVLPNDVCDSGINNRVPYELKQFRRHDRRALNNENMSRVYTLNDNVVATNRHKATKQTTDSLEEFRQNHPDDVCKLKVKEHHPTYRNMNRNYPGSVFLIGKQVHVMQGIAGSKDGEATTYKDTNANSIAAGKCKFVAKNSGILFV

SEQ ID NO: 3712 - protein, 411 aa, Ktedonobacter sp.; identical to SEQ ID NO: 3601

SEQ ID NO: 3713 - protein, 343 aa, unidentified
  REGION 1..343: note = Human gut metagenome
MSEVVGRNDITDKMTQRAKYRRNRRNRKTRYRKARWLNRASSIKKDRFSPTMQSKLHSHVREIEYIQSILPVTEMVFETGQFDMQLMKNPSLANPKVRPWGYQKGANYGFENTKAMVLNRDNYTCQCCKGKHKDSKLEVHHIVFRSQGGSDEESNLLTLCHTCHKDLHSGKINPKLSGKVKGNLKYATQMNSIRKQLFRFYPNAIETFGYVTKANRLHLGVDKEHYYDACTIATQGNAFNVKSNLYKKKCVSDGDFQKTKGIRSEQPIVTDKICGFRKFDKVRYFGNDYFIKGRMSTGYAILMDIDGNKIDFSTMPRGYKTPKLSNCKRITARSTVMTQVKVV

SEQ ID NO: 3714 - protein, 425 aa, Fischerella sp.
MQTNYVFLVDTNKQPLNPIHPARARELLNKNKAAIYRQFPFTLVLHKAIDNPVVRLLTLKLDPGSKTTGIALLDGENVIWAAELQHRGWSIKDALNSRRSLRRSRRSRKTRYRMARFDNRKRPEGWLPPSLIHRVLTVETWVKRLCRYAPIAQAVMELVKFDTQKMQNPEIDGIEYQQGQLAGYEVRQYLLEKWGRQCVYCDKEGVPLQIEHIHPKSKGGSNRVSNLALSCKRCNLKKGTQLIDEFLKKDAKRLEKIKQQAKKPLKDAAAVNATRWTLFHTLKGILPTTTGTGAQTKYNRTLFQLEKQHWIDAACIGDIKAIKLLTLQPLLIKANGWGTRQMAGTNKYGFPIRHRTRQSLHFGFQTGDIVKAVVLSGKKVGQYVGRVLCRARGSFDIVTKTGRVGDINHRFCKPIHKKDGYSYAF

SEQ ID NO: 3715 - protein, 782 aa, Streptomyces sp.; identical to SEQ ID NO: 3487

SEQ ID NO: 3716 - protein, 544 aa, unidentified
  REGION 1..544: note = Human gut metagenome
MKQKKQKVMVYILNKKGKPLMPTTRCGHVRKLLDSKKAVVVNSNPFTIRLKYDTPNGVQDVFAGIDSGRENIGSGVSNEDGDCLYLGELRTSNKSIKMKMTERVGFRRERRKHDRQNKQRKARKDHTEIQNGNADICRTTISCKSVQISYPAAEKSVTHKIIRGKEGKFANRHRDGDWITPSARQLVQMHMNDLKSMCKILPISHVTLERVAFDFQKLENENIKVWEYGKGKLYGYDSPEEYIHDVQNGKCLVCGKPHIDYLHHIIPRSKGGSDKVSNIAGLCYDCHYGPIGVHNCQDTQDRLPELKNEVNKQYKVSLLNSVMPVLIEEMDKFCKANSIMFSICEGHDTAKVRDMYDLQKDHCIDGFAISLVDRNVKSVDVMPDRIYQKQRYKKKSKNIIQKRNCREYYDDKKLVAVNRHKGTDQKADSLEEYMNTYAETHTTDECKKHFDSLVVKPARRTYTFHKEWRICPFHIGDKVRYEKKNKIKGNTKVDTFICEGIRFVKDENKAEVKHNKTKSKKMKFCRVLESGCTPYVDYRKLALM

SEQ ID NO: 3717 - protein, 427 aa, Tolypothrix sp.
MSKIFVIDQNKRPLDPIHSAQARQLLRNKKAAVFRQFPFTIILKESRPDSPVSSLRLKIDPGAKHTGIALVNDASGEVVFAAELKHRGFSIHNALTSRRQLRRSRRARKTRYRKPRFLNRTRPEGWLAPSLQSRVDNIKTLVDKLRRFAPITAISQELVRFDMQLMSNPNIQGEEYQQGTLQGYETREYLLEKWGRQCAYCGVKDVPFQVEHIHPRAKGGSNSISNLTLSCEKCNTKKGTKDIKDFLKKDPSKLTKILAQAKKPLADAAAVNTTRWALLQTLKSTVLPVETGSGGLTKFNRSQQMLEKTHWFDAACVGKSTPVLMIKGIKPLLITANGHGSRQSCRTDKFGFPNRHVPRKKIHFGFETGDIVSSVVTTGKKVGQYVGKVAIRSSGSFNISTKNGLIQGISHKFCKRIHAKDGYSYAI

SEQ ID NO: 3718 - protein, 512 aa, unidentified
  REGION 1..512: note = Human gut metagenome
MSTVYVLNKNGKPLMPTTRCGRVRHLLKEQKARVVTSNPFTIQLLYETDDVVQPLYLGIDPGRTNIGVAVVKTDGTAVFTAHLETRNKEIPKLMQGRKKARRARRTNGRRCRRQRRAKANDTISKKCVKQDTAQSGSASKRAKKIGVIKRHLPGCEKGVLCIGIKNKEAKFSNRTRPEGWLTPTANQLLQTHINLVKKIRKFLPISDVVLEINKFAFMQLDNPNIQKWQYQQGPLYQKASLEEAVSEMQEHHCLFCKKPIAHYHHVVPQSENGSDTIGNIIGLCTKHHDLVHKDTAWQKKLAKKKTGLNKKYGALSVLNQIIPALTKGLGSRFQGHFYVTTGKSTYDYREVHGVSKDHWLDAYCIACSVLPNDVCDSDINNRVPYELKQFRRHDRRALHKANINRVYTLNGKSVATNRHKAIKQTTDSLEEFRQCQPDDVCKLKVKEHHPAYRNLNRNYPGSVFLVDGQVHVMQGVSGSHNGKADGYYNTNGNAYPYYKCKFVVKNEGIVFA

SEQ ID NO: 3719 - protein, 419 aa, unidentified
  REGION 1..419: note = Human oral metagenome
MLVYVISKDGQPLMPTERFGKVRRLLKEKKAKVVRRCPFTIKLLYEPETCIVQEVVLGQDTGSKYVGTACVANGRVLYQSEVILRDNIKKKMDSRRALRRNRRYRKTRHRKARFLNRANSKKKDRLPPSVRSKVQSHIDEIEFCKKILPISKIILEVSQFDTALMKNPSLINDKVKRWGYQKGFNYRYSSRREAVIHRDNYTCQCCSKKHVRFEVHHIIFRRQGGSDDESNLITLCKECHDAIHSGILVLTKKPKKLNLKYATLMSIIRSQLLKIYPDAIETIGFVTKTNRENLNLSKEHYIDACVIAGGGKKFKLNDIIYQKRRVAKGDYKLTRGSRSQQKLPVGKIQGFRKFDKVKYLKQEYFIKSRMSTGYAKLMDIFSITIDFSYMPKGKKTPKLLNLERISARSTCLCASQRII

SEQ ID NO: 3720 - protein, 512 aa, unidentified
  REGION 1..512: note = Human gut metagenome
MPTVYVLNKDGKPLMPTTRCMHVRHLLKNGKARVVKSKPFTIQLLYETDDVVQPLYLGIDPGRTNIGVAVVKADGAAVFTAHLETRNKEVPKLMKKRKESRCARRTNGRRCRRQRRAKTNGTISKKCVKQTTAQNGSVSKRAKEIGVIKRHLPGCEKDVLCIGIKNKEAKFTNRARPEGWLTPTANQLLQTHINLVKKIQKFLPISDVVLEVNKFAFMQLDNPNIQKWQYQQGPLYQKGSLENAVSEMQEHHCLFCEKPIEHYHHVVPKSENGSNTIANIVGLCTEHHNLVHKDATWQKKLAKEKVGLVKKYSALSVLNQIIPALTKEMNSLFPKHFFVTNGKSTYDYRTAHGVSKDHWLDAYCIACSVLPNDVCDSNINSHVPYELKQFRRHDRRVLHKANMSRVYTLNGKTVATNRHKAIKQTTDSLEEFRQSHPGDVCKLKVKEHHPAYRNLNRNYPGSVFLVDGQVHVMQGVSGSHNGKADGYYNTNGNAYPYYKCKFVVKNEGIVFA

SEQ ID NO: 3721 - protein, 480 aa, unidentified
  REGION 1..480: note = Human gut metagenome
LYTKPLDNIGEGSLPPSGEINLKGMTFMVYVKSIDGKALMPTSNSKARKLLKQKKAKVVSLRPFVVKLTYKTKTEYTQKLNLGVDSGYSNIGFSVIDAKQEYIAGEVKLLEGMKKRLLEKASYRRIRRSRLRYRKARWNNRVKSKKKGWLAPSLKHKLDTHIKFIDYLKNILPIGKITIEVANFDIQKMKDDLISGIDYQNGDMFGFWNVREFVLHRDGHKCQNPNCKHKDKKEQILKVHHIRYRSEGGSDRPENLITLCSKCHTPANHKKGKFLYDWCVNGKKVRGFKDATFMSIIRWYLVNELKSKHNNVSITYGYITKNHRIQNGIEKSHLNDAFAIAKGTNQARTKDRFLVIQDRLKNRSLEKFYDSKIIDIRTEKKVSGGDLNCGRSTRNKNLNTENLRKYRGVKISKGQRRIRKQKYFYQPNDLVKYDGKVYTVKGTQNEGKYIALKEIKKVPKVELLIPYVFKKGLNWSYGLC

SEQ ID NO: 3722 - protein, 412 aa, Moorena sp.; identical to SEQ ID NO: 3610

SEQ ID NO: 3723 - protein, 470 aa, unidentified; identical to SEQ ID NO: 2825
  REGION 1..470: note = Human gut metagenome

SEQ ID NO: 3724 - protein, 427 aa, Scytonema sp.
MSKVFVIDTDKRPLDPIHPAQARQLLRNKKASVFRRFPFTLILKESRFESPVLPLRLKLDPGAKITGIALVNDATGEVVFAAGLKHRGFAIRDALTSRRQLRRSRRNRKTRYRQPRFLNRTRPQGWLAPCLKSRVDNIKTWVEKLRRFAPVEAISQELVRFDMQLMRNPDIQGKEYQQGTLAGYETREFLLEKWNRQCAYCGVKDVPLQIEHIHPRAKGGSNSITNLTLSCEKCNTKKGSKDIKEFLKKDPLRLEKILKQAKIPLADAAAVNGTRFTLLSTLKATGLPVETGSGGLTKFNRSQQNLPKLHWLDAACVGKSTPILDIKCVKPLMITANGHGTRQMCGTDKFGFPNRHRTNKQIHFGFQTGDIIKAVVTSGKKVGVYVGRVLCRATGSFDIATKTGRISGISYKYCSATHKKDGYSYGF

SEQ ID NO: 3725 - protein, 515 aa, unidentified
  REGION 1..515: note = Human gut metagenome
MATVYVLNKDSKPLMPTTRCGHVRYLLKEKKARVVRANPFTIKLLYETDDVVQPLYLGIDPGRTNIGVAVAKGDGTAVFTAHLETRNKEIPKLMAKRKEYRQGRRHYRRCKRQRRAAAHGTLSKRCKKQDTAQGSNISERAQKIGVFERNLPGCEKPVLCIGIKNKEARFNNRVRPAGWLTPTANQLLLTHINFVKKICKYLPISDVVLEINKFAFMALDNPNIQKWQYQQGPLYQKGSLENAVSEQQDHHCLFCKKAIEHYHHVVPRSENGSNTIANIVGLCTKHHDLVHKDTAWQKKLAKKKTGLNKKYGALSVLNQIIPALTKELSSRFQGHLYVTTGKSTYDYRAAHGVSKDHWLDAYCIACSVLPDGCFDNTVNSRIPHELRQFRRHDRQVCHQQNAKRKYYLDRKLVAINRHKATEQKTDSLEEYRNNGGATDKLVVKEHKPTSKRLNRILPGALMTANGKLNVMVASKGLHNGIPDYYVFADNSEAKPTKYTLINKNKGIVFVLNSVS

SEQ ID NO: 3726 - protein, 470 aa, unidentified; identical to SEQ ID NO: 2825
  REGION 1..470: note = Human gut metagenome

SEQ ID NO: 3727 - protein, 380 aa, Ktedonobacter sp.; identical to SEQ ID NO: 3640

SEQ ID NO: 3728 - protein, 425 aa, Planktothrix sp.
MSNYVFVINTNKQPQNPLHPAQARLLLSQGQAAVYRRYPFTIILKESKPESETEHLTLKIDPGSKTTGIALVQGNKVIWGAELTHRGQAIKMSLESRRSLRRSRRNRHTRYRQARFLNRTRQKDWLAPSLQHRVKTNLTWVNKLIKIAPIGSIIQELVRFDLQQLENPEISGIEYQQGELQGYEVRQYLLEKWQRKCAYCGIENVPFQVEHIHPKAKGGSNRISNLCLACEKCNLKKGTQSIEEFLIKKPDVLKRILSQAKRPLKDATAVNSTRWSLFNRLKETGLPVETGSGGLTKFNRTRLNLPKTHWIDAACVGKVKTFKVLTNKPLLIQATGHGSRQMCRTDKFGFPSLYIPRFKFVKGFQTGDIIKAVVTQGKKIGTYIGRIAVRSTGSFNVSTSPGLIQGINYKYCRKIHRKDGYFYSF

SEQ ID NO: 3729 - protein, 551 aa, Moorena sp.
MNDASLGGPCIGENRKETMSRVLIVDQQRRPLMPCTPARARLLLKQKKAAVLRRCPFTLILHESRPEAVVQPLRLKIDPGSKVSGLALVNDTSGEVVWAAEVTHRGEQVHKDLQKRAGVRRGRRQRHTWYRPARYLNRRRPKGWLPPSLESRVQNVETWTQRLIFWAPVGSLSYEAVRFDTQALQNPEIEGTQYQHGTLAGLEVKEYLLLKWGQRCAYCEKMGLPLQVEHILPKIRGGSNRVTNLTLACEQCNGKKGNQTAEEFGFPHLQAQAKAPLKDAAAVNSTRRVLHQRLMRTGLPIEASSGGHTKWNRGERDIAKTHWLDAANVGPSTPARLLFQHVRPWLIEANRRQDRQLCLVNALGFPRSKPKKKSPKHDFRTGDIVRAVVPAHLENPGIYVGRMAAKASGAEQRKGACGFLPIPSKGMGTCRIRSMANSHRQEKLGELIAVELSDLMRTRLKDPRVGFASITHVEVSGDFRHAKIFVSVMGSPEDQAATMKGLKHASGYLRHELAERITLRYMPELVFKLDTSIAEGAKVLELIRQNEQEQH

SEQ ID NO: 3730 - protein, 426 aa, unidentified; identical to SEQ ID NO: 3614
  REGION 1..426: note = Human gut metagenome

SEQ ID NO: 3731 - protein, 411 aa, unidentified
  REGION 1..411: note = Human gut metagenome
MVYVQDIDGKPMMPTTRHGKVRRLLKDNKAVVVNTCPFTIKLTYKTSDYKQEIVLGVDSGTKHVGLSATTKSKELYASEVILRSDVVDLLSTRRGLRGTRRSRLRYRKQRFNNRVKSKKDGWIAPSVRHKIDSHIRIISFVYSILPVSKLIVEVAQFDTQKIKNPEISGKEYQEGEQLGFWNVREYVLARDGHKCQHCKGKSKDPILNIHHIESRKIGGDSPSNLITLCETCHKEFHKGNIKLKVSRGKSLRDAAVMGIMKWKLYEELKSKYDNVSMTFGYITKYNRINHGIEKSHVSDAFVISRNFNSCRLGYYYKRKLVRRHNRQIHKMKILKGGIRKRNQAPFKVFGFRLFDKVMFQGEEHFIYARRLSGQFNIRDINGENKKDVSCKKLKYVSHGLVSVKTNLFLSQ

SEQ ID NO: 3732 - protein, 412 aa, Moorena sp.; identical to SEQ ID NO: 3443

SEQ ID NO: 3733 - protein, 277 aa, unidentified
  REGION 1..277: note = Human gut metagenome
VETAEFDLQLLKAVAEGKPVPQGEDYQKGEMYGHYNVRQYVLWRDSYTCRICGMHGSVRKGVPLHVHHLESRRVGGDAPDNLVTLCTACHDKLHKGIIMAADIKKRKRRSTRDATFMGIMRMTLLRRLREQLPVPVVETRGYITKATRENLLVLPKSHANDALAIAHGPQGFRAEHLPNIRQADRLYTIRPVRHHNRQLLKATILKGGVRKTNQAEKYICGFRLYDKVLYNGIECFVWGRRTSGSFLLRQLNGEKVKDGVSYKHLKLLERSQSYLVA

SEQ ID NO: 3734 - protein, 425 aa, Nodularia sp.; identical to SEQ ID NO: 3165

SEQ ID NO: 3735 - protein, 423 aa, Arthrospira sp.
MSNHVFVLDTNRKPLTPCKPGVARSLLKAGKASVFRRYPFTIILNKEVDANPEPLELKLDPGSKVTGIALKQGNHIIFAAELQHRGQQIKEALLSRRQLRRSRRNRKTRYRPARFLNRTRSKGWLAPSLQHRVDTLMTWVHRFRRLAPVGCIAQELVRFDLQLMENPEISGVEYQQGELQGYEVREYLLFKWDRTCAYCGAQNVPLEVEQIQPRSKGGSDRVSNLTMACHSCNQAKGNGDIRDFLSSQPDVLSRLLRQAKSPLKDAAAVNSTRWALFKALKATGLPVTTGTGGQTKFNRLRLNLPKAHWLDAACVGPVESLEVLTSKPLLILAKGHGTRQMCGTNKYGFPNRHRSRRQIHKGFETGDMVTATVTAGKKIGSYLGRVLCRASGSFDITTASVRVAGISHKYCQPIHRKDGYAYA

SEQ ID NO: 3736 - protein, 442 aa, Anaerostipes sp.
MVTVQQSTHHLPFGRVFIRRNLFMVYVISQDGKPLMPCSDPIARLLLKQGKAKVKKREPFTIKLTYETTNHTQGLTLGVDTGSGTIGTAVSKDNGDIVYMSEVVARNDITDKMTQRAKYRRNRRNRKTRYRKARWLNRASSIKKDRFSPTMQSKLHSHVREIEYIQSILPVTEMVFETGQFDMQLMKNPSLANPKVRPWGYQKGANYGFENTKAMVLNRDNYTCQCCKGKHKDSKLEVHHIVFRSQGGSDEESNLLTLCHTCHKDLHSGKINPKLSGKVKGNLKYATQMNSIRKQLFRFYPNAIETFGYVTKANRLHLGVDKEHYYDACTIATQGNAFNVKSNLYKKKCVSDGDFQKTKGIRSEQPIVTDKICGFRKFDKVRYFGNDYFIKGRMSTGYAILMDIDGNKIDFSTMPRGYKTPKLSNCKRITARSTVMTQVKVV

SEQ ID NO: 3737 - protein, 447 aa, Marinobacter sp.
MSVFVLDRRKHPLMPCTERRARLLLDRGRAVVVRAYPFTIRLKDRIGGIIQPVRIKIDPGSKTTGIAVVRESGQKQHVLALMELAHRGRPISKSLEQRRAFRRRRRNQLRYRAPRFLNRTKPKGWLAPSLQHRVDTTRSLVNRLRALAPVTAISQELARFDTQKMENPEVSGVEYQQGTLLGYEVREYLLEKWGRECAYCTDKDTPLQIEHIDPKANGGSNRISNLTLACRPCNQEKDRQSLVSFFATSKRLKNHQARLDRILKQCKKPLRDASAVNSTRWALHQTLKQTGLPVEVGTGGRTTFNRQRLGISKTHALDAACVGEVEIVEGWDVPTLAIKATGRGSYKRTRLTKHGFPRGYLMRQKQVQGFQTGDMVRALVPTGTKTGTWVGRVAVRKTGSFNIQTNSGAIQGISHRHCVLTQRADGYGYHIQPNQPKEEGDRKNESR

SEQ ID NO: 3738 - protein, 412 aa, Deinococcus sp.
VPPGTRQGVAARKEGRRVQAVSVHDHSQGARRRRDAAPIQIKIDPGSKTTGIALVGDFKRGKKVLWGANLTHRGLAIKMKPEARRSLRSSRRSRKTRYRKARFLNRTKPKGWLAPSLMHRVFTVDPWVTRLAKWTPADQISIERVRFDMQTMENPEIQGTEYQQGTLHGYEVKGYLLHKWGHQCAYCREKDVPLEVERIQPRSKGGSDRVSNLTLACVPCNQKKGSKPVEQFLAKKPDLLKRILGQAKAPLRDAAAVNATRWKLYETLKVSGFPVEVGTGGRTKFNRTHQGFSKNHWIDAACVGESGERLRLPILKPFQIKCMGRGNRQACKTDEHGFPNKWRTRQKVFFGFQTGDMVRADVPSGKNAGHHTGRVSVRAKGSFALATKDGKKDGINHRFFSTIQRQDGYSYA

SEQ ID NO: 3739 - protein, 515 aa, unidentified; identical to SEQ ID NO: 3339
  REGION 1..515: note = Human gut metagenome

SEQ ID NO: 3740 - protein, 429 aa, Ktedonobacter sp.
MSNVFVIDTDYNPLDPVHPGYARRLLKQGKAAVYRRYPFTIVLKRVVEEPQMQPLRLKLDPGSKTTGIALVDDGNGKVVFAAELAHRGHAIKESLDDRRVVRRNRRNCKTRYRKPRWQNRRRKKGWLPPSLESRIANILTWVARLCRLAPITALSMELVKFDLQQIENPDITSVEYQQGTLQGYEVREYLLEKWERTCAYCSVQNVPLQVEHIHPRAKGGTSRISNLTLACEPCNKAKDTLDITVFLAKKPEVLKHILAQVKRPLKDASAVNATRWAVLQRLKALGLPVECGSGGLTKYNRTTRGLPKTHWLDAACVGKSTPVGLSHTGIVPLQIKAMGHESRQMCVVDKYGFPKQHKQRKKTFLGYQTGDMIKAMTPKGTFEGRIAIRHRPSFRLGKRDIHPKYLRCVHRADGYEYIQKGVRHAPPHD

SEQ ID NO: 3741 - protein, 512 aa, unidentified
  REGION 1..512: note = Human gut metagenome
MSTVYVLNKDGKTLMPTTRCGHVRHLLKKQKARVVTSNPFTIQLLYETDDVVQPLYLGIDPGRTNIGVAVVKADGTAVFTAHLETRNKGIPKLMKKRKDSRRARRTNGRRCRRQRRAKANGTISKKCVKQATAQNGSASKRAKKIGVIKRHLPGCEKEVLCIGIKNKEAKFNNRTRPAGWLTPTANQLLQTHINLIKKIQKLLPISDVVLEINKFAFMQLDNPNIQKWQYQQGPLYQKANLEEAVSEMQEHHCLFCKKKIDHYHHVVPQHKNGSNTIDNIVGLCTKHHDLVHKDTAWYEKLTKKKTGLNKKYGALSVLNQIIPALTKGLSSLFQKHFFVTTGKSTYDYRAAHGVSKDHWLDAYCIACSVLPNDVCDSNINSHVPYELKQFRRHDRRALHKENINRVYTLNGKKVATNRHKAIEQTTDSLEEFRQNHPDDVCKLKVKEHHPEYRNPKRNFPGCVFLVGKRTHVMQGTSGSHNGKADGYYDTNGNSYPSGKCKFVAKNKGIVFA

SEQ ID NO: 3742 - protein, 408 aa, Moorena sp.; identical to SEQ ID NO: 3580

SEQ ID NO: 3743 - protein, 427 aa, Anabaena sp.
MSKVFVINTDKQPLNPIHSAQARQLLRNGKAAVFRRFPFTIILKESRPDFSVSPLRLKIDPGAKHTGIALINDTTGEVVFAAELKHRGFAIRDALTSRRQLRRFRRTRKTRYRQPRFLNRTRSLGWLTPSLQSRIENIKTWVKKLSRIVHFVAISQELVRFDMQLMANPDIQGREYQQGTLAGYETREYLLDKWDRQCAYCGVKDVPFQVEHIHPRAKGGSDSITNLTLSCEKCNTKKGTKDIKDFLKKDPSKLEKILKQAKRSLADAAAVNTTRFVLLFVLKATGLPVETGSGGLTKFNRSQQKLEKTHWIDAACVGQSTPILNIKGVKPLLITANGHGTRQSCRTDKHGFPNRYCSRTKFHFGFQTGDIVKSVVKTGKKVGEYIGRIATRATGSFNISTRNGLLQGISYKTCKTIHKKDGYSYSN

SEQ ID NO: 3744 - protein, 462 aa, unidentified
  REGION 1..462: note = Human gut metagenome
MSVLVIGRNGRALMPTNPRKARLLLKKKTASVVCRHPFTIQLLYKTGCATQEGCIGIDTGSQHIGVGITCGDRVILKDEHALRSSMEKRSLLATRTVMRRGRRYRKVRYRKPKWRHHTKRMYFEKANRRGQHWRKVKTTTQSPRQKGWLPPSLQSKCDHHFRIIDRYLKYLPDPITRNLVIEAGRFDMARMNDPTIHGEMYQRGPMYDAENLRAYIFARDNYQCACCKAKAGTTRKADGTTVKLVAHHILFRSRGATDNPKYIISVCDHCHTTKAHQPGGILYSWMENNKKVARGLRDATFMNILRKRLFARYPQAAFTYGNITAADRKQLRLPKSHANDAVAISLFGKEASTVKNICQTMHYKQIRKSKRSLHEAIPRKGRKNPNTKAVRNKKNTTQANGFKLWDSVLADGKKLFICSFTGTSAYLIDKNGCYISQPGKTYKQWPLSKLKRLHPNGNWLMA

SEQ ID NO: 3745 - protein, 464 aa, unidentified
  REGION 1..464: note = Human gut metagenome
MYVFVIGLDGTRLMPCKPRKARKLIEAHKAEIYKKQPFTIRLLYKTGCASQPITLGIDTGSQHIGIAVTSENKVLYQAEIELRSTMDKRSLMETRYSYRRSRRYRKTRYRSPKFRFHTKRTYSETLVKRKTTGIMTHWVKHTNSMSTNRPDGWLAPSMQSKVDHHIRWINRFLDVLPPDTKLRLEIARFDMARMKNPEVHNELYQHGPQYDYENLKAYVFDRDHYKCVVCKRKLGSKQPDGHSLKGMMHHITFRSKGATDNPDQLVTVCEYCHTPQAHKEGGVLWDLKEKHKSVQRGLRDATQMNIIRTRLVKAFPDAELTYGNITAADRKKMHLPKSHAGDAVAIAMKGEDVNICEPTVYIKQIRKKKRSLHEATPRKGRKKPNTQAVRNPKNTKSIGIYHIYDTVRFQNETGFISGFTGKSAYVQDFDGNYITMPGKSYKQINLSSLELVKHNNNWIQKTRN

SEQ ID NO: 3746 - protein, 431 aa, unidentified
  REGION 1..431: note = Human gut metagenome
MPDKVYVISRLGHPLMPCSPAKARHLLDDGKAKVVKRTPFTIKLLYGSTEYTQPVILGVDAGSKTIGLSASTTKEELFAAEVMPRNDVVENLSTRREFRRARRNRTTRYRKPRFNNRVHSKNNGWLAPSVEVKIQEHITSIKRVCAILPISKIVVETAEFDLQLLKAVQDGKPVPEGEDYQKGEMYGSYDVRQYVLWRDNYTCTCCGVKGTDKKPVKLHVHHFESRKHGGNAPDNYGTLCEDCHKKLHLGIITDISRKTRKRPSTRDAAFMGIMRKTLMQRLITGLSIPVAETKGYITKAAREEILKLPKTHTNDALAIAQGRHGFGIREQAYVKPTNRIYTVRPVRHHNRQLHKATMLKGGIRKLNQASKYIFGFRLYDKVLYQGGECFVWGRRRSGSFLLRTIDGTKVKDGVGYRNLTLLERSTNYLIA

SEQ ID NO: 3747 - protein, 406 aa, Geobacillus sp.
MPCSPRKARLLLKQKKAKVVRRTPFTIQLLYGSSGYKQPVSLGVDMGTRHVGISATTKKDVLFEAEAQLRTDIVELLAIRRQFRRSRRNRKTRYREARFLNRRKPEGWLPPSIQHKINSHIKLIDLVHNILPVTSVTIEVAAFDTQKLKNLNIRGVEYQQGEQMGFWNVREYVLYRDNHTCQYCKGKKKDPVLQVHHIESRKTGGDSPDNLITLCKTCHHEIHEKGLEHIFQRKRPPMRDASQMTAMRWAMFSRIREKYSHANITYGYITKCIRIANGLSKSHMVDARCISGNPLAKPSGTVYLLKFVRKNNRQLHKATILKGGKRKSNKAPRFVKGFQLFDKVVYERKECFIFGRRSSGYFDLRLLDGTKVHASASWKKLKRVEHASTLLIERRKGDSSPTFALA

SEQ ID NO: 3748 - protein, 551 aa, Moorena sp.; identical to SEQ ID NO: 3229

SEQ ID NO: 3749 - protein, 427 aa, Moorena sp.
MSNFVLVLDTNKKPLTPIHPGDARFLLNQQKAAVFRRFPFTIILKEPKSEVPTQPIELKIDPGSKTTGFALVQNNKVIWGMELQHRGLAIKESLETRKGVRRGRRSRHTRYRQARFLNRTKPQGWLAPSLSHRVLTINTWVKRLCNFAPITDIVQELARFDLQQLENPEISGFEYQQGELQGYEVREYLLNKWNRKCAYCTAENVPLQVEHIKPKAKGGTNRISNLCLACEKCNIKKGTQDIEKFLVKKPELLKQILSQAKCPLKDASAVNSTRWALFNKLKETGLPITTGSGGLTKFNRTRLGLSKTHWIDAACVGKVETLKILTTKILTVKSTGHSCRRFCRINKFGFPCTEPKKIFTHVSTGDFVKATLHKDRKNITSGKYVSRVKTPTKNGCEIVINGFRVEFSTMKDITRVHCSDGYSYSYV

SEQ ID NO: 3750 - protein, 324 aa, Parasutterella sp.
KTRYRAPRFDNRIRTKRKGWLAPSVENRINAHLSRIKAVLRLLPVTKITVETASFDLQLLKNPDISGKEYQEGEQLGFWNIREYVLCRDGHVCQHCYGRSKDPVLNVHHLKSRRMGGDSPGNLITLCETCHKALHRGEITLKAKRGQSFRAEAFVGIMRWEVHNRLRALHPGIEVSNTYGYRTKHARIANGIAKSHCADAFCIAGNLGAERLCEFFFQKQTRRNNRQIHKLSILKGGIRKRNQAPFEVKGFRLFDKVACQGEEGFIFGRRSSGFFDVRKLDGTRISAGISCKKLHLLEKRRTYLTEIRKEEALPPLPEGRGLRA

SEQ ID NO: 3751 - protein, 413 aa, unidentified
  REGION 1..413: note = Human gut metagenome
MTSYSFVLDANGKQLAPTKEPKAWFLIRKKRAALVSKYPMVIQLKKKIQENEICKDEIRCGIDDGGLHVGIALVQKCKSKNKVVFKGTIEQRNDVKHLMEVRRNYRRYHRYHKRYRQARFDNRKSSKRKGRIAPSILQKRQATIRVINRLNKWINITNYWLEDVSIDIRVLTDGYKSYSWQYQKSNRLDENIRKATILRDGGKCMECGKSNCRLEVHHIKPRRRNGSNTLDNLITLCESCHQKTEGQEELYMDRYFSLLKSSDNKNLNYAQHVMIGKMWLRKQLSGLGVLYLTSGGDTANKRIDWNIEKSHTNDAVCITDLQPDTCDIKEWAIKPMRRQSKAKTDHVLGIHHRDLVEYTFKNGETHRGYVTALYPDQKAINFQSQTKHCKKVNARKCKLLWKYSKIYWFENAS

SEQ ID NO: 3752 - protein, 458 aa, Nitrosococcus sp.
MGVFVLDKNRQPLMPCQPARARKLLREGKAAVFRCYPFTIILKERAGGTTQPISLTVDPGSKTTGISLNAQFNSGTVCIFAMQLEHRGRQIKESLDSRRGVRRSRRNRNTRYRQPRFLNRSRPKGWLPPSLLSRVDNTETWAERLVRLAPICSANVEIARFDLQLLENPDITGIEYQQGTLYGFELREYLLARHQHTCAYCHGLSKDSILEIEHILPKSLGGTDRVGNLVVACRTCNQHKNNLHPQAWADACRKRKNKLEQQRSLAMRAILKGHRPTLKDAAAVNATRYAVGRVIKQLIPDIRFCSGGQTKRNRTLQGYPKAHWIDAACVGEQGQQVRLECSGYLQVSAKGHGARQQCRMDKYGFPRTSAKAARTVQGFRTGDIVEARVPTGKKAGHYIGRVAVRSSGFFNITSQRIVTQGISYQYCRTLHRCDGYGYGYVIDTQIASTQQEDAGEAA

SEQ ID NO: 3753 - protein, 425 aa, Nodularia sp.; identical to SEQ ID NO: 3165

SEQ ID NO: 3754 - protein, 634 aa, Nocardiopsis sp.; identical to SEQ ID NO: 3305

SEQ ID NO: 3755 - protein, 406 aa, unidentified
  REGION 1..406: note = Human gut metagenome
MVYVQDIDGKPMMPTTRHGKVRRLLKDNKAVVVNTCPFTIKLTYKTSDYKQEIVLGVDAGTKHVGLSATTKSKELYSGEVILRNDVVELLSTRRESRRARRNRLRYRKPRFENRVKSKRLGWVAPSVRHKVDAHIRVIDNICSTLPISRIIVEIAQFDTQKIKNPDISGNEYQEGDQLGFWNVREYVLARDGHKCQHCKGKSKDPILNVHHIESRKTGGDSPSNLITLCETCHKEYHKGNIDLKVKRGKSLRDAAVMGIMKWKLYEELKSRYPNVSMTFGYITKYNRIKYGIEKSHTSDAFVISRNFNAKRIERQYLNRLIRRHNRQIHKMKILKGGKKKNNQAPFEVFGFRLFDKVLYNNEICFIYGRRKSGCFDIRDFDGKNSKNVTYKKLKLIRGKRYPIILK

SEQ ID NO: 3756 - protein, 419 aa, unidentified
  REGION 1..419: note = metagenome
MIYIRSKDGKALMPSERGGRIGYLLRHAKAHVVSRVPFTVQLDYESTTYTQEVSLGVDAGSKHIGVSASSEKKELLVAQVELRNDVVNLLSTRRELRRTRRNRKTRYRKARFDNRKKKDDWLAPSVEQKVDSHLKVIRLVHGLLPITNTTIEVAQFDAQKIKRPDIKGEEYQQGEQMCFWNVREYVFARDGHRCVHCKGKSKDPILNVHHLESRKTGGNSPSTLVTLCEPCHKAYHRGEFELKIKRGNSLRDAAVMNNMRWAVYKRANEEFGNVHLTYGYVTKHTRIENGIAKTHAADAFCIAKNINAMRLRTFYLCRCVPRHSRALHVANPKKGGIRRSTIASHKIGKSRFQRFDMVRWKGKESFIFGSTNGRPVLRDIEGYKMHENASVNIKTIKFLKRLRNNILVEEKDFRKLNML

SEQ ID NO: 3757 - protein, 518 aa, Nocardiopsis sp.
VLPQQLDLEFESADNPRIGGETGLERRRAPGAEHVRGETPGSAPAAGRVTPNQQVRESAGREARTIHPVVFALDKHGRPLQPTSPARARKLLKKRRAVVPRHTPFVIRLKDREAAESGIDGVELGIDPGSKHTGIAVFTEQKRSKRRGLYSIDLEHRSRRIRDKLTQRAAYRRSRRTRNLRYRAPRFLNRTRPDGWIAPSLRHRVDTTTAWAARLARWAPVRTVHVERVAFDTHAISAGRPLEGAEYQHGTLAGIEAREYLLTKWGRACAYRGITGVVLNIDHIQPRSRGGSDRISNLTLACIPCNKRKSNRPVEEFLEQKPQRLAGILAHAKAPLRDAAAVNTTKWALWRALEAVFPAVRTASGGRTKWNRARCGLPKTHTLDALCIGHMEAVDRHPRTVLAVQATGRGSYTRTRTDKYGFPRLRLPRHKTFFGFQTGDLGRATVPAGKKAGTHSGRIAVRASGSFNVTTAHGLAQGINHKHFRLLQRADGYAYTTQKEGGGFLPGLKARVSAPDIR

SEQ ID NO: 3758 - protein, 424 aa, Parasutterella sp.
LRVFVLNKRGKPLMPCSPAKARHLLKEKKAIVVRRTPFTIQLTIATGESKQPVSLGVDAGYKYVGLSASTEKAELYASEVELRQGITDLLSARRALRRARRNRKTRYRAPRFDNRIRTKRKGWLAPSVENRINAHLSRIETVLRMLPVTKITVETASFDMQLLKDPDISGKEYQEGEQLGFWNVREYVLFRDGHVCQHCHGRLKDPVLNVHHLKSRRTGGDSPGNLITLCETCHKALHRGEITLKAKRGQSFRAETFMGIMRREVLDRLKASHPKLEVQNTYGYRTKHARISNGIAKSHCADAFCIAGNLGAKRLGEFLFQKQTRRNNRQIHKLSILKGSLRKRNQAPFEVKGFRLFDKVAYQGEEGFIFGRRSSGFFDIRRLDGTRISAGINYKKLRLLEKRRTYLTEIRKEEARRPLPEGRG

SEQ ID NO: 3759 - protein, 414 aa, unidentified
  REGION 1..414: note = metagenome
MVYVINKQGQALMPTERFGKVRRLLKNSLAHVVCRIPFTIQLDYDTTDYTQPVSLGVDAGSKHIGISATTSEKEMYAADVELRNDIVDKLSTRREQRRTRRSRLRYRKARFNNRVSSKRKGWLAPSVENKIQTHLTVVEKIHKFLPITNIVVETASFDIQKINNPSISGSEYQQGEQLDFFNVREYVLFRDNHICQHCKGKSKDKVLNVHHIESRKTGGDSPNNLITLCETCHKAYHRGEFKLNIKRGKSFRDAVFMGIMRWGFYDRLKNIYPNVSMTFGYITKNARITNNLPKEHYVDARCISGNPTAKPLGYYFYQKKVRCQNRQIHKANFLKGGRKKLNQAPFLVKGFRLFDLVEYQKELYYIFGRRSNGSFDIRKLDGTKVNKGSINCKYLRLISTRKSILTEKRTQVNL

SEQ ID NO: 3760 - protein, 430 aa, unidentified
  REGION 1..430: note = Human oral metagenome
MVFVLNKSKKPLDMISHAKARILLKNRLAVVHKIYPFTIRLRDNSCVSNDRAYTVKIDPGSRYTGIAIVDDKNSVVMLAELEHRGYLIKRNLDKRRSLRQSRRERKTRYRPARFLNRTKPKGWLTPSIKSRADNVINFIKKYKNVLNIDKVMIENVIFDTAQMTSDDNLVGTAYQQGPLYNTNLREFIFSKTKGRCSYCGAKATEIDHIVPRAKGGSNSTYNLTPACSSCNKKKSNLSLKDFGKLVGKDFSHLKSKKLPKNAAIVQAAKNYMFKEISKLVSDTTTHDSWMTKYNRDELGLPKQHYYDALSVGEVPNKFNFLTDKALQISAKGRGSRQMCHVDKYGFPRTLAKTSKTARGFQTGDMVKAIVPTGSKAGKYFGKVAIRSRGCFNIETERGLVKDIWYKYCRLIQRGDGYSYNYKASARQSKN

SEQ ID NO: 3761 - protein, 343 aa, unidentified
  REGION 1..343: note = Archaeon sp.
MQKLLVELKNTSGDALQTPCSVSETLNREGTLSVPCTVLANNNSDEDLHYGKSGQDLRVPVINMRGEVLMPTRPRKARILLKQKKATVVQRSPFIIQLKYPIGENKQALTLGIDSGYTTIGFSAVTEKSELISGELTIRKRISKLLEQRSSYRQTRRSRLWHRKPRFNNRSIAKGWFTPSIQHKLNTHLRLIEKLKKILPITKVIVEVASFDTHNLQNPEIKGVEYQLGELQGYEVREYLLEKWKHKCAYYGKSNLPMEIEHIIPKIRGGTDRVSNLTLACHKCNQKKAKQTLKATAFMNIIRWRLVNTLKCDWTYGYITKHDRIEIGLKKSHVNDAFASGKN

SEQ ID NO: 3762 - protein, 411 aa, unidentified
  REGION 1..411: note = Human gut metagenome
MVYVQDIDGKPMMPTTRHGKVRRLLKDNKAVVVNTCPFTIKLTYKTSDYKQEIVLGVDSGTKHVGLSATTKSKELYASEVILRSDVVDLLSTRRGLRRTRRSRLRYRKQRFNNRVKSKKDGWIAPSVRHKIDSHVRIISFVYSILPVSKLIVEVAQFDTQKIKNPEISGKEYQEGEQLGFWNVREYVLARDGHKCQHCKGKSKDPILNIHHIESRKIGGDSPSNLITLCETCHKEFHKGNIKLKVSRGKSLRDAAVMGIMKWKLYEELKSRYDNVSMTFGYITKYNRINHGIEKSHVSDAFVISRNFNSCRLGYYYKRKLVRRHNRQIHKMKILKGGIRKRNQAPFKVFGFRLFDKVMFQGEEHFIYARRLSGQFNIRDINGENKKDVSCKKLKYVSHGLVSVKTNLFLSQ

SEQ ID NO: 3763 - protein, 429 aa, Ktedonobacter sp.; identical to SEQ ID NO: 3740

SEQ ID NO: 3764 - protein, 292 aa, unidentified
  REGION 1..292: note = Human gut metagenome
LSRIEAVLRLLPVTKITVETASFDLQLLKNPDISGKEYQEGEQLGFWNIREYVLCRDGHVCQHCYGRSKDPVLNVHHLESRRTGGDSPGNLITLCETCHKALHRGEITLKAKRGQSFRAEAFMGIMRSEVLNRLKASHPELEVNNTYGYRTKHARIANDIAKSHCADAFCIAGNLGAERLGEFFFQKQTRRNNRQIHKLSILKGGIRKRNQAPFEVKGFRLFDKVACQGEEGFIFGRRSSGFFDVRKLDGTRISAGISCKKLHLLEKRRTYLTEIRKEEALPPLPEGRGLRA

SEQ ID NO: 3765 - protein, 574 aa, Nocardiopsis sp.; identical to SEQ ID NO: 3358

SEQ ID NO: 3766 - protein, 421 aa, Moorena sp.; identical to SEQ ID NO: 3386

SEQ ID NO: 3767 - protein, 472 aa, Cupriavidus sp.
MSVFVLDKHGKPLMPCTEKRARLLLERRRARVHRVVPAVIRLVDRTVDDCEFQPLRIKLDPGSKMTGGALVRDTELACSVSGEIRRGAAVLNLFELVHRGGQISEGLTARRSMRRRRRSANLRYRAPRFLNRTRPAGWLAPSLQHRVDTTMAWVQRIRRWAPVNGVSSELVRFDMQAMENPEISGVEYQQGTLAGYEVREYLLEKWRRTCIYCDATDRPLQIEHLTARAKGGTNRIGNLGLACGPCNQDKGAKDIRQYVDDPKRLARILATASRPLTDAAAVNATRWALANALRATGLPLELASGGRTKFNRAAYTIPKTHALDAACVGDVNAITGWQRPTLEVKATGRGSYQRTRLTASGFPRGYLMRQKQVKGFQTGDRVHAVVPSGKKAGTYAGRVAVRASGSFNIQTPNGVVQGISHRHCSLVQRADGYGYHFRTKDSIYKGEAGEGRAAHAALSIPVLKDGVSRASR

SEQ ID NO: 3768 - protein, 616 aa, Salipiger sp.
VPPQHGPLLEAPSVDKPGQARNGADACAGGQHVREETVKRRRHRRGQPSSASGVSRVFVLARNGKPLMPTRPARARRLLKDGRAVVHKTYPFTIRLKDRAEGDTQDVELRVDPGSKTTGMALVRKDEAADDVLHLSEVTHRGGAIRKKMDQRRGHRRRRRSANLRYRKKRFDNRRRAPGWLPPSLQSRVDNVASWAARYRKLVPVTSIAVERVRFDMQMLDNPEVSGAEYQQGTLAGYEVREYLLEKWDRRCAYCNARHVPLQIEHIHPRSRGGSNRVSNLALACEPCNQAKGNKPVEAFLAGKPARLARIRAQAKRPLRDAAAVNATRNATWHALRATGLPVTTATGGRTKYNRAALGIPKTHSLDAACVGEVNSLTGWDQPVLRITAMGRGSHARTRLDRHGFPRGYLMSEKSIHGVQTGDIVKASVPNGRKAGTYTGRVAIRRSGSFNIQTRTGTVQGISHRHCRILQRNNGYGYHIATGNFRNGHWLVKSRVSHVAGFMLPFVVGARPPHHAIQVNPERLSEKRAPRPRTCHEQPAGVIEVRVPATGPLRTGSPVPAQTFSDGLSRSGRPPCRSGTSSRRSTCDGERWPTSAPRRRLPGFALAAVQLASPTP

SEQ ID NO: 3769 - protein, 512 aa, unidentified
  REGION 1..512: note = Human gut metagenome
MPTVYVLNKDGKPLMPTTRCMHVRHLLKNGKARVVKSKPFTIQLLYETDDVVQPLYLGIDPGRTNIGVAVVKADGAAVFTAHLETRNKEVPKLMKKRKESRCARRTNGRRCRRQRRAKTNGTISKKCVKQTTAQNGSVSKRAKEIGVIKRHLPGCEKDVLCIGIKNKEAKFTNRARPEGWLTPTANQLLQTHINLVKKIQKFLPISDVVLEVNKFAFMQLDNPNIQKWQYQQGPLYQKGSLENAVSEMQEHHCLFCEKPIEHYHHVVPKSENGSNTIANIVGLCTEHHNLVHKDATWQKKLVKEKVGLVKKYSALSVLNQIIPALTKEMNSLFPKHFFVTNGKSTYDYRTAHGVSKDHWLDAYCIACSVLPNDVCDSNINSHVPYELKQFRRHDRRVLHKANMSRVYTLNGKTVATNRHKAIKQTTDSLEEFRQSHPGDVCKLKVKEHHPAYRNLNRNYPGSVFLVDGQVHVMQGVSGSHNGKADGYYNTNGNAYPYYKCKFVVKNEGIVFA

SEQ ID NO: 3770 - protein, 431 aa, Klebsiella sp.; identical to SEQ ID NO: 2435

SEQ ID NO: 3771 - protein, 425 aa, Planktothrix sp.; identical to SEQ ID NO: 3728

SEQ ID NO: 3772 - protein, 388 aa, Moorena sp.
MSRVLIVDQQRRPLMPCTPARARLLLKQKKAAVLRRCPFTLILHESRPEAVVQPLRLKIDPGSKVSGLALVNDTSGEVVWAAEVTHRGEQVHKDLQKRAGVRRGRRQRHTWYRPARYLNRRRPKGWLPPSLESRVQNVETWTQRLIFWAPVGSLSYEAVRFDTQALQNPEIEGTQYQHGTLAGLEVKEYLLLKWGQRCAYCEKMGLPLQVEHILPKIRGGSNRVTNLTLACEQCNGKKGNQTAEEFGFPHLQAQAKAPLKDAAAVNSTRRVLHQRLMRTGLPIEASSGGHTKWNRGERDIAKTHWLDAANVGPSTPARLLFQHVRPWLIEANRRQDRQLCLVNALGFPRSKPKKKSPKHDFRTGDIVRAVVPAHLENPGIYVGRMAAK

SEQ ID NO: 3773 - protein, 420 aa, unidentified
  REGION 1..420: note = activated sludge metagenome
MVYVISKDNKPLMPCENVVARLLLKQKKAKVKRKTPFTIKLLYDTTEYVQDCTLGVDTGSTHVGTSVINSKNEVLYMSDIEIRNDIADKMSQRAKYRRNRRNRKTRYRKARWLNRKDSIKKDRFSPTMRSKLDSHMKEIEFIKSILPISRLVMETATFDPHLLKNPSLHNPVYKKWGYQQGGNYGFENTKAKVLNRDNYTCQHCKGRRKDSKLEVHHIIYRSNGGSDEEDNLITLCHTCHKGVHSKSIKLKLTGKRKGQLKHATQMNSIRIQLLKLYSDVIETFGYITKANRLLLEIDKSHHLDACVIASGGNKFIIRQNILYRKKCVSDGDFQQTKGIRSQQAIPTGKIQGFRKFDKVRYLGKEYFIKGRMSSGYAILMDIEGNKVDFSSMSEGWKTPKLSNCKRISARKTWIVDSLVV

SEQ ID NO: 3774 - protein, 430 aa, Moorena sp.; identical to SEQ ID NO: 3527

SEQ ID NO: 3775 - protein, 425 aa, Nodularia sp.; identical to SEQ ID NO: 3165

SEQ ID NO: 3776 - protein, 512 aa, unidentified
  REGION 1..512: note = Human gut metagenome
MSTVYVLNKDGKPLMPTTRCGHVRHLLKEQKARVVTSKPFTIQLLYETDDVVQPLYLGIDPGRTNIGVAVVKTDGTAVFTAHLETRNKEIPKLMQGRKKARRTRRTNGRRCRRQRRAKANGTISKKCVKQTTAQNGSVSKRAKEIGVIKRHLPGCEKDVLCVGIKNKEAKFSNRTRQEGWLTPTANQLLQTHINLIKKIRKFLPISNVVLEINKFAFMRLDNPNIQKWQYRQGPLYQKASLEEAVSEMQEHHCLFCKKPIAHYHHVVPQSENGSNTIGNIVGLCTKHHDLVHKDTTWQKKLAKKKTGLNKKYGALSVLNQIIPALTKELSSLFPKHFFATNGKSTYDYRAAHSVSKDHWLDAYCIACSVLANDVCDSNINSRVPYELKQFRRHDRRALNNENMSRVYTLNGKVVATNRHKATKQTTDSLEEFRQNHSDDVCKLKVKEHHPTYRNMNRNYPGSVFLIGKQVHVMQGIAGSKNGEATTYKDTNANSIAAGKCKFVAKNSGILFV

SEQ ID NO: 3777 - protein, 471 aa, Caldicellulosiruptor sp.; identical to SEQ ID NO: 3268

SEQ ID NO: 3778 - protein, 460 aa, unidentified
  REGION 1..460: note = Human gut metagenome
MVAVVDLFGKPLMPTNEYRARKLLKQKKAKIFGYRPFTIQLTERKSAEIQPIELCMDTGYIHIGISAKSERHEYLGMQIDTLTDEKLKRDDKRQYRRQRRNRKRYRAPRFDNRRRKEGWIAPSLEHKKEIHIDAIQRICKVMPITDITLEIGNFDTHVLKAVEEGKPLPQGSDYQHGERYGIATLREAVFLRDGYKCQCCEKSVKDGAILHVHHIKYRSQGGTNRMSNLITVCDKCHTPKNHKPGGKLWNWKPKLAEFKGASYMTSIRWTLYNEVTALLPNSSVHITYGAKTKESRRKLDIKKSHVNDAYVMGLFCPKHRTKPVYFKKKRRNNRVLEKFYDAKYIDSRDGKKRSGQELFNGRINRNHRKDSENLHLYRKQKVTKGKRSIRNKHYPIQPHDILLYQKKKYENAGCHNNGSRVILLPEKKSVALKQLTIYQYAGGYYRVPYESNKKEERTGS

SEQ ID NO: 3779 - protein, 415 aa, Bacillus sp.; identical to SEQ ID NO: 2431

SEQ ID NO: 3780 - protein, 400 aa, unidentified
  REGION 1..400: note = Human gut metagenome
AKIKKRTPFTIQLVYGSSGYTQEVILGVDAGSKTIGVSALTKKEELFAANVIPRNDVVDLLSTRRESRRARRNRKTRYRKPRFDNRVRSKHKGWLAPSVEVKIQEHITSIKRACRILPVSKVVVETAEFDLQLLKAIADGKPVPQGEDYQKGEMYGHYNVRQYVLWRDDYTCQCCGAHATKKKEVRLHVHHLESRKTGGDASGNLVTLCESCHEKLHKGLITEDDFKKRKRKSTRDATFMGIMRATLLQRLRSELPIPVVETRGYITKATREKLLVLPKSHTNDALAIAQGKHGFNVGYLPGIAQIDKIYTIRPVRHHNRQLHKATILKGGIRKSNQAEKYVFGYRLFDKVQFNGQDCFIWGRRTTGIFTIKTINGKMIKDGISFKKLKLVEKSTSYLIA

SEQ ID NO: 3781 - protein, 493 aa, unidentified
  REGION 1..493: note = Human gut metagenome
MAAVYVISASGKPLMPTTRCGHIRGLLNAGKARVVEREPFTIQLKYETPDVTQPLYLGIDPGRTNVGSAVVREDGECVFTAQLTTRNKDVPKLMKARKQFRMAHRRLKRRCKRQRRAKAAETLSQKGEFQRLLPGYEEPILCKGIRNKEARFNNRQRPAGWLTPTANHLLLTHLNMVKKLQKLLPITDVVLEVNRFAFMAMENPSIRRWQYQQGPLYGKGSVEDAVYAQQDGHCLFCGKPIAHYNHVVPQHKNGSETLENRVGLCNEHHDLVHKDRAWDAKMKETKAGLNKKYHALSVLNQIIPALTEQLTAMFPQHAFVTTGKDTADFREDYGIAKEHHLDAYCIACSVLAEPTKVAAPTGKPHRLMQFRRHDRQVCHKENIKRVYLSEGKAVATNRHKAIEQKDDSLEEFRKTHTQQEVSALTVKDHQPVYKDMRRFMPGGVFLFNGKVHTLQRSHGRYKGMPFYYIDTDGSKNHAKGCIFLQQNCGLRWV

SEQ ID NO: 3782 - protein, 441 aa, Thioploca sp.
MAVFVLDRQKKPLMPCSEKRARRLLERGRAVVVKRYPFAIRLKDRVGGELQPIRVKLDPGSKQTGVAIVRESKNIDTETGEITRKINILSLLHLHHRGLAISANLTSRRAMRKRRRNNLRYREARFDNRTKPTGWLAPSLQHRVDTAISWIKKLQRVAPVTALSQELVRFDLQQLESPEISGIEYQQGELQGYEVRKYLLDKWDRKCAYCGVEQVPLEIEHIVPKSAGGSHQVSNLTLACIPCNQKKGSQALDIFLAKQPQLLQKIKAQAQQPLKDAAAVNSTRWALANALKTTGNPVELASGGRTQFNRIRLDIPKSHALDAACVGIVDTVQDWNKPTLEIKCTGRGSYQRTRLDKFGFPRGYLMRSKSAFGFQTGDMVKAVVTKGKKVGEYVGRVAIRASGSFNITTLIETIQGISHKYCQMISRNDGYGYSLQPKIAN

SEQ ID NO: 3783 - protein, 424 aa, unidentified; identical to SEQ ID NO: 3232
  REGION 1..424: note = Human gut metagenome

SEQ ID NO: 3784 - protein, 424 aa, unidentified; identical to SEQ ID NO: 3232
  REGION 1..424: note = Human gut metagenome

SEQ ID NO: 3785 - protein, 469 aa, Moorena sp.
LAVFVLDRSGKALMPCSEKRARLLLARGRARVHRVVPFCIRLIDRQHASSAMQSLRLKLDPGSKTTGIALVRDVTQPDASIGEIQRGAAVLNLFELIHRGRQISETLTARRSMRQRRRGNLRYRAPRFLNRTRPTGWLAPSMQHRVDTTMAWVKRLMRWAPVCAVTSELVRFDLQALENPEIEGVEYQQGALAGYEVREYLLAKWGRACAYCDAENTPLQIEHIHARARGGTNRVSNLTLACAPCNTKKAARALPDFLTRDPKRAARILAQAKRPLKDAAAVNATRWQLVQSLRATGLPVELASGGRTKFNRTRFDIPKTHALDALCVGEVEWVRTWQRPTQTVKCTGRGSYQRTRLDKYGFPRGYLTRSRRVHGFQTGDLVRADVPTGKKAGIHVGRVAVRATGSFNIQGDGAVVQGIAHRHCRLVQRSDGYGYSRIATSKGDARTGTASLSALSLPAVNDGVSRATG

SEQ ID NO: 3786 - protein, 458 aa, Halomonas sp.
MAVFVWDKQKQPLMPCCEKRARLLLERGRAVVHKRYPFTIRLKDRVGGETQPLRLGLDPGSKTTGLALMRESEGEQRHVLCLFDLVHRGFQIKKALEQRRGFRRRRRSANLRYRAPRFDNRTRKAGWQPPSLQHRVDTVMAWVDRLSRLTPITAISQELVRFDTQQLDNPEISGVEYQQGTLLGYEVREYLLEKWGRECAYCGTADTPLEIEHVVPRSRGGSNRVSNLTLSCHNCNQAKNALPLADFFARDKGLKKRLKANGLSADTRLERVQRELKRPLRDASAVNATRWALFNALKATGLPVTVASGGRTKFNRNLLDIPKTHALDAACVGAFETLHDWTVPTLTIKATGRGSYQRTRLTKHGFPRGVLMRQKQVHGFQTGDMVRAVVPAGKKTGTHTGRVAVRKTGSFNIQTEHGAVQGISHKHCTVIQRGDGYGYHVTPTIHQPIKGGAGHAVA

SEQ ID NO: 3787 - protein, 427 aa, Parasutterella sp.
LKVFVLNKRGKPLMPCSPAKARLLLKEKKAIVVRRTPFTIQLTIATGESKQPVSLGVDAGYKHVGLSASTEKAELYESEVELRQDVSDLLSARRALRQSRRNRKTRYRAPRFDNRIRTKRKGWLAPSVENRINAHLSRVETVIRLLPVTKITVETTSFDMQLLKNSDIAGKEYQEGEQLGFWNVREYVLFRDGHVCQHCHGRSKDPVLNVHHLESRRTGGNSPGNLITLCETCHKALHRGEIKLKAKRGHSFRAQAFMGIMRWEVLNRLKASHPELEVNNTYGYRTKHARIANDIAKSHCADAFCIAGNLGAERLGEFLFQKQTRRNNRQIHKLSILKGGIRKRNQVPFEVKGFRLFDKVAYKGEEGFIFGRRSSGYFDVRKLDGTHISAGISYKKLRLLEKRQTYLTEIRKEEALPPLPEGRGLRA

SEQ ID NO: 3788 - protein, 430 aa, Clostridium sp.
LRVYVKNQRNQPLMPTTQRKARIFLKQKKAKIITYEPFTIQLLYATGETTQETILGVDAGNRTIGLSATTYKCELFSAELKLRTDIVELLATKRQFRRSRRSRKTRYRQPRFENRKKTEGWLAPSIENKIGTHLKVVNKVHSLLPISKIIIEVASFDIQKIKNPDIQGEKYQQGNQLGFWNVREYVIFRDGHKCQGKKNCKGKILNVHHIESRKTGGDSPDNLITLCEDCHKDYHSGKLKLNLKRGQSFRDAAFMGIMRWSFYNKLKELYSNVNLTYGYITKNTRITNNLPKEHRIDALCITGNSTVKRLDNWYLIKQVRKKKRSLHEAIARKGRKEPNITSKRNSKNTKEIISKGKKWCLFDKVKIGSNTGFVSGFTGNMVYVQDIEGNYLQVSPKYKQISTDNVSLISRNNNWIYKEVALGTANHPHL

SEQ ID NO: 3789 - protein, 438 aa, Geobacillus sp.
MPCSPRKARLLLKQKKAKVVRRTPFTIQLLYGSSGYKQPVSLGVDMGTRHVGISATTKKDVLFEAEAQLRTDIVELLAIRRQFRRSRRNRKTRYREARFLNRRKPEGWLPPSIQHKINSHIKLIDLVHNILPVTSVTIEVAAFDTQKLKNLNIRGVEYQQGEQMGFWNVREYVLYRDNHTCQYCKGKKKDPVLQVHHIESRKTGGDSPDNLITLCKTCHHEIHEKGLEHIFQRKRPPMRDASQMTAMRWAMFSRIREKYSHANITYGYITKCIRIANGLSKSHMVDARCISGNPLAKPSGTVYLLKFVRKNNRQLHKATILKGGKRKSNKAPRFVKGFQLFDKVVYERKECFIFGRRSSGYFDLRLLDGTKVHASASWKKLKRVEHASTLLIERSLDRSTFLEGGRAIPPRLSLSLRSRGLLAKEDENSKMIDNYANS

SEQ ID NO: 3790 - protein, 347 aa, Ktedonobacter sp.
MSNVFVIDSDYKPLHPVHPARARLLLTQGKATVYRRYPFTIVLKRVAEQPEAPPLRLKIDPGSKTTGIAIVNDANGKVVFAAELEHRGHAIKASLENRRAIRHSRRQRKTRYRKPRYKNRKRKQGWLPPSLESRLANILTWVARLCRSAPIAAVSQELVKFDLQLLDNPDITGIEYQQGTLQGYEVREFLLEKWGRTCAYCCKQDIPLRIEHIHPRANGGTHRISNLTLACERCNRTKGTQDIAVFLAKKPDVLTRILAQVKKPLKDASAVNATRWALLERLKAFGLPVECGSGGLTKYNRTTRGLPKTHWVDAACVGKSTPVALSYKGVGPLCVTAKGMDRGKCAG

SEQ ID NO: 3791 - protein, 442 aa, unidentified
  REGION 1..442: note = Human gut metagenome
MSTSVFVLDKKHRPLMPCRPARARRLLRAGRARVVKRFPFVIRLVDRTVEQSEVQPVLIKLDPGSRETGAAVVRDDEKKRHHALAFFVIKHRGGAIRDALKARSAFRRRRRSQNFRCRSPRFLNRVKPKGWLPPSLRHRVETTLSFVRRMCRYLPVSGIATELVKFDSQKLQNPEVSGVKYQQGTLFEYEVREYLLEKFGRKCVYCGAEGVPLNIDHVVPRAKGGSNRVSNLVLACVSCNQKKGARSLEDFLKGKPEVLARVRRELKTPLRDAAAVNATRWVLFNELKATGLPVETGSGALTKLNRHAFGVEKEHWLDALCVGRLNGVVTRKGLNALEIRCMGRGSRQRTRLTKYGFPRGYLMRQKCVHGFATGDMVEANVPKGKKAGLWRGRVAVRVSGSFNIQTPKGVIQGVGWKHCRLISHNDGYGYAWLGHAPHSSPA

SEQ ID NO: 3792 - protein, 408 aa, unidentified
  REGION 1..408: note = Human gut metagenome
FVLDANNKQLTPTKEQKAWFLIRKKRATLVSKYPMVIQLKKKIPDKEICKDEVRCGIDDGGLHVGVALVQKCQTRNKVVFKGVIEQRNDVKHLIDVRCGYRRYHRYHKRYRSARFNNRNSSKREERIAPSILQKRQATIRVINQLNKWINITNYWLEDVAIDIRALTDGYKPYRWQYQKSNRLDENIRKAVILRDGCKCMECGKSNCRLEVHHIKPRRLKGSSTLDNLITLCTKCHQKTESVEELYMDRYFALLNSSDNKNLNYAQHVMIGKKWLREQLSNLGMLYLTNGGDTANKRIDWDIAKSHSNDAICITDLRPDTCEIKEWAIKPMRRQSKAKTDNVLGIKHRDLVEYTFRNGKTHRGYVTALYPEQNAINFQSPTKHCKKVNAKKCKVLWKYSKIYWLDNVG

SEQ ID NO: 3793 - protein, 551 aa, Moorena sp.; identical to SEQ ID NO: 3262

SEQ ID NO: 3794 - protein, 437 aa, Ktedonobacter sp.; identical to SEQ ID NO: 2920

SEQ ID NO: 3795 - protein, 406 aa, unidentified
  REGION 1..406: note = Human gut metagenome
MVYVQDIYGRPLMPTTRHGKVRRLLKSKKATVVNLCPFTIRLLYDTTGYKQEITLGVDTGTKHVGLSATTKSKELYASEAILRSDVVDLLSTRRELRKIRRYRLRYRKPRFMNRIKSKKRGWIAPSIRQKIDSHIRIIGFVYSILPVSKLIIEVAQFDTQKIKNPEISGKEYQEGEQLGFWNVREYVLARDEHKCQHCKGKSKDPVLNVHHIESRKTGGDSPSNLITLCKTCHKEFHKGNIKLKVNRGESLRDAAVMSIMKWELYDELKSLYPNVKMTFGYITKYNRINHGIEKSHVSDAFVISRNFDSERLGYYYKRKLVRRHNRQIHKMKAPKGGNKRMNQSPFKVFGFRLFDKVMFQGKERFIYARRLRGIFNIRDINGENKKDISYKKLEYVSHGLISIVAG

SEQ ID NO: 3796 - protein, 435 aa, Streptosporangium sp.
VFVLDKHGQPLQPTIPAYARKLLRSGRAVVHRHTPFVIRLKDRTAADSTVEGVHVGIDPGSRHTGIAVFTEHGGSRTGRYALQLDHRGAAIGDKVASRAALRRGRRSRNLRYRAPRFDNRTKPKGWLAPSLKHRVDTTMSWAGRLRRWAPVSAVHVERVAFDTHALSAGRPLEGAQYQQGTLLGYEVREYLLAKWGRACAYCAISGTPLNIDHIHPRSRGGSDRISNLTMACIPCNQTKNATPVEEFLKARPTLLAKILKQAKAPLRDAAAVNATRWALWRALEATGLPVATASGGRTKWNRSRTGAAKSHALDALHVGHLETVIGWPSTVLVVTATGRGSYARTTPDRYGFPRLVRPRIKLHHGFQTGDLVRANVPTGKKAGVHVGRVLVRSSGSFDITTRHGRVAGISHKHVRHLQRADGYGYTTQKEADRND

SEQ ID NO: 3797 - protein, 459 aa, Ktedonobacter sp.
VSNVFVIDSDYTPLNPVHPGHARRLLRQGKAAVFRRYPFTLVLKRIVEQPEVQPLRLKLDPGSKTTGIALVNDANGKIVFAAELEHRGHAIKDSLDDRRAVRRSRRHRKTRYRKPRFHNRRKKKGWLPPSLESRLANILTWVARLCRYAPIAAISQELVKFDMQLMENPDIAGVEYQQGTLQGYEVREYLLFKWERKCAYCGKQDVPLQVEHIQARANDGTNRVSNLTLACEPCNTAKGTQDIEVFLKKKPDVLKRILAQIKKPLKDASAVNATRFALLERLKAVDLPVECGSGGLTKFNRTMRKLPKTHWLDAACVGTSTPVALLNKGTVPLHITATGHGRRQICSTDKYGFPKQHKERKKKFLGYQTGDMVKAITPKGTFEGRIAIRHRPSFRLGKADIHPKYMRCVHRSDGYEYRQKGVRHAPPPWLKPGAPAWRDFKGGQWRLRFHALPGRPSAL

SEQ ID NO: 3798 - protein, 401 aa, Sharpea sp.
MSSARYWHEEKFSERKVSEMTNYAFVLDADNKQLAPTKEQKAWFLIRKKRATLVSKYPMVIQLKKKIQDKEICKDEIRCGIDDGGLHVGVALVQKCQTRNKVIFKGTIEQRNDVKHLMDVRRGFRRYYRYHKRYRPARFNNRKFSKRKERVAPSILQKRQATVRVISQLNKWINITSYWLEDVAIDIRALTDGYKPYQWQYQKSNRLDENIRKAVILRDGCRCMECGKSNCRLEVHHIKPRRLKGSNTLGNLITLCTECHQKTEDAEELYMNRYFALLNSSDNKNFDYAQHVMIGKKWLREQLSNLGMLHLTNGGDTANKRIDWGIAKSHSNDAICITDLQPDTCEIKEWVIKPMRRQSKAKTDNVLGIKHRDLVEYTFRNGETHRGYVTALYPEQNALNF

SEQ ID NO: 3799 - protein, 424 aa, Spirulina sp.
MSNFVFVLDTKKQMLNPVHPGEARCLLSQGKAAVCRQYPFTIMLKQEAESEIQPLQLKIDPGSKTTGLAILNGSTVVWAAELTHRGQGIKDALLSRSQLRRGRRNRKTRYRAPRFLNRTRAEGWLAPSLMHRVKTTLTWVNRLCRYAPIAGISQELVRFDTQVIQNPEMSGTEYQQGTLAGDEVREYLLEKWGRKCAYCKAENTPLQIEHIQPRSKGGSDRVSNLTLACEPCNRAKSNLPVQEFLSGKPDRLKRILAQAKAPLKDAAAVNSTRWALFNALKETGLPVSTGSGGQTQYNRTRLNLPKTHWLDAACVGMVNRLEILTTQPLLIKATGHGTRQMCGTDRYGFPSRHRSRVQIHKGFQTGDIVVATVTAGQKIGSYLGRVLCRASGSFDIATKIGRVAGISHKYCKSIHKRDGYAYTL

SEQ ID NO: 3800 - protein, 464 aa, Moorena sp.; identical to SEQ ID NO: 3503

SEQ ID NO: 3801 - protein, 431 aa, Klebsiella sp.
MNRVFVLGKTGQALMPCHPARARQLLQSKKARVKRLYPFTIQLTQRSDGYIQPVELKFDPGSKQTGVGLVLHGKNRLSAIYAAVLTHRGQEIKSNLDSRRMIRRARRNRKTRYRQERFLNRVRSKHKGWLAPSVHSRVDNIVEWSKRFMRLSHVDFITVESVKFDMQKMESAAVEGLEYQRGTLFDYEVKEYLLEKYHYSCVYCGIKNVPFEKEHVVPRSRGGSNRISNLVLSCRSCNEKKDNLPIEEFLKDNPALLKKIKAQLKSSLKDAAAVNITRKQIVKELSDLNVPVLTGIGAETKYNRVSQGYGKEHYIDALCAGTTGTKVYIPSKLKPLLIKKERRNNRQMCLVDKYGFPRGKAKGSKIVHGFKTGDIVKAVVLKGKKKGVYKGKVAVRSSGSFNINVKQGRIEGIGWKNCVMLHRFDGYSYTY

SEQ ID NO: 3802 - protein, 414 aa, Moorena sp.
MPCSPAKARLLLKEKKAIVVRRTPFTIQLTIATGETKQPVSLGVDAGYKHVGLSASTEKAELYASEVELRQDITDLLSARRELRRARRNRKTRYRAPRFDNRIRTKRKGWLAPSVENRINAHLSRIEAVLRLLPVTKITVETASFDMQLLKNPDISGKEYQEGEQLGFWNVREYVLFRDGHVCQHCHGRSKDPVLNVHHLESRRTGGDSPGNLITLCETCHKALHRGEITLKAKRGQSFRAEAFMGIMRWEVLNRLKASHPELEVNNTYGYRTKHARIANDIAKSHCADAFCIAGNLGAERLGEFFFQKQTRRNNRQIHKLSILKGGIRKRNQAPFEVNGFRLFDKVACQGEEGFIFGRRSSGFFDVRKLDGTRISAGISCKKLHLLEKRRTYLTEIRKEEALLALPEGRSLRT

SEQ ID NO: 3803 - protein, 456 aa, Halomonas sp.
MAVFVLDKHKRPLMPCSEKRARLLLARGRAVVHKRYPFTIRLKDRVSGETQPLRLGIDPGSKTTGLALMREPDSQQRHVLCLFELIHRGFQIKKALQQRAAFRRRRRSANLRYRAPRFNNRTKPKGWLAPSLQHRVDTVTAWVKRLSRLAPVTAISQELVRFDTQKLENPEISGVEYQQGTLLGYEVREYLLEKWERECAYCGTGDTPLEIEHVVPRSRGGSNRVSNLTLSCHPCNAEKDSQTLTDFFATNKGLKKRLKANSLSADAQLERVQRQLKQPMRDASAVNATRWALFSALKTTDLPVAVSSGGRTKYNRQRLNIPKTHALDAACVGAFEKLHDWTVPTLTIKAMGRGSYQRTRLTKHGFPRGYLMRQKQVHGFQTGDMVRAIVPTGKKAGTYTGRVAIRKTGSFNVQAEHGAVQGISHKYCTLIQRSDGYGYYITPFTSLTGGAGQAVA

SEQ ID NO: 3804 - protein, 420 aa, unidentified
  REGION 1..420: note = Human gut metagenome
MQYVYVLSKHGEPLMPCSPGKARLLLKEKKARVVRRTPFTIKLLYRSAGYKQPITLGVDAGSKHVGLSASTEKRELYREEFTPRNDVVKLLSKRKQYRRSRRNRKTRYRAPRFNNRVHSKHKGWLAPSVEVKIQEHITVIKLICRILPISLVRVETAEFDTQRLKAMLEGKSLPVGTDYQLGEMYDEYNVRQYVLKRDNYTCQCCGAHTTKKKTVKLHVHHLEGRQVGGNAPNNLITLCVDCHKALHAGKVKLDGKKRGKSFKDAAFMGIMRKTLMARLSKELPIPVQGTYGYITKLLREQNDIKKSHVNDARCISKHPLAEPCSVCYRTKAIRHHNRQTHKANFSKKGIRERNQTPYVVEGYRLWDKVLYKGQECFISGRRTSGSFALKRLDGTSISESVTFKKLRLLEPATNYLIERM

SEQ ID NO: 3805 - protein, 411 aa, unidentified
  REGION 1..411: note = Human gut metagenome
MVYVQDIDGKPMMPTTRHGKVRRLLKDNKAVVVNTCPFTIKLTYKTSDYKQEIVLGVDSGTKHVGLSATTKSKELYASEVILRSDVVDLLSTRRGLRRTRRSRLRYRKQRFNNRVKSKKDGWIAPSVRHKIDSHIRIISFVYSILPVSKLIVEVAQFDTQKIKNPEISGKEYQEGEQLGFWNVREYVLARDGHKCQHCKGRSKDPILNIHHIESRKIGGDSPSNLITLCETCHKEFHKGNIKLKVSRGKSLRDAAVMGIMKWKLYEELKSKYDNVSMTFGYITKYNRINHGIEKSHVSDAFVISRNFNSCRLGYYYKRKLVRRHNRQIHKMKILKGGIRKRNQAPFKVFGFRLFDKVMFQGEEHFIYARRLSGQFNIQDINGENKKDVSCKKLKYVSHGLVSVKTNLFLSQ

SEQ ID NO: 3806 - protein, 455 aa, Ktedonobacter sp.
MNRVYVLSSDRTPLMPCSSVIARLLLKEGKAKVVRRTPFTIKLYVQPEHPSTQPLTLGVDTGSTVIGSAVASEQNDIVYLSEVEARNDIATAMKERAAYRRKRRSRKIRYRPARWLNRRNSIKRGRFSPTMRSKIDAHLREIRFVQSILPITSIVLETSTFDPHALKNPEVLRKKWLYQKGINYGYANTRAYVLTRDGYTCQHCKGKTKEQRLEVHHLIFRRHHGSDEESNLLTLCKTCHDALHAGTITLKCTGKKKGKLLHATQMSSIRMQLLKRVEAEETWGFVTKEHRLLASLPKEHCFDAAMIATRGQRPVIQIQTVLVKKCIPDGDYQQTKGKRSEQRLTTGKIEGFRKFDKVRYRGQEYFIKGRMSTGYAILMMIDGKKVDLKPIPKLEKMKRVSARSSWMIDQRSMPRSIGNASQETPRQDIESQGEKEGTALIHEAEDLVVFLPHQV

SEQ ID NO: 3807 - protein, 544 aa, unidentified
  REGION 1..544: note = Human gut metagenome
MKQKKQKVMIYILNKKGKPLMPTTRCGHVRKLLDSKKAVVVNSNPFTIRLKYDTPNGIQDVFAGIDSGRENIGSGASNEDGDCLYLGELKTSNKSIKIKMTERTGFRRERRRHDRQSKQRKEKKDHTEIQNGNDDICRTTISCKSVQISYPVAEESVTHKIIRGKEGKFANRHRDEGWITPSARQLVQMHMNDLKSMCKILPINHVTLERVAFDFQKLENENIKTWEYGKGKLYGYDSPEEYIHDVQDGKCLVCGKPHIDYLHHIIPRSKGGSDKVSNLAGLCYDCHYGPMGVHNCRETQDRLPELKNEANKQYKVSLLNSVMPVLIEEMDKFCKANSIIFSICEGHDTAKVRDMYDLQKDHCLDGFAISLVGRNVKSVDVMPDRIYQKQRYKKKSKNIIQKRNCREYYDGKKLVAVNRHKGTDQKADSLEEYMNTYAETHTADECKKHFDSLTVKPARRTYTFHKKGCICPFHIGDKVRYEKKNKIKGNTKVETFICESIHFYKDENKAKVEHNKTKSKRMKFCRVLEAGCTPYIDYRKLALM

SEQ ID NO: 3808 - protein, 434 aa, Anoxybacillus sp.
MVFVLDTNKCPLAPCHEAVARKLLKQGKAAIYKRFPFTIILKKSVDESENETTYRLKIDYGSRHTGLAILRGQEVVWLGQLDHRTDIKERIDKRRAFRRARRNRKTRYRKPRFLNRKRKEGWLPPSLESRVQNIQTWVSRLKKLCPIGHISYENAKFDTQLMRNPEISGIEYQQGTLQGYEVREYLLEKFGRKCCYCGKENVPLEEEHIIPKSRGGTDRIDNLCLACRDCNQRKGNQTAEEFGCPHIQKQVKESLKDTSIINATRWKVYEVLKQARLDVECGTGARTKMNRIRLGLPKTHYFDACCVGESTPNHLYFKTKEVLFINAKGRGSRSRTNLDRYGFPRGYLARQKFFFGFQTGDMVKAIVPRGKYKGVWFGEVACRKTGNFDIKGKDGKRIAQGISYKYIQVIQRFDGYTYRKEEAELAQGAIPPRA

SEQ ID NO: 3809 - protein, 493 aa, unidentified
  REGION 1..493: note = Human gut metagenome
MAAVYVISASGKPLMPTTRCGHIRGLLNAGKARVVEREPFTIQLKYETPDVTQPLYLGIDPGRTNVGSAVVREDGECVFTAQLTTRNKNVPKLMKARKQFRMAHRRLKRRCKRQRRAKAAETLSQKGEFQRLLPGYEEPILCKGIRNKEARFNNRQRPAGWLTPTANHLLLTHLNMVKKLQKLLPITDVVLEVNRFAFMAMENPSIRRWQYQQGPLYGKGSVEDAVYAQQDGHCLFCGKPIAHYNHVVPQHKNGSETLENRVGLCNEHHDLVHKDRAWDAKMKETKAGLNKKYHALSVLNQIIPALTEQLTAMFPQHAFVTTGKDTADFREDYGIAKEHHLDAYCIACSVLAEPTKVAAPTGKPHRLMQFRRHDRQVCHKENIKRVYLSEGKAVATNRHKAIEQKDDSLEEFRKTHTQQEVSALTVKDHQPVYKDMRRFMPGGVFLFNGKVHTLQRSHGRYKGMPFYYIDTDGSKNHAKGCIFLQQNCGLRWV

SEQ ID NO: 3810 - protein, 438 aa, Ktedonobacter sp.; identical to SEQ ID NO: 3407

SEQ ID NO: 3811 - protein, 378 aa, Moorena sp.; identical to SEQ ID NO: 2642

SEQ ID NO: 3812 - protein, 429 aa, Ktedonobacter sp.
LSNVFVIDSDYKPLNPVHPGHARRLLRQGKAAVFRRYPFTIVLKRVVEQPEIQPLHLKLDPGSKTTGIALVNDTNGHIVFAAELSHRGHAIKDSLDSRRASRQGRRQRKTRYRKPRFDNRRRKKGWLPPSLESRLANILTWVARLCRYAPIATLSQELVKFDMQLMENPDIAGVQYQQGTLQGYEVREYLLEKWERTCAYCGKQDVPLQVEHIHPRARSGTNRMSNLTLACEACNTAKGTQEIEVFLKKKPDVLKRLLAQVKKPLKDASAVNSTRCALLERLKAIGLPVECGSGGLTKFNRATRGLPKTHWLDAACVGKSTPDVLLQKGVIPLRIKATGHGRRQMCVPDKYGFPKQHKERKKTFLGYQTGDLVKAITPKGTFEGRIAIRHRPSFRLEKVDIHPKYMRCVQRSDGYEYTQKGVRHAPPHG

SEQ ID NO: 3813 - protein, 431 aa, Moorena sp.
MRVFVLDKDFKPLDPCRPARARLLLKQGRAKVFRMYPFTIILKDLEVENCTTHNHQLKIDPGAKTTGLAILQDNTVIWGAEIRHRGFQIRDALTSRRQLRRSRRNRKTRYRKPRFLNRKRQSEWLAPSLMSRVHNILTWVKKLIRFCPMTGISQELVRFDTQKMENPEISGTEYQQGTLYGYEIREYLLEKWNRKCAYCGATDTRLEVEHIKPRSNGGSDRVSNLAIACHDCNQAKGNQDIKQFLSRKPDVLKRVLSQSKRSLADTAAVNSTRWKLYKELKSTGLPVQTGSGGQTKYNRRRFNLVKTHWLDAACVGNVQAIYVENCQFLLIMAKGHGTRQICRTDKFGFPKRYCSRTKIHKGFQTGDIVKAIVTKGKKIGTYVGRVATRKTGSFNISTANGLIQGISYKYCTPIHKKDGYSYQINTLSSLS

SEQ ID NO: 3814 - protein, 464 aa, Ktedonobacter sp.
LLDVPPDNIIEATITRAIGGSERSKHMSHVFVIDANKQPLNPVHPARARVLLSQGKAAVLKRFPFTIILNVAIDAPVVEELRIKIDPGSKTTGIALVNDQSGEVVFAAELHHRGANIKEALDDRRTVRYSRRRRHTRYRKARWQNRRRREGWLPPSLTSRISNVLTWVKRLRNLCPITAMSMELVKFDMQAMENPDIQGWEYQQGTLAGYELREYLLEKWNRMCAYCGKGNVPLQVEHIVPRANKGTHRVSNLTLACEKCNQAKGTQDIKDFLKKKPAMLKHILAQAKAPLKDAAAVNATRWELFRGLQALGLPIECGSGGLTKYNRTTRELPKTHWIDAACVGQSTPEYLNTTGISSLLITATGYGKRQLCGVDKHGFPQRHRQRKKVHHGYQTGDLVRAVVPEGFAAAGRHVGRVLARATGSFDLRTARGRIEGVPVRYCRPLHRNDGYSYHSTRGGNSSPL

SEQ ID NO: 3815 - protein, 426 aa, Bacillus sp.
MVFVLDTKKRPLAPCHEAVARKLLKQGKAAIYKRYPFTIILKEIVDNFRPKTPYRLKIDYGSKHTGLAIVRGEEVLWLAQLDHRTDIKERLDKRRAFRRARRKRKTRYRKPRFLNRRRKDGWLPPSLESRVQNIQTWVERLRKICPIEHISYENAKFDTQLMRNPEINGVEYQQGTLQGYEVREYLLEKFGRKCCYCGKEGVPLEIEHIIPKSRGGTDRVDNLCLACHDCNQRKGSKTAEEFGYPHIQEMVKKTLKDASVVNATRWKVYEVLKQSGCEVECGTGARTKMNRIRLGLPKIHYFDACCVGESTPLQLHFKTKEALFIKAKGRGSRSRTNLDKYGFPRGYLARQKYFFCFQTGDIVKANVPKGKYQGVWFGEVACRKNGSFDMKDKDGKRIAQGISYKYFNIIQRFDGYTYRREGMNIA

SEQ ID NO: 3816 - protein, 529 aa, Burkholderia sp.
LEVAAADKPRVGTKRAATGELTLTLCCTTWSRGAAPQGARHQARKGNAPDVFRRHNKELGLAVCVLDRSGKALMPCSEKRARLLLARGRARVHRVVPFIIRLVDRRAHASRFQPLRIKVDPGSRTTGLALVRDTQLVDATSGEIQRGAAVLNLFELVHRGRQISEALSARRAMRRRRRGNLRYRAPRFLNRTRPAGWLAPSLEHRVATTMAWVNRVMDWTPVAALSSELVRFDMQALENPEIASVEYQQGTLAGYEVREYLLAKWGRRCAYCDQEHVPLQIEHILARASGGTNRISNLTLACACCNAKKAARPIEAFLARDPKRLAVILAQAKRPLKDAAAVNATRWALANALRATGLPVELASGGCTQFNRKQLGLPKTHALDAVCVGKVASVSVWYKPTLAVKCTGRGSYQRTRLDRYGFPRGYLTRSRRVHGFQTGDLVRAEVPTGKKAGRHTGRVAVRATGSFNIQVAGNVVQGIAHRHCRLIQRSDGYGYSRIALLKGDASDGTASLSALSLPAVNDGVSRAAG

SEQ ID NO: 3817 - protein, 499 aa, unidentified
  REGION 1..499: note = Human gut metagenome
MRYVYVLDVDGKPLMPTCRFSKVRRMLKSDQAKAVDTLPFTIQLTYRTKTRILQPVTLGQDPGRTNIGVAAVRSDGKELGRFHCITRNKEIPKLMADRMAVRRASRRGERLVRKRLARKLHTTAKHLEGRMLPGCDKPLPVKDIINTESRFNNRLRPEGWLTPTATQLLRTHINLFVRLAKILPVTDVAIELNKFAFMQLDNPEMKKREIDFCHGPLYGTGGLEATVKEQQNGKCLLCGKEPISHYHHIVPRSRRGSNTIANIAGLCPKCHELVHKDADTAERLTEMKTGLTKKYGGTSVLNQIIPKLVETLADLFPGHFHVTNGWNTKEFREKHHLEKDHDVDAYCIACSHLKPEETLVETEPFEILQFRKHNRAIIHHQTERTYKLDGVTVAKNRKKRMEQKTDSLEDWYVDMAKEHGKTQADAMRSRLTVIKSTRYYNTPGRMMPGTVFLYEGKRYVMTGQITNGKYYRAYDQEKRNFPAVKVRILTKNTGLVFVA

SEQ ID NO: 3818 - protein, 428 aa, unidentified
  REGION 1..428: note = Human gut metagenome
LKVFVLNMRGQPLMPCSPAKARHLLKAGKAAVRRRTPFTIQLRIATGETKQSVTLGVDAGAKHVGLSAATEKEEVFASEVELRQDITGLLAARLLLRRERRQRKTRYRAPRFLNRVRSKHKGWLAPSVENRIQAHMSRIDAICGLLPVTKIVIETASFDIQKIKHPDVEGTDYQQGDQLGFWNVREYVLFRDGHVCQHCHGHAKDKILNVHHLESRQTGGDAPNNLITLCETCHKACHAGKIKLKVKRGQSFRAEAFMGIMRWTLLDRVRKAHPGLPVENTYGYLTKNTRITLGLPKAHCVDAYCIAGNLKAVRRGVYLHQRQVRKHNRQIHKCTVLSKTLKDGTKIGYRKLNQTPHLVKNFRLFDKVRCLGQTGFIFGRRSSGYFDVRRLDGVKLSSGISYRKLTLLEKRSTYLTELRKEDGASSPV

SEQ ID NO: 3819 - protein, 323 aa, Ktedonobacter sp.
MEQGSILYLSEVEVRNDIATTMKERATHRRDRRNRKTRYRPARWLHRRNSIKIGRFSPTMRSKIDAHLREIHFAHSLLPISSIVLETGTFDPHALKNPEVLRKKWLYQKGINYGFANTKAYVLTRDGYTCQHCQGKSKDQRLEVHHIIFRSQHGSDEESNLLTLCKTCHDALHAGTIPLKRTGKKKGDLLHATQMNSIRVQLLKLVEAEETWGFVTKEHRLLAGLPKEHRFDAAMIATRGNRPVFQIQTVFVKKCIPDGEYQQTKGKRSEQRIPTGKIQGCAQMRQSALSRSGILYQRAYVYWLCYFDDDRREKGRFETHSQV

SEQ ID NO: 3820 - protein, 429 aa, Moorena sp.; identical to SEQ ID NO: 3501

SEQ ID NO: 3821 - protein, 442 aa, unidentified; identical to SEQ ID NO: 2903
  REGION 1..442: note = Human gut metagenome

SEQ ID NO: 3822 - protein, 417 aa, unidentified
  REGION 1..417: note = Human oral metagenome
MFVYVISKDGQPLMPTSRFGKVRRLLKNKKAKVIRSCPFTIKLLYEPESLIVQEIVLGQDTGSKHIGTACVADDKILYQSEVALRDDIKKKMDRRRALRRNRRQRKTRYRKPRFLNRANSIKKDRLPPSTKSKVQSHIDEIEFCKKILPVSKIVLEVSQFDIHLMKNPSLIFEKVRHWGYQKGFDYGYSSRREAVLNRDNYTCQCCGKKHVRLEIHHIIFRCMGGTDDERNLITLCEKCHKLIHDGVLILTKKPRKLNLKYATQMSIIRNQLLKIYPDAIETFGFVTKENRNNLNLPKGHYIDACVIASAGKKFKQLNWLFKKRRVAKQNRQLCKGVRGEKQIPTGKVFGFRRFDKVKYLKEICFIKGRRNSGSFVLMDIDNNTIDFRSGGGKQSPSYKLLERLNTRKSVLCISQRI

SEQ ID NO: 3823 - protein, 356 aa, unidentified
  REGION 1..356: note = metagenome
QEIVLGVDAGTKHVGLSATTKSKELYSSEVILRNDIVDLLSTRRELRRTRRNRLRYRKPRFDNRIKSRRPGWVAPSVKYKVDAHIRVVENVCSILPISRIVIEVAQFDTQKIKNPNISGKEYQEGDQLGFWNVREYVLARDGHKCQYCKGKSKDHVLNVHHIESRKTGGNSPSNLITLCETCHKEYHKGNIDLKIKRGSSLRDAAVMGIMKWRLYEELRSKYDRVSMTFGYVTKYNRINHDIEKSHVSDAFVISKNFNAIRLGYYYKVRLVRRHNRQIHKQKIPKGGIKRLNQSPFEVFGFRLFDRVMFENNCYFIFARRKTGSFNIRDINGKNKRDITYKKLKLSRCKRFMIEKS

SEQ ID NO: 3824 - protein, 457 aa, Tolypothrix sp.; identical to SEQ ID NO: 2930

SEQ ID NO: 3825 - protein, 468 aa, Petrotoga sp.
MWTYRCEADLFPKGDLKMVYVLSKDGAPLMPTKRHGKVKHMLKDGKAKVVRNKPFTIQLTYDTPHYTQPITLGIDSGYKYIGFSAVTEKGNTPNGVKEEVLSGEVNLRSNVSELLKERSMYRRIRRNKLRYRKSKFDNRVSSRKETPRKGFKESWLAPSIKHKLDTHIRFIEFIKKILPITNIVIEVAKFDTQKIKNPEIKGKEYQQGEQQNFYNLREYILYRDNYTCQLCGKSNVPLEVHHIGFWKGDRTNRPSNLITLCTKCHDPKNHLKGGKLYGMKPVQKPLKEATFMSTVRWKLVNILDCKYTYGYITKSKRIKLNLDKTHYNDAYCIAGGTSQRRIEPIYFEQIRRNNRSLEKFYDAKYIDTRDGSIKKGQELFNGRRTRNKNYNTENLRKFRGQKISKGRRSIRTQRYFYQPKDLVIYEGKKYTVKGIHCCGKRIILAELSKSFKIETVEPYMFRKGLCIT

SEQ ID NO: 3826 - protein, 442 aa, Lactobacillus sp.
MKHENANRVFLLNRDGKPLMPCRPRKARLLLKSGKAFVVKKYPFTIQLKYGSYGYKQKASLGVDTGQRHIGFAIVSQNKVLYQSEVELRQDVHKNLYTRKIYRRSKRNRKTRYRQARFLNRVHGKRDGLWLPPSIKGKVSHNIAWIKRYLAVLPNTDLHIEVGKFDMAKMINPEISGKQYQEGSLKDWKNYEYYVLARDEYTCQLCHKHGEGVKLVVHHIVYRSHGGTDRISNLITLCTDCHTTKNHQPGGKLYKWMKAKKKVTKQLKGATFMNILRKRIMTAFPEASFQYGSQTYVDRKNLLLPKGHFMDAIAISGIKSVGQMPDTVTLISQFRKKKRSLHEATARKGRKQPNKSSKRNEKNMNHARGLWLNDYVRVIGNHAKGYVKGFKSKGYYVYLTDGLGNYVLSNGKNYINRKQCRLIMHNGNWQKAEQKLSLYEFK

SEQ ID NO: 3827 - protein, 375 aa, unidentified
  REGION 1..375: note = Human gut metagenome
LGVDAGSKTIGVSALTKKEELFAANVIPRNDVVDLLSTRREFRRARRNCKTRYRKPRFDNRVRSKHKGWLAPSVEVKIQGHITAIRRVCGILPVSKVVVETAEFDLQLLKAIEKGKPVPQGEDYQQGEMYGHYNVRQYVLWRDDYTCQCCGAHTTKKKEVRLHVHHLESRKTGGDAPSNLITLCDSCHEKLHKGLIAEKDFKKRKRRSTWDATFMGIMRKTLMQRLCSELPIHVVETRGYITKATREKLLVLPKSHINDALAIAQGKHGFNVGYLPGILQIDMIYTIRPVRHHNRQLHKATILKGGIRKSNQTGKYVFGYRLFDKVQFNGQDCFIWGRRTTGIFTIKTINGKMIKDGISFKKLKLVEKSTSYLIA

SEQ ID NO: 3828 - protein, 399 aa, Moorena sp.
LTVFVLDINRNPPNPVHPAEARLLLSQQKAAVLRQYPFTIILKEASADVEPEPLRVKIDPGSKVTGFAVINDNTGEIVFAMELEHRGGYIKKSLESRRAIRRSRRNRKVRYREPRCENRSRPKGWLPPSLKSRVHNLETWVNRLSRYCNVKGISLELVRFDMPKIQHPEISGVEYQQGELMGYEVREYLLEKWRRKCAYCGEGDVPLEIEHIVPKSKGGSNRVSNLTLACTPCNQKKGNKPVEQFLLKKPELLKKISAKAKAPLKDAAAVNATRWNLFRTLKETGISVETGSGGLTKFNRTTRELPKTHWLDAACIGKSTPEKLFQIHKSVLVVKAGGHGSRQVCRVDKFGFPRTKAKSKNPKIKAFQTGDIVKAVVTSGKKSERTWGVSQSEVVNPLI

SEQ ID NO: 3829 - protein, 512 aa, unidentified
  REGION 1..512: note = Human gut metagenome
MSTVYVLNKDGKPLMPTTRCGHVRRLLKEQKARAVASKPFTIQLLYETDDVVQPLYLGIDPGRTNIGVAVVKTDGTAVFTAHLETRNKEIPKLMKKRKDSRRARRTNGRRCRRQRRAKANGTLSKKCVKQTTAQNGSVSKRANEIGVIKRHLPGCEKEVLCIGIKNKEAKFNNRTRPEGWLTPTANQLLQTHINLVKKIQKFLPISDVVLEVNKFAFMRLDNPNIQKWQYQQGPLHQKASLEEAVSEMQEHHCLFCKNTIDHYHHVVPQHKNGSNTIDNIVGLCTKHHDLVHKETEWQEKLAKKKTGLNKKYGALSVLNQIIPALTKELSSLFPKHFFVTTGKSTYDYRAAHGISKDHWLDAYCIAGSVLPNDVCDNSINNRIPYELKQFRRHDRRASHKENVNRVYTLNGKKVATNRHKAIEQTADSLEEFRQRQPNDVYKLKVKEHHPEYRNPKRNFPGCVFLVGKHTHVMQGTSGSHNGKADGYYDTNGNSYSSGKCKFVVKNKGIVFA

SEQ ID NO: 3830 - protein, 420 aa, unidentified
  REGION 1..420: note = Human gut metagenome
MQYVYVLSKHGEPMMPCSPGKARLLLKQQKACVVRRTPFTIKLLYGSVGYKQPITLGVDAGSKHVGLSASTEKRELYREEFTPRNDVVELLSTRRQNRRSRRNRKTRYRAPRFDNRVHSKHKGWLAPSVEVKIQEHITIIKRICKILPISLVRVETAEFDTQRLKAMLAGKPLPVGTDYQLGEMYDEYNVRQYVLKRDNYTCQCCGAHTTAKKLVKLHVHHLESRKTGGNAPSNLVTLCTTCHKNLHKGNVTLDGKERGKPLRDAAFMGIMRKTLMARLKEELPIPVQGTYGYITKMRREQNDIKKGHTNDARCISKHPLAEPCSVCYRTKAIRHHNRQTHKANFSKKGIRKRSQMPYLVEGYRLWDKVLYKEQECFVSGRRSSGSFTLKKLDGTSVSKGVTFKKLRLLEPATNYLIERM

SEQ ID NO: 3831 - protein, 473 aa, unidentified; identical to SEQ ID NO: 3562
  REGION 1..473: note = uncultured beta proteobacterium

SEQ ID NO: 3832 - protein, 442 aa, Anaerostipes sp.; identical to SEQ ID NO: 3218

SEQ ID NO: 3833 - protein, 512 aa, unidentified
  REGION 1..512: note = Human gut metagenome
MSTVYVLNKDGKPLMPTTRGGHVRHLLKEQKARVVRTNPFTIQLLYETDNLVQPLYLGIDPGRTNIGVAVVKTDGTAVFTAHLETRNKEIPKLMQGRKKARRARRTNGRRCRRQRRAKANGTISKKCVKHDTAQNGSVSKRAKEIGVIKRHLPGCEKDVLCIGIKNKEAKFSNRTRPEGWLTPTANQLLQTHINLVKKIQKFLPISDVVLEINKFAFMRLDNPNVQKWQYQQGPLYQKANLEETVSEMQEHHCLFCKKKIDHYHHVVPQSENGSDTIGNIVGLCTKHHDLIHKDTAWQKKLAKKKTGLNKKYGALSVLNQIIPALTKELSSLFPKHFFVTNGKSTYDYRAAHGVSKDHWLDAYCIACSVLPNDTCDKTINSRVPYELKQFRRHDRRALNNENMSRVYTFNGKMVATNRHKATEQTTDSLEEFRQRQPNDVCNLKVKEHHPTYRSMNRNYPGSVFLVGNQVHVMQGIAGSKDGEATTYKDTNANSIAAGKCKFVAKNSGILFV

SEQ ID NO: 3834 - protein, 551 aa, Moorena sp.; identical to SEQ ID NO: 3262

SEQ ID NO: 3835 - protein, 429 aa, Ktedonobacter sp.; identical to SEQ ID NO: 3098

SEQ ID NO: 3836 - protein, 497 aa, unidentified
  REGION 1..497: note = Human gut metagenome
VIVEIQLQYKGVTAKKERIIMVIALDKRKRPIGFITERRCRILMEKKRAVLYRLFPTVIVLKDVDARTIPSPPSYRIKLDPGAKHTGVAIVRNDTNEHAFSMQIEHRGDAIKAGLTTRQAARRNRRSRETGYRRAKWGNQCLSKEAKKSYDSARKDGWLPPSIRSTAENVISWVRRLSRWINLTECSVEAVRFDTQLLENPNIQGVEYQQGTLFGYEIKEYLLEKYGHTCQYCGGQSGDDILEWEHIHPRSRGGSDRVKNATLACSKCNHDKNNQTLTEWLAAIKMRVSTEKGKTKELDQARLLYIQKVLDGKPETKPLRYAAWVTSSRRYLEKYLFAHFSNVECSSGGKTKYNRRQLGYPKDHHYDALCVGTIPEHGFVDRTSGYCLYAKATGRGTRLRGKLNKCGIIVFKWKNRSKTINGFQTGDIVVADVPHNDKKTYKNEGQFVGRVMVRSSGRFDIKTIRGELVNVKMQFCKLLQNNSGYHYTVGRAIPLGH

SEQ ID NO: 3837 - protein, 464 aa, Moorena sp.; identical to SEQ ID NO: 3503

SEQ ID NO: 3838 - protein, 459 aa, Ktedonobacter sp.; identical to SEQ ID NO: 3797

SEQ ID NO: 3839 - protein, 424 aa, Anabaena sp.
MSNYALVLDTNKQPLSPCHPSVARKLLDSGKAALFRMYPFTIILNKSCSDIVNQAIELKIDPGSKTTGIALVQGEKIIFGAELSHRGSAIKASLESRRSLRRGRRNRHTRYRQARFLNRTRTENWLAPSLQHRVETTLTWVNKLIKFIPITRISQELVRFDLQQIDNPEISGIEYQQGTLSGYEVREYLLEKWQRKCAYCGIENVPLQVEHIHPQARGGTNRISNLCLACEKCNIKKGTQDIKDFLAKKPDLLKCILAQAKRPLKDAAAVNSTRWALFSRLQETGLPVFTGSGGQTKFNRTRLNFPKTHWLDAACVGQIGELEILTNKPLLIKATGHGTRQMCRTDKFGFPSRYVPRIKFVKGFQTGDIVKAIVTTGKKIGKYIGRVAVRATGSFNISASKLVQGISYKYCKIIHRKDGYDYAF

SEQ ID NO: 3840 - protein, 431 aa, unidentified
  REGION 1..431: note = Human gut metagenome
MDAWDIIVVLTKRGKPLMPCSPAKARLLLKEKKAIVKRRTPFTIQLTIATGETKQPVSLGVDAGYKHVGLSASTEKAELYASEVELRQDITDLLSARRALRQSRRNRKTRYRAPRFDNRIRTKRKGWLAPSVENRINAHLSRIEAVLRLLPVTKISVETASFDMQLLKNPDISGKEYQEGEQLGFWNIREYVLCRDGHVCQHCYGRSKDPVLNVHHLESRRTGGDSPVNLITLCETCHKALHRGEITLKAKRGQSFRAEAFMGIMRWEVLNRLKASHSELKVHNTYGYRTKHTRIVNGIDKSHCADAFCIAGNFGAKRLGEFFFQKQTRRNNRQIHKLSILKGGIRKRNQAPFEVKGFRLFDKVACQGEEGFIFGRRSSGFFDVRKLDGTRISAGISYKKLHLLEKRRTYLTEIRKEEALPPLPEGRGLRA

SEQ ID NO: 3841 - protein, 447 aa, unidentified
  REGION 1..447: note = metagenome
MKGKLFMVFVLNKSKKPLDMITNAEARILLRKKLAVIHKIYPFTIRLKDNSAVSKDRSYTVKVDPGSRHTGIAIVDDRDQVVMLAEIEHRGNLIKKDLDSRRVVRRSRRNRKTRYRPARFLNRTKPEGWLTPSVKSRADNVINFIRKYKKLINISKVMIENVSFDTAQMTSNNYLIGTAYQQGPLYQKELRSFIFSRSNGKCVYCGAKATEIDHIVPRAKGGSNSIYNLVASCRSCNEKKSNLSLKEFGKRMNKDYSHLKPKKLPRDAAIVQSARNYMIKEVAKLVPDTTLHDAWLTKYNRDELGLPKEHYYDALSVGKIPTKFDFSTDKILLISAKGRGSRQMCRVDKFGFPRTSAKVSKSVEGFQTGDIVKAVVTKGLKKGEYFGRVIIKSSGYFKIGYNNCLVQGIGYKYCRLIQRGDGYSYNYKECDFLSAMNCRVPIAKGKK

SEQ ID NO: 3842 - protein, 447 aa, Marinobacter sp.
MSVFVLDKRKHPLMPCTERRARLLLSRRRAVVVRAYPFTIRLKNRTGDVTQPLRIKIDPGSKATGIAVVRENGQKQHVLALMELVHRGRQISKSLDQRRAFRRRRRNQLRYRAPRFLNRTKPKGWLAPSLQHRVDTTRSLVNRLRSLVPVVSISQELVRFDTQKMENPEVSGVEYQQGTLLGYEIREYLLEKWGRECAYCADTDTPLQIEHIDPKANGGSNRISNLTLACRPCNQEKDRKSLVSFFATSKRLKNHQAKLDRILKQCKKPLRDASAVNSTRWALHQTLKQTGLPVEVGTGGRTKFNRRRLNIPKTHALDAACVGEVEIVEGWDVPTLAIKATGRGSYKRTRLTKHGFPRGYLMRQKQVQGFQTGDMVRAVVPAGTKAGTWQGRVAVRKTGSFNIQTSSGAIQGISHRHCVLTQRADGYGYHIQPNQRKEEGDRENESR

SEQ ID NO: 3843 - protein, 499 aa, unidentified
  REGION 1..499: note = Human gut metagenome
MRYVYVLDVDGKPLMPTCRYGKVRRMLKSGQAKTVDTLPFTIQLTYQTKTKILQPVTAGQDPGRTNIGLAAAREDGTDLYRSHCETRNKEIPKLMAERLAHRRASRRGERLARKRLAKKFGTIAKKLNGRLLPGYKEPLAVKDIINTEAKFNARLRPEGWLTPTATQLLRTHLNLLERVSRILPVTDVAIEINRFAFMELADPDKKHSEIDFQHGALFGTGGLEQAIREQQQDRCLLCGKRDIEHFHHIIPRTKRGSNTIANLAGLCEQCHTLVHQSEEAKNRLEEKKQGLTKQYGGTSVLNQIIPSLVKELEKRYPGQLHLMTGRDTKAFREKHGLEKDHDVDAYCIAASRMENIKPKIQTEPFEIQQFRKHNRANIHHQTERTYKLDGKVIAKNRKKRMDQKTDSLEDWFATMTEQYGLEKAMRLRARLTVKKSTRHYNTKDRIMPGLVFRYGTKRYVMTGQITGGRYYRAYGAGNQNFPAQKVTMLKQNTGLVYVA

SEQ ID NO: 3844 - protein, 512 aa, unidentified
  REGION 1..512: note = Human gut metagenome
MSTVYVLNKDGKPLMPTTRGGHVRHLLKNQKARVVRTKPFTIQLLYETNDVVQPLYLGIDPGRTNIGVAVVKANGTAVFTAHLETRNKEVPKLMQDRKKARRARRTNGRRCRRQRRAKANGTISKKCVKQTTAQNGSVSKRAKDIGVIKRRLPGCEKDVLCIGIKNKETKFTNRTRPEGWLTPTANQLLQTHINLVKKIQKFLPISDVVLEANKFAFMRLDNPNIQKWQYQQGPLYKKESLESAVSEIQEHHCLFCKKPIDHYHHVVPQSENGSNTIANIVGLCSEHHNLVHKDVAWQEKLAEEKTGLNKKYGALSVLNQIIPALTNKLSVLFPKHFFVTAGKSTHDYRAAHGVSKDHWLDAYCIACSVLPSDVCDSNINNHMPYELKQFRRHDRRVLNNENMNRVYTLNNKAVAINRHKAKDQKTVSLEEFRKEHPDDVCKLKVKEHHPTYRNMNRNYPGSIFLVGKHVHIMQGIAGSKDGKATKYNDTSATAIAAGKCKFVAKNTGILFV

SEQ ID NO: 3845 - protein, 515 aa, unidentified
  REGION 1..515: note = Human gut metagenome
VAYMSTVYVLNKDGKPLMPTTRCGHVRHLLKEQKARVVTSKPFTIQLLYETDDVVQPLYLGIDPGRTNIGVAVVKTDGTAVFTAHLETRNKEIPKLMQGRKKARRTRRTNGRRCRRQRRAKANGTISKKCVKQTTAQNGSVSKRAKEIGVIKRHLPGCEKDVLCVGIKNKEAKFSNRTRQEGWLTPTANQLLQTHINLIKKIRKFLPISNVVLEINKFAFMRLDNPNIQKWQYRQGPLYQKASLEEAVSEMQEHHCLFCKKPIAHYHHVVPQSENGSNTIGNIVGLCTKHHDLVHKDTTWQKKLAKKKTGLNKKYGALSVLNQIIPALTKELSSLFPKHFFATNGKSTYDYRAAHSVSKDHWLDAYCIACSVLANDVCDSNINSRVPYELKQFRRHDRRALNNENMSRVYTLNGKVVATNRHKATKQTTDSLEEFRQNHSDDVCKLKVKEHHPTYRNMNRNYPGSVFLIGKQVHVMQGIAGSKNGEATTYKDTNANSIAAGKCKFVAKNSGILFV

SEQ ID NO: 3846 - protein, 442 aa, unidentified; identical to SEQ ID NO: 2637
  REGION 1..442: note = Human gut metagenome

SEQ ID NO: 3847 - protein, 447 aa, Marinobacter sp.; identical to SEQ ID NO: 2652

SEQ ID NO: 3848 - protein, 325 aa, unidentified
  REGION 1..325: note = Human gut metagenome
RKTRYRAPRFDNRIRTKRKGWLAPSVENRINAHLSRIEAVLRLLPVTKITVETASFDMQLLKNPDISGKEYQEGEQLGFWNIREYVLCRDGHVCQHCYGRSKDPVLNVHHLESRRTGGDSPGNLITLCETCHKALHRGEITLKAKRGQSFRAEAFMGIMRWEVLNRLKASHPELEVNNTYGYRTKHARIANDIAKSHCADAFCIAGNLGAERLGEFFFQKQTRRNNRQIHKLSILKGGIRKRNQAPFEVKGFRLFDKVACKGEEGFIFGRRSSGFFDVRKLDGTRISAGISYKKLHLLEKRRTYLTEIRKEEALPPLPEGRGLRA

SEQ ID NO: 3849 - protein, 464 aa, Ktedonobacter sp.; identical to SEQ ID NO: 3814

SEQ ID NO: 3850 - protein, 464 aa, Moorena sp.; identical to SEQ ID NO: 3503

SEQ ID NO: 3851 - protein, 421 aa, Moorena sp.
MQNCIFVLDANKQPLSSTHPARARKLLKQGKAAVFRTYPFTIILRKTVGTPGNEPYRIKLDPGAKVTGIALVNERTGTVVWAAELSHRGDIIRQKLSFRRVVRRNRRNRKTRYRPARFNNRKRPLGWLTPSLQHRVETTMTWVKRLRKYCPITDISMELVRFDMQKLQNPEISGVEYQQGVLFGYELREYLLTKWRHQCAYCGAKEVPLEIEHIHPKSKGGSDRVSNLAIACHKCNQKKAASAVEQFLKKRPEVLKRLLAQAKAPLKDAAAVNSTRWALFNRLKETGLTIETGTGGLTKYNRTLQGLPKTHWLDAACVGKSTPMLKISTTQPLLITCKGRGGRQKAALNKYGYPIRHNPLKPIKGWQTGDIAKHKVHGIGRITPRSRGSFVLTKPDKTQKSVKPIDLKPVFRRDGYAYKWG

SEQ ID NO: 3852 - protein, 442 aa, unidentified; identical to SEQ ID NO: 3037
  REGION 1..442: note = Human gut metagenome

SEQ ID NO: 3853 - protein, 429 aa, Ktedonobacter sp.; identical to SEQ ID NO: 3703

SEQ ID NO: 3854 - protein, 504 aa, unidentified
  REGION 1..504: note = Human gut metagenome
MAWEAIQTRRIKPHDIGEGTLRRHAAGTVSFPVLCKNRKETLMSVLVIGRNGRALMPTNPRKARLLLKKKTASVVCRHPFTIQLLYKTGCATQEGCIGIDTGSQHIGVGITCGDRVILKDEHALRSSMEKRSLLATRTVMRRGRRYRKVRYRKPKWRHHTKRMYFEKANRRGQHWRKVKTTTQSPRLKGWLPPSLQSKCDHHFRIIDRYLKYLPDPITRNLVIEAGRFDMARMNDPTIHGEMYQRGPMYDAENLRAYIFARDNYQCACCKAKAGTTRKADGTTVKLVAHHILFRSRGATDNPKYIISVCDHCHTTKAHQPGGILYSWMENNKKVARGLRDATFMNILRKRLFARYPQAAFTYGNITAADRKQLRLPKSHANDAVAISLFGKEASTVKNICQTMHYKQIRKSKRSLHEAIPRKGRKNPNTKAVRNKKNTTQANGFKLWDSVLADGKKLFICSFTGTSAYLIDKNGCYISQPGKTYKQWPLSKLKRLHPNGNWLMA

SEQ ID NO: 3855 - protein, 486 aa, Moorena sp.
MKEAEPTQQLGRRDTYTPRDAAPVPGSVAARLNSSERVGAVPRSLKTRPNNSEEHLTPKPKGGGGQDLRVPVLNMRGEPLMPTTPRKARILLKQGKARVVSRTPFVIQLLYPTGENKQDITLGIDAGYSVIGYSAVTAKRELIAGELELRNDIRRLLEKRRKYRRDRRSRKWYRKPRFDNRRKKDGWLPPSLEHKLQSHIRLIERLKRILPITRVVVEVASFDTQKMQNPEIKGVEYQRGELAGYEVREYLLEKWGHKCAYCGKTDVPLEIDHIVPKSRGGSNRVSNLTIACHKCNQRKGNRTAEEFGYPEVQAKAKEPLRAAAFMNNIRWELVNRLGCDWTYGSITKYKREKLNLEKSHVNDAFVIAGGNSNHIRTGYVYKAKQVRRQNRSLFKANILKGGRKRRNTIKEVNGFRRFDKVLYGKLKCFIFALRTSGYFRLRDIEGNKIGASVNSKKLKLLERARGRIEEVIRATCAEPRGILAHG

SEQ ID NO: 3856 - protein, 465 aa, unidentified
  REGION 1..465: note = Human gut metagenome
MSTCVCVLSNNGERLMPTIRLGRVRHLLKDGKAKIIKHHPFTIQLLYDSKTNTQPIEICEDVGYNYIGISVKSQSHEYVSAQYDTLQDEKACHDSCRKLRRTRRNRLRYRKPRFDNRKRGEGWLAPSLKHKKELNVNVVKMYCTVMPITHATVEVGSFDTMLVKAIQEGKVIPEGADYQKGPRYNLATLREAVFYRDNYVCKICGRKATEGAILHMHHMFYWKGRHGNSLNELLTVCEKCHTPANHQKSGKLYGFGEKIKFADLSGAAFMNTVRWQIVNELYVAFGKPFVTITYGAMTKEKRIALQLEKSHNNDAYAMGEFHPNLRCMFEHYEKARRNNRILEKFYDSRYIDIRTGEIATGKELFNGRINRNHKKDSENLHKYRGKRTYAGHRALLRKKVNLNPGDLVSLNGENLIVHSTHTKKNGAVNVEFETPAKSGQKSASLKKLKIVKAANSIHPAWKKIS

SEQ ID NO: 3857 - protein, 470 aa, unidentified; identical to SEQ ID NO: 2825
  REGION 1..470: note = Human gut metagenome

SEQ ID NO: 3858 - protein, 387 aa, unidentified
  REGION 1..387: note = Human gut metagenome
MVYVVANDGQPLMPTERHGKVCRMLKSGMAKVVKKCPFTIQLQYESERNVQPVALGIDAGSKHVGVSATTKAKVLYESDVELRDDIVKLLATRRQLRRRRRSRKTRYRPARFDNRRRKEGWLAPSIRQKIESHLTVVANACKILPINQIIVETASFDIQKIKDPEIQGIEYQQGEQMDFWNIREYVLFRDGHTCQCCKGKSKDKVLNVHHIESRKTGGNAPNNLITLCETCHKGYHNGTVTLPKNIKRGMKFKDAAFMGIMRWTFYNTLKEQYEPDIPVHYTYGYITKNTRINHNLLKGHCIDARCISGNPDAVSDGTYYYQKKVRCHNRQIHKQTILKGGIRKSNQAEYLVRGFRLFDKVRYQGREYFIFGRRKSGFFDIRTLSGE

SEQ ID NO: 3859 - protein, 460 aa, Moorena sp.
MHVFVLDKDKNPLAPCHPAKARRLLKSGRASVFRRYPFTLILHEIEAKDCVVPETQLKIDPGSQTTGLAILSENRVIWASELSHRGQQIKNDLEKRRALRRSRRHRKTRYRKPRCLNRTRPKGWLLPSLNASAPLSVESERSRGLNHRVETTMTWVNRLRKLCPIVSIAQELVRFDTQKLQNPEVSGIEYQQGELLGYEIREFLLEKWGRKCASLGARSLAPCDGAGSHRYCGAENLPLEVEHIHPKSQGGSDRVSNLTLACHTCNQAKGNRDIREFLSGKPTVLNRILKQAKAPLKDAAAVNATRWKLYQQLKETGLPVEVGTGGQTKFNRTRLGLPKTHWFDAACVGKSTPDRLDVAVEKPLLVAAKGHGVRQRCRSDRYGFPRTHAPKAKSFQGFQTGDIVKATIPQGKFAGNYTGRIAIRFRPSFRLNAGVKPFDVHPKYLTTVQKSDGYEYRFSK

SEQ ID NO: 3860 - protein, 323 aa, unidentified
  REGION 1..323: note = Human gut metagenome
TRYRAPRFDNRIRTKRKGWLAPSVENRINAHLSRIETVIRLLPVTKITVETTSFDMQLLKNSDIAGKKYQEGEQLGFWNVREYVLFRDGHVCQHCHGRSKDPVLNVHHLESRRTGGDSPGNLITLCETCHKALHRGEITLKAKRGQSFRAEAFMGIMRWEVLNRLKASHPEQEVQNTYGYRTKHARIENGIAKSHCADAFCIAGNLGAERLGEFFFQKQTRRNNRQIHKLSVLKHGLRKRNQAPFEIKGFRLFDKVACKGEEGFIFGRRSSGYFDVRKLDGTHISAGISYKKLRLLEKRQTYITEIRKEEALPPLSEGRGLRA

SEQ ID NO: 3861 - protein, 436 aa, Ktedonobacter sp.
MSKVLVVDTTHKPLDPVHPGQARRLLKQGKAAVWRRFPFTIILKKEVTQPQTQPFRLKLDPGSRTTGIALVNDASGEVVFAAELTHRGEQVKEALETRRGARRGRRARKTRYRRARFHNRRRPKGWLPPSLESRLSNILTWVRRLCRYAPVACISQELVRFDMQLLENPSIQGEEYQQGELAGYEAREYLLEKWERRCAYCGKSHLPLQIEHIVPRVKGGTNRLSNLTLACESCNQAKGSQDLEDFLKKHPKRLQQIQAQAKAPLKDAAAVNATRWALFERLMAMGLPVEVGSGGLTKYNRSIRGLPKTHWLDAVCVGRSTPEQLQTSGVVPLEIRAQGHGCRRVRNVNGLGFPCSAPKRAKKVQGFQTGDICRARVTRGKKQGTYTGRVLVRTSGSFDLTTRSGRITGLNMRFFTPLHRCDGYSYQKGGVHSSPA

SEQ ID NO: 3862 - protein, 477 aa, Acidithiobacillus sp.
MFVFVMDQYGRPGHPTRRMDWVRKQLKHKRGKIVGGGISGKPAVLVLREQSFDRSKTVKRRFFVTLDTGFRNVGYAVTELLADGTLRVLLKGTLTARTPELRGLMDERKMYRRARRYRRRLNVRKKGQTPKHRPPRYESRGKRDSVTLQHGLETHRNLYARLARLVPLPDHQVTRGFESVSFDLRALAHGRPRTGSGYQVSPADKEKGEKTGRFIVRRDGGCVICGGKEHLQVHHLRKRSQQGSHRVGNQVALCEDCHDDVHAGLIDLPITDGAQWRDASMVNAVCGKLRKLSAEAGMVPVPVEISVAARRRLGLEKTHALDAVSVAAALTGAGTVDQRDTLDMDLAQYRRHRRAHIHAQRDRLYYLPGEKRPVAHNRRKRCDQGDVDSLAEFRRTHPKDVGRLQVKRAVRLYTPHRAKAPAVGGDVWNIGGLRVVAKGVHSKTNLYVPSLRSITGKVYASPKEGVRLFRNSGMVVA

SEQ ID NO: 3863 - protein, 420 aa, unidentified
  REGION 1..420: note = Human gut metagenome
MQYVYVLNKHGEPLMPCSPGKARLLLKQQKACVVRRTPFTIKLLYGSAGYKQPITLGVDAGSKHVGLSASTEKRELYSEEFTPRSDVVKLLSTRKQNRRSRRYRKTRYRAPRFDNRVHSKHKGWLAPSVEVKIQEHITVIKRICKILPISLVRVETAEFDTQRLKAMLAGKPLPVGTDYQLGEMYDEYNVRQYVLKRDHYTCQCCGAHNTAKKVVKLHVHHLESRKTGGNAPSNLVTLCTTCHKNLHKGKVTLDGKERGKPLRDAAFMGIMRKTLMARLKEELPIPVQGTYGYITKMRREQNDIKKSHTNDARCISKHPLAEPCSVCYRTKAIRHHNRQTHKANFSKKGIRKRSQMPYFVEGFRLWDKVLYKGQECFVSGRRSSGSFALKKLDGTSISKGVTFKKLRLLEPATNYLIERM

SEQ ID NO: 3864 - protein, 570 aa, unidentified
  REGION 1..570: note = Candidatus Collierbacteria bacterium
MKQSKQSNKKFKAQALNSKEKSALDILGLRPDLVYQTQESMPKGIATPEGVTTTFKITSKDALRDDNSSPGPCKNETSKALTKAERLAKATERQLTEAQRNLNIVEENIASKATVPSREIARKGIHTQGRVLVIGQDSNPCMPCNPARARKLLKAGKAKIHLYFPFVIQLNYSPTGTQPVQLKGDPGTRTTGICLNILTQHGWRTVWAMHLVHHPDDIRNSLTKRRSQRNGRRSRNTRYRPPRWNNRKRAKGWLAPSLMTNVINLVTWVKRLKKHAPVTQITIEDVKFDTQLMQNPDISGLEYQYGTLHGTDIREHTFWKCNYTCSYCGKKNVPLTVDHIKSQSPRTPDRQAGTNTPSNLTAACKPCNQEKSNYSVEEFAIMRGVKSFPLLKINNEKNLKAVGISNSIRLRIIEETKNATGINPELGSGGRTKFNRENQKYPKTHFIDAACAGESGAKVSLNPNMQIYIVKACSRNARRMQQPDSFGFPKGKAKEFSCIHGVRTGDIGKAVVTKGKNKGTWIGRISIRSTGTFKVGNKDGVNYKKIKVIQRNNGYSYNFAYPPLFQNPKP

SEQ ID NO: 3865 - protein, 423 aa, Moorena sp.
MRVFVLNKNRQPLDPCKPARARILLSTGKAKVYRRYPFTIFLTEEIKEPITHEHQLKIDPGAKTSGLAIVQGKRVIWGAELTHRGFQIREALTSRRQLRCSRRNRKNRYRKPRFLNRTRPKGWLAPSLMSRVQNILTWVKKLTRLCPVTGISQELVRFDTQKLQNPEISGIEYQQGTLYGYELREYLLEKWNRKCAYCGATGTQLEIEHIKPKSKGGSDRVSNLAIACRPCNQAKSNQDIELFLSKKPSILKRILNQAKRPLADAASVNTTRWKLYHELKSIGLPIEVGSGGLTKFNRCRQSLPKTHWLDAANVGKVETLIIEVTHPLIMTAKGHGTRQLCRTNKYGFPIRHCSRIKFHKGFQTGDIVRAVVTKGKNIGTYVGRVATRKSGSFNISTKSGLVQGISHKYCQFIHRKDGYAYTN

SEQ ID NO: 3866 - protein, 458 aa, Microcoleus sp.
LQSNKLKVTLVSAANLTSLYNQVEANITRKWRDTTMSNFIFVVDTNKKPLTPCKSSMARKLLTAGKAAIFRRFPCTIILKKAVTATIESITLKLDPGSKTTGIALLQGEKVIFGAELTHRGQTIKASLESRRSLRRGRRNRNTRYRQARFLNRTRKKGWLAPSLQHRVETTLTWVEKLRRLAPIGLIVQELVRFDLQQLENPEISAIEYHQGELQGYEVRQYLLNKWNRKCAYCDAENVPLQVEHIHPKSQGGSNRISNLCLACQKCNQKKGTQKIEQFLAKKPDILSRILTQSKRPLKDAAAVNSTRWTLFDHLKETGLPVLTGSGGLTKFNRSRLQLPKTHWLDAACVGQVEALELLTNKPLLIKATGHGTRQMCRTDKFGFPSRYIPRNKFVKGFQTGDIVKAIVISGNKIGEYVGLVAVRTTGSFNISASELVQGISHKYCKIVHRKDGYSYAY

SEQ ID NO: 3867 - protein, 419 aa, unidentified
  REGION 1..419: note = Human gut metagenome
MVYVISQDSKPLMPCSNVIARLSLKQGKAKVKRREPFTIKLTCETTNYTQDLTLGVDTGSGTIGTAVSKNNGDIVYMAEVVVRNDITDKMTQRAKYRRNRRNRKTHYRKARWLNRANSIRNDRFSPTMQSKLHSHIKEIEYIKSILPVTEMVFETGQFDTHLMKNPSLINPKVKHWGYQKGTNYGFENTKAFVLNRDNYTCQYCKGKHKDSKLEVHHIVFRSQGGSDEESNLITLCHTCHKDLHSGKINTKLSGKIKGNLKYATQMNSIRKQLFRLYPNAIETFGYVTKANRLHLGVDKEHYYDACTIATQGNAFNVKSNLYKKKCVSDGDFQQTKGIRSEQPIVTDKICGFRKYDKVKYFGREYFIKGRMSTGYAILMNINGEKADFSYLPRGFKTPKLSNCKRITARTSQMVQAVAI

SEQ ID NO: 3868 - protein, 471 aa, Acidithiobacillus sp.
MAVFVLDKRKKPLMPCSEKRARILLERGRARVHRMVPFTIRLVDRLQEDSVLQPLRLKVAPGSKTTGLALVREQETEDADTGEIIRTLAVVTLLELQHRGHAISKALKQRRGHRRFRRNQLRYRPARFLNRKRPTGWLSPSLQHRVDTVTAWVSRLQRWAPVSALSTLLHRFDTQALQNPEISGAEYQHGTLFGYEVREYLLEKWGRKCAYCDAEHTPLTIDHIHPKSKGGSDRVSNLTLACVPCNQRKSNLDVRDYLAHDPKRLARIEAQRKAPLKDAAAVNSTHWALFNRLKDTGLDLEVGTGARCKWNRKRHNMPKAHSLDAACIGPVDGIAHWQQPVLQIKATGRGSYQRTRPTKHGFPRGYLMRSKSAFGFQTGDLVKAIVTKGKKAGVYLGRVAIRASGSFDIQAKNERVQSISHRFCTLIQRADGYGYFWDKIATSQGDAGTGAACAAALSLPGIHAGVSRANG

SEQ ID NO: 3869 - protein, 443 aa, Bacillus sp.
MVEENMTCFMQRKGEYPMVFVLDTNKCPLAPCHEAVARKLLKQGKAAIYKRYPFTIILKEIVDNFRPKTPYRLKIDHGSKHTGLAILRGQEVVWLGQLDHRTDIKERMDKRRAFRRARRNRKTRYRKPRFLNRRRKDGWLPPSLESRVQNIQTWVNRLKKLCPIGYISYENTKFDTQLMRNPEISGIEYQQGTLQGYEVREYLLEKFGRKCCYCGKENVPLEVEHIIPKSRGGTDRVDNLCLACHDCNQRKGSKTAEEFGYPHIQKQVKESLKDASAVNSTRWKVYEVLKQSGCEVECGTGARTKMNRIRLDLPKTHYFDACCVGESTPNHLYFKTKEVLFIRAKGRGSRSRTNLDRYGFPRGYLARQKFFFGFQTGDMVKAVIPRGKYQGVWFGEVSCRKTGSFDIKGKDGKRIAQGINYRYVQVIQRFDGYTYRREGMNIA

SEQ ID NO: 3870 - protein, 512 aa, unidentified
  REGION 1..512: note = Human gut metagenome
MSTIYVLNKDGKPLMPTTRGGHVRHLLKEQKARVVQSNPFTIQLLYETNDVVQPLYLGIDPGRTNIGVAVVKADGTAVFAAHLETRNKKIPKLMQDRKKARRARRTNGRRCRRQRRAKANGTISKKCVKQDTAQSKNPSKRAKEIGVIKRHLPGCKKDVLCVGIKNKEAKYTNRARLEGWLTPTANQLLQTHINLVKKIQKFLPISDAVLEVNKFAFMRLDNPNIQKWQYQQGPLYQKGSLENAVSEMQEHHCLFCEKPIEHYHHVVPKSENGSNTIANIVGLCAEHHNLVHKDVAWQEKLVEEKTGLNKKYGALSVLNQIIPALTKELSFLFPKHSFMTNGKSTHDYRAAHGISKDHWLDAYCIACSVLPIDVCDSTINNCVPYELKQFRRHDRRALNNENMNRVYTLNDKVVATNRHKATEQEAASLEEFRKEHPNDVCKLKVKEHHPTYRNMNRNYPGSVFLVGKQIHVMQGIASSKDGKATKYNDTRATTIAAGKCKFVAKNSGILFV

SEQ ID NO: 3871 - protein, 427 aa, Enterococcus sp.
MVYVLSIDNEPLMPCSNVIARLLLKQGKAKVKYREPFTIKLTYETTTYTQPLTLGVDTGSQTFATAVADEKGNILYTSEVTLREDKNNSIKKKMDQRRMYRRNRRSCKTRYCKARFNNRKNSKRKERFSPTMTSKLHSHQKEIEFIKSILPIAKLIFETGTFDPHLMKNPSLANPKVKPWGYQQGPNYGFENTKARVLVRDNHTCQICNKKPKNERLEVHHIVFRSQGGSDEENNLVTVCHSCHVELHKGLIHPNFEGSLKSALKYATQMNSIRIQLLKLYPDAIETFGYVTKANRLNLGLPKEHYVDAAVIATAGNQVKFACNLMIKRCIPKGDFQRTKGVRSEKTIPKGKIDGFKKYDKVRYFGNEYFIKGRRTSGYFTLMDIYGQTISFNHMSKGQKTPKAKNCHRISARKSWIVTTKKLENIA

SEQ ID NO: 3872 - protein, 430 aa, unidentified
  REGION 1..430: note = Candidatus Falkowbacteria bacterium
MVFVLDKNRKPLAPCHPARARKLLKTGKAKIFRKYPFTIILEKEIEEENEEEYRLKIDYGSRHTGLAILKNNKEAIWLAQIEHRTNIKDKLDTRRGHRKFRRNKLRYREKRFNNRKRKKGWIPPSLQSRVDNIQSWVEKLQKLVPLTYISYENVRFDTQLMQNAEISGIEYQQGTLTGYNTREYLLEKFNRKCCYCGKQNIPLEIEHIIPKSRGGSNKVDNLCIACHDCNQKKGNKTAEEYGYPNIQKQVKKSLKDCAILNATRWKVYKALISTGLEVECGTGARTKMNRINLGLPKDHHYDAVCIGQSTPKEIVFKTNKVLYIKALGRGSYSRTTLDKYGFPRAYLLRQKYFFGFMSGDMVKAVVPKGKNKGIWYGSVACRSTGSFNINLIKGRIQGINHKYCRIVQRFDGYKYTLERREMELSHSSHT

SEQ ID NO: 3873 - protein, 323 aa, Ktedonobacter sp.; identical to SEQ ID NO: 3819

SEQ ID NO: 3874 - protein, 417 aa, unidentified
  REGION 1..417: note = Human gut metagenome
MPCSPAKARLLLKERKAIVKRRTPFTIQLTIATGEAKQPVALGVDSGYKHIGLSATTEKAELYASEVELRQDITDLLSARLALRRSRRSRKTRYRAPRFDNRVASKCEGWLAPSVENRIVAHMSRVEAVMRVLPVTAITVETAAFDTQLLKNPDIAGEAYQQGEQLGFWNVREYVLFRDGHVCQHCRGKYKDPILNVHHIESRRTGGDAPNNLITLCETCHKAFHRGEIKLKVKRGKSFKAATFMGIMRWTLFERLKKAHPELSVRNTYGYLTKHKRISHGIAKSHCADAYCIADNLGAKRLEGFFFQKQTRKHNRQIHKLSILKGGLRKKNQAPYEVKGFRLFDKVICKGKEAFIFGRRTSGSFDVRRLDGTRISAGISYKKLRLLEPRTTYLTEFRREAALPPLPKCRGFRAEFL

SEQ ID NO: 3875 - protein, 429 aa, Ktedonobacter sp.; identical to SEQ ID NO: 3296

SEQ ID NO: 3876 - protein, 414 aa, Parasutterella sp.
MPCSPAKARLLLKEKKAIVVRRTPFTIQLTIATGESKQPVSLGVDAGYKHVGLSASTEKAELYESEVELRQDVSDLLSARRALRQSRRNRKTRYRAPRFDNRIRTKRKGWLAPSVENRINAHLSRVETVIRLLPVTKITVETTSFDMQLLKNSDIAGKEYQEGEQLGFWNVREYVLFRDGHVCQHCHGRSKDPVLNVHHLESRRTGGNSPGNLITLCETCHKALHRGEIKLKAKRGHSFRAQAFMGIMRWEVLNRLKASHPELEVNNTYGYRTKHARIANDIAKSHCADAFCIAGNLGAERLGEFLFQKQTRRNNRQIHKLSILKGGIRKRNQVPFEVKGFRLFDKVAYKGEEGFIFGRRSSGYFDVRKLDGTHISAGISYKKLRLLEKRQTYLTEIRKEEALPPLPEGRGLRA

SEQ ID NO: 3877 - protein, 448 aa, unidentified
  REGION 1..448: note = Human gut metagenome
MYWLIASNISKKKGSALHGICTRYQRTTTYANHKAWKSKRLLNSHLAKVVKRCPFTIQLLYQSTKEIQPVSLGVDAGSKHIGMAATTEKKVVYQEELSARNDVVKLLSARRTLRRTRRNRKTRYRKPRFNNRAHSKHKGWRAPSVEVKIQEHITTIKRICQILPISEIQVETAEFDLQRLKAMKEGKPLPVGTDYQLGEQYDFYNTRQYVLHRDGYTCQCCGTHDNNIKLHVHHIESRQTGGDAPNNLIILCEHCHKALHEGKLELSKGKKRGKSYRDATFMGVIRKTLLERLKKEIDVPVEGTYGYITKYWRERAGLEKSHIHDSVCISKYPYAKPLDIYYLTKTVRHHNRQIHKSNFSKGGIRKRNQAPYLVKGFRLFDKVLYQGKEYFIFGRRATGYFDIRTLDGTKVNKGSISYKKLRIQDTAKAYLKEARAIPHMNKFTCILA

SEQ ID NO: 3878 - protein, 518 aa, Anaerostipes sp.
MTPKKRKEASRMSEYIYVIGVDGDPQMPTKRKRHVEQLLQTGRARIFRQVPFTIQLTYENEPVLQPVTIAEDPGRSNIGMAVVSLSGELLSAAVVQTRNKEIAKLMEKRKQHRRASRNGERRARQRLAKKYHTMITAGFLMRKLPMYGKDKRVRCNVIKNTESRFCNRKRENGWLTPSAEHLVRTHINLIHKMQKFLPITDVAIEINRFAFLSLEDPSISGVDFQNGPLKGYDDLNAAVEDLQDGHCLMCNSPIEHRHHIVPRSMQGSNTIGNIAGLCCKCHERVHKDTRFEDRLKKKKAGLDKRYAAVSVLNQAIPFICKRLEQEFEKEHVHYCSGRDTGMVRRPFGYHKTKEEQLHEVDAWCIAVLALQHVPEKAPEFDHVHEILQFRRQDRSRIKAQTSRAYYHEGKKIAKNRKKAEGQRDDSLQEWRKRQVERYGKEQTRKMISQLEVKESIRRYNRLDRLMPGAVFYYQGVRYVMRGQHSNGQYLQAVGMGSKDFPAKKCKIVANNEGLVFVS

SEQ ID NO: 3879 - protein, 458 aa, unidentified
  REGION 1..458: note = seawater metagenome
LVLDNQKQPLMPCRPARARQLLRDGKAAVFRRYPFTIILKDRQGGDTQPVSLNVDPGSKTTGIALVALFQRGHVAVYGHHIVHRGQQIKDALESRRAIRRLRRNRKTRYRKPRFLNRPRPAGWLPPSLMSRVYNVDTWTKRLNRLTPVTSANVETVRFDTQLIENPDIAGKDYQQGSLFGWELREYLLYRHQHTCAYCHGLTKDVVLEKEHVIPKSLGGSNRLANHVISCRECNVDKGSLHPNAWMSLCKQRGDKLNLTRARNMQRIMDGYRPSLRDAAAVNATRYAVGNSIKSIIPNTQFWSGGLTKKNRSEQGYTKDHWIDAACIGQNGSEVALECHHILVSSAKGHGSRQMCRVDKYGFPRTSAKTSSVVYGFRTGDLVTANVPTGKKQGLHIGRVAVRKNGYFNIQSESGAVQGISHKHCRITQHSDGYNFNYGAAIPPTTDSKNSVAVFLPNF

SEQ ID NO: 3880 - protein, 447 aa, Marinobacter sp.
MSVFVLDKRKHPLMPCTERRARLLLSRRRAVVVRAYPFTIRLKNRTGDVTQPLRIKIDPGSKATGIAVVRENGQKQHVLALMELVHRGRQISKSLDQRRAFRRRRRNQLRYRAPRFLNRTKPKGWLAPSLQHRVDTTRSLVNRLRSLVPVVSISQELVRFDRQKMENPEVSGVEYQQGTLLGYEIREYLLEKWGRECAYCADTDTPLQIEHIDPKANGGSNRISNLTLACRPCNQEKDRKSLVSFFATSKRLKNHQAKLDRILKQCKKPLRDASAVNSTRWALHQTLKQTGLPVEVGTGGRTKFNRRRLNIPKTHALDAACVGEVEIVEGWDVPTLAIKATGRGSYKRTRLTKHGFPRGYLMRQKQVQGFQTRDMVRAVVPAGTKAGTWQGRVAVRKTGSFNIQTSSGAIQGISHRHCVLTQRADGYGYHIQPNQRKEEGDRENESR

SEQ ID NO: 3881 - protein, 453 aa, unidentified
  REGION 1..453: note = Human gut metagenome
MLMAVAVVSRTGVPLMPTSPYRARKLLASGKAEKYGYDPFTIRLTERETGDTQPVELCMDTGYIHIGVSVKSEKHEYLALQIDTLTDEKKKHEKCREKRRNRRSRKRYRKPRFDNRKRDKGWLAPSLEHKKEIHVRAAERICRVVPVTDITMEMGNFDTQVLKAREEGRPLPQGTDYQQGERYGTATLREAVFSRDNYTCLCCGRTMKDGAYFHVHHIRYRSQGGTDRMANLATVCEKCHTPANHQPGGKLYNWKLEIKSFKGATFMTAVRWQMYREIKEKIPDISVHLTYGAATKERRRALDIEKSHVNDAFVMGRFHPGHRARPELYIKKRRNNRVLESFYDARYIDSRDGKRKSGKELFNGRISRNHKKDSENLHKYRLRKVSKGKRSIRKKHYPIQPHDILVYCGRKYETAGCHNLGTGAILLPERKSIAVSKLKIYRYSGGYYKAEFN

SEQ ID NO: 3882 - protein, 493 aa, unidentified; identical to SEQ ID NO: 3781
  REGION 1..493: note = metagenome

SEQ ID NO: 3883 - protein, 427 aa, Nitrosococcus sp.
MNRVFVLDTDRKPLMPCSPARARRLLRDGKAAVYRMQPFTIILKYRVDPNPQPVEFKVDPGSKITGLALVGNFPQQGRVVLWAANLTHRGYAIRERLASRRSLRRGRRGRKTRYRAPRFLNRTKPKGWLPPSLNSRVENVSSWFNRLLDRVPISECHIETVRFDTQKIQNPEINGVEYQQGELMGYEVREYLLEKWDRKCAYCNKKDIPLEVEHIIPRSRGGSNRVSNLTLARAPCNKKKNSKTAAEFGYTQIQSKSKLPLKDAAAVNATRYAIGCTIQSVGLPTSFWSGGRTKKNRISQGYTKDHWIDAACVGESAEQVTITEGYRALHIKATGRGTRQVVRTDKYGFPRGKAGRCRRVKGFQTGDLVRLSQPQGKYAGDHVGILASIRASGTFDVKAKAGKISANWINFKLIQRGDGYDYSLSAV

SEQ ID NO: 3884 - protein, 420 aa, unidentified
  REGION 1..420: note = Human gut metagenome
MIYVRSKDGKALMPSERGGRIGYLLRHGKAHVVSRVPFVVQLDYESTTYTQEVSLGIDAGSKHIGVSASSEKKELLAAQVELRSDVVNLLSARMELRRTRRNRKTRYRKSRFDNRKRMDGWLAPSVKQKVESHLKVIRLVHKLLPITKTTIEVAQFDAQKIKNPDIKGDKYQQGEQMGFWNVREYVLARDGHRCVHCKGKSKDPILNVHHLESRKVGGNSPSNLVVLCETCHKAYHRGEFDLKIKRATTLRDAAVMNIMHWSVYERAKAEFGNVYLTYGYITKHTRIENGIAKTHAADAFCIAKNVNAMRLSFFFMCRCIPRHTRVLHVANPKKDGIRRSTIASHKIGKSRFQRFDMVRWRGKECFIFGSTHGRPVLCDIEGIKMHDKQAVNIKTIKFLKRLRNDILVEEKTSESFHNYK

SEQ ID NO: 3885 - protein, 423 aa, Microcoleus sp.
MSNHVFVLDTNRKPLTPCQPGVARSLLKAGKASVFRRYPFTIILNKEVDANPEPVEFKLDPGSNVTGIALKQGNRIIFAAELQHRGQQIVEALRSRRQLRRSRRNRKTRYRPARFLNRTRSEGWLAPSLQHRVDTLMTWVNRFRRLAPIGRIAQELVRFDLQLMKNPDISGVEYQQGALQGYEVREYLLEKWGRTCAYCGVQNVPLEVEHIQPRSKGGSDRVSNLTMACRSCNQAKGNGDIRDFLSGQPDVLSRLLRQAKSPLNDAAAVNSTRWALFNALNATGLRVTTGTGGQTKFNRLRLNLPKAHWLDAACVGPVESLDIVTSKPLLIVAKGHGTRRMCGTNKYGFPTRHRSRRQIHNGFQTGDIVTATVTAGKKIGSYIGRVLCRASGSFDITTASGRVAGINHKYCKPIHRKDGYAYA

SEQ ID NO: 3886 - protein, 464 aa, Moorena sp.; identical to SEQ ID NO: 3503

SEQ ID NO: 3887 - protein, 501 aa, Nonomuraea sp.
VPHQQRALEFESADNPGIRDETGLEGRKAPGAGHVRGETSGSSPAAGGATPDHPVREAGRESHPYVFVLDKHGRPLQPCTPARARQLLKKGRAVVHRHTPFVIRLKDRSIDSSEVDGVEMGVDPGSQHTGVSVFTAQAGERRARFAIQLDHRGATIRKMLQQRAAYRRRRRTQNLRYRAPRFSNRTRPPGWLPPSLRHRVITTVSWIDRLVRWAPVRAVHIERAAFDTHAIAAGKPLEGVEYQLGTLHGTEVREYLLAKWGRACAYCGSSGMPLNIDHIHPRSRGGSDRVSNLTLACVSCNQAKGNRPIEDFLTRKPELLAKIIAQAKAPLRDAAAAQSTRWALWRALDSRLPTHVASGGRTKWNRTRNHLPKTHTLDALAVGKLDSISETVSAVLVAGCAGRGTHARTRLDKYGFPRLRMPRRKLYFGFQTGDFARAVVPTGKKQGTHIGRVAARTNGYFNVTTIHGTVQGVHHRHFRLLQRADGYAYTTQKEGRASSSG

SEQ ID NO: 3888 - protein, 442 aa, unidentified
  REGION 1..442: note = metagenome
MSTTVFVLDKKHRPLMPCRPARARRLLRAGRARVVKRFPFVIRLVDRTVEQSEVQPVLIKLDPGSRETGAAVVRDDEKKRHHALAFFVIKHRGGAIRDALKARSAFRRRRRSQNLRCRSPRFLNRVKPKGWLPPSLRHRVETTLSFVRRMCRYLPVSGIAAELVKFDSQKLQTPEVSGIEYQQGTLFEYEVREYLLEKFGRKCVYCGAEGVPLNIDHVVPRAKGGSNRVSNLVLACVSCNQKKGARSLEDFLKGKPEVLARVRRELKTPLRDAAAVNATRWVLFNELKATGLPVETGSGALTKLNRHAFGVEKEHWLDALCVGRLNGVVTRKGLNVLEIRCMGRGSRQRTRLTKYGFPRGYLMRQKCVHGFATGDMVEANVPKGKKAGLWRGRVAVRVSGSFNIQTPKGVIQGVGWKHCRLISHNDGYGYAWLGHAPHSSPA

SEQ ID NO: 3889 - protein, 425 aa, Moorena sp.
MENTLKVFVLNMRGQPLMPCSPPKARKLLRAGKAVPVRRTPFVIQLTVPTGETKQPITLGVDAGYKRVGLSATTAKEELLASEVELRQDVTGLLSDRLALRRARRNRKMRCRAPRFDNRVRSKHKGWLAPSVENRIHAHLSRIEAVLRLLPVTSVTVETAAFDMQKIKNPEIEGEGYQQGEQLGFWNVREYVLFRDGHVCQACKGRSKDLILNVHHIESRKTGGDAPGNLITLCEACHKAYHAGKLKQFSPRRGASFRAETFMGLMRWTVINRLRERHPELPVTNTYGYLTKHKRNVAGLPKTHCADAFCIAGVLDAKRRGEYLFQKQTRRHNRQIHKLTILKGGVRKRHQAPYLVHGFGLFDKVLCKGEVGFIFGRRSSGAFDVRRLDGTKISAGISYKKLSLLEKRKMFLTELRKEGRDSSRV

SEQ ID NO: 3890 - protein, 461 aa, Clostridium sp.
MVFVLSKNKKSQSMCSNAKARVLLSKGYAVVHKVYPFTIRLKKEVDNPQQPKEYKLKIDPGSKGTGLSIIDNKDNVVFLATIEHRGQVIVSKLETRSGARRNRRQRETRYRKCKFINYYLKKGSKYKATSPRPLGWLPPSIKSIEQNIVSWTKKLSKLCNITSASIEVVSFDMQFMDNPNIEGVEYQQGTLLGYEIRAYLFEKYGHKCQYCNGVSDDNKLEIEHMISVKNGGSYAIKNLSLACHTCNDAKGSLNLAEWFEILKSSRKTKLNIERIKYIEPILKNATIHKPKRFGAWVNSYKNALIDDVRKLIDNVELSSGGRTMYNRIGLKLPKEHYYDALCVGEIPKTFKFKTNDVLSIKAYGRGSHFRGRTNKCGIITNNLPRQKYFFGFQTGDIVTAIVLKGKKQGKYFGRVAVRSSGFFNIQTKDNVVQGISRKYFTIIQRNDGYSYNIITRNKKNA

SEQ ID NO: 3891 - protein, 424 aa, Fervidobacterium sp.
VISKDGKPLMPTKRHGKVRRLLKQGLAKVVNREPFTIQLLYETTNYTQPVTVGIDIGSKVVGVSAITDKEEIFSAQIQLRQDISKLLLERRQHRRFRRYRKTRYRKPRFLNRRKEDGWLPPSLQWKVDAHVRIVNKLSKIIPITKVVVEVAPFDIQKVQNPDIEGEDYQNGPQKGFADVREYCLWRAGYKSELSGKTGVLEVHHIIPRSEGGADTPSNLIVLTTQEHKMLHEGKIKIPKSRLEQVKVLKDAAHVSAIGWYIVNKLKQNYQVAITYGSITKARRATYGLEKSHRDDAFVIAGGNIQERANEWYFGKLLRRQNRSLHKANPIKGGKRPLNTIKQVKGFRRFDRVECEGKIGIVSGLRSSGYFSISSLNGEKISDSVKYTKLRLLERAKTLMFERRERATCSWLKPRVSVARRYEIP

SEQ ID NO: 3892 - protein, 426 aa, unidentified; identical to SEQ ID NO: 3614
  REGION 1..426: note = Human gut metagenome

SEQ ID NO: 3893 - protein, 461 aa, Moorena sp.
MSRVFVLDARGEALMPCHPARARKLLTQGRAVVVHQQPFTIKLLDRVGGETQPVTLKLDPGSRVSGLVLVGHFARGAEVLWAGEITHRGQLIRDKLLKRAGVRRSRRSRQTRYRPPRFRNRRRRVGWLAPSLQSRVDNSLSWVRRLRGWCPVSGLAMELVRFDMQAMQNPEISGIEYQQGTLQGYEIREYLLEKWGRQCAYCAASGLPLQVEHIQARGQRGSHRVSNLTLACEHCNQRKGTQDIRDFLAHDPVRLARILAQAQAPLRDAAATGSTRWALYEALQATGLLLEVGTGGRTKYNRSQQDYPKAHWIDAACVGASGEQVSLDPAMPILQVKAMGCGSRQMCRMDKYGFPRTGPKRFKRVQGFQTGDLVEAIVPTGKPTVGALGEGGALCRARGGARLRLVQYFDAAGGVGAGHPCPLLPLTSTRRWLSLCHRACLARRGIASSRHCLAAPFLLRL

SEQ ID NO: 3894 - protein, 429 aa, Ktedonobacter sp.; identical to SEQ ID NO: 3591

SEQ ID NO: 3895 - protein, 455 aa, Ktedonobacter sp.; identical to SEQ ID NO: 3806

SEQ ID NO: 3896 - protein, 394 aa, unidentified
  REGION 1..394: note = Marine metagenome
MPTTPAKARRLLRDGKAKVVKKEPFTIQLQYATGETKQEINLGVDAGSKIVGLFATTEKEELFSAEVELRNDIVKLLAQRKAYRRNRRSRKTRYRQARFLNRKKEKGWFAPSIQHKINTHLKVVADIHKILPVSKIIVEVASFDIQKIKNPDIQGEEYQQGDQLEFWNVREYVLWRDGHRCHGKKGCKNNILNVHHIESCSTGGNAPDNLITLCKECHKAYHRGELKLNLKRGKSFRDAAFMGVMRRAFYNKLKDLYLDVNLTYGYITKTVRIKHNLPKSHRIDALCIGGNVSVKPNNVWFYIKKIRNQNRRLHKDTILKGGYRKANKATKYVFGYKLFDKVLFNNNKYFILGRRNNGYFSLGKLSGEKITVSYKKIKVIRMSQSLLCERRQTA

SEQ ID NO: 3897 - protein, 406 aa, unidentified; identical to SEQ ID NO: 2752
  REGION 1..406: note = Human gut metagenome

SEQ ID NO: 3898 - protein, 442 aa, unidentified
  REGION 1..442: note = Human gut metagenome
MVTVQQSTHHLPFGRVFIRRNLFMVYVISQDGKPLMPCSDPIARLLLKQGKAKVKKREPFTIKLTYETTNYTQGLTLGVDTGSGTIGTAVSKDNGDIVYMSEVVVRNDITDKMTQRAKYRRNRRNRKTRYRKARWLNRASSIKKDRFSPTMQSKLHSHVREIEYIQSILPITEMVFETGQFDMQLMKNPSLANPKVRPWGYQKGANYGFENTKAMVLNRDNYTCQCCKGKHKDSKLEVHHIVFRSQGGSDEESNLLTLCHTCHKDLHSGKINPKLSGKVKGNLKYATQMNSIRKQLFRLYPNAIETFGYVTKANRLHLGVDKEHYYDACTIATQGNAFNVKSNLYKKKCVSDGDFQKTKGIRSEQPIVTDKICGFRKFDKVRYFGNDYFIKGRMSTGYAILMDIDGNKIDFSTMPRGYKTPKLSNCKRITARSTVMTQVKVV

SEQ ID NO: 3899 - protein, 473 aa, Acidithiobacillus sp.
MFMHILVLDKRKKPLMPCHPARARELLREGRARVHRIVPFTIRLVDRLQADSVLQPLRLKLDPGSKTTGLALAREKETVDPTTGEVLRTLTILMLLELKHRGHAIRDALTSRSALRRRRRGNLRYRPARFDNRTKPEGWLAPSLQHRVDTTLAWVKRLMRWAPVTALSQELVRFDMQQMQNPEISGTEYQQGTLAGYEVREYLLEKWGRECVYCRAQHTPLEIDHIHPRSKGGSDRVNNLTVSCHDCNQRKGNRPLEQFLAKAPERAEKILKQAKARLNDAAAVNSTRWTLFQRLKATGLDVEVASGGRTKWNRIRLGLPKAHCIDAACVGHLDAIKNWQQPVLSIKATGRGSYQRTRLTKYGFPRGVLTRSKSAFGFQTGDMVKAVVTRGKKAGAWLGRVAIRVSGSFNIQTATGLVQGIHHRFCTLIQRADGYSYSWTKIASTQGDAGLGRSQTAALSLPGLNPGVSRATG

SEQ ID NO: 3900 - protein, 413 aa, unidentified; identical to SEQ ID NO: 3290
  REGION 1..413: note = Human gut metagenome

SEQ ID NO: 3901 - protein, 431 aa, Moorena sp.; identical to SEQ ID NO: 3507

SEQ ID NO: 3902 - protein, 421 aa, Ktedonobacter sp.; identical to SEQ ID NO: 2376

SEQ ID NO: 3903 - protein, 473 aa, unidentified; identical to SEQ ID NO: 3562
  REGION 1..473: note = uncultured beta proteobacterium

SEQ ID NO: 3904 - protein, 414 aa, unidentified
  REGION 1..414: note = Human gut metagenome
MVYVINKQGQALMPTERFGKVRRLLKNSLAHVVCRIPFTIQLDYDTTDYTQPVSLGVDAGSKHIGISATTSEKELYAADVELRNDIVDKLYTRRELRRTRRSRLRYRKARFNNRVSSKRKGWLAPSVENKIQTHLTVVEKIHKFLPITNIVVETASFDIQKINNPSISGVEYQQGEQLDFFNVREYVLFRDNHICQHCKSKSKDEVLNVHHIESRKTGGDSPNNLITLCETCHKAYHRGEFELNVKRGKSFRDAAFMGIMRWKLYDRLKNIYPNVSMTFGYITKNTRITNNLPKEHYVDARCISGNPVAKPLGYYFYQKKVRCQNRQIHKANFLKGGRKKLNQAPFLVKGFRLFDLVEYQKELYYIFGRRSNGSFDIRKLDGTKVNKGSINCKYLRLIDKRKSILTEKRTQVNL

SEQ ID NO: 3905 - protein, 374 aa, Halomonas sp.
LNWSIAAFRSKKALQQRAAFRRRRRSANLRYRAPRFNNRTKPKGWLAPSLQHRVDTVTAWVKRLSRLAPVTAISQELVRFDTQKLENPEISGVEYQQGTLLGYEVREYLLEKWERECAYCGTGDTPLEIEHVVPRSRGGSNRVSNLTLSCHPCNAEKDSQTLTDFFATNKGLKKRLKANGHAADARLDRVQRQLKQPMRDASAVNATRWALFSALKTTDLPVAVSSGGHTKYNRQRLNIPKTHALDAACVGAFEKLHDWTVPTLTIKAMGRGSYQRTRLTKHGFPRGYLMRQKQVHGFQTGDMVRAIVPTGKKAGTYTGRVAVRKRGSFNIQRSAGTVSDISYKYCTLIQRSDGYGYYVTPFTNLTGGAGQAVA

SEQ ID NO: 3906 - protein, 415 aa, unidentified
  REGION 1..415: note = Human gut metagenome
MVYVVANDGQPLMPTERHGKVCRMLKSGIAKVVKKCPFTIQLQYKSERNVQPVALGIDAGSKHVGVSATTKAKVLYESDVELRDDIVKLLATRRQLRRRRRSRKTRYRPARFDNRRRKEGWLAPSIRQKIESHLTVVANVCKILPVSQIIVETASFDIQKIKNPDIQGIEYQQGEQMDFWNIREYVLFRDGHTCQCCKGKSKDKVLNVHHIESRKTGGNAPNNLITLCETCHKGYHNGTVTLPKNIKRGMKFKDAAFMGIMRWTFYNTLKEQYEPDIPVHYTYGYITKNTRINHNLPKGHCIDARCISGNPDAVSDGTYYYQKKVRCHNRQIHKQTILKGGIRKSNQAEYLVRGFRLFDKVRYQGREYFIFGRRKSGFFDIRTLSGEKVNKGSINVKRLTFVDTRKNYLTERRTV

SEQ ID NO: 3907 - protein, 457 aa, unidentified; identical to SEQ ID NO: 3236
  REGION 1..457: note = Human gut metagenome

SEQ ID NO: 3908 - protein, 433 aa, Ktedonobacter sp.; identical to SEQ ID NO: 2375

SEQ ID NO: 3909 - protein, 465 aa, unidentified
  REGION 1..465: note = Human gut metagenome
MSTCACVLSKNGKRLMPTIRLGKVRHLLKDGKAKIIKHHPFTIQLLYDSEANTQPIEICEDVGYNYIGISVKSESHEYVSAQYDTLQDEKDCHDDCRRMRHTRRNRLRYRQARFDNRKRDDGWLAPSLEHKKELNVNVIKMYCEVMPIAHATVEVGSFDTMLVKAIEEGKVTPEGADYQKGPRYNLATLREAVFYRDNYTCQVCGRKANEGAILHVHHMFYWMSRHGNSLSELVTACEKCHTPANHQKGGKLYGFGENIKLANLSGAAFMNTVRWQIVNELYAAFGKPFVTFTYGAMTKEKRITLHLEKSHNNDAYAMGSFHPADRCAFEHYEKVKRNNRILERFYASQYIDIRTGEVTTGKSLFNGRINRSHKKDSENLHKYRGKRIRKGYRALRRKKVALNPGDLVSLNGETLIVHGTHTNKKGTVRVEFKTPSKGGKKSASLKNVEIVKTANSMHSAWKKVS

SEQ ID NO: 3910 - protein, 417 aa, unidentified
  REGION 1..417: note = Human gut metagenome
MPCSPAKARLLLKEKKAIVKRRTPFTIQLTIATGEAKQPITLGVDSGYKHIGLSATTEKAELYASQVELRQDITDLLSARLALRRSRRSRKTRYRAPRFNNRVASKRKGRLAPSVENRIAAHMSSVEAVMRVLPVTAITVETAAFDTQLLKNPDIAGEAYQQGEQLGFWNVREYVLFRDGHVCQHCRGKSKDPILNVHHIESRRTGGDAPNNLITLCETCHKAFHRGEIELKVRRGKSFKAETFMGIMRWTLFERLKKAHPELSVRNTYGYLTKHKRISHGIAKSHCADAYCIADNLGAKRLEGFFFQKQTRKHNRQIHKLSILKGGLRKKNQAPYEVKGFRLFDKVICKGEEAFIFGRRTSGSFDVRRLDGTRISAGINYKKLRLLEPRTTYLTEFRKEAALPPLHKCRGFRAEFL

SEQ ID NO: 3911 - protein, 461 aa, Desulfotignum sp.
MGAFAVNGVSRVFVLDKKGKPLMPCHPARARKFLAQGRARVHQMFPFTIRLVDRIREDSDVQPVNVKLDPGAKTTGMAVVRQDGGHAQILHLSELTHRGAVIRKKLDQRSNYRRRRRTANLWYRKKRFDNRTRPKGWLPPSLRSRVDNTLSWVKKYQRFCPVTGIVLERVRFDTQKLQNPDISGIEYQQGTLFGYEVKEYLLEKFNRTCAYCNGLSKDPVLEIEHFIPRNPSKGDKGSNRISNLAIACKTCNQESKKNLQPADWISLLSRSRKKIDQVRLKNATRFLEGKRPSLASTAAVNATRNAIFFELRDLGLPVECSTGGRTKYNRSRLDIPKTHCLDAACTGHVDSVSGWKQNVFLIKAMGRGSYQRTRVDKYGFPRGTLMAQKTVKGFATGDMVKAIVPTGKKKGTYICRVAVRKSGSFNIQTNTETVQGISWKYCKIISRQNGYNFASQVSSPT

SEQ ID NO: 3912 - protein, 425 aa, Caldicellulosiruptor sp.
MVYVISKEGKPLMPTKRHGKVRKLLKQGLAKVVRREPFTIQLLYDTTTYTQPVTVGVDIGSKVAGISAITEKEEVFSAEVELRQDIKKLLLERRELRRARRYRKTRYRKPRFLNRRKPEGWLAPSLQWKVDAHFRFVNFVAKILPVTKVVVEIALFDIHKVVNPEVEGKGYQEGPQKGFWDIREFCLWRAGYKSELSGKKGVLEVHHIIPQSQGGPDNPSNLIVLTVEEHKAVHEGKLKIPESKLAKVKIFKDASHVSTIGWHIVNKLKQQYDVEITYGSITKQKRKEIELQKTHRNDAFVIAGGNKNIKRADEWYFGKFFRRQNRSLHKTNPIKGGKRPVSTIKEVKGFRKFDRVLYNGQVGIIYGLRSTGYFDIRILSGEKIHSSAKWSDLKLLEKAKTLMLERRVQRTCLHLAEDGVSCAEV

SEQ ID NO: 3913 - protein, 471 aa, Caldicellulosiruptor sp.; identical to SEQ ID NO: 3268

SEQ ID NO: 3914 - protein, 433 aa, Ktedonobacter sp.; identical to SEQ ID NO: 2375

SEQ ID NO: 3915 - protein, 447 aa, unidentified
  REGION 1..447: note = Human gut metagenome
VPAYRFKHITKKEVPYMVYVLDIDGQPLMPTSRHGKVRRLLNSHLAKVVKRCPFTIQLLYQSTKETQPVSLGVDAGSRHIGLSATTEREVVYQEELVPRNDIVKLLSARRALRRSRRNRKTRYRRVRFNNRVHSKHKGWLAPSVEVKIQEHITATKRICQILPIFDIHVETAEFDLQRLKAMEEGRLLPAGTDYQLGEQYDFYNTRQYVLHRDEYTCQCCGTHDNNVKLHVHHVESRQTGGEAPNNLITLCEHCHKSIHAGKMMLPKGKKRGKSYRDAAFMGIMRNTLLERLRKEVNVPVTMTYGYITKYWREKAGLEKSHINDAICISKHPYARPLETYYLTKAVRHHNRQIHKTKFSKGGIRKRNQAPYLVKGFRLFDKVLYQGESYFIFGRRITGYFDIRTLDGTKVNKGSTSYKKLRIQDTAEAYLTEVRAIPHMNEFTCVLA

SEQ ID NO: 3916 - protein, 424 aa, Moorena sp.
MSNFILVLDTNRKPLNPCTPGIARGLLKSGKARVFRRFPFVIILNKAVLSSPAQMQLKLDPGSKTTGIALLQGEQVVFGAELTHRGQQIKNALESRRALRRGRRSRKTRYRKPRFLNRTRQCGWLAPSLQHRVETILTWVNRLRRYAPITNISTELVRFDMLALDNPEISGIEYQQGTLFGYEVREYLLAKWDRKCAYCSAENVPLQIEHIHPKAKGGTNRISNLCVACEPCNIKKGTQDVEVFLTKKPDVLKRILAQAKRPLKDASAVNSTRWALMNRLKQTGLPVLAASGGKTKFNRCRLLLPKTHWLDAACVGEVEQLEVKTTQPLLIKATGHGTRQMCGTDRFGFPTRHRKTIQIHKGFQTGDIVKAAVREGKKFGTYVGRVLCRATGSFDIATKSGRVAGISHKFCTHIHRKDGYNYAY

SEQ ID NO: 3917 - protein, 411 aa, unidentified
  REGION 1..411: note = Human gut metagenome
MVYVQDIDGKPMMPTTRHGKVRRLLKDNKAVVVNTCPFTIKLTYKTSDYKQEIVLGVDSGTKHVGLSATTKSKELYASEVILRSDVVDLLSTRRGLRRTRRSRLRYRKQRFNNRVKSKKDGWIAPSVRHKIDSHIRIISFVYSILPVSKLIVEVAQFDTQKIKNPEISGKEYQEGEQLGFWNVREYVLARDGHKCQHCKGKSKDPILNIHHIESRKIGGDSPSNLITLCETCHKEFHKGNIKLKVSRGKSLRDAAVMGIMKWKLYEELKSRYDNVSMTFGYITKYNRINHGIEKSHVSDAFVISRNFNSCRLGYYYKRKLVRRHNRQIHKMKILKGGIRKRNQAPFKVFGFKLFDKVMFQGEEHFIYARRLSGQFNIRDINGENKKDVSCKKLKYVSHGLVSVKTNLFLSQ

SEQ ID NO: 3918 - protein, 417 aa, unidentified
  REGION 1..417: note = Human gut metagenome
MPCSPAKARLLLKERKAIVKRRTPFTIQLTIATGEAKQPVTLGVDFGYKHIGLSATTEKAELYASQVELRQDITDLLSARLALRRSRRSRKTRYRAPRFDNRVASKREGWLAPSVENRIAAHMSRVEAVMRVLPVTAITVETAAFDTQLLKNPDITGAAYQQGEQLGFWNVREYVLFRDGHVCQHCRGKSKDPILNVHHIESRRTGGDAPNNLITLCETCHKAFHRGEIKLKVRRGKSFKAETFMGIMRRTLFERLEKAHPELNVRNTYGYLTKHKRISYGIAKSHCADAYCIADNLGAKRLEGFFFQKQTRKHNRQIHKLSILKGGLRKKNQAPYELKGFRLFDKVICKGEEAFIFGRRTSGSFDVRRLDGTRISAGINYKKLRLLEPRTTYLTEFRKEAALPPLHKCRGVCAEFL

SEQ ID NO: 3919 - protein, 470 aa, unidentified; identical to SEQ ID NO: 2825
  REGION 1..470: note = Human gut metagenome

SEQ ID NO: 3920 - protein, 452 aa, Lactobacillus sp.; identical to SEQ ID NO: 3322

SEQ ID NO: 3921 - protein, 452 aa, Ktedonobacter sp.; identical to SEQ ID NO: 3544

SEQ ID NO: 3922 - protein, 422 aa, unidentified
  REGION 1..422: note = bioreactor sludge metagenome
MQNFVFVLDANKQPISPCHPSVARKLLRDRKAAVYRRFPFTIILKRAVDKPIVEPITVKVDPGSKTTGIALIQSNKVVFAAEVEHRGQAIKDALESRRAIRRGRRQRKTRYRQPRFLNRTKKKGWLAPSLKSRVDNLQTWLVRFLKLCNVRSISMELVRFDMQLMQDAEISGVEYQQGELAGYEVREYLLEKFNRKCCYCGKSDIPLEIEHITPKSRGGSNRVSNLCLACRSCNVSKGNQTATEFGFPNIQAHAKKPLKDAGAVNSVRWAIWRMFDASGLPVEVGTGGRTKFNRAQRAPAQNYPKAHWIDAACVGESGQAVKLCPEQKPLRIKAVGRQSRQMCRPNKFGFPRTASKQSRVVKGGFQTGDIVKAVLPSGKYVGTHIGAVAVRATGSFRVGKTDGISWKYCQRLHALDGYSYAN

SEQ ID NO: 3923 - protein, 420 aa, unidentified
  REGION 1..420: note = Human gut metagenome
MQYAYVLNKHGEPLMPCSPGKARILLKQQKACVVKRTPFTIKLLHGSAGYKQPITLGVDAGSKHVGLSASTEKRELYSEEFTPRSDVAELLSTRRQNRRSRRYRKTRYRAPRFNNRVHSKHNGWLAPSVEVKIQEHITVIKRICRILPITLVRVETAEFDTQRLKAMLAGKPLPVGTDYQLGEMYDEYNVRQYVLKRDNYTCQCCGAHTTAKKTVKLHVHHLESRKVGGNAPSNLITLCTTCHNNLHKGKITLDGKKRGKTLRDAAFMGIMRNTLLTRLRNELHIPVQNTYGYITKLLREQNDIKKSHVNDARCISKHPLAEPCSICYRTKAIRHHNRQIHKAKILKYGIRKANQAPYIVKGFRLWDKVLYNGQECFISGRRTSGYFALRKLDGTTITNSISFKKLRLLEPATNYLIERK

SEQ ID NO: 3924 - protein, 413 aa, unidentified
  REGION 1..413: note = Human gut metagenome
MVYVLNENGQPLMPTENHAKVRVLLRQGKAKVVNNCPFTIQLLYSSTNYTQPVTLGVDAGSKHIGLSATTEDKELYAADVELRNDIVKLLATRRASRRSRRNRKTRYRKPRFNNRKRDKGWLAPSIKEKIGTHLKVVDDTCKLLPVSKIIVETASFDIQKIKNPDVKGTDYQQGEQLGFWNVREYVLFRDGHKCQCCKGKSKDKILNVHHIESRQTGGNAPNNLITLCETCHTGYHKGTIKLPAKIKRGMKFKDAAFMGIMRWAFYGELKKRYPDVSLTYGYITKNTRIENELPKEHYVDARCISGHPLARPLGTVFYIKKVRCHNRQIYKFKILKKGVRKRNQAEYEVYGFRLYDKVSWKGRTCFVFSRKSTGYITLRLLDGTRVKESASYKKIKLLRMRSGYLIESRSVIF

SEQ ID NO: 3925 - protein, 430 aa, unidentified
  REGION 1..430: note = Human gut metagenome
LETRNKEIPKLMQDRKKARRARRTNGRRCRRQRRAKANGTISKKCVKQTTAQNGSVSKRAKDIGVIKRRLPGCEKDVLCIGIKNKETKFTNRTRPEGWLTPTANQLLQTHINLVKKIQKFLPISDVVLEVNKFAFMRLDNPNIQKWQYQQGPLYKKESLESAVSEIQEHHCLFCKKPIDHYHHVVPQHKNGSNTIGNIVGLCAKHHDLVHKDSAWEKKLAKKSTGLYKKYGALGVLNQIIPTLTNELSSLFPKHSFVTNGKSTYDYRAAHGVSKDHWLDAYCIACSVLPSNVCDSNINNHMPYVLKQFRRHDRRVLNNENMTRVYTLNNKAVAINRHKAKDQKTVSLEEFRKEHPDDVCKLKVKEHHPTYRNMNRNFPGSVFLVGKQIHVMQGIASSKDGKATKYNDTSATAIAAGKCKFVAKNTGILFV

SEQ ID NO: 3926 - protein, 429 aa, Ktedonobacter sp.; identical to SEQ ID NO: 3200

SEQ ID NO: 3927 - protein, 419 aa, Butyricicoccus sp.
MYVYVLNKHGEPLMPCSAHKARVLLKNKKACVVKRTPFTVKLLYGSAGYKQPITLGVDAGSKHVGLSASTETHELYREEFTPRNDVVDLLSTRREFRRARRNRKTRYRAPRFNNRVHSKHKGWLAPSVEVKIQEHITVIKHVCQIMPILLVRVETAEFDTQRLKAMLEGKPLPVGTDYQLGEMYDEYNVRQYVLKRDNYTCQCCGAHATKTKQVKLHVHHLESRKTGGNAPSNLITLCPTCHKAIHEGKKTLGTKKRGKPLRDAVFMGIMRKTLLARLHKELSIPVQQTYGYITKMLREKNNLPKSHMNDALCIAKHPKAAPCENCYRSKAVRHHNRQIHKATILKGGIRKTNQAPYLVKGFRLWDKVRYNGQECFISGRRATGYFALRKLDGAIVTNSASYKKLRLLETAKNYLRERM

SEQ ID NO: 3928 - protein, 336 aa, Moorena sp.
MHVFVLDKDKNPLAPCHPAKARRLLKSGRASVFRPYPFTIILHEIEAKDCVVPETQLNASAPLSVESERSRGLKIDPGSQTTGLAILSENRVIWASELSHRGQQIKNDLEKRRALRRSRRHRKTRYRKPRCLNRTRPKGWLPPSLNASAPLASTSLASTSLSVESERSRGLNHRVETTMTWVNRLRKLLKETGLPVEVGTGGQTKFNRTRLGLPKTHGFDAACVGKSTPDRLDVAIEKPLLVAAKGHGVRQRCRSDKYGFPRTHAPKAKSFQGFQTGDIVKATIPQGKFAGNYTGRIAIRFRPSFRLNAGVKPFDVHPKYLTTVQKSDGYEYRFSK

SEQ ID NO: 3929 - protein, 424 aa, unidentified
  REGION 1..424: note = Human gut metagenome
MRVFVFNMRGRPLMPCSQRKARLLLRENKAMIYKYHPFTIQLTYTTGETKQDCHIGIDTGSKYIGAAVRSEDKVFWKGEIELRQDIRSNLDTKRIYRRSRRNRKTRYRKPRFLNRKRRDEWLPPSLQSRINHTFHWIDTLSSLVPNPILHIEVGKFDVAKMINPEIHGVDYQHGQTYGFFDERYFVFARDKYTCQCCGKSKNKILNTHHIIYRSNGGTNRVDNLITVCTDCHTSQNHRKGGIFYQWQEQHKKVKQYKEPPFMNTLRKRIFVAYPDAEITYGSETTPKRKAMKLDKTHYNDAIVISGINEIKENPEEWLLIKQFRKKKRSLHEATARKGRKKPNRNQTRNSKNTPYYKGFYLNDKVSVFGKSGYITGFTSNAAYIKDENNDYITLPNKTYKQVSINKMKLECHNNNWQYIIKNAV

SEQ ID NO: 3930 - protein, 400 aa, Lactobacillus sp.
PVTTNTQELTLGVDAGFHLGLSVVGNNREYYVSESLRKSEKDRITSRRELRRTRRNRLRYRKARFNNRRRKDGWLAPSIQHRLDFTIKEIKRLYKFLPITNLVVEVTPFDNQKLLNPDIQGWQYQKGKMYGFKTIKDYLLARDNYRDALDGKQYPASQLRVHHLVQRKDGGSNQPDNLVLLSDINHNQANHNNGILAKLRENRQKTLDYRGAYFMSILATRLSNYFEHYTTTQGYLTANLRQKYEIEKSHLNDAFVIAGGTDTTLRTNNVYSRQKLRNNNRVLQKFYDAKYIDSRDGKQKAGKELSSGRTRRSQELNYDNLRQLRKEKVKKGRVSIRRGHYQLRPHDVVLNTRTNRIETVKGVQNSGTVIKFQTGKTCSIKSVVSLYHVNGILEKKMKNI

SEQ ID NO: 3931 - protein, 551 aa, Moorena sp.; identical to SEQ ID NO: 3262

SEQ ID NO: 3932 - protein, 436 aa, unidentified
  REGION 1..436: note = Human oral metagenome
MTKTLTTQTTQVCVLDQNGKPLMPTTRLGKVYRLLKTKKAHIVSYEPFTIQLDYEPDTHIIQPITLGVDSGAIHSGYSIANEHREYYSAEVISRDDISKRLSDRRMYRQNRRYRKTRYRKPRFNNRKNKEKGWLPPSLEQKVTVQLNEIDHLHRYFPIGKIIVEVAEFDIQKIKNPNISGIEYQQGTLQGYNIRNYLLEKHGRKCFYCGKTVSDFEVEHMLPKSRGGSNRIDNLTLSCHECNQKKDTLTAEEFIKQTLPAKKAAAKLKQLPNEKRLFKYMAHMNATRWTLYSAIDEKYPNVEMTYGYITKYNRIKAELPKAHHIDAKCITGFVTVPSIDQTIVKVKMRRHNRQLHRTTFSKGHVRKTACLSTVVFGFQLYDLVLFNNRRYYIKSRKSSGYFRLASLEGLKEENRSYKKLTLLAHTNAYLINHYIIK

SEQ ID NO: 3933 - protein, 415 aa, unidentified
  REGION 1..415: note = Human gut metagenome
MVYVVANDGQPLMPTERHGKVCRMLKSGMAKVVKKCPFTIQLQYESERNVQPVSLGVDAGSKHIGISATTKTKVLYESDVELRDDIVKLLATRRQLRLSRRSRKTRYRPVRFDNRKRKEGWLAPSIRQKIGSHLTVVANVCKILPINQIIVETASFDIQKIKDPEIQGIEYQQGEQMDFWNIREYVLFRDGHTCQCCKGRSKDKILNVHHIESRKTGGNAPNNLITLCETCHKGYHNGTVILPKNIKHGMQFKDAAFMGIMRWTFYNTLKEQYEPDIPVSMTYGYLTKNTRIEHGLPKEHYIDARCISGNPDAVSDGTYYYQKKVRCHNRQIHKQTILKDGVRKSNQAEYLVKGYRLFDKVRYQGREYFIFGRRKSGFFDIRTLSGEKVNKGSISVKKLTFADTRKNYLTERRTV

SEQ ID NO: 3934 - protein, 512 aa, unidentified
  REGION 1..512: note = Human gut metagenome
MSTVYVLNKDGKPLMPTTRCGHVRHLLKEQKARVVTSKPFTIQLLYETDDVVQPLYLGIDPGRTNISVAVVKADGTAVFTAHLETRNKEIPKLMKKRKNSRRARRTNGRRCRRQRRAKANGTISKKCVKQDTAQNGSVSKHAKKIGVIKRHLPGCEKEVLCIGIKNKEAKFSNRVRPEGWLTPTANQLLQTHINLVKKIQKFLPISDVVLEVNKFAFMQLDNPNIQKWQYQQGPLYQKANLEEAVSEMQEHHCLFCKKPIAHYHHVVPQSENGSDTIGNIVGLCTKHHDLVHKDTTWQKKLAKKKTGLNKKYGALSVLNQIIPALTKELSSLFPKHFFATNGKSTYDYRAAHGVSKDHWLDAYCIACSVLADDVCDNNINSHVPYELKQFRRHDRRALHKENMSRVYTLNGKSVATNRHKATKQTTDSLEEFRQNHSDDVCKLKVKEHHPTYRNMNRNYPGSVFLIGKQVHVMQGIAGSKNGEATTYKDTNANSIAAGKCKFVAKNSGILFV

SEQ ID NO: 3935 - protein, 419 aa, Geobacillus sp.; identical to SEQ ID NO: 2623

SEQ ID NO: 3936 - protein, 347 aa, Ktedonobacter sp.; identical to SEQ ID NO: 3790

SEQ ID NO: 3937 - protein, 518 aa, unidentified; identical to SEQ ID NO: 3878
  REGION 1..518: note = Human gut metagenome

SEQ ID NO: 3938 - protein, 339 aa, unidentified
  REGION 1..339: note = Human gut metagenome
LLSARRALRQSRRNRKTRYRAPRFDNRIRTKRKGWLAPSVENRINAHLSRIEAVLRLLPVTKITVETASFDLQLLKNPDISGKEYQEGEQLGFWNIREYVLCRDGHVCQHCYGRSKDPVLNVHHLESRRTGGDSPGNLITLCETCHKALHRGEITLKAKRGQSFRAEAFMGIMRWEVLNRLKASHPELEVNNTYGYRTKHARIANDIAKSHCADAFCIAGNLGAERLGEFFFQKQTRRNNRQIHKLSILKGGIRKRNQAPFEVNGFRLFDKVACKGEEGFIFGRRSSGYFDVRKLDGTCISAGISYKKLHLLEKRRTYLTEIRKEEALPPLPEGSGLRA

SEQ ID NO: 3939 - protein, 433 aa, Anabaena sp.
MSKVFVIDTDKRPLDPIHSAQARQLLRNKKAAVFRRFPFTIILKESHSDSAVSPLRLKLDPGAKHTGIALINDVTGEVVFAAELKHRGFAIRESLTSRRQLRRSRRGRKTRYRQPRFLNRTRPEGWLAPSLQSRIENIKTWVKKLCNLARIEAISQELVRFDMQLMANHDIQGKEYQQGTLAGYETREYLLENWDRQCGYCGVKDVPFQVEHIHPRAKGGSNSITNLTLSCEKCNTKKGTKDIKDFLKKDPLKLEKILKQAKRPLADAAAVNTTRFALLEVLKATGLPVETGSGGLTKFNRSKQKLKKTHWIDAACVGQSTPILNIKGVKPLLITANGHGTRQSCRTDKFGFPNRHCSRIKFHFGFQTGDIVKSVVKTGKKVGEYVGRIATRATGSFNISTRNGLVQGISYKTCRTIHKKDGYGYSSQKIQCG

SEQ ID NO: 3940 - protein, 468 aa, unidentified
  REGION 1..468: note = Human gut metagenome
MSTCVCVLSNSGERLMPTFRLGKVRHLLKDGKAKIVKHHPFTIQLLYDSKTNTQPIEICEDVGYNYIGISVKSQSHEYVSAQYDTLQDEKACHDSCRKLRRTRRNRLRYRKPRFDNRKRGEGWLAPSLRHKKELNANVVKMYCEVMPITHATVEVGSFDTMLVKAIQEGKAIPEGADYQKGPRYNLATLREAVFYRDNYTCQVCGRKVADGAILHMHHMFYWKGRHGDSLNELLTVCEKCHTPANHQKGGKLYGFGENVKFADLSGAAFMNTVRWQIVNELYAAFGKDFVTVTYGAMTKEKRIALRLEKSHNNDAYAMGEFHPNCRCTFEHYEKVRRNNRILEKFYDSRYIDIRTGEIATGKELFNGRINRNHKKDSENLHRYRGKRTYAGHRALLRKKVNLNPGDLVSLNGEVLVVHSTHTNKKGAVNVEFKTPGKSGQKSASLKKLKIVKAADSMHSAWEKNILII

SEQ ID NO: 3941 - protein, 480 aa, Dorea longicatena; identical to SEQ ID NO: 2726

SEQ ID NO: 3942 - protein, 417 aa, unidentified
  REGION 1..417: note = Human gut metagenome
MPCSPAKARLLLKEKKAIVKRRTPFTIQLTIATGEAKQPVALGVDSGYKHIGLSATTEKAELYASQVELRQDITDLLSARLALRRSRRSRKTRYRAPRFNNRVASKRKGWLAPSVKNRITAHMSRVEAVMRVLPVTAITVETAAFDTQLLKNPDIAGEAYQQGEQLGFWNVREYVLFRDGHVCQHCRGKYKDPILNVHHIESRRTGGDAPNNLITLCETCHKAFHRGEIKLKVKRGKSFKAATFMGIMRWTLFERLKKAHPELSVRNTYGYLTKHKRISHGIAKSHCADAYCIADNLGAKRLSGYLFQKQTRKHNRQLHKLSILKGGLRKKNQAPYEVKGFRLFDKVICKGEEAFIFGRRTSGSFDVRRLDGTRISAGINYKKLRLLEPRTTYLTEFRKEAALPPLHKCRGFRAEFL

SEQ ID NO: 3943 - protein, 466 aa, unidentified
  REGION 1..466: note = Mouse gut metagenome
MTVFVISKNGERLMPTIRYGRVRHLLKEGKAIIYSHKPFAIQLTYDVTPHNQPIEICVDTGYKHIGVSVKSESREYASAQYDLLPNEKEKHDTQRKNRCNRRNRKRYRKSRFDNRRASKKSGWIAPSLKNKADRHVDIIKRIAAVVPIISITVEMGEFDTQVLKAVTEGKPVPEGKDYQQGARYGIETLRAAVFQRDGYKCLFCGRGIDDGVILHVHHAYFWRSQHGDSLNELASCCEKCHTSANHKPGGKLWGYDKYLPRYAGAAFMNTVRWYIYNQIKDQIQGADVHITYGTATKLARKEYGVDKSHANDAYAMGVFHPEARAKTEYFEKKRRNNRILEKFYDASYVDIRDGKTKKATALGCERTNRKEPRMSEKNLRGFRGKKRSRGRRTIRQQRYSIRSGDRLLVASQSRVSKGVQNKGAVVALLGKPGWKNTVAVKNVQVIYHTGGWEKVAAPKIKSKKKN

SEQ ID NO: 3944 - protein, 459 aa, unidentified
  REGION 1..459: note = metagenome
MVITLDKHKKPLSVCSERRARILLTKKRACIYRHYPFTIIVKDADINKMESRDEYRIKIDPGAKYTGIAVVRIKDGAVVFYQQIEHRGEMVKSNLDTRRMARRNRRSRETRYRKPKWGNNQKNKDSKASYDSSRPAGWLPPSVKSVTDNVINWIIRLKKLFNITQCSFEAVRFDTQLLDNPDIEGVEYQHGTLFGYEVREYLLDKYGHTCQYCGGKSGDPILEWEHIIPASRGGSNSIKNATLSCRTCNSLKGAKTPAEWLSAIKGKSALADARRKGIQNVLDHKISGVSNRYCAWVSAYRRYVENKLFSMFEDVECSSGGRTKYNREKLGLPKDHHYDALCVGNIPSDGYKDLTNGYCFITKAVGRGTRFRGKINKCGIITVKLPKGTKRRFGFQNGDIVKAVSPHGKYAGTHVGRVMTRSSGSFDIRKSDGTLVTVNQRYCMILQRDNGFLCYYRKP

SEQ ID NO: 3945 - protein, 426 aa, Ktedonobacter sp.; identical to SEQ ID NO: 3418

SEQ ID NO: 3946 - protein, 443 aa, Anoxybacillus sp.; identical to SEQ ID NO: 2800

SEQ ID NO: 3947 - protein, 448 aa, Thiohalospira sp.
MQQQRVFVQGREGSPLMPCHPARARRLLRVGRAKVVRRVPFTVRLIDRDQKDSAVQPVSLRLDPGARTTGVALVAEGGRGARAVWAAELTHRSQSIRSRLTDRRMYRRGRRSRKTRHRPPRLQNRARPKGWLPPSLQSRVDNTRTWAERLACRAPVSTVVVETTRFDVHALSAGKPLAGVEYQQGTLQGWELREYLLHRHGHTCAYCQGESRDPVLEVEHVHPRSRGGSNRVANLVIACQTCNTAKGNRTPGEWAVALGRTKFDQARAKTAPAIEAGKPSSLRDAAAMNASRYAVGRAVKTLGLPVTFTSGGRTKANRSSQGYRKAHWIDAACVGPAGDSVHLDPNAPVLSITATGRGQRRVTKPDRYGFPRGAAGRVKRVQGLQTGDRVRAVVPTGKYRGSHVGRVAGVRADGRMDVATTRQKFTTTAARLARLQAADGYHYEGAGL

SEQ ID NO: 3948 - protein, 429 aa, Ktedonobacter sp.; identical to SEQ ID NO: 3812

SEQ ID NO: 3949 - protein, 512 aa, unidentified
  REGION 1..512: note = Human gut metagenome
MSTVYVLNKDGKPLMPTTRGGHVRHLLKEQKARVVRAKPFTIQLLYETDNLVQPLYLGIDPGRTNIGVAVVKTDGTAVFTAHLETRNKEIPKLMQGRKKARRARRTNGRRCRRQRRAKANGTISKKCVKQATAQSKNPSKRAKEIGIIKRRLPGYKKDVLCIGIKNKEAKYTNRTRPEGWLTPTANQLLQTHINLVRKIQKFLPISDVVLEVNKFAFMRLDNPDIQKWQYQQGPLYQKGSLENAVSEMQEHHCLFCDKPIDHYHHVVPQSENGSNTIANIVGLCAEHHNLVHKDAAWQKKLAEEKVGLNKKYGALSVLNQIIPALTNKLSVLFPKHFFVTAGKSTHDYRATHGVSKDHWLDAYCIACSVLPSDVCDSNINNHMPYELKQFRRHARRALNNENMNRVYTLNDKAVAINRHKATEQEAASLEEFRKEHPNDVCKLKVKEHHPTYRNMNRNYPGSIFLVGKHVHIMQGIAGSKDGKATTYKDSNANSITASKCKFVAKNSGILFV

SEQ ID NO: 3950 - protein, 413 aa, unidentified; identical to SEQ ID NO: 2636
  REGION 1..413: note = Human gut metagenome

SEQ ID NO: 3951 - protein, 423 aa, unidentified
  REGION 1..423: note = Human gut metagenome
MRVFVFNMRGEPLMPCTQRKARLLLKTGKAKIYKYNPFTIQLKYVTGENKQECHVGIDTGSKYIGLAVTSENKVLFKGEVELRQDVKSKIDTKRIYRRSRRNRKTRYRRCRFLNRKRFGKWLPPSLQNRINHTFKWIDKLCSFIPESILHIEVGKFDIAKMINPEVHSVDYSQGQTYGYQGERYFIFARDNYTCQVCGERNKPLQTHHIIYVSNGGTNRVDNQITVCKECHTSTNHKNGGIFYKWQKEHKKVKQYKAPPFMNVLRQQILNQYPQALITYGFETTIKRKNIGLEKTHYNDAIVISGVSTISENLHEWLLIRQFRKKKRSLHEGVPRKGRKEPNRIQKRNSKNTPYYRGFYLNDKVSVFGKSGYITGFTNSGAYVKGVDGEYIVLPNKSYKRVNIASLKFICHNNNWQYITKNAV

SEQ ID NO: 3952 - protein, 470 aa, Acidithiobacillus sp.
MAVLVLDKRKRPLMPCSEKRARLLLESGRARVHRMVPFTIRLVDRLQAESVLQPLRLKLHPGSKTTGMALVREKETVDATTGEILRTFTVLMLLELKHRGHAIRDALTQRRAFRRRRRGNLRYRPARFDNRTKPEGWLAPSLQHRVDTMLAWVNRLMRLAPVTALSQELVRFDTQALQNPEIAGSEYQQGTLAGYEVREYLLEKWGRECAYCGAKNTPLEIDHIHPRSKGGSNRVSNLTIACRDCNQAKGNMPLEQFLAKAPERVRKILAQAKAPLKDAAAVNSTRWALFQRLKATGLDVEVASGGRTKWNRHQMSIPKAHCLDAACVGCVDAIQNWQQPVLGIKATGRGSYQRTRLTKHGFPRGYLTRSKSVFGFQTGDLVKAIVTTGKKTGTYLGRVAIRASGSFNLQTGNGLVQGIHHRFCALIQRADGYGYLWTKIALDRGDAGLGQATPAALSLPGMNAGVSRAN

SEQ ID NO: 3953 - protein, 507 aa, unidentified
  REGION 1..507: note = Human gut metagenome
MSEYIYVIGMDGDPQMPTKRKRHVEQLLQTGRARVFRQVPFTIQLTYKNEPVLQPVTIAEDPGRSNIGMAVVSLSGELLSAAVVQTRNKEIVKLMEKRKQHRRTSRNGERKARQRLAKKCHTMVKAGFLMRKLPMYGKDKRVRCNMIKNTEARFCNRKREDGWLTPSAEHLVRTQINLIHKMQKFLPITDVAIEINRFAFLSLEDPSISGVDFQNGPLKGYDDLNAAVEDLQDGHCLMCNSPIEHRHHIVPRSMQGSNSIGNIAGLCCKCHERVHKDSAFEDSLKKKKAGLNKRYAAVSVLNQAIPFICKRLEQEFRKEHVHYCSGRDTSMVRRSLGYHKTKEEQLHEVDAWCIAVLSLQQIPEKAPSFDHVHEILQFRRQDRSRIKAQTSRAYYHERKKIAKNRKKAEGQREDSLQEWRKRQVERYGEEQTRKMISQLKVKKSIRRYNRLDRLMPGAVFYYQGVRYVMRGQHCEGTYLQAVGMGSKDFPAKKCKIVAHNEGLVFVS

SEQ ID NO: 3954 - protein, 414 aa, unidentified
  REGION 1..414: note = Human gut metagenome
MPCSPAKARLLLKEKKAIVKRRTPFTIQLTIATGESKQPVTLGVDAGYKHVGLSASTEKAELYASEVELRQDVSDLLSARRALRQSRRSRNTRYRAPRFDNRIRTKRKGWLAPTVENRINVHLSRIETVLRLLPVTKITVETASFDTQLLKNPDIAGKEYQEGEQLGFWNVREYVLFRDGHVCQHCHGRSKDPVLNVHHLESRRTGGDSPGNLITLCETCHKALHRGEIKLRAKRGQSFRAETFMGIMRWGVLNRLKASHPKLEVHNTYGYRTKHARIANGIAKSHCADAFCIAGNFGAKRLGEFFFQKQTRRNNRQIHKLSILKGGIRKRNQAPFEVKGFRLFDKVACQGEEGFIFGRRSTGYFDVRKLDGTRISASISCKKLRLLEKRRTYLTEIRKEVALPSLSEGRGLRA

SEQ ID NO: 3955 - protein, 419 aa, Moorena sp.
MQNYVFVIDTNFQPLNPIHPKKARRLLEKGKAAVFRMYPFTVILKTAIANPTISPCQVKIDPGSKVTGFALVQKDQVIWAMELEHRGGLIKKKLESRRAVRRGRRNRNTRYRKPRFLNRKRPEGWLPPSLEHRILTTQTWVKRLIKFCPVSEIWVERVKFDTQKMQSPEISGVEYQQGELAGYEVREYLLEKWGRECAYCGKQNVPLQIEHIHPKSKGGSNRVSNLCLACEKCNQRKGNKPVEDFLKKKPKLLQKIKAKAKQPLKDAAAVNATRNRLVKVLQGIKPVITGTGAQTKYNRTKLGFPKQHWVDAACVGNIETLTLKISQPLLVTCKGQGGRQKAALNKCGYPIRHNPLKPIKGWVTGDIVRHQRLGIGKVTPRSKGSFGFTPLGMKGYKSCKPQDISAIHRKDGYIYSFCG

SEQ ID NO: 3956 - protein, 456 aa, unidentified
  REGION 1..456: note = Human gut metagenome
MSTCVCVLSNSGERLMPTFRLGKVRRLLKDGKAKIVKHHPFTIQLLYDSKANTQPIEICEDVGYNYIGISVKSQSHEYASAQYDTLQDEKACHDSCRKLRRTRRNRLRYRKPRFDNRKRGEGWLAPSLRHKKELNVNVVKMYCAVMPITHATIEVGSFDTMLVKAIQEGKAIPEGADYQKGPRYNLATLREAVFYRDNYVCKVCGRKATEGAILHVHHMFYWKGRHGNSLSELITVCEKCHTSANHQKGGKLFGFGEDKEFANLSGAAFMNAVRWQIVNALYATYGKEFVTITYGAMTKEKRIILGIEKTHNNDAYAMGDYHPAHRCVFRHYQKRRRNNRVLEKFYDATYIDARTGNKAKGKELFNGRINRNHKKDSENFHKYRSKKVSKGRRSIRRQRYAIQPYDTVHLEGKTYITSGCHNKGTRLLIPVNGKSKSVAISKVQVVCHAGAWIQII

SEQ ID NO: 3957 - protein, 427 aa, Nitrosococcus sp.
MNRVFVLDTDRKPLMPCSPARARRLLRDGKAAVYRMQPFTIILKYRVDPNPQPVEFKVDPGSKITGLALVGNFPQQGRVVLWAANLTHRGYAIRERLASRRSLRRGRRGRKTRYRAPRFLNRTKPKGWLPPSLNSRVENVSSWFNRLLDRVPISECHIETVRFDTQKIQNPEINGVEYQQGELMGYEVREYLLEKWDRKCAYCNKKDIPLEVEHIIPRSRGGSNRVSNLTLARAPCNKKKNSKTAAEFGYTQIQSKSKLPLKDAAAVNATRYAIGCTIQSVGLPTSFWSGGRTKKNRISQGYTKDHWIDAACVGESAGQVTITEGYRALHIKATGRGTRQVVRTDKYGFPRGKAGRCRRVKGFQTGDLVRPSQPQGKYAGDHVGILASIRASGTFDVKAKAGKISANWKNFKLIQRGDGYDYSLSAV

SEQ ID NO: 3958 - protein, 468 aa, Moorena sp.; identical to SEQ ID NO: 2760

SEQ ID NO: 3959 - protein, 562 aa, Streptomyces sp.
MTTFRTGAQTHQAVLPQQPALESGSADTPGSRDETAHGLPAVRPGTGVEHGRGETGGVRTRTRRRHARSDATAAETAETGSGDAPRLAASRVFVPAKAGEPLMPCHPARARELLAGGRAVVARRAPFTIRLRQRTRAESTVEGVQLRIDPGSKATGIAITEEQHRNGPKGRSAIARRGLITIELRHRGQKIHSGMMRRAAYRRRRRSANLRYRAPRHDNRPRPHGWLPPSLRHRIDSTMAVVVRLCRYAPVLEIHVEHVAFDTSAFTEVMPSGAQGGESTHGASEIREFLLAKWERSCAYCDATGVPLNIDHVRARSRGGSDRVSNLVLACVPCNQAKGTTSVHAFLADRPARLERVIAQLRRPLQDVAATNATRLQLVTALAAQGVPVHTWSGGRTHWNRVAMGLPKSHTLDALVTGFFDHERGDSLVRIPAQVLVVGSTGRGSYARTTPDRFGFPRLRRPRRKIQHGYATGDLVSAVVPKGKWAGRWVGRIAVRTGGQHRITTLTSRFDVSHRNVRLLQRADGYTYGFAHEIRLSGRRGPAYSGPTLKGGDPGNVRTPDA

SEQ ID NO: 3960 - protein, 431 aa, Klebsiella sp.; identical to SEQ ID NO: 2435

SEQ ID NO: 3961 - protein, 426 aa, unidentified
  REGION 1..426: note = Human gut metagenome
MVYVLNKQGKPLMPCKEAKARKLLKQNKAKIVKYEPFTIQLLFDCENQTQEVNLGIDAGSKYIGVSVTTEKQVLYEAEVELRNDIVNKLSARRAARRTRRNRLRYRSARFNNRVHSKHKGWLAPSVEQKINAHIQVIRHLYEILPITKLIVETAQFDIQKINNPEISGEEYQHGNQLGFWNVREYVLARDNHECQCCHGKSRDNVLNVHHLESRKTGGNAPNNLITLCETCHKAYHKGEVELKPKRGKSYRDAAFMGILRKTLLIRLKQMYPNVHETFGYITKNTRIENSLPKEHHVDARCISGSPLAKPLEYYLYQKCVRRQNRKMTKDKFLKGGTKKNNQLIGNVFGFKLFDTVEYQNKQYFIFGKRKSGRLDIRHLDGEKVNNGAISYKKLKRIKHNSTKLTERRRQFLHTSKEDVISLPKIL

SEQ ID NO: 3962 - protein, 515 aa, unidentified
  REGION 1..515: note = Human gut metagenome
LTALEELLSKTEYIYVIGTDGRPQMPTKRKRHVLKLLNTGKARIAEKVPFTIQLKYDNIPVLQPVILAADPGRANIGVAALSPFGDLMFAAVIETRNKEIKKLMADRKAHRQASRRGERKARQRLAKKYETMIKAGMIMRKLPQYAADKFVTCNVIRNTEARFCNRKRCSDWMTPTVNHLVQTHLNVIKKISRYLPVTDIAIEVNRFAFMQIENPNASGVDFQNGPLRGFDDVKAAIREQQNGKCLMCKNDIEHFHHMVPLSKGGSDTIQNQVGLCPKCHAKAHTEQTFKKKLKDKKSGLLKKYGALSALNQAIPFICKDLLAGYGKEHVHFCTGKETSLIRTSLGYEKTKDNQMHEVDAYCIGLASLELEDIKSQSFVNTYKIKQFRRQDRSIIHHQTERSYYLDEQKIATNRKPRFEQTGNALSDWYKKQVKACDKAKADKMLSTLKVKKSSRSYNSEGRLMPGAVFYYNGQRHVMSGQLTGGRYLRAYGDTKTNYPVSKCNILRSNEGLVFI

SEQ ID NO: 3963 - protein, 462 aa, Thioploca sp.
MAVFVLDQQKKPLMPCPEKRARRLLERDRAVVVKRYPFAIRLKDRVGGELQPIRIKLDPGSKQTGIAIVRESQGVDPETGEITSKISVFNLLQLHHRGLTISKNLTSRCAMRRRRRSNLRYRGARFDNRTKPKGWLAPSLQHRVNTTINWVNKLQRFAPIATLSQELVRFDLQQIESPEISGVEYQQGELQGYEVRKYLLDKWDRKCAYCGVEQVPLEIEHIVPKSAGGSNKVSNLTLACRPCNQKKGSQALDIFLANKPELLQRIKAQAKKPLKDAAIVNSTRWALANALKTTRLPVELASGGRTQFNRVRLDIPKSHALDAACVGVVEAVQDWNKPILEINCAGRGRYQRTRLDKFGFPRGYLMRKKSVFGFQTGDIVKAVVTKGKKVGEYVGRIAIRASGHFDITTGDEKVSGISYKYCQMISRNDGYGYFLQPKAVRRLATPVALSLPALKDGVSRAF

SEQ ID NO: 3964 - protein, 426 aa, unidentified
  REGION 1..426: note = Cyanobacteria bacterium UBA11370
MSKPNYVFVVDTNRKPLTPCKPSIARKLLTVGKAKVFRLYPFTIILNKEVVDTPEPLTLKIDPGSKVTGLAILLDSNLIWVAELSHRGQSIKASLESRRALRRGRRNRHTRYRQARFLNRTRSKGWLAPSLQHRVKTTITWVNRLLRCSPIKVVFQELVRFDLQQIENPEISGVEYQQGELAGYEVREYLLNKWDRKCAYCGAKNVPLQIEHIYPKAKGGSNRISNLCLACEPCNIRKGTKDIKVFLAKKPDVLKRVLAQAKHPLKDAAAVNSTRWTLFNQLKETGREISTGSGGLTKFNRTRLELPKTHFFDAACVGDTPELLVLANQPLNIKATGHGSRQMCRTDKFGFPSRYLPRFKFVKGFQTGDIVKAIVTSGKKIGTYAGRIAVRSTGRFNISATIGLIQGISHKHCQQIHQKDGYNYGF

SEQ ID NO: 3965 - protein, 323 aa, Ktedonobacter sp.; identical to SEQ ID NO: 2759

SEQ ID NO: 3966 - protein, 481 aa, Polaromonas sp.
MCRKACVTRPVRAEGFEMAVFVLDRSGRPLMPCTEKRARLLLERGRARVHKMLPFTIRVVDRFAESSEFQALRIKLDPGSKTTGIALVREAERGAVAVLNLFELAHRGRQISKALTARRGHRRLRRGKLRYRAPRFLNRDNKAKGWLAPSLQHRVDTTLAWVNRLEQLAPVSAISTEMVRFDMQALENPEIEGAQYQQGTLAGYEVREYLLEKWGRTCAYCGAKNVPLQIEHIHPKSKSGSDRIGNLTLACQCCNQKKAALPVEVFLARKPELLKRILGQAKRPLKDAAAVNSTRWALVNALKTTGLVVETASGGRTKFNRMALGIPKTHALDAACVGHVNAMTGWHKPTLRLKAMGRGSYQRTRLDKYGSARGYLTRSKSIQGFQTGDMVKAEVTQGKKTGIHTGRVAVRASGSFNIQTRHGLVQGVSHRYCTVVQRGDGYGYQLVAKTDATGTPPKQGDASHPALYLPGLKAEVSRANR

SEQ ID NO: 3967 - protein, 443 aa, Caldicellulosiruptor sp.; identical to SEQ ID NO: 2385

SEQ ID NO: 3968 - protein, 458 aa, Lactobacillus sp.
LKGVGMMSEIKKVDYIYVVDSNGTPLMPTSRLGMVRRWLKTGQAKWFGNSRKTIQFVRPVTTNTQELTLGVDAGFHLGLSVVGNNREYYAAESLRKSEKDRITSRRELRRTRRNRLRYRKARFDNRRRKDSWLAPSIQHRLDFTIKEIKRLYMFLPITNLVVEVTPFDNQKLLNPDIQGWQYQKGKMYGFKTIKDYLLARDNYRDALDGKQYLASQLRVHHLVQRKDGGSNQPDNLVLLSDINHNQTNHNNGILAKLKENRQKTIDYRGAYFMSVLATRLSNYFDNYTITQGYLTANLRQKYEIEKSHLNDAFVIAGGTDITLRTNNVYSRQKLRNNNRVLQKFYDAKYIDSRDGKQKTGKELSSGRTRRSQELNYDNLRQFRKEKVKKGRVSIRRGHYQLRPHDVVLNTRTNRIETVKGVQNSGTVIKFQTGKTCSIKSVVSLYHVNGILEKKMENI

SEQ ID NO: 3969 - protein, 443 aa, Oligella sp.
MAVFVLGKNKRPLMPCSEKRARLLLERGRARVHRLVPFTIRLVDRTVADCALQPLELKIDPGSKTSGLALVRNNEAINTETGEITATAHVLNLFELIHRGTQISQALTARSQMRRRRRSANLRYRAPRFLNRTRPTGWLAPSLQHRVDTIQSWVQRIRRYAPVMQLAQELVRFDMQQLENPEIAGVEYQQGELAGYEVREYLLEKWQRQCAYCDAINVPLQIEHIQPKARGGSNRISNLTLACAPCNTKKGAQSVSSFLANDPKRLAHTQAQAKRPLRNAAAVNTTRWKLLNALKATGLPVNTGSGGLTKFNRTRLQMPKTHALDAVCVGEVGHVKQWQKPTLVIKATGRGSYQRTRLNRFGFPRGYLTRKKRIHGFQTGDRVKAVVTQGKKIGTYVGRVAVRASGSFNIQTAQSLIQGISHRYCTLIQRGDGYGYSTRIDSF

SEQ ID NO: 3970 - protein, 428 aa, Chamaesiphon sp.
MEFIMSNFALIVDTNRRPLNPIHPAQARLLLKQRKASILRRFPFTIILKTASNAQTQPLEIKIDPGSKVTGLVLVTNSKVIWAAELTHRGAQIKAALLSRRQLRRNRRSRKTRYRKARFLNRTRPNGWLAPSLKHRVQTTLTWVNRLRRFAPVTAIAQELVKFDTQLMQDETISGPEYQSGTLAGYEIRSYLLEKFDRKCAYCGVEHVPFEIDHIIPRSKNGSDRPSNLCLSCHDCNQAKSNHPIQEFLADKPDVLKRLLALAKSPLRDAAAVNSTRWALFDALKATDLPITTGTGGRTRWNRFRFQLPKTHWIDAALVGAVETITLLTNRPLSIACNGHGTRQSCRTDRFGFPSRYVPQYKFVKGFQTGDLVKAVVTKGKKVGTYIGRCAVRSSGSFNISTKSGLIQGISHRYCQTVHSKDGYNYSF

SEQ ID NO: 3971 - protein, 512 aa, unidentified
  REGION 1..512: note = Human gut metagenome
MSTVYVLNKDGKPLMPTTRGGHVRHLLKEQKARVVRAKPFTIQLLYETNDVVQPLYLGIDPGRTNIGVAVVKANGTAVFTAHLETRNKEIPKLMQDRKKARRARRTNGRRCRRQRRAKANGTISKKCVKQTTAQNGSVSKRAKDIGVIKRRLPGCEKDVLCIGIKNKETKFTNRTRPEGWLTPTANQLLQTHINLVKKIQKFLPISDVVLEVNKFAFMRLDNPNIQKWQYQQGPLYKKESLESAVSEIQEHHCLFCKKPIDHYHHVVPQHKNGSNTIGNIVGLCAKHHDLVHKDSAWEKKLAKKSTGLYKKYGALGVLNQIIPTLTNELSSLFPKHSFVTNGKSTYDYRAAHGVSKDHWLDAYCIACSVLPSNVCDSNINNHMPYELKQFRRHDRRVLNNENMNRVYTLNNKAVAINRHKAKDQKTVSLEEFRKEHPDDVCKLKVKEHHPTYRNMNRNFPGSVFLVGKQIHVMQGIASSKDGKATKYNDTSATAIAAGKCKFVAKNTGILFV

SEQ ID NO: 3972 - protein, 464 aa, unidentified
  REGION 1..464: note = metagenome
MYVFVIGLDGTRLMPCKPRKARKLIEAHKAEIYKKQPFTIRLLYKTGCASQPITLGIDTGSQHIGIAVTSENKVLYQAEIELRSTMDKRSLMETRYSYRRSRRYRKTRYRSPKFRFHTKRTYSETLVKRKTTGIMTHWVKHTNSISTNRPDGWLAPSMQSKVDHHIRWINRFLDVLPPDTKLRLEIARFDMARMKNPEVHNELYQYGPQYDYENLKAYVFDRDHYKCVVCKRKLGSKQPDGHSLKGMMHHITFRSKGATDNPDQLVTVCEYCHIPQAHKEGGVLWNLKEKHKPVQRGLRDATQMNIIRTRLVKAFPDAELTYGNITAVDRKKMHLPKSHTGDAVAIAMKGKDVNICESTVYIKQIRKKKRSLHEATPRKGRKRPNTQAVRNSKNTKSIGIYHIYDTVRFQNETGFISGFTGKSAYVQDFDGNYITMPGKSYKQINLSSLELVKHNNNWIQKTRN

SEQ ID NO: 3973 - protein, 412 aa, Moorena sp.
MMCLVYVINQNGQCLMPCKPSKARKLLRDGRARVKHRSPFTIQLLWDCEEHVQEVVVGIDKGSSITGFACVGNGELLLSGEIVHRKDVKEKMQTRRMHRRSRRNRRWYRSKRIRNRASSRLSGRLPPSIKTNVEEVIRVVERLPLPLAHIVIEDVQVDIARLNDPTLQARRYQDPTRLDENLRIACLMRDGYQCQYCHKRETRLEAHHLVFRQHGGKDTLSNLLTLCESCHHRVHEGKVTLSVTGVSGHLDHIAQRSMQGKSHLYATLEQGISLTTLFGYQTAIWRKHLDLPKAHDVDALCIATYDTGEVIPWQQDRFYQVRFRPRRTRRHYHDLPRKGQGRVRYQVNSELEGFRKGDVVRVKGTFVKQINSIYSDGYLAFPRVKGEPSKARPKDCVLLERGTTILWQRMAE

SEQ ID NO: 3974 - protein, 425 aa, Planktothrix sp.; identical to SEQ ID NO: 3728

SEQ ID NO: 3975 - protein, 413 aa, unidentified; identical to SEQ ID NO: 2636
  REGION 1..413: note = Human gut metagenome

SEQ ID NO: 3976 - protein, 406 aa, unidentified
  REGION 1..406: note = Human gut metagenome
MVYVQDINGKPMMPTTRHGKVRRLLKDKKAIVVNLCPFTIKLMYVTSDYKQEIVLGVDAGTKHVGLSATTKSKELYSSEVILRNDIVDLLSTRRELRRTRRNRLRYRKPRFNNRIKSKRPGWVAPSVKYKIDAHIRVIDNVCSILPISRIVIEVAQFDTQKIKNPDISGNEYQEGDQLGFWNTREYVLARDGHKCQYCKGKSKDKILNVHHLESRKTGGDSPSNLITLCETCHKEYHKGNIDLKIRRGKSLRDAAVMGIMKWRLYEELKSKYDNVSMTFGYVTKYNRINHGIEKSHVSDAFVISKNFNAKRIGCQYLKRLIRRHNRQIHKMKILKGGKKKNNQAPFEVFGFRLFDKVLYNNEIFFVYGRRKSGSFNIRDFNGENSKDVSHKKFKLIRGKRHPIILK

SEQ ID NO: 3977 - protein, 241 aa, unidentified
  REGION 1..241: note = Human gut metagenome
LQFYRKEHGIMQYVYVLNKHGEPLMPCSPGKARLLLKQQKACVVKRTPFTIKLLFGSAGYKQPITLGVDAGSKHVGLSASTEKRELYSEEFTPRSDVVELLSTRRQNRRSRRNRKTRYRVPRFDNRVHSKHKGWLAPSVEVKIQEHITVIKHICKILPISLVRVEKAEFDTQRLKAMLAGKPLPVGTDYQLGEMYDEYNVRQYVLKRDHYTCQCCGTHNTAKKVVKLHVHHLESRKTGGNA

SEQ ID NO: 3978 - protein, 414 aa, unidentified; identical to SEQ ID NO: 2588
  REGION 1..414: note = metagenome

SEQ ID NO: 3979 - protein, 444 aa, unidentified
  REGION 1..444: note = Mouse gut metagenome
CQHWRRITTGRKTEEQNLRVFVLNKRGKPLMPCSPAKARHLLKEKKAIVVRRTPFTIQLTIATGESKQPVSLGVDAGYKYVGLSASTEKAELYASEVELRQGITDLLSARRALRRARRNRKTRYRAPRFDNRIRTKRKGWLAPSVENRINAHLSRIEAVLRLLPVTRITVETASFDLQLLKNPDISGKEYQEGEQLGFWNIREYVLFRDGHVCQHCHGRSKDPVLNVHHLESRRTGGDSPGNLITLCETCHKALHHGEITLKTKRGQSFRAETFMGIMRWEVLNRLKASHSKLEVNNTYGYLTKHARIKSGITKSHCSDAFCIAGNLGAKRLGEFLFQKQTRRNNRQIHKLSILKGGIRKRNQAPFEVNGFRLFDKVACKGEEGFIFGRRSSGSFDVRRLDGTRISAGISYKKLRLLEKRQTYLTEIRKEEALPSLREGRGLRA

SEQ ID NO: 3980 - protein, 406 aa, unidentified
  REGION 1..406: note = Human gut metagenome
MVYVQDIDGKPMMPTTRHGKVRRLLKDNKAVVVNTCPFTIKLTYKTSDYKQEIVLGVDAGTKHVGLSATTKSKELYSGEVILRNDVVELLSTRRESRRARRNRLRYRKPRFENRVKSKRLGWVAPSVRHKVDAHIRVIDNICSTLPISRIIVEIAQFDTQKIKNPDISGNEYQEGDQLGFWNVREYVLARDGHKCQHCKGKSKDPILNVHHIESRKTGGDSPSNLITLCETCHKEYHKGNIDLKVKRGKSLRDAAVMGIMKWKLYEELKSRYPNVSMTFGYITKYNRIKYGIEKSHTSDAFVISRNFNAKRIERQYLKRLIRRHNRQIHKMKILKGGKKKNNQAPFEVFGFRLFDKVLYNNEICFIYGRRKSGCFDIRDFDGKNSKNVTYKKLKLIRGKRYPIILK

SEQ ID NO: 3981 - protein, 429 aa, Methanosarcina sp.
MLVFVINQNKKPLMPCKPSKARKLLQAGKAKVVRNTPFTIKLLFGSNGYTQPVIAGMDTGSKVVGCAAIANGKVLYQSEIYLRENVSKKMEQRKMYRRTRRGRKTRYRPARFDNRGNSRREGRLAPSIKSKLEAHFREKRFVESLLPVTRWKVELASFDIHKITNPEVSGVGYQEGDLKGFYNVKAYVLDRDGYTCQHCRGKSKDSRLHCHHIVFRSQKGSDAPENLITLCETCHKALHNGEFKLSGKKSKTKHATEIGILKSQIRKSGWSFAETFGYETKYRREQVLKLLKTHYFDAVAICCRDDQKVEVEDSVFLKRNVPAGDYQQRRGKRSEKKIPTGKLFGLRKFDIVKTENGTGFIRGKRSSGYFSISDIFGNKISDSVNVKKKCRRLSARSTTLVQMVQMTHSSPTCHFRQAGNVEEGGFLLR

SEQ ID NO: 3982 - protein, 413 aa, unidentified; identical to SEQ ID NO: 2605
  REGION 1..413: note = Human gut metagenome

SEQ ID NO: 3983 - protein, 521 aa, unidentified
  REGION 1..521: note = Human gut metagenome
MWLCPGYGNTTGTCSLAYSKGDTMNYVYVLDQRGSPLMPTRRYGWVRRTLKSGKAKAVRTLPFTIRLMYDPDTTKIQSLTLGIDPGRTNIGMATADETGRCLYSSQCETRNRVIPRLMEKRRQHRQASRRGERLARKRLARKLGTTMRDILERMLPGCEKPVRVKDIINTESRFNNRRRRESWLTPTATQLLRTHLNLVEKVCRILPISGIALEANRFAFMELEAGGHLESGVDYQRGPLYGYRSIREALEELQDGRCLLCGERAIEHDHHLVPRSKGGSDTIANMAGLCEHCHTLVHTDQTAAEKLETIKAGQNKTYGVLSVLNQIIPYLVEALSKKFNGNIRLVSGWETKQFRDENYIDKDHGIDAYCIAVIGQHPKKIDVPETHFQIRQFRRHDRARIKSQTERTYRLDGEKVAINRRKQLEQKTDSLEDWYQKMAAYYGRQQADRMRSKLQVQRSTRRYNNPNRLLPGTVFVYQGKAYIMTGQLTGGQYFRAAGCDRKNFSARSAQIVRYNQGLVYV

SEQ ID NO: 3984 - protein, 413 aa, unidentified; identical to SEQ ID NO: 3587
  REGION 1..413: note = Human gut metagenome

SEQ ID NO: 3985 - protein, 416 aa, unidentified
  REGION 1..416: note = Human gut metagenome
MVYVLDKNGQPLMPTDRHRKVRLMLQSGQAKVIKRCPFTIQLNYDSGHQTQEISLGIDAGSKHIGVSATTKIKVLYEADVELRNDIVDLLSSRRELRRGRRNRKTRYRQAKFNNRRRGNGWLAPSIRQKIGTHLTVVENICKILPISRIMVETASFDIQKIKNPDIQGAEYQQGDQLGFWNVREYVLFRDGHTCQCCKGKSKDKILNVHHIESRKTGGNAPNNLITLCETCHTGYHKGTVQLPKAIKRGMRFKDAAFMGIMRWAFYEALKQQYEPVGTPVHDTYGYITKHTRIAYNLPKEHYVDARCISGNPEASSNGEYYYQKKVRCHNRQIHKLTVLKGGIRKQNQATYLVKGYRLFDKVSYQGKGYFVFGRRQSGFFDIRTLSGEKVNKGSLSCKKLKFIATRTYYLTERRAV

SEQ ID NO: 3986 - protein, 443 aa, Caldicellulosiruptor sp.; identical to SEQ ID NO: 2385

SEQ ID NO: 3987 - protein, 420 aa, unidentified
  REGION 1..420: note = Human gut metagenome
MQYVYVLNKHGEPLMPCSPRKARLLLKQKKACVVKRTPFTIKLLYGSTGYKQPITLGVDAGSKHIGISATTEKHELYREEATPRNDVVDLLSARRAFRRSRRNRKTRYRAPHFNNRVHSKHEGWLAPSVEVKIREHITLIKRVCRTLPVTLVRVETAEFDTQRLKAMLEGKPLPVGTDYQLGEMYDEYNVRQYVLKRDNYTCQCCGAHSTKTKDVKLHVHHIETRRTGGNAPNNLITLCTDCHKALHAGKVTLDGKKRGKPLKDAAFMGVMRKTLMERLRKKLKIPVQGTYGYITKYLREKNGIPKSHTNDARCISKNPLAIPCDTCYYTKAVRHHNRQLHKATILKGGIRKANQAPYIVKGYRLWDKVSCNGTECFITGRRTSGYFALKKLDGTVVSNSTSYKKMRLLEVATNYITERR

SEQ ID NO: 3988 - protein, 322 aa, unidentified
  REGION 1..322: note = Human gut metagenome
MLFAHFGNRTARKIRKQSLLPATIAADLCFKPLYKHHITVIKRICRILPITLVRVETAEFDTQRLKAMLKGKPLPVGTDYQLGEMYDEYNVRQYVLKRDNYTCQCCGAHPTEKKPIRLHVHHIESRHVGGNAPNNLITLCVACHKALHEGKITLDKGKKRGKPLRDAAFMGIMRNTLLARLKDELNIPVKQTYGYITKLLREKNKIPKSHVNDARCIAKAPNAKPCDTMLYTRALRHHNRQIHKAKILKGGIRKKNQAPYLVKGFRLWDKVRYNGEECFITGRRSSGYFALKKYDGTVISNSASYKKLMLLKAATNYITERS

SEQ ID NO: 3989 - protein, 436 aa, Ktedonobacter sp.; identical to SEQ ID NO: 3861

SEQ ID NO: 3990 - protein, 429 aa, Methanosarcina sp.
MLVFVINQNKKPLMPCKPSKARKLLQAGKAKVVRNTPFTIKLLFGSSGYTQPVTAGMDTGSKVVGCAAIANGKVLYQSEIYLRENVSKKMEQRKMYRRTRRGRKTRYRPARFDNRKNSRREGRLAPSIKSKLESHFREKRFVESLLPVTGWKVELASFDIHKITNPEVSGVGYQEGDLKGFYNVKAYVLDRDGYTCQHCRGKSKDSRLHCHHIVFRSQKGSDAPENLITLCETCHKALHNGEFKLSGKKSKTKHATEIGILKSQIRKSGWSFAETFGYETKYRREQVLKLLKTHYFDAVAICCRDDQKVEVEDSVFLKRNVPAGDYQQRRGKRSEKKIPTGKLFGLRKFDIVKTENGTVFIRGKRSSGYFSISDIFGNKISDSVNVKKKCRRLSARSTTLVQMVQMTHSSPTCHFRQAGNVEEGGLLLR

SEQ ID NO: 3991 - protein, 419 aa, Moorena sp.
MQNYVFVIDTNKQPLNPITPKKARRLLDKGKAAVFRMYPFTIILKTAINNPTISPCQIKIDPGSKVTGFALIQNNQVIWGMELEHRGGLIKKKLESRRAVRRGRRNRNTRYRKPRFLNRKRPEGWLPPSLEHRILTTQTWVKRLIKFCPVNEIWVERVKFDTQKMQNPEISGVEYQQGELAGYEVREYLLEKWGRECTYCGKQNVPLQVEHIHPKSKGGSDRVSNLCLACEKCNQRKSDKPIEVFLKKKPSLLQKIKVKAKLPLKDAAAVNTTRNKLVKVLRNARPVVIGTGAQTKYNRTKLRLPKQHWIDAACVGDIETLMLKTSQPLLATCKGQGSRQKAALNKYGYPIRHNPLRPIKGWATGDIARHQKLGIGKVTPRSKGSFGFTPLGMKGYKSCKPQDISAIHRKDGYTYSFCQ

SEQ ID NO: 3992 - protein, 423 aa, Microcoleus sp.
MSNHVFVLDTNRKPLTPCQPGVARSLLKAGKASVFRRYPFTIILNKEVDANPEPVEFKLDPGSNVTGIALKQGNRIIFAAELQHRGQQIKEALLSRRQLRRSRRNRKTRYRPARFLNRTRPEGWLAPSLQHRVDTLMTWVHRFRGLAPVGQITQELVRFDLQLMENPEISGVEYQQGELQGYEVREYLLEKWGRTCAYCGVKHVPLEVEHIQPRSKGGSDRVSNLTLACCSCNQAKGHGDIRDFLSGQPDVLSRLLGQAKSPLKDAAAVNSTRWALFKALKATGLPVTTGTGGQTKFNRLRLNLPKAHWLDAACVGDVESLDILTSKPLLIVAKGHGTRRMCGTNKYGFPTRHRSRRQIHNGFQTGDIVTATVTAGKKIGSYVGRVLCRASGSFDITTASGRVAGINHKYCKPIHRKDGYAYA

SEQ ID NO: 3993 - protein, 419 aa, Geobacillus sp.
LFVYIINKHGKPLMPCSPRKARLLLKQKKAKVVRRTPFTIQLLYGSSGYKQPVSLGVDMGTRHVGISATTKKDVLFEAEAQLRTDIVELLAIRRQFRRSRRNRKTRYREARFLNRRKPEGWLPPSIQHKINSHIKLIDLVHNILPVTSVTIEVAAFDTQKLKNLNIRGVEYQQGEQMGFWNVREYVLYRDNHTCQYCKGKKKDPVLQVHHIESRKTGGDSPDNLITLCKTCHHEIHEKGLEHIFQRKRPPMRDASQMTAMRWAMFSRIREKYSHANITYGYITKCIRIANGLSKSHMVDARCISGDPLAKPSGTVYLLKFVRKNNRQLHKATILKGGKRKSNKAPRFVKGFQLFDKVVYERKECFIFGRRSSGYFDLRLLDGTKVHASASWKKLKRVEHASTLLIERRKGDSSPTFALA

SEQ ID NO: 3994 - protein, 414 aa, unidentified; identical to SEQ ID NO: 2588
  REGION 1..414: note = Human gut metagenome

SEQ ID NO: 3995 - protein, 447 aa, Marinobacter sp.; identical to SEQ ID NO: 2641

SEQ ID NO: 3996 - protein, 436 aa, Ktedonobacter sp.
MSHVFVVDANRNPLTPVHPGRARLLLTQKKAAVFRRYPFTIILKTMPEHPEVHPLRLKIDPGSQTTGLALVNDATGEIVFAAELSHRGQAIKHAMDQRRAVRRNRRQRKTRYRKARFANRRRRKGWLSPSLISRMANIVTWVQRLRRIAPISVLSQELVKFDLQQMDHPEISGMEYQQGTLAGYEVREYLLEKWKRACTYCGAQNVPLQVEHIQAKANGGTDRISNLCLACDSCNKAKGTQDIRVFLTEKPDLLGRILAQSKAPLKDAAAVNTIRWALYERLGTLGMPIECGSGGLTKFNRTVRELPKKHWLDAACVGKSTPEHVHLAGVVPLLIAATGHGSRQKCNVNEMGFPCSKPKGAKKVKGFQTGDIVKAVVTSGSKQGVYVGRVLVRASGSFDIRTNQGRVQGISYRFCAPVHRCDGYSYMKGAGHSSPV

SEQ ID NO: 3997 - protein, 473 aa, Calothrix sp.
MEYLPKNKMLTNHVFVLNADKSFLNMVHPARARKLLTQEKAAVLRTYPFVLILKKQVFNPTLKEYFLKIDPGSKWTGFAIQCGSDIVFRMELQHRGMQIRSDLLTRAGFRRGRRSRNLRHRKKRFNKRKRLGWLAPSLMHRVLTVKTWIKRFCKFCPIVVIEIEQVKFDMQKLANSLISGIEYQQGELMGYEIREYLLEKWGRECVYCGVKDVQLEIEHITPKSKGGSDRISNLTLACHNCNQRKGDMNISDFLDDRQKLSKILNQAKSPLRDAAAVNSTREAISNMASKYNNVKNWTGGRTKMNRVKQNLSKAHSIDAACVGESGSNIKILTYQPLIVISKGHGNRQSRKTNERGFPALITETCQKTGKEIVKKNPDGTVKTIAPKKKYTHIHTGDIVRFKLDKPCMTKGNKKKGIEKKVRVPCGSYTARVKTPTPKGFEVLINNERVNVSTMRNVSFAYRADGYDYKFAHV

SEQ ID NO: 3998 - protein, 443 aa, Bacillus sp.
MVEENMTCFMQRKGENPMVFVLDTNKRPLDPCHEAVARKLLKQGKAAIYKRFPFTIILKKSVDESEIKTTYRLKIDYGSRHTGLAIVRGEEVLWLAQLDHRTDIKEKMDKRRAFRRARRNRKTRYRKPRFLNRKRKEGWLPPSLESRVQNIQTWVNRLKKLCPIGYISYENAKFDTQLMRNPEINGVEYQQGTLQGYEVREYLLEKFGRKCCYCGKEGVPLEIEHIIPKSRGGTDRVDNLCLACRDCNKRKGKQTAEEFGYPHIQEMVKETLKDASAVNTTRWKMYEVLKQSGCEVECGTGARTKMNRIRLGLPKTHYFDACCVGKSTPLQLYFKTKEVLFIKAKGRGSRSRTNLNKHGFPRGYFARQKFFFGFQTGDMVKAVVSKGKYKGVWFGEVACRKSGSFDIKDKDGKRIAQGINYRYVQVIQRFDGYAYRREETELA

SEQ ID NO: 3999 - protein, 451 aa, Moorena sp.; identical to SEQ ID NO: 3199

SEQ ID NO: 4000 - protein, 365 aa, unidentified
  REGION 1..365: note = Human gut metagenome
LGVDAGSKHIGISATTEKHELYREEATPRNDVVDLLSARRAFRRSRRNRKTRYRAPRFNNRVHSKHKGWLAPSVEVKIQEHITLIKHACRILPVTLVRVETAEFDTQRLKAMLEGKPLPVGTDYQLGEMYDEYNVRQYVLKRDNYTCQCCGAHSTKTKGVKLHVHHIETRRTGGNAPNNLITLCKACHKALHAEKVTLDGKKRGKPLKDAAFMGIMRKTLMERLRKELKIPVQGTYGYITKYLREKNGIPKSHTNDARCISKNLLAIPCDTCYYTKAVRHHNRQLHKATILKGGIRKANQAPYIVKGYRLWDKVAYNGTECFITGRRTSGCFALKKLDGTVVSNSISYKKMRLLEAATNYIIERK

SEQ ID NO: 4001 - protein, 424 aa, Bacillus sp.
MTHCFVLDAEGRKLSPTKEKRAWYLIRKQKAILKCKFPMVIQLAREVPEEEIDSTPIHLGIDDGSKLVGIALVQECGKENKPVFKGTIELRIDVKEKLAVRRGYRRYRRQHKKYRPARFDNRPSSRKEGWIPLSIRQKKDSILRVVRQLTKWVRINQIFLEDVLLDIRALETGYKPYRWEYQQSNRLDENIRKAAILRDQNTCQDCGATNTRMEVHHITPRRLNGSDSIHNLITLCSTCHEKIAGEELLHSQRFYQKIKGRSISFKDAMHVMQGKTYLQKALKEIAPLNLTTGGDTANKRIDWGIEKTHANDSIVICNLRVNQEQCEMKDWVIKPMKKRSNKKIKSANGIYHRDFVRYTKRNGESYIAYITALYPERNQCNMTTLDGKVLKRYGLSRLSLIWRFSKIFWFTNSMKEVNPGSIIG

SEQ ID NO: 4002 - protein, 430 aa, Moorena sp.
MSNFVFVLDTNKQPLELVAPGQARRLLKLAQAAVYLRYPFTIILKYAVSHPKTQPTQLKIDPGSKTTGLAIVSGNKVLWGAHLSHRGQQIKNDLESRRNLRRNRRNRKTRYRKPRFLNRTRAPGWLPPSLESRVKNIVTWVNRIRRYVAITGISQELVKFDLLAMQNPEISGKEYQQGELAGYEVKEYLLAKWGRKCAYCGVENVPFEVEHIHPKSKGGSDRVSNLTLACRGCNQAKGNQDIRDFLFKKPDILSRILKQASQPLKDATAVNSTGWALFQQLKQTGLPIEVSTGGRTKYNRTRLGLAKTHWLDAACVGNVEVLQVLTDQPLLIAAKGWGSRQMCTTNKYGFPVKHRTRCKTFFGFGTGDMVSAILPSGRFAGTHVGRLTVRESGVFEMRTPLGKVSPVRHKYCKSIHRNDGYMYAFSTNVQ

SEQ ID NO: 4003 - protein, 437 aa, Moorena sp.
MRVFVLDKNRKPLDPCHPAKARKLLKLGRAKVLRRYPFTIIIKDLEEENCVTHDHQLKIDPGAKTTGLAIIQDNRVIWGAELTHRGFQIREALTSRRQLRRSRRNRKTRYRQPRFLNRKRPKGWLAPSLMSRVYNILTWVNKLIKFCPVTGISQELVRFDTQKMLNPEISGIEYQQGTLYGYELREYLLAKWNRTCAYCSAIGTRLEIEHIKPKSKGGSNRVSNLAIACHNCNQAKGNQEIEQFLSKKPSILKRILSQAKKPLADAAAVNATRWKLHDELKLIGLPVEVGSGGLTKYNRCRQNLPKTHWLDAANVGNVDTLYIEDYQPLLITAKGHGTRQICRTDKFGFPRLHCSQKKIHKGFQTGDIVKAVVTKGKKIGTYVGRIATRKTGFFDITTHLEKFQELAISIVKLFIAKMDIATNFMADKSAASTSSAS

SEQ ID NO: 4004 - protein, 544 aa, Blautia sp.
MKQKKQKVMVYILNKKGKPLMPTTRCGHVRKLLDSKKAVVVSSNPFTIRLKYDTPNGVQDVFAGIDSGRENIGSGASNEDGDCLYLGELKTSNKSIKMKITERAGFRKERRRHDRQNKQRKARKDHTEIQNGNADICRTTISCKSVQISYPAAEKSVTHKIIRGKEGKFANRHRDEGWITPSARQLVQMHMNDLKSMCKILPISHVTLERVAFDFQKLENENIKAWEYGKGKLYGYDSPEEYIHDVQGGKCLICGKPHIDYLHHIIPRSKGGSNKVSNLAGLCYDCHYGPMGVHNCQNTQDRLPELKNEANKQYKVSLLNSVMPVLIEEMDKFCKANSIIFSICEGHDTAKVRDIYDLQKDHCVDGFAISLVGRNVKSVDVMPDRIHQKQRYKKKSKNIIKKRNCREYYDGKKLVAVNRHKGTDQKADSLEEYMNTYAETHTADECKKHFESLTVKPARRTYTFHKEGRICPFHIGDKVRYEKKNKIKGNTKVETFICEGIRFPKDENKAKVEHNKTKSKKMKFCRVLEPGCTPYIDYRKLVLI

SEQ ID NO: 4005 - protein, 324 aa, Parasutterella sp.; identical to SEQ ID NO: 3750

SEQ ID NO: 4006 - protein, 449 aa, Allochromatium sp.
MAVFVLDKQKHPLMPCTEKRARLLLERGRAVVVRLAPFTLRLKDRIGGAVQPLRLKLDPGSRVTGLALVRESETGDADTGAVERLEHGLWFGELVHRGQAIREALTLRRHYRRARRSRKTHYRAPRVLNRPRREGWLPPSLQHRLDTTLNWVERLRRLAPITALSQELVRFDTQALQNPEISGVEYQQGELAGYEVREYLLEMWHRSCAYCGATNVPLEIEHIVPRAKGGSDRASNLTLACRPCNQRKGSRSIEDFLQRQPVRLHQIQAQARAPLQDAAAVNATRWALLNALQTTGLAVETGSGGRTKFNRTRLDIPKTHALDAACVGAVDQVRDWNRPVLAIRATGRGAYRRTRTFNNGFPRGYLMRHKRVHGFQTGDWVSAVVPTGKKAGVHIGRVAVRQTGSFNIQAPAGTVQGIAYRHCCLIQRADGYGYAFQPKPDTEEARRAA

SEQ ID NO: 4007 - protein, 427 aa, Moorena sp.
MHVFVLDKDKKPLAPCHPAKARRLLKSGRASVFRRYPFTLILHEIEAKDCVVPETQLKIDPGSQTTGLAILSENRVIWASELSYRGQQIKNDLEKRRALRRSRRHRKTRYRKPRFLNRTRPKGWLPPSLNHRVETTMTWVNRLRKLCPIVSISQELVRFDTQKLQNPEVSGIEYQQGELLGYEVREYVLQKWGRKCIYCGAEDLPLEVEHIHPKSKGGSDRVSNLTLACHTCNQAKGNRDIREFLSGKPTVLNRILKQAKAPLKDAAAVNATRWKLYQQLKETGLPVEVGTGGQTKFNRTRLGLPKTHWLDAACVGKSTPDRLDVAVEKPLLVAAKGHGVRQRCRPDRYGFPRAVAPKAKSFQGFQTGDIVKATIPQGKFAGNYTGRIAIRFRPSFRLNAGVKPFDVHPKYLTTVQKSDGYEYRFSK

SEQ ID NO: 4008 - protein, 427 aa, Moorena sp.
MQNYVFVIDASKQPLNPIHPKKARRLLDIGKAAVFRMYPFTIILKTAINNPTISPCKIKIDPGSKTTGFAIVQNDQVIWGMELEHRGGLIKKKLEYRRAVRHRRRNRNTRYRKPRFLNRKRPEGWLPPSLEHRILTTETWVKRLIKFCPVNEIWVERVKFDTQKMQNPEINGTEYQQGELAGYEVREYLLEKWGRKCTYCGKQNTPLQIEHIHPKSKGGSNRVSNLCLACDKCNQRKGNKPVEDFLRKKPSLLQKIKTKAKQPLSDAAAVNTTRNKIVKVLKGIKPVVTGTGAQTKYNRINFGLPKQHWIDAACVGDVEALVLKTSQPLLVTCIGPGGRQKAALNKYGYPIRHNPLKPIKGWITGDIAKHQKLGIGKVTPRSKGSFGFTPLGEKGYKSCRPQDISAVHRKDGYIYRFCQSLPGTAWK

SEQ ID NO: 4009 - protein, 423 aa, Marinobacter sp.
MSVFVLDRRKQPLMPCSEKRSRLLLGRGRALVVRAYPFTIRLKDRAGGITQPVRIKIDPGSKTSGIAVVRESGQKQHVLALMELAHRGRQISKSLEQRRAFRRRRRNQLRYRAPRFLNRLRSLVPVVSISQELVRFDTQKMENPEVSGVEYQQGTLLGYEIREYLLEKWGRECAYCADKDTPLQIEHIDPKANGGSNRISNLTLACGPCNREKGRQPLADFFASSKRLKNHQARPDRILKQCKKPLRDASAVNSTRWALHQTLKQMGLSVEVGTGGRTKFNRQRLEIPKTHALDAACVGEVEIVEGWDVPILAIKATGRGSYQRTRLTRYGFPRGYLMRQKKVQGFQTGDMVRAVVPTGTKAGTWLGRVAVRKTGSFNIQTSSGAIQGISHRHCALTQRADGYGYHIQPNQPKEEGGRKNESR

SEQ ID NO: 4010 - protein, 442 aa, unidentified
  REGION 1..442: note = Human gut metagenome
MVYVLNKDGQPLMPTSRHGKVRRLLKTNKAKVVKRCPFTIQLLYDTANHTQNITLGVDAGSKHIGLSATTEDKVLFEADVELRNDISRLLEARYKFRRSRRNRKTRYRKKRFDNRVSSKHKGWLAPSIEHKIQSHFAMVEKVHRILPVTKIVVETASFDTQLLKAQLEGKLIPQGTDYQNGELAGWNIREYIFHRDNYTCQWCKGKSKDPVLVTHHHAYWKGDHTNKPSSLITLCNTCNDSKYHKKEANRLWGWEPKITNSYKHAVFMGVMRWTFYNRLKEIYPNVSMTYGYITKNTRIENNLPKTHYVDARCISGHPEAKSSGEYFYYKKVRRHNRQLYKANTLKGGVRKRSQAEYIVKGFRLFDRVEYQNNEYFVFGRRASGFFDIRTLDGQKVNKGSISFKKLKLKETNKTYLIERRMADTGVSLAPLTTEVVSFRQTG

SEQ ID NO: 4011 - protein, 413 aa, unidentified
  REGION 1..413: note = Human gut metagenome
MTSYAFVLDANGKQLAPAKEQKAWFLIRKKRAALVSKYPMVIQLKKEIPENEICKDEIRCGIDDGGLHVGIALVQKCKTKNKVVFKGTIEQRNDVKHLMEVRRSYRHYHRYHKRYRPARFDNRKSSKRKKRIAPSILQKRQAIIRVINRLNKWINITNYWLEDVSIDIRALTDGYKPYRWQYQKSNRLDENIRKAAILRDGGKCMECGKLNCRLEVHHIKPRRRNGSNTLDNLITLCESCHQKTEGQEELYMDRYFSLLKSSDHKNLNYAQHVMIGKEWLRKQLSSLGVLYLTNGGDTANKRIDWNIEKSHANDAVCITNLQPDTYDMKEWTVKPMRRQSKAKTDNVLGIKHRDLVEYTFKNGETHRGYVTALYPEQKAINFQSPTKHCKKVNARKCKLLWKYSKIYWFENAS

SEQ ID NO: 4012 - protein, 413 aa, unidentified; identical to SEQ ID NO: 2636
  REGION 1..413: note = Human gut metagenome

SEQ ID NO: 4013 - protein, 441 aa, Scytonema sp.; identical to SEQ ID NO: 2725

SEQ ID NO: 4014 - protein, 469 aa, Moorena sp.
MSKTNYVFVLDTNRQPLAPCHPARARELLAKGKAAVFRRYPFAIVLNRAVGDVPPESQLNASTSLSVESERSRGLKIDPGSQTTGLAVVNGDKLVWGAELQHRGDRIQAKLETRRACRRSRRNRQTRYRKPRFLNRTRPKGWLPPSLNASAPLSVESERSRGLNHRVETTLTWVNRLRKLCPIASISQELVRFDTQKLQNPEISGVEYQQGELFGYEVREFLLEKWGRKCAYCRAENVPLEVEHIVPKSKGGSDRVSNLTLSCRPCNQSKGNRDVREFLSGKPSVLERILRQAKTPLKNAAAVNATRWKLYQRLKETGLPVEVGTGGQTKFNRTRLEFPKAHWLDAACVGKTPSLHLATETPMAIASKGHSTRFRTLIDRYGFPRAVRKTKAQVNGLQAGDIVRAIVPNGKYRGQWTGAIAGVRKKRPPALRPFGKKQIDLTAKTQIQIVHKQDGYEYNINPCGHSSRR

SEQ ID NO: 4015 - protein, 414 aa, unidentified
  REGION 1..414: note = metagenome
MVYVINKQGQALMPTERFGKVRRLLKNSLAHVVCRIPFTIQLDYDTTDYTQPVSLGIDAGSKHIGISATTSEKELYAADVELRNDIVDKLSTRRELRRTRRSRLRYRKARFNNRVSSKRKGWLAPSVENKIQTHLTVVEKIHKFLPITNIVVETASFDIQKINNPSISGVEYQQGEQLDFFNVREYVLFRDNHTCQHCKGKSKDKVLNVHHIESRKTGGDSPKNLITLCETCHKAYHRGEFKLNIKRGKSFRDAAFMGIMRWKLYDRLKNIYPNVSMTFGYITKNTRITNNLPKEHYVDARCISGNPVAKPLGYYFYQKKVRCQNRQIHKANFLKGGRKKLNQAPFLVKGFRLFDLVEYQKELYYIFGRRSNGSFDIRKLDGTKVNKGSINCKYLRLIDKRKSILTEKRTQVNL

SEQ ID NO: 4016 - protein, 465 aa, Marinobacter sp.
MAVFVLDRQKNPLMPCSEKRARLLLARRRAVVVRVYPFTLRLKARTGGTVQKVVLKIDPGSKETGLAVSRVSAQGEHVLCLIELIHRGRQISKALGQRRGCRRRRRSQLRYRAPRFNNRTKPKGWLAPSLQHRVDTTTSVIKRLRALVPVTSISQELVRFNLQQMENPEISGVEYQQGTLLGYEVREYLLEKWGRECAYCTAIDTPLEIEHIVPKSNGGSNRISNLTIACHHCNEEKDTQTLADFFKTSSRLKDKQNRMDNVLIQCKRPLRDAAAVNSTRWDLFQSLKTTGLPVNVGTGGQTKFNRQRLGIPKTHAFDAVCVGVVEHVFDWEKPTLRIKATGRGSYKRTRLTKHGFPRGYLMREKSVHGFQTGDMVRAIVPIGKKEGTWLGRVAIRKTGSFNIQTSGGAVQGIHHRHCQLMQRADGYGYHLHHKKEKGNRKVCRADARRALPPRPKRTGFPAQNR

SEQ ID NO: 4017 - protein, 456 aa, unidentified
  REGION 1..456: note = Human gut metagenome
MNTCVCVLSNNGERLMPTFRLGKVRRLLKDGKAKIVKHHPFTIQLLYDSKTNKQPIEICEDVGYNYIGISVKSESHEYVSAQYDTLQDEKEHHDDCRKMRRARRNRLRYRKPRFDNRKRSEGWLAPSLEHKKQLNISLVERYVSVIPITHATVEVGSFDTMLLQAIQKGETKPEGADYQEGPRYNLATLREAVFYRDNYTCQVCGRKITDGAILHMHHMFYWKGRHGYKLDELVTACEKCHTPANHQKGGKLFGFGEDKEFADLSGAAFMNAVRWQIVNALHTTYSKEFVTITYGAMTKEKRIALQLEKSHNNDAYAMGDFHPVHRCGFRHYQKRRRNNRVLEKFYDATYIDARTGNKAKGKELFNGRISRNHKKDSENLHKYRSEKVSKGRRSIRKRRYAIQPYDTVRLKGKTYITSGCHNKGTRLLIPVNGKSKSVTISKVQVVCHAGPWIQII

SEQ ID NO: 4018 - protein, 534 aa, unidentified
  REGION 1..534: note = Marine sediment metagenome
MRKCVNTVAVLNGDGKPLSPTRPSRARWLLKQGRARVINIYPFVIQLTCTISNPVVNKAVLVLDDGETFGLAVVEHCRSHDRVVLGADGKTRGREISDNMRERKELRAARRNRRNKKRGRVGESKLAYRHGTEYPASIRADVQAKLNAVGDILRWFPVSRIILEPVKVDLVKERRPGVKGKDYQQGLSFGIEAESRNRKRRLAVLKRDGYRCLYCGTPVTEETARIHHFRARKSGGTNRYDIQGTLCEKCHTSVSTEQLALVFDPDRYPDTRAAGRLMHGRYLLEAGLKGFSLSLEVKYGYETQVKREEINLPKTHVNDAAALGAREGYPLRLPPALYKIEYRKRHANRKLFNTNPGVAHYRAEADRQPHVDQARMKVDDHDHETNRKNRSYRRYVRNKYYKKLKTEGRFNYDLLPGKKRLNEPYAVNEAVYVDEEGRPVVVKNRRIWRDQDLSGLPPRSKLFEKGDLVRTKEGWLAKVISLMSDGQVKVLFCERKEGRKCQFTQRHPATLRIVQKGRGRCWIPQKAALLPSMN

SEQ ID NO: 4019 - protein, 449 aa, unidentified
  REGION 1..449: note = Fermentation metagenome
MVYVLSIDGKPLMPTSNAKARRLLKQKKAKVRELTPFTIQLTYKTKTEYTQPITLGIDSGYSNVGFSAIANNSELISGELKLLQGMKERLLERARYRKIRRSKLRYRKARFDNRTKSKPKGWLAPSLQYKLDSHIKFIDYLYSILPITRCVVEVANFDIQKIKNPDIQGEEYQQGEQMGFWNLREYIIHRDSHKCQNPNCKNRDKEQILETHHIKYKHLGGTDNPNNLITLCTKCHTSQNHKEGYFLWDWCQQGKKVRGFKDATFMSMIRWYLVNLLKERYSNIHVTYGYITKSHRINNKIEKTHYNDAFCIAKGINQKRSIEIFKVKQSRRNNRNLEMFYDAKYIDTRTGEKVSGSELNNGRRTRNKNLNSENLHQYRGQKLSKGQRRIRTKRHFYQPNDLVKYNGQTYSVRGTQNNGAYIRLNEIKKVPRVDLLTPYKFNKGIVWSM

SEQ ID NO: 4020 - protein, 451 aa, Scytonema sp.; identical to SEQ ID NO: 2763

SEQ ID NO: 4021 - protein, 443 aa, Caldicellulosiruptor sp.; identical to SEQ ID NO: 2385

SEQ ID NO: 4022 - protein, 470 aa, unidentified
  REGION 1..470: note = Human gut metagenome
MSVFVVGLNGCRLMPVSERKARLLLKGGKASVYRKVPFTIKLNYKTGSTVQPGYLGIDTGSQHIGVSVVRQDGTVLHKEEIGLRDSMSKRKLLESRASSRRGRRYRKTRYRHPKWKPKTKRIYSEKADRKGQHWKKQKNTFTSKRQAGWLPPSLQSKTDHHIQWIRKLLHLLPEGYRLSIELGRFDPARMKDPGIHGELYQKGPQYDYENVRAYVLARDGYTCRVCKKKGGKLHVHHILYRSRGASDDPKYMAAVCSNCHTTENHLPGGILYQWMQEQKKFTRGLRDATFMNILKKRLRRAFPDAVFTYGNITKADREKLGLPKSHGNDATAIALVKTGVTSVRDEEPVIHIQQVRRKKRSLHEETPRKGRKEPNRTASRNDKNTRSVTVSKGSREKKVSMTACLFDRVELDGKKGWITGFTGTSCYVKDKEDNYICTSPKYKQVSISRLRILHHCGNWAIGAEKPLGKG

SEQ ID NO: 4023 - protein, 258 aa, unidentified
  REGION 1..258: note = Human gut metagenome
MPNKVYVINKHGRPLMPCSPAKARHLLDAGKAKVKKRTPFTIQLVYGSSGYTQEVILGVDAGSKTIGVSALTKKEELFAANVIPRNDVVDLLSTRREFRRARRNCKTRYRKPRFDNRVRSKHKGWLAPSVEVKIQGHITAIRRVCGILPVSKVVVETAEFDLQLLKAIADGKSVPQGEDYQKGEMYGHYNVRQYVLWRDNYTCQCCGAHATKKKEVRLHVHHLESRKVGGDAPSNLITLCDSCHEKFHKGIILSLIHI

SEQ ID NO: 4024 - protein, 423 aa, unidentified
  REGION 1..423: note = Lachnospiraceae bacterium UBA7754
MVYVLSKDNKPLMPTQNHAKVRILLKTKKAETVRRYPFTIRLLYDSTEYTQDISLGVDAGSRHIGLSATTETKVLFEADIQLRNDIVDELSTRREYRRSRRSRKTRYRKPRFDNRRRGDGWLAPSVREKVETHLTAVQKVHEILPITKITVEVASFDIQKIKNPDIQGTEYQKGEQLDFWNVREYVLFRDGHQCQCCHGKSGDKILNVHHIESRKTGGNAPNNLITLCETCHRGYHMGVVKLPKAIHRGMSFKDATFMGIMRWALNDRLKGLYPDVHLTYGYITKNTRIEHNLPKDHYIDARCISGHPDAKSTCKDGDVVYAYRKIRCHNRQIHKAKILKDGIRKRNQAEYEIKGFRLFDHVSYKGWSHYFIFGRRKTGYFDIRLFNGTGKVNNGSVSCKKIHMIQPCSGYMVDRYIVPENNT

SEQ ID NO: 4025 - protein, 447 aa, Marinobacter sp.
MSVFVLDRCKQPLMPCSEKRSRLLLGRGRALVVRAYPFTIRLKDRAGGITQPVRIKIDPGSKTSGIAVVRESGQKQHVLALMELAHRGRQISKSLEQRRAFRRRRRSQLRYRAPRFLNRTKPRGWLAPSLQHRVDTTKSLVNRLRSLVPVESISQELVRFDTQKMENPEVSGVEYQQGTLLGYEIREYLLEKWGRECAYCADKDTPLQIEHIDPKANGGSNRISNLTLACGPCNREKGRQPLADFFASSKRLKNHQARPDRILEQCKKPLRDASAVNSTRWALHQTLKQMGLSVEVGTGGRTKFNRQRLEIPKTHALDAACVGEVEIVEGWNVPTLAIKATGRGSYQRTRLTRYGFPRGYLMRQKKVQGFQTGDMVRAVVPTGTKAGTWLGRVAVRKTGSFNIQTSSGAIQGISHRHCALTQRADGYGYHIQPNQPKEEGGRKNESR

SEQ ID NO: 4026 - protein, 413 aa, unidentified; identical to SEQ ID NO: 2605
  REGION 1..413: note = Human gut metagenome

SEQ ID NO: 4027 - protein, 412 aa, Lactobacillus sp.
VFNLFLQLAKKYPFTIQLKYGSYGYKQKVSLGVDTGQRHIGFAIVSQNKVLHQSEVELRQDVHKNLYTRKIYRRSKRNRKTRYRQARFLNRVHGKRDGLWLPPSIKGKVSHNIAWIKRYLAVLPNPDLHIEVGKFDMAKMVNLEISGKQYQEGSLKDWKNYEYYVLARDEYTCQLCHKHGEGVKLVVHHIVYRSQGGTDRVDNLITLCTNCHTTKNHQPGGKLYKWMKAKKKVIKQLKGATFMNILRKRIMTAFPEASFQYGSQTYADRKNLLLPKGHFMDAIAISGIKSVGQLSDTVTMISQFRKKKRSLHEATARKGRKQPNTSSKRNEKNTKHARGLWLNDYVRVIGNHAKGYVKGFKSNGYYVYLTDGLGNYVLNNGKNYINGQQCRLIMHNGNWQKAEQKLSLYKFK

SEQ ID NO: 4028 - protein, 269 aa, Moorena sp.
  SITE 269: note = misc_feature - Xaa can be any naturally occurring amino acid
MPNKVYVINKHGRPLMPCSPAKARHLLDEGKAKVKKRTPFTIQLVYGSSGYTQEVILGVDAGSKTIGMSASTTKEELLSAEVKPRNDVVDLLSTRREFRRAQRNRKTRYRKPRFDNRVRSKHKGWLAPSVEVKIQEHITSIKRVCRILPVSKVVIETAEFDLQLLKAIEEGKPVPQGEDYQQGEMYGHYNVRQYVLWRDGYTCQCCGAHATKKKEVRLHVHHLESRKVGGDAPDNQVTLCESCHEKLHKGLIAEKDFKKRKRKSTRDAX

SEQ ID NO: 4029 - protein, 465 aa, unidentified; identical to SEQ ID NO: 3306
  REGION 1..465: note = Human gut metagenome

SEQ ID NO: 4030 - protein, 420 aa, unidentified
  REGION 1..420: note = Human gut metagenome
MQYVYVLNKHGEPLMPCSPRKARLLLKQKKACVIKRTPFTIKLLYGSTGYKQPVTLGVDAGSKHIGISATTEKHELYREEATPRNDVVDLLSARRAFRRSRRNRKTRYRAPRFDNRVHSKHKGWLAPSVEVKIQEHITLVEHVCRILPVTLVRVETAEFDTQRLKAMLEGKPLPVGTDYQLGEMYDEYNVRQYVLKRDNYTCQCCGAHSTKTKGVKLHVHHIETRRTGGNAPNNLITLCTACHKALHAGKVTLDGKKRGKPLKDAAFMGIMRKTLMERLRKELKIPVQGTYGYITKCLREKNGIHKSHTNDARCISKNPLAIPCDTCYYTKAVRHHNRQLHKATILKGGIRKANQAPYIVKGYRLWDKVSCNGTECFITGRRTSGYFALKKLDGTVVSNSISYKKLRLLEAATNYIIERK

SEQ ID NO: 4031 - protein, 512 aa, unidentified
  REGION 1..512: note = gut metagenome
MSTIYVLNKDGKPLMPTTRGGHVRHLLKEQKARVVQSNPFTIQLLYETNDVVQPLYLGIDPGRTNIGVAVVKADGTAVFAAHLETRNKKIPKLMQDRKKARRARRTNGRRCRRQRRAKANGTISKKCVKQDTAQSKNPSKRAKEIGVIKRHLPGCKKDVLCVGIKNKEAKYTNRARLEGWLTPTANQLLQTHINLVKKIQKFLPISDVVLEVNKFAFMRLDNPNIQKWQYQRGPLYQKGSLENAVSEMQEHHCLFCEKPIEHYHHVVPKSENGSNTIANIVGLCAEHHNLVHKDVAWQEKLVEEKTGLNKKYGALSVLNQIIPALTKELSFLFPKHSFMTNGKSTHDYRAAHGISKDHWLDAYCIACSVLPIDVCDSTINNCVPYELKQFRRHDRRALNNENMNRVYTLNDKVVATNRHKATEQEAASLEEFRKEHPNDVCKLKVKEHHPTYRNMNRNYPGSVFLVGKQIHVMQGIASSKDGKATKYNDTRATTIAAGKCKFVAKNSGILFV

SEQ ID NO: 4032 - protein, 394 aa, unidentified
  REGION 1..394: note = Human gut metagenome
MNTCVCVLSNNGERLMPTFRLGKVRRLLKDGKAKIVKHHPFTIQLLYDSKTNKQPIEICEDVGYNYIGISVKSESHEYVSAQYDTLQDEKEHHDDCRKMRRARRNRLRYRKPRFDNRKRSEGWLAPSLEHKKQLNISLVERYVSVIPITHATVEVGSFDTMLLQAIQKGETKPEGADYQEGPRYNLATLREAVFYRDNYTCQVCGRKITDGAILHMHHMFYWKGRHGYKLDELVTACEKCHTPANHQKGGKLFGFGEDKEFADLSGAAFMNAVRWQIVNALHTTYSKEFVTITYGAMTKEKRIALQLEKSHNNDAYAMGDFHPVHRCGFRHYQKRRRNNRVLEKFYDATYIDARTGNKAKGKELFNGRISRNHKKDSENLHKYRSEKVSKGRRS

SEQ ID NO: 4033 - protein, 518 aa, unidentified
  REGION 1..518: note = Human gut metagenome
MTPKKRKEASRMSEYIYVIGVDGDPQMPTKRKRHVEQLLQTGRARVFRQVPFTIQLTYKNEPVLQPVTIAEDPGRSNVGMAVVSLSGELLSAAIVQTRNKEIVKLMEKRKQHRRASRNGERRARQRLAKKYHTMITAGFLMRKLPMYGKDKRVRCNVIKNTESRFCNRKRENGWLTPSAEHLVRTHINLIHKMQKFLPITDVAIEINRFAFLSLEDPSISGVDFQNGPLKGYDDLNAAVEDLQDGHCLMCNSPIEHRHHIVPRSMQGPNTIGNIAGLCCKCHERVHKDTRFEDRLKKKKAGLDKRYAAVSVLNQAIPFICKRLEQEFEKEHVHYCSGRDTGMVRRSFGYHKTKEEQLHEVDAWCIAVLALQHVPEKTPEFDHVHEILQFRRQDRSRIKAQTSRAYYHEGKKIAKNRKKAEGQRDDSLQEWRKRQVERYGKEQTRKMISQLEVKESIRRYNRLDRLMPGAVFYYQGVRYVMRGQHSNGQYLQAVGMGSKDFPAKKCKIVANNEGLVFVS

SEQ ID NO: 4034 - protein, 424 aa, Enterococcus sp.
MRVFVRNMQGKPLMPCSNRKARLLLKEGKAKIYQYNPFTIQLCYASREYVQECHIGIDTGAKHIGMAVTSEDKVLFKGEIELRQDVKSNLDTRRSYRRDRRNRKTRYRKARFLNRKKKESWLPPSIENRINHTFKWINKLVALLPNPKLHIEVGKFDVAKMINPNVQGVDYQHGQTYGFYNVRYFVFARDNYTCQCCKKSKNKILQTHHIIYRSNGGSNRADNLITVCTDCHTYENHQKGGILYQWQENHKKTKQYKEPPFMNVLRKRIFTQYPNAIITYGSETTPKRKELGLEKTHYNDAIVISGITKIKGNPNEWLLIKQFRKKKRSLHEATARKGRKEPNRLQKRNAKNTPYYKGFCLNDKVRVFNQVGHITGFTSSGAYIKNSKNEYITLPNKSYKQIGISNIRLLHHNNNWQYIHKHIA

SEQ ID NO: 4035 - protein, 419 aa, Geobacillus sp.; identical to SEQ ID NO: 2623

SEQ ID NO: 4036 - protein, 455 aa, unidentified
  REGION 1..455: note = Human gut metagenome
MVFVLDRHHKPLMPCHPARARRLLGKGRARIHKLYPFTIRLVDRELKDSTVQPVVLKLDPGSKETGMALVREDETKTHHALYFVNLKHRGSEIKPSLLQRSSFRRSRRSRNLHYRAPRFLNRTRPQGWLAPSLQHRVDTTLSWVERLRKLAPVATLEMELVKFDTQKMQNPEIDGVAYHQGELAGFEVREYLLEKFGRKCIYCGAEGVPLNIDHIVPKSAGGSNRVSNLVLACVDCNQKKNNLPFEVFLKGDKAKINRIRSQLKTPLKDAVSVNTTRWQLFEALKLTGQPLTTATGARTKYNRHQFGVPKEHWLDALCVGETAAVRGWQPLGVLVVKCTGRGAYKRTRLTKDGFPRGYLTRTKRFFGFGTGDMVVATVFASKKKGSYKGRVAVRKSGSFAIQTASRKVDGISYRYCRLLSRADGYGYSWHSSKSLINSTKETALLPRINTQVSAP

SEQ ID NO: 4037 - protein, 443 aa, Oligella sp.; identical to SEQ ID NO: 3678

SEQ ID NO: 4038 - protein, 512 aa, unidentified
  REGION 1..512: note = Human gut metagenome
MSTVYVLNKDGKPLMPTTRGGHVRHLLKEQKARVVRTKPFTIQLLYETNDVVQPLYLGIDPGRTNIGVAVVKTDGTAVFTAHLETRNKEIPKLMQGRKKARRARRTNGRRCRRQRRAKVNGTLSKKCVKQTTAQNGSVSKRAKKIGVIKRHLPDCEKEVLCIGIKNKEAKFSNRTRQEGWLTPTANQLLQTHINLVKKIQKFLPISDVVLEVNKFAFMQLDNPNIQKWQYQQGPLYQKASLEEAVSEMQEHHCLFCKKPIDHYHHVVPQHKNGSNTIGNIVGLCAKHYDLVHKDTTWQKKLAKKKTGLNKKYGALSVLNQIIPALTKELSSLFPKHFFATNGKSTYDYRAAHGVSKDHWLDAYCIACSVLPNDVCDSDINNRVPYELKQFRRHDRRALHKENMSRVYTLNGKSVATNRHKATEQTTDSLEEFRQCQPDDVCKLKVKEHHPEYRNPKRNFPGCVFLVGKHTHVMQGPSGSHNGKADGYYDTNGNSYSSGKCKFVAKNEGIVFT

SEQ ID NO: 4039 - protein, 416 aa, unidentified
  REGION 1..416: note = Human gut metagenome
MVYVLSQNGQPLMPTENHAKVRVFLKQGKAKVVQRCPFTIQLLYESTTHTQKINLGIDAGSKTIGISATTDSKVLYEAEVVLRNDIVELLSGRRALRRSRRNRKTRYRKPRFDNRKKPDGWLAPSIRQKIETHVTVVENITKILPMTKIIVETASFDIQKIKNPEIEGAEYQHGEQLDFWNVREYVLFRDGHTCQCCKGKSKDNILNVHHIESRKTGGNAPNNLITLCETCHKAYHKGIITLPKEIHRGMRFRDAAFMGVMRWAFYDRLKELYNLLGVEVINTYGYITKNTRITYDLPKEHYVDARCISGNPAAKPMDYYYLQKKVRCHNRQIHKCKINKGGTRKRNQAAYEVKGFRLYDQVLWKGQKCFIFARRSTGRMDLRLLDGTHVNASVGYKNLKLLSMRKNYLIEQRKAG

SEQ ID NO: 4040 - protein, 443 aa, Moorena sp.
MDEAAALEKGRHSRMGRRLTYPMYVFVLSKTGKRLMPTHAAKARKLLKEKKAKIVSRNPFTIQLTYQTTEYTQNLTVKLDPGFRKGGVALQSNDKIIFQGEITHRRYINQPTKGQVLVVRRQRRRARRYRIRYRAPRFDNRRRPEGWLPPTIKAKADVLINVLKVLAKYAPITRAIIEAGSFDTHKMQDPDIKPEDYQNGRQKGFKNVKEYVKHRDRRCINCGAEIKEVHHLKQKAKGGTDNPDNLVALCEKCHRLVTLGKLKLDISPGREFKGAAFINAAKNYIVSEIKKFIPEVVIQKGWQTKEERERLNLPKTHINDAIAMGTYGQSVYIPDISGYEIRPRQRAVRQQYLSEPEKGGVFKRYRHPWQNIAGIKRGDLCRDKKTNQLVRVDTLLSSGRLNARVLKTGHRLVNIVPDRLQIVERAKGLMFLPRKEGKPALLP

SEQ ID NO: 4041 - protein, 443 aa, Anoxybacillus sp.
MVEENMTCFMQRKGENPMVFVLDTNKRPLAPCHEAVARKLLKQGKAAIYKRYPFTIILKEIVDNFRPKTPYRLKIDHGSKHTGLAILRGQEVVWLGQLDHRTDIKERMDKRRAFRRARRNRKTRYRKPRFLNRRRKDGWLPPSLESRVQNIQTWVNHLKKLCPIGYISYENTKFDTQLMRNPEINGVEYQQGTLQGYEVREYLLEKFGRKCCYCGKENVPLEVEHIIPKSRGGTDRVDNLCLACHDCNQRKGSKTAEEFGYPHIQKQVKESLKDASAVNSTRWKVYEVLKQSGCEVECGTGARTKMNRIRLDLPKTHYFDACCVGESTPNHLYFKTKEVLFIRAKGRGSRSRTNLDRYGFPRGYLARQKFFFGFQTGDMVKAVIPRGKYQGVWFGEVSCRKTGSFDIKGKDGKRIAQGINYRYVQVIQRFDGYTYRREGMNIA

SEQ ID NO: 4042 - protein, 424 aa, Scytonema sp.; identical to SEQ ID NO: 2747

SEQ ID NO: 4043 - protein, 417 aa, Moorena sp.
MVYVLNKNSQPLMPTERHGKVRRMLRDGKAHVVRLEPFTIQLDYSSGETIQEISLGIDAGSKHIGVSATTKKKELLAIQVEERTDIVELLSTRREARRTRRNRKLRHRAARFDNRRRKEGWLTPSSENRVVAHLRIIHLVNSILPIAKTTIEVAQFDSQKIKNDKISGVEYQQGEQLGFWNVREYVLARDGHVCQHCKGKSKDKILNVHHIEGRKTGSNAPNNLITLCKTCHKACHDREITLKVRRGTSLRDAAAMSIMRWEVYNRAKQEFKNVHLTYGYVTKHTRIHNNIAKTHCADALCISGNVGAERLSWFYGVRLTRRHNRSLHLFKPKKGGIRQGNLAPHWIGKSRLQQYDYVEWNGQRAFVSGSSNGRPYLKNFDDKYIMTPKASVNAKTVKFIRRKRGSMIIEQLLKDSI

SEQ ID NO: 4044 - protein, 413 aa, unidentified
  REGION 1..413: note = Human gut metagenome
MTGYAFVLDVNGKQLAPTKEQKAWFLIRKKRATLVSKYPMVIQLNKEIPDEEICKDEIRCGIDDGGLHVGIALVQKCQTKNKVIFKGIIEQRNDVKHLMEVRRGYRNYHRYHKRYRQARFNNRSSSKRKGRIAPSILQKRQSIIRVINRLNKWINITNYWLEDVSIDIRALTDGYKSYSWQYQRSNRLDENIRKAVILRDNCKCKECGKSNCRLEVHHIKPRRLNGSNTLDNLITLCKNCHQKTEGQEELYMSKYFDLLMSSDNKGLNYAQHAMIGKKWLRKELSNLGILYLTNGGDTANKRIDWSIEKSHSNDAICITDLQPDICNIKEWTIKPMRRQSKAKTDNVLGIKHRDLVEYTFKNGETHKGYVTALYPEQKAINFQSPTKHCKKVNARKCKLLWKYSKIYWLENAG

SEQ ID NO: 4045 - protein, 447 aa, Marinobacter sp.; identical to SEQ ID NO: 3880

SEQ ID NO: 4046 - protein, 449 aa, Moorena sp.
MKVYVKSQSGKWLMPTNPANARILLKQGKAKVIQRTPFAIHLLYETTEHIQPVTVGIDDGGINIGIAAVSNGKVLFQQEVVLRSDVKSKLDTRRQYRKSRRNRKTRYRKSRFLNRKSSIPTCKVCGGNAPASQVICRSCLNRADGVHQKYAKIKKSVFRIPPSIKAKKDAIIRVVKQIPLPICRIVLEDLYFDFQAMENPDISGEQYQHGDLLYHKNFKQACLVRDKFRCRVCGAQTKLQCHHICAGAKGGTDKLSNLMTLCDLCHDRHHKEGLKLPKQKSSFYMSAAHVQQGKHYLQAKLSRIAPLRTTFGYITSHFRNNAGIEKSHVNDAVIIADKQASPLDRQIQTKHVQSRKRSLHEATARKGRKTPNRTQKRNNKNVFTLKDFNRWDTVQYKGRVGFISGFTGSSSCYIVDIKGNYIKNPMKTYKQVDLREISLICKNQTIISQ

SEQ ID NO: 4047 - protein, 466 aa, unidentified
  REGION 1..466: note = Human gut metagenome
MSTCACVFSKSGKRLMPTIRLGKVRHLLKDGKAKIIKHHPFTIQLLYDSETNIQPIEICEDVGYNYIGISVKSQSHEYVSVQYDTLQDEKDCHDSCRKMRRIRRNRLRYRKPRFDNRKRNKGWLAPSLEHKKELNVNVIKMYCKVVPITHVTVEVGSFDTMLVKAIQEGKAIPEGADYQKGPRYNLATLREAVFYRDNYTCQVCGREVQKDGAILHVHHMFYWKGRHGNSLSELLTVCEKCHTPANHQKGGKLYGFGEDIKFANLSGAAFMNTVRWQIVNELYAVFGKPFVTFTYGAMTKEKRIAFHLEKCHNNDAYAMGNFHPVDRCAFEHYKKVKRNNRILEKFHDSQYIDIRTGKVANGRSLFNGRINRSHKKNSENLHKYRGKRTRKGYRALRRKKVALNPGDLVSLNGEILVVHSTHAGKNGYVGVEFKAPSKSGKKSASLKKLKIVKTSNSMRSAWTKVS

SEQ ID NO: 4048 - protein, 431 aa, unidentified
  REGION 1..431: note = Human gut metagenome
MPNKVYVINKHGRPLMPCSPAKARHLLDEGKAKVKKRTPFTIQLVYGSSGYTQEVILGVDAGSKTIGVSASTKKEELFAANVIPRNDVVDLLSTRRESRRARRNRKTRYRKPRFDNRVRSKHKGWLAPSVEVKIQEHITSIKRVCRILPVSKVVIETAEFDLQLLKAIADGKPVPQGEDYQKGEMYGHYNVRQYVLWRDGYTCQCCGAHATKKKEVRLHVHHLESRKVGGDAPDNQVTLCESCHEKLHKGLIAEKDFKKRKRRSTRDATFMGIMRKTLMQRLCSELPIPVIETRGYITKATREKLLVLPKSHTNDALAIAQGKQGFNVGYLPGIVQINKIYTIRPVRHHNRQLHKATILKGGIRKSNQTEKYVFGYCLFDKVQFNGQDCFIWGRRTTGIFTIKTINGKMIKDGISFKKLKLVEKSTSYLIA

SEQ ID NO: 4049 - protein, 512 aa, unidentified
  REGION 1..512: note = Human gut metagenome
MSTVYVLNKDGKPLMPTTRCGHVRHLLKEQKARVVTSKPFTIQLLYETDDVVQPLYLGIDPGRTNIGVAVVKADGSAVFTAHLETRNNEIPKLMKKRKESRRARRTNGRRCRRQRRAKANGTISKKCVKQATAQNGGASKRAKEIGVIKRHLPGCEKEILCIGIKNKEAKFNNRTRPEGWLTPTANQLLQTHVNLVKKIQKFLPISDVVLEINKFAFMQLDNPNIQKWQYQQGPLYQKANLESAVSEMQEHHCLFCKKPIDHFHHVVPQHKNGSNTIDNIVGLCTKHHDFMHKDTAWQEKLAKKKTGLNKKYDALSVLNQIIPALTKELSFLFPKHFFATNGKSTYDYRAAHGVSKDHWLDAYCIAGSVLPNDVCDNNINSRVPYELKQFRRHDRRALHKENMSRVYTFNNKVVATNRHKAIKQTINSLEEFRQCQPNDVSKLKAKEHYPEYRNPKRNFPGSVFLVGKHTHVMQGTSGSHNGKADGYYDTNGDSYSTGKCKFIAQNEGIVFA

SEQ ID NO: 4050 - protein, 453 aa, Lactobacillus sp.
MMSEVQKVNYIYVVDSNGTPLMPTSRLGMVRRWLKTGQARWFGNSRKIIQFVRPVTTNTQELTLGVDAGFHLGLAVVGNQREYYASESLRKSEKDRITSRRELRRTRRNRLRHRQARFDNRRRKDGWLAPSMQHRLDFTIKEIKCLYTFLPITKLVVEVTPFNNQKLVDSNIKPWEYTQGKMHGFKTIKDYLLARDNYRDALDGKQYPASQLRVHHLVQRRDGGSNQPDNLVLLSDINHSQANHHNGSLAKLRENRQKELDYRGAYFMSILATRLSDYFARYTTTQGYLTANLRQKYQLEKSHLNDAFIIAGGTNTTLRTNNVYSRQKLRNNNRVLQKFYDAKYIDSRDGKQKTGKELSSGRTRRTRELNYANLRQFRQEKVKKGRVSIRRNHYQLRPHDVVLNTKTNKVETVTGVQNNGTVIKFQTGKTCSLKNVVSLYHVNGMLEKKIEDI

SEQ ID NO: 4051 - protein, 412 aa, Moorena sp.
MTQLVYVINQNGHPLMPCKPSKARKLLRDGRAKVKHRAPFTIQLRWDCEEQVQDVVVGIDKGSSTTGFACVGRGEILLSGEILHRKDVKEKLDARRAHRRSRRNRRWYRPCRILNRASSKRSGRLPPSIKTNVEEVIRVVQRLPLPITRIVIEDVQVDIARLNDPTVQGSRYQDSKRLDENLRIACLLRDRYQCQHCGKREVRLEAHHVQYRQHGGKDTLSNLLTLCESCHHGVHAGNITLEVSGVSGHLDHIAQRSMQGKTYLYTTLGSALPLSTLFGYQTATWRKHQELPKEHDSDALCIATYDTGERVPWQRERFYRIGFRPRQTRRQYHDLPRKGQGRVRYQLNTELEGFRKGDVVRVKGTWIKQINSIYSTGYLAFSRKKGEPANARPKDCVLLERGTTILWQRPQR

SEQ ID NO: 4052 - protein, 512 aa, unidentified; identical to SEQ ID NO: 3720
  REGION 1..512: note = Human gut metagenome

SEQ ID NO: 4053 - protein, 417 aa, Methanosarcina sp.
MPTNPAKARILLKAGKAKMVSRIPFTIKLNYNSKGYTQPVVAGMDSGSKKIGCAAVGNGKILYQSETEIRQDVSGKMQQRAMYRRTRRSRNTRYRPARFDNRRNSQREGRIPPSIRSKLESHFREKKFVESILPVTEWKVELASFDTHKITNPDVSGIGYQNGDQKGFYNLKAYVLSRDNHTCQHCKSKSKDPKLHCHHIIFRSQNGTDTPENLITLCSTCHQKLHEGKIKLFGNVSKTKHATDVGIIKSQIKKSEWNFKETFGYETKYKREQILELPKTHYNDGVAICCDFDQKVTTNPTIYFKKHVSKGDYQQTTGKRSEKKIPTGKLFGLRKFDLIRTEKGVGIVKGKRSTGYFVITDIFGNKIHDSVNVKRNCKRLKARTSTLIQMVAGLELTHSSPTCRAASSEEGVSCLWG

SEQ ID NO: 4054 - protein, 423 aa, Marinobacter sp.
MSVFVLDRRKQPLMPCSEKRSRLLLGRGRALVVRAYPFTIRLKDRAGGITQPVRIKIDPGSKTSGIAVVRESGQKQHVLVLMELAHRGRQISKSLEQRRAFRRRRRNQLRYRAPRFLNRLRSLVPVVSISQELVRFDTQKMENPEVSGVEYQQGTLLGYEVREYLLEKWGRECAYCTDKDTPLQIEHIDPKANGGSSRISNLTLACRPCNQEKGRQPLADFFASSKRLKNHQARLDRILKQCKKPLRDASAVNSARWTLYQTLKQTGLPVEVGTGGRTKFNRCRLRIPKTHALDAACVGEVEIVEGWDVPTLAIKATGRGSYKRTRLTKHGFPRGYLMRQKKVQGFQTGDRVRAIVPTGTKAGTWLGRVAVRKTGSFNIQTSGGAIQGVSYRHCTLTQRADGYGYHIQPNQPKEEGDRENESR

SEQ ID NO: 4055 - protein, 422 aa, unidentified
  REGION 1..422: note = Human gut metagenome
MRGKPLMPCSAAKARILLKEKKAAVARRTPFTIRLTTAGGESKQPVSLGVDAGYKHVGLSASTEKAELYASEIELRQDITDLLSARLALRRARRSRKTRYRAPRFDNRVRSKRKGWLAPSVENRIAAHLSRIEAVLRILPVTKITVETASFDMQLLKNPDISGKGYQQGEQLGFWNVREYVLFRDGHVCRHCGGRSKDPVLNVHHLESRRTGGDSPGNLITLCETCHKALHRGEIKLSIKRGASFRAEAFMGIMRWKVLDRLKAAHPELEVRNTYGYLTKHARIEHGIAKSHCADAFCIAGNLKADRLGSFYYQKQTRRHNRQIHKLSILKGGVRKRNQAPYEVKGFRLFDKVACKGETAFIFGRRSTGSFDVRKLDGTRISAGISFKKLRLHERRRTYLTELRKEAALPPLPEGRGLRADF

SEQ ID NO: 4056 - protein, 443 aa, Caldicellulosiruptor sp.; identical to SEQ ID NO: 2385

SEQ ID NO: 4057 - protein, 443 aa, Bacillus sp.
MVEENMTCFMQRKGENPMVFVLDTNKRPLAPCHEAVARKLLKQGKAAIYRRFPFTIILKKSVDESEIKATYRLKIDYGSKHTGLAILRGQEVVWLGQLDHRTDIKERMDKRRAFRRARRNRKTRYRKPRFLNRRRKDGWLPPSLESRVQNIQTWVNRLKKLCPIGYISYENTKFDTQLMRNPEISGIEYQQGTLQGYEVREYLLEKFGRKCCYCGKENVPLEVEHIIPKSRGGTDRIDNLCLACRDCNQRKGSQTAEEFGYPHIQKMVKKTLKDASVVNATRWKVYEVLKQSGCEVECGTGARTKMNRIRLDLPKTHYFDACCVGESTTNHLYFKTKEVLFIKAKGRGSRSRTNLDRYGFPRGYLARQKFFFGFQTGDMVKAVVPRGKYQGVWFGEVACRKTGSFDIKGKDGKRIAQGINYRYVQVIQRFDGYAYGKGVAELA

SEQ ID NO: 4058 - protein, 462 aa, unidentified
  REGION 1..462: note = Human gut metagenome
MSVLVIGRNGRALMPTTSRKARLLLKKKTASVVCRHPFTIQLLYKTGCATQEGCIGIDTGSQHIGVGVTCGDRVILKEEHELRSSMEKRSLLVTRAAMRRGRRYRKVRYRKPKWRHHTKRMYFEKPNRRGQHWRKVKTTTQSPRPKGWLPPSLQSKCDHHFCIIDRYLKYLPDSITRNLVIEAGRFDMARMNDPMIHGEMYQRGPMYDAENLRAYIFARDNYQCACCKAKAGTTRKTDGTTVKLVAHHILFRSQGATDNPKYMVSVCDHCHTTKAHQPGGVLYSWMENNKKVTRGLRDATFMNILRQRLFARYPQAAFTYGNITAADRKQLRLPKSHANDAVTISLFGKEIPSVRDTCQTVHYKQVRKSKRSLHEAIPRKGRKNPNTKAVRNKKNTTQVNGFKLWDSVLADGKKLFICSFTGTSAYLVDKNGCYVSQPGKTYKQWPLSKLKRLHPNGNWLMT

SEQ ID NO: 4059 - protein, 512 aa, unidentified
  REGION 1..512: note = Human gut metagenome
MSTVYVLNKDGKPLMPTTRCGHVRRLLKEQKARVVTSKPFTIQLLYETNDVVQPLYLGIDPGRTNIGVAAVKTDGTAVFTAHLETRNKEIPKLMQGRKKARRARRTNGRRCRRQRRAKANGTISKKCVKQTTAQNGSVSKRAKEIGVIKRHLPGCEKELLCIGIKNKEAKFSNRTRPEGWLTPTANHLLQTHINLVKKIQKFLPISDIVLEINKFAFMQLDNPNIQKWQYQQGPLYQKASLEEAVSEMQEHHCLFCKKPIAHYHHVVPQSENGSNTIGNIVGLCTKHHDLVHKDATWQKKLAKKKTGLNKKYGALSVLNQIIPALTKELSSLFPKHFFATNGKSTYDYRAAHGVSKDHWLDAYCIACSVLANDVCDSNINSHVPYELKQFRRHDRRALHKENMSRVYTLNGKSVATNRHKAIKQTTDSLEEFRQRQPNDVCKLKVKEHHPEYRNPERNFPGCVFLVGKHTHVVQGTSGSHNSKADGYYDTNGNSYSSGKCKFVAKNKGIVFA

SEQ ID NO: 4060 - protein, 370 aa, Moorena sp.
VQREPFTIKILDRKKKSSYTKDVTLGIDAGYKEVGFSVINEDEELISGVLELRNDIPKKLEQKANYRRNRRHRNTRYRQPRFDNRKKSKPKGWLAPSIKHKMNSHIKLVNKLKEILPISKVIVEVAQFNTQKMQNPEIEGVEYQQGTLQGYNVRNYLLEKFNRQCAYCGKEDVPLEVEHIIPKSRGGSNRVDNLTISCHNCNQEKDSQTAKEFGYPNVQKQAKQTLKSTAFMNIVRWKIVNKLDCDYTFGHITKKNRIEQDLEKTHYNDAFIIANGKNQKRCKPIKAIINRRNNRSLQTNRKTYGRSVRKQKYLLSPGDLVKYEGKVCEVKGMFNYGKWVRMKDSDGNTVNSNVKDVELVKYRKGLCFVS

SEQ ID NO: 4061 - protein, 512 aa, unidentified
  REGION 1..512: note = Human gut metagenome
MSTVYVLNKDGKPLMPTTRCGHVRRLLKEQKARAVASKPFTIQLLYETDDVVQPLYLGIDPGRTNIGVAVVKTDGTAVFTAHLETRNKEIPKLMQGRKKARRTRRTNGRRCRRQRRAKANGTISKKCVKQTTAQNGSVSKRAKEIGVIKRHLPGCEKDVLCVGIKNKEAKFSNRTRQEGWLTPTANQLLQTHINLIKKIRKFLPISNVVLEINKFAFMRLDNPNIQKWQYRQGPLYQKASLEEAVSEMQEHHCLFCKKPIAHYHHVVPQSENGSNTIGNIVGLCTKHHDLVHKDTTWQKKLAKKKTGLNKKYGALSVLNQIIPALTKELSSLFPKHFFATNGKSTYDYRAAHSVSKDHWLDAYCIACSVLANDVCDSNINSRVPYELKQFRRHDRRALNNENMSRVYTLNGKVVATNRHKATKQTTDSLEEFRQNHSDDVCKLKVKEHHPTYRNMNRNYPGSVFLIGKQVHVMQGIAGSKNGEATTYKDTNANSIAAGKCKFVAKNSGILFV

SEQ ID NO: 4062 - protein, 423 aa, unidentified
  REGION 1..423: note = Human gut metagenome
MRVFVFNMRGEPLMPCTQRKARLLLKAGKAKIYKYNPFTIQLKYATGENKQECHVGIDTGSKHIGLAVTSENKVLFKGEVELRQDVKSKIDTKRIYRRSRRNRKTRYRRCRFLNRKRFGKWLPPSLQNRINHTFKWIDKLCSFIPESILHIEVGKFDIAKMINPEVHSMDYSQGQTYGYQGERYFIFARDNYTCQVCGERNKPLQTHHIIYVSNGGTNRVDNQITVCKNCHNSTNHKNGGIFYKWQKEHKKVKQYKEPPFMNVLRQQILNQYPQALITYGFETTIKRKNIGLEKTHYNDAIVISGISTISENLDEWLLIKQFRKKKRSLHEGVPRKGRKEPNRIQKRNSKNTPYYRGFYLNDKVSVFGKSGYITGFTNSGAYVKGVDGEYIVLPNKSYKRVNIASLKFICHNNNWQYITKNAV

SEQ ID NO: 4063 - protein, 429 aa, Ktedonobacter sp.
LSNVFVIDTNYKPLNPVHPARARLLLTQGKAAVFRRYPFTIVLKRSVEQPEVQPLRLKLDPGSKTTGIALVNDANGKIVFAAELEHRGHAVKDSLESRRASRRGRRQRKTRYRKPRFNNRRRKKGWLPPSLESRIANIETWVARLCRFAPIRALSQELVKFDLQLMENPDLAGIEYQQGTLQGYEVREYLLDKWERTCAYCGAQKVPLQVEHIYSRAKHGTKRISNLTLACEPCNLAKGTQDITVFLATKPEVLKRLLAQVKKPLKDASAVNSTRFALLERLKAFGLPVECGSGGLTKYNRTTRGLPKTHWLDAACVGKSTPVVLSQKGVIPLRIKATGHGRRQMCVPDKYGFPKQHKKRKKTFLGYQTGDMVKARTPKGVFEGRIALRHRPSFRLEKVDIHPKYMRCVQRADGYEYTQKGGCDVAPQV

SEQ ID NO: 4064 - protein, 512 aa, unidentified; identical to SEQ ID NO: 3720
  REGION 1..512: note = Human gut metagenome

SEQ ID NO: 4065 - protein, 447 aa, Marinobacter sp.; identical to SEQ ID NO: 3737

SEQ ID NO: 4066 - protein, 471 aa, Caldicellulosiruptor sp.; identical to SEQ ID NO: 3268

SEQ ID NO: 4067 - protein, 404 aa, unidentified
  REGION 1..404: note = Soda lake metagenome
MSKKVYVQDKNGKALDPTTSTRARKLLSKGRAKVVQRELFTIKILDRKKENSYTKDVTLGIDAGYKEVGFSAINEDEELISGVLELRKNISKKLEQKANYRKNRRHRNTRYRQPRFDNRKKSKPKGWLAPSIKHKMDSHIKLVNKLKEILPITKVIIEVAQFNQQKMQNPEVEGVEYQQGKLQGYNVRNYLLKKFNRKCVYCGKKDVPLEVEHIIPKSRGGSNRVDNLTISCHDCNQKKGSQTAKEFGYPSVEKQAKKTLKSTAFMNIVRWKIVDKLDCDYTFGHITKKRRIEQDLEKTHNTDAFIIAGGKEQKRSKVFKVIIQRRNNRSIQTNRKRYGRSIRKQKYPLSPKDLIKYEGEICEVKGMFNYGTWVRMKDSEGNTINSNVKKVELIRYNKGLVFAS

SEQ ID NO: 4068 - protein, 430 aa, unidentified
  REGION 1..430: note = Human gut metagenome
LRVFVLNKRAKPLMPCSPAKARILLKEKKAVVTRRMPFTIRLTIATGETKQPVTLGVDAGYKHVGLSACTEKAELYASEVELRQDITELLSVRLALRRARRNRQTRYRAPRFDNRVRSKHKGWLAPSVENRINAHLSRIDAVLRILPISKIVIETAAFDTQLLKDTNIEGATYQQGEQFGFWNVREYVLFRDGHVCQHCHGKSKDPVLNVHHLESRRTGGDAPNNLITLCETCHKALHQGKLTLKVKRGFTYKAETFMGIMRWTVQDRLKTAYPDIEIRNTYGYLTKHSRISHGIAKSHCADAYCIAGHLKAKRLAGYYFQKQTRRHNRQIHKLTILKGGLRKSNQAAYEIKGFRLFDKVKVLGEEGFIFGRRASGYFDVRKLDGTRISAGISSKKLTLLEKRKTYLTEYRKEAALPPLNEFRVFLADVL

SEQ ID NO: 4069 - protein, 420 aa, unidentified
  REGION 1..420: note = Human gut metagenome
MQYVYVLNKHGEPLMPCSPGKARLLLKQQKAHVIKRTPFTIKLLYGSTGYKQPITLGVDAGSKHVGLSASTEKRELYREEFTPRNDVVDLLSTRKQNRRSRRNRKTRYRPPRFDNRVHSKHKGWLAPSVEVKIQEHITVIKRICRILPVALVRVETAEFDTQRLKAMLEGKPLPVGTDYQLGEMYDEYNVRQYVLKRDNYTCQCCGAHTTAKKAVKLHVHHLESRKMGGNAPGNLITLCITCHDALHKGKVSLDNKKRGKPMRDAAFMGIMRRTLMSRLREELPITVQGTYGYITKMQREQNDIKKSHVNDARCISKHPLAEPCSVCYRTKAIRHHNRQTHKANFSKGGIRKRSQMPYVVEGYRLWDKVLYKGQECFVSGRRASGSFTLKKLDGTRISKGVTFKKLRLLEPATNYLIERM

SEQ ID NO: 4070 - protein, 512 aa, unidentified
  REGION 1..512: note = Human gut metagenome
MSTVYVLNKDGKPLMPTTRGGHVRHLLKEQKARVVRAKPFTIQLLYETNDVVQPLYLGIDPGRTNIGVAVVKANGTAVFTAHLETRNKEIPKLMQDRKKARRARRTNGRRCRRQRRAKANGTISKKCVKQTTAQNGSVSKRAKEIGVIKRHLPGCEKDVLCIGIKNKETKFTNRTRPEGWLTPTANQLLQTHINLVKKIQKFLPISDVVLEVNKFAFMRLDNPNIQKWQYQQGPLYKKESLESAVSEIQEHHCLFCKKPIDHYHHVVPQSENGSNTIANIVGLCAEHHNLVHKDAAWQKKLAEEKVGLNKKYGALSVLNQIIPALTKELSSLFPKHSFVTNGKSTYDYRAAHGVSKDHWLDAYCIACSVLPSNVCDSNINNHMPYELKQFRRHDRRVLNNENMNRVYTLNNKAVAINRHKAKDQKTVSLEEFRKEHPDDVCKLKVKEHHPTYRNMNRNFPGSVFLVGKQIHVMQGIASSKDGKATTYKDSNANSITASKCKFVAKNSGILFV

SEQ ID NO: 4071 - protein, 380 aa, Moorena sp.
VQEVTVGIDKGSHITGVSCVANGRILMSGEIHHRVDIKDKMDARRANRRNRRNRKWYRPKRFLNRASSRKSGRLPPSIKANVEEVIRVVRRIPLPISHIVIEDVQVDIARLNDPKRKDSETLSPRLIGKAYQQSNRLDENLRIATLMRDGFRCTQCEKKKTRLDAHHIIWKEHGGKDTIENLITLCKACHRKVHQGKLQLDVEGVSGFNDGIAQRTMQGKTYLYKELSKQASLDKVFGYQTSAYRKALDLPKRHDVDALCVATLETGEVIRGVIACETFRKPNRENFYRIKFRPRQTRRKYHDLPRKGKGRVRYQVNAELEGFRKGDIVRVKGKWVKQINSIYSNGYLAFARVKGEPNAAKPKDCLLLQRGQTLIWAKAV

SEQ ID NO: 4072 - protein, 431 aa, unidentified
  REGION 1..431: note = Human gut metagenome
VEQNLRVFVLNKRGKPLMPCSPAKARHLLKEKKAIVVRRTPFTIKLTIATGESKQPVSLGVDAGYKHVGLSASTEKAELYASEVELRQDITDLLSARLALRRSRRNRKTRYRAPRFDNRIRTKRKGWLAPSVENRINAHLSRIEAVLRLLPVTKITVETASFDLQLLKNPDISGKEYQEGEQLGFWNIREYVLCRDGHVCQHCYGRSKDPVLNVHHLESRRTGGDSPGNLITLCETCHKALHRGEITLKAKRGQSFRAEAFMGIMRWEVLNRLKASHPELEVNNTYGYWTKHARIANGIAKSHCADAFCIAGNLGAERLGEFFFQKQTRRNNRQIHKLSILKHGLRKRNQAPFEIKGFRLFDKVACKGEEGFIFGRRSSGFFDVRKLDGTRISAGISYKKLHLLEKRQTYLMEIRKEEAFPPLPEGRGLRA

SEQ ID NO: 4073 - protein, 428 aa, unidentified
  REGION 1..428: note = Human gut metagenome
LKVFVLNMRGQPLMPCSPAKARHLLKAGKAVVRRRTPFTIQLRIATGETKQSVTLGVDAGAKHVGLSATTEKEEVFASEVELRQDITGLLAARLSLRRDRRHRKTRYRAPRFLNRVRSKHKGWLAPSVENRIQAHMSRIDAICGLLPVTKIVIETASFDIQKIKHPDVEGTDYQQGDQLGFWNVREYVLFRDGHVCQHCHGHSKDKILNVHHLESRQTGGDAPNNLITLCETCHKAYHAGKIKLKVKRGQSFRAEAFMGIMRWTLLDRVRKAHPGLPVENTYGYLTKNTRITLGLPKAHCVDAYCIAGNLKAVRRGVHLYQRQVRKHNRQIHKCTVLSKTLKDGTKIGYRKLNQTPHLVKNFRLFDKVRCLGQTGFIFGRRSSGYFDVRRLDGVKLSPSISWRKLTLLEKRSTYLTELRKQDGTSSPV

SEQ ID NO: 4074 - protein, 413 aa, unidentified
  REGION 1..413: note = Human gut metagenome
MVYVLNENGQPLIPTENHAKVRVLLKQGKAKVVNNCPFTIQLLYSSTNYTQPVTLGVDAGSKHIGLSATTEDRELYAADVELRNDIVKLLAARRASRRSRRNRKTRYRKPRFNNRKRDKGWLAPSIREKIGTHLKVVDDTCKLLPVSKIIVETASFNIQKIKNPDVKSTDYQQGEQLGFWNVREYVLFRDGHKCQCCKGKSKDKILNVHHIESRQTGGNAPNNLITLCETCHTGYHKGTVKLPAKIKRGMKFKDAAFMGIMRWAFCGELKKRYPDVSLTYGYITKKTRIENGLPKEHYVDARCISGHPSAKPLGTVFYIKKVRCHNRQIHRLKILKKGVRKRNQAEYEVYGFRLYDKVSWKGRICFVFGRRSTGRMDLRLLDGTHVNASVSYKNIKLLRMRSNYLIEVKNAIG

SEQ ID NO: 4075 - protein, 441 aa, Sutterella sp.
MSVSVFVQDRKHRPLMPCRPARARRLLKSGRARVVRLFPFTIRLTDRLIEDSELQPVLVKIDPGSRRSGFAVVRVDEKGDHHALFFIELVHRGESIRDALTGRSAHRRWRRGNLRHRAPRFLNRTKPQGWLPPSLRHRVDTATAWVAKLVKLAPVTGIVEELVKFDTQKLQNPEISGIEYQQGTLFEYEVREYLLEKFGRKCVYCGAENVPLNIDHVVPKARGGSNRISNLVLSCVDCNQKKDAQPVDVFLKGRPDVLDRIKRQIKKPLRDATAVNATRWSLFNALQTFGLPVETGSGALTKFNRHTFRVPKEHWLDALCAGRVNGVHYPKGMGILQVRCTGRGSYQRTRVDKYGFPRGYLTRQKRIHGFATGDMVKAVVPSGRKAGTYRGRVAVRARGCFVIQTPEGKVDGIGWRHCRLLSFNDGYGYAWLRPASHSSPV

SEQ ID NO: 4076 - protein, 461 aa, Desulfotignum sp.; identical to SEQ ID NO: 3911

SEQ ID NO: 4077 - protein, 407 aa, Moorena sp.
MHIFVLDKDKKPLAPCHPAKARRLLKSGRASVFRRYPFTLILHKIEAKDCVVPETQLNASAPLASTSLSVESERSRGLKIDPGSQTTGLAILSENRIIWASELSYRGQQIKNDLEKRRALRRSRRHRKTRYRKPRFLNRTRPKGWLPPSLNHRVETTMTWVNRLRKLCPIVSISQELVRFDTQKLQNPEVSGIEYQQGELLGYEVREFLLEKWGRKCASLGARSLAPCDGAGSHRYCGAENLPLEVEHIHPKSKGGSDRVSNLTLACHTCNQAKGNRDIREFLSGKPSVLDRILKQAKAPLKDAAAVNATRWKLYQQLKETGLPVEVGTGGQTKFNRTRLGLPKTHWLDAACVGKSTPDRLDVAVEKPLLVAAKGHGVRQRCRPDRYGFRGLLPRKPNLFKVSKPAI

SEQ ID NO: 4078 - protein, 472 aa, unidentified
  REGION 1..472: note = Human gut metagenome
MNTCVCVLTNNGERLMPTFRLGKVRHLLKDGKAKIVKHHPFTIQLLYDSKTNTQPIETCEDVGYNYIGISVKSESHEYVSAQYDTLQDEKEHHDDCRKYRRTRRNRLRYRKSRFDNRKRDKGWLAPSLEHKKHLNISLIERYVSVIPITHVTVEVGSFDTMLVKAIQEGKVIPEGADYQKGPRYNLATLREAVFYRDNYVCKVCGRKATEGAILHMHHMFYWKGRHGNSLNELLTVCEKCHTPANHQKSGKLYGFGEDVKFADLSGAAFMNTVRWQIVNELYAAFGKPFVTITYGAMTKEKRIALQLEKSHNNDAYAMGEFHPDHRCAFEHYEKVRRNNRILEKFYDSQYIDIRTGEIATGKELFNGRINRNHKKDSENLHKYRGKRTYAGHRALLRKKVNLNPGDLVSLNGEPLVVLGTHTRKNGAVNVEFETPSKSGRKSASLKKLKIVKAADSIHPAWEKVSQIIQRKE

SEQ ID NO: 4079 - protein, 408 aa, unidentified
  REGION 1..408: note = gut metagenome
MVYVQDIDGKPMMPTTRHGKVRRLLKDSKAIVVNTCPFTIKLMYKTSDYKQEIVLGVDAGTKHVGLSATTKSKELYSSEVILRSDIVELLSTRRESRRTRRNRLRYREPRFDNRIKSKRTGWVAPSVRHRIDAHIRIINNVCSILPISRIIIEVAQFDTQKIKNPDISGDEYQEGDQLGFWNVREYVLARDGHKCQHCKGKSKDPILNIHHIESRKTGGDSPSNLITLCETCHKEYHKGNIDLRVKRGKSLRDAAVMGIMKWKLYEELKSRYDNVSMTFGYITKHNRIKYGIEKSHTSDAFVISRNFNALMLKYHYKVRLVRRHNRQIHKQKVLKGGVKKPNQSPFEVFGFRLFDRVMFEGDCHFIFGRRKSGSFNIRDIDGGNQRDVTYKKLKLSRCKRFMIQNKIF

SEQ ID NO: 4080 - protein, 408 aa, unidentified
  REGION 1..408: note = Human gut metagenome
LKVFVLNMRGKPLMPCSPAKARHMLKAGKAFVVRRTPFTIKLTIATGETKQDVTLGVDAGARHVGISATTEKEEVFASEVALRQDITGLLADRLAFRRARRNRKTRYRAPRFNNRVRSKHKGWLAPSVENRIQAHISRIEAVCRLLPVTKIVIETASFDIQKIRNPEVEGTGYQQGDQLGFWNVREYVLFRDGHICQHCRGRSKDPILNVHHLESRKTGGDAPNNLITLCETCHKAYHAGKIKLKVKRGQSFRAEAFMGIMRWTLLNRMRKAHPSLPVENTYGYLTKHKRIALGLPKTHCADAFCIAGNLKALRRGDFLFQQQTRKHNRQIHKCSILKGGVRKLNQAPFLVKGFRLFDKVRIGGQIGFVFGRRVRGTFNIRRLDKTVIGTDINCKKTESSRNTQNFFD

SEQ ID NO: 4081 - protein, 410 aa, Tissierella sp.
MVYILNQEGKPLMPTNRHGKVKHLLREGRAKVVKRTPFTIQLLYATTDCVQPIVLGVDAGSKVIGLSATTEKEELFASEVVLRNDIVELLSTRRQNRRTRRNHLRYRKARFLNRVKSKNKGWLAPSIQHKVDSHLKAIANVYKILPISKIIIETASFDIQKIKNPQISGVDYQQGEQEGFWNVREYVLWRDGHECQHCHGKSKDKVLNVHHKESRKTGGDSPGNLVTLCENCHTLHHKGKIELNLTKNKSYRDATFMGIMRWQIYNKLKEIYPNISTTYGYITKNNRITNGIEKTHTADAFCIAGSLKAKRSSVVYFQTFKRRHNRQIHKANFLKGGKKKLNQSPYEVKGFRLFDKVLFQEKECFVFGRRATGYFDLRKLDGTVIHRSASVKNIKLLEKKSTLLIERQVA

SEQ ID NO: 4082 - protein, 406 aa, unidentified
  REGION 1..406: note = Human gut metagenome
MVYVQDIDSKPMMPTTRHGKVRRLLKDNKAVVVNTCPFTIKLTYKTSDYKQEIVLGVDAGTKHVGLSATTKSKELYSGEVILRNDVVELLSTRRESRRARRNRLRYRKPRFENRVKSKRLGWVAPSVRHRIDAHIRVIDNVCSILPISRIIIEVAQFDTQKINNPNISGNEYQKGDQLGFWNVREYVLARDGHKCQHCKGKSKDHILNVHHIESRKTGGDSPSNLITLCETCHKEYHKGNIDLKVKRGKSLRDAAVMGIMKWKLYDELKSKYDNVSMTFGYITKYNRIKYGIEKSHTSDAFVISRNFNAKRIERQYLKRLIRRHNRQIHKMKILKGGKKKNNQAPFEVFGFRLFDKVLYNNEICFIYGRRKSGCFDIRDFDGKNSKNVTYKKLKLIRGKRYPIILK

SEQ ID NO: 4083 - protein, 419 aa, unidentified
  REGION 1..419: note = Human metagenome
MFVYVLDKNGQPLMPTSRFGKVRRMLRDKKAKVVNRCPFTIRLLYEPETKVVQDVILGVDTGSKHVGVACIGNDKVLYQSQVELRDDIKRKMDSRRMYRRSRRNRKTRYRKARFLNRRNSIRKDRYCPTLISKCCGHEREIEFCKRILPVKDTVLETAKFDTQLIEKPWLQEHKWAYQKGVNYGYANAREHALVRDKYTCQCCGKKNCRVETHHIVFRSKNGSNDLENYITLCEDCHKAIHLGEIELEQKGKRKSNLRYATQMSIIRSMLLKKYPDAIETFGFVTKANQENLGLKKDHYLDACVIASGGLEFEQLDVLYRKRVVSVQDRVLTKGIRGEKKLPTGKVHGFKRYDKVKYLGEVCFVKGRRVKDGFVLMDIDNNSIDFRDRGGKQNPSYRFIERINTRRSVLCVKKRLEREV

SEQ ID NO: 4084 - protein, 417 aa, unidentified
  REGION 1..417: note = Human gut metagenome
MPCSPAKARLLLKEKKAIVKRRTPFTIQLTIATGEARQPVTLGVDSGYKHIGLSATTEKAELYASEVELRQDITDLLSARLALRRSRRSRKTRYRAPRFDNRVASKREGWLAPSVENRIAAHMSRVEAVMQVLPVTAITVETAAFDTQLLKNPNIAGEAYQQGEQLGFWNVREYVLFRDGHVCQHCRGKSKDPILNVHHIESRRTGGDAPNNLITLCETCHKAFHRGEIELKVRRGKSFKAETFMGIMRWTLFERLKKAHPELRVRNTYGYLTKHKRISHGIAKSHCADAYCIADNLGAKRLSGYLFQKQTRKHNRQLHKLSILKGGLRKKNQAPYEVKGFRLFDKVICKGEEAFIFGRRTSGSFDVRRLDGTRISAGINYKKLRLLEPRTTYLTEFRKEAALPPLHKCRGFRAEFL

SEQ ID NO: 4085 - protein, 425 aa, unidentified
  REGION 1..425: note = Human oral metagenome
MLVYVLKQNGQPFMPTERFGKVRRLLKEGKAKVVRREPFTIRLLYKPETDVVQECYCGVDTGSRHIGVAVVGNDRVLYQSQIELRSDIKKKMDARRASRRSRRNRKTRYRKKRFLNRRNSIKNDRLPPSVKHKVQSHIDEIEFCKKILPVSDLILEVSQFDTALMKNPSLINEKVKHWGYQQGFNYGYSSRRSAILHRDNYTCQRCGKKNCRLEVHHIKFRRNGGTDDEENLITLCKECHDGVHTGTIFLNKKPKKSKGLKHATHMSIIRSQLLKKYPDAIETFGFVTSENRNYLKLEKDHYIDACVIASGGLEFKELDMVYKKRRISNQSRILTKGIRGEIKLPTGKIHGFRRHDKVKYLGEICFIKSRRVGGNFTLMDIDSNSLDFRDMGGKQNPSYRYIKRIKAGRSILCVCKRIERRVLHE

SEQ ID NO: 4086 - protein, 447 aa, Marinobacter sp.; identical to SEQ ID NO: 3842

SEQ ID NO: 4087 - protein, 427 aa, Moorena sp.
MQNYVFVIDTKNQPLNPISPKKARRLLDKGKAAVFRMYPFTIILKTAIDNPTISPCQIKIDPGSKVTGFALVQNNQVIWGMELEHRGGLIKKKLESRKAVRHRRRNRNTRYRKPRFLNRRRKEGWLAPSLEHRVLTIETWVKRLIKFCPINQVWVERVKFDTQKMQNPEINGVEYQQGELAGYEVKEYLLEKWGRECTYCGKQSVPLQIEHIHPKSLGGSNRVSNLCLACEKCNQRKGNKPIEEFLKKKPNLLQKIKTKTKQPLPDAAAVNTTRNKLVKVLRSIKFVVTGTGAQTKYNRTRLGLPKQHWIDAACVGNIETLVLKTSQPLLVTCKGQGGRQKAALNKYGYPIRHNPLKPIKGWLTGDIAKHQKLGIGKVTPRSKGSFGFTPLGMKGYKSCFPQDISAIHRKDGYTYSFCQHMPEFTWK

SEQ ID NO: 4088 - protein, 413 aa, unidentified
  REGION 1..413: note = Human gut metagenome
MTNYAFVLDANGKQLAPTKEQKAWFLIRKKRATLVSKYPMVIQLKKEISDEQICKDEICCGIDDGGIHVGLALVQKCKTKNKVVFKGTIEQRNDVKHLIEVRKGYRNYHRFHKRYRQARFNNRKSSKRKGRIAPSIFQKRQATIRVIKQLNKWINIANYSLEDVTIDIRALTDGYKSYRWQYQQSNRLDENIRKAVILRDGCKCMECGKSNCRLEVHHIKPRRLNGSNTLDNLISLCEKCHQRTEGQEELYMDRYFSILSSTDNKNLDYAQHVMIGKKWLREQLSELGTLILTTGGDTANKRIDWNIEKSHANDAICITGLQSDACNVKEWTIKPMRRQSKAKTDNVLGIKHRDLVEYTFKNGETHRGYVTALYPKQNAINFQSPTKHCKKVNAKKCKLIWKYSKIYWLDNVL

SEQ ID NO: 4089 - protein, 465 aa, Marinobacter sp.; identical to SEQ ID NO: 4016

SEQ ID NO: 4090 - protein, 512 aa, unidentified
  REGION 1..512: note = Human gut metagenome
MSTVYVLNKDGKPLMPTTRCGHVRHLLKEQKARVVTSKPFTIQLLYEADDVVQSLYLGIDPGRTNIGVAVVKADGTAVFTAHLETRNKEIPKLMKKRKESRRARRTNGRRCRRQRRAKANGTISKKCVKQTTAQNGSISKHAKEIGVIKRRLPGCEKDILCIGIKNKEAKLNNRTRPEGWLTPTANQLLQTHINLVKKIRKFLPISDVVLEINKFAFMQLDNPNVQKWQYQQGPLYQKASLEEAVSEMQEHHCLFCKKPIAHYHHVVPQSENGSNTIGNIVGLCTKHHDLVHKDTAWQKKLTKKKTGLNKKYGALSVLNQIIPALTKELSSLFPKHFFVTNGKSTYDYRAAHGVSKDHWLDAYCIACSVLPNDTCDKTINSRVPYELKQFRRHDRRALNNENMSRVYTFNGKMVATNRHKATEQTTDSLEEFRQRQPNDVCNLKVKEHHPTYRNMNRNYPGSVFLIGKQVHVMQGIAGSKDGEATTYKDTNANSIAAGKCKFVAKNSGILFV

SEQ ID NO: 4091 - protein, 472 aa, Cupriavidus sp.
MSVFVLDKHGKPLMPCTEKRARLLLERRRARVHRVVPAVIRLVDRTVDDCEFQPLRIKLDPGSKMTGGALVRDTELACSVSGEIRRGAAVLNLFELVHRGGQISEGLTARRSMRRRRRGANLRYRAPRLLNRTRPAGWLAPSLQHRVDTTMAWVQRIRRWAPVNGVSSELVRFDMQAMENPEISGVEYQQGTLAGYEVREYLLEKWGRTCIYCDATDRPLQIEHLTATANGGTNRIGNLGLACGPCNQDKGANDVREYVDDPKRLARILAAASRPLKDAAAVNATRWALANALRATGLPLELASGGRTKFNRAAHTIPKTHALDAACVGDLNAITGWQRPTLEVKATGRGSYQRTRLTASGFPRGYLMRQKQVKGFQTGDRVHAVVPSGKKAGTYAGRVAVRASGSFNIQTPNGVVQGISHRHCSLVQRADGYGYHFRSKDRLYKGEAGEGRAAHAALSIPVLKDGVSRASR

SEQ ID NO: 4092 - protein, 470 aa, Moorena sp.
MSVFVLDKQGSPLMPCSEKRARLLLARSRARVHRVMPFVIRLVDRHRDSCATQPLRLKLDPGSKTTGMALVRDSEVVVADSGEIQRGAAVLNLFELVHRGRQISEALSARRAMRRRRRSSLRYRAPRFLNRTRKTGWLPPSLQHRVDSTMAWVRRIQRWAPVTALSSELVRFDMQALENPEISGIEYQQGTLAGYEVREYLLEKWCRQCAYCDKTDVPLQVEHIVAKARGGSTRMSNLTLACRCCNKAKAALPVEVFLAKDPKRLARILAQAKRPLKDAAAVNVTRWALANALRATGLPVEFASGGRTKFNRAMLSVPKTHALDAACVGELAHIVAWQKPTLAVKCSGRGSYQRTRLDKYGFPRGYLTREKQHFGFQTGDLVRASVPTGKKAGTYVGRVAVRASGSFNIQGAGGVVQGVAHRHCRFVQRSDGYAYSRIATPEGVAGTGTASPRSALSLPGLKAEVSRAIG

SEQ ID NO: 4093 - protein, 521 aa, Streptomyces sp.
MTTFSSGEKTHRAVLPQRRALESAGADTPGSRDETACGLPATVPGAGAEHGRGEILSAGSHPAGRRPAPASAGKGETREGHPVVFVLDRHHQPLMPCPPARARKLLSHGRAVVHRHTPFVIRLKDRTAATSEVTGVQLGIDPGSRFTGIALFRAVDEADVSVRHGLFAIELVHRGGPISVRLTSRATLRRARRQRNLRYRAPRFNNRARPEGWLAPSLRHRVDTITAWVNRMTRWAPVRAVHVELSVFDPHAMSAGTSASDAEYRGGTLQGMEVREYLLMKWNRACAYCGATSTPLNIDHIHPRSRGGSDRVSNLTLACLPCNTRKSNMPVEGFLKKKPAVLSKILQQAKTPLRDAAAMNATRCAVLRALEAQHPDVRASTGGRTRWNRRRTATPKSHTLDALCVGVLASVARHPKAIQVVTATGRGTYRRTAPDRYGFPRLHLPRTKQYFGYATGDLVRANVPNGKRQGSHTGRVAVRATGNFNIKTRRGLVQGISQRHVRLLQRADGYAYTTRAEGTHA

SEQ ID NO: 4094 - protein, 512 aa, unidentified
  REGION 1..512: note = Human gut metagenome
MSTVYVLNKDGKPLMPTTRGGHVRHLLKEQKARVVQSNPFTIQLIYETNDAVQPLYLGIDPGRTNIGVAVVKANGTAVFTAHLKSRNKEIPKLMKKRKDSRRARRTNGRRSRRQRRAKANGTISKKCVKQTTAQNGSVSKRAKEIGVIKRHLPGCEKDVLCIGIKNKEAKFNNRTRPEGWLTPTANQLLQTHVNLVKKIQKFLPISDVVLEVNKFAFMQLDNPNIQKWQYQQGPLYQKANLEEAVSEMQEHHCLFCKKKIDHYHHVVPQHKNGSNTIDNIVGLCTKHHDLVHKETAWQEKLAKKKTGLNKKYGALSVLNQIIPALTKGLSSLSPKHFFVTTGKSTYDYRAAHDVCKDHWLDAYCIACSVLPNDVCDSNINSHVPYELKQFRRHDRRALHKENMNRVYTLNGKKVATNRHKAIEQTTDSLEEFRQRQPNDVCKLKVKEHHPEYRNPKRSFPGCVFLVGKQTHVMQGTSGSHNGKADGYYDTNGNSYSSGKCKFVAKNEGIVYA

SEQ ID NO: 4095 - protein, 419 aa, Geobacillus sp.; identical to SEQ ID NO: 2623

SEQ ID NO: 4096 - protein, 423 aa, Marinobacter sp.; identical to SEQ ID NO: 4054

SEQ ID NO: 4097 - protein, 426 aa, Moorena sp.
MSKVFVVDLEKRPLNPVHPAQARQLLRNKKAAIFKRFPFTLILKESRPDAPIQPLRLKIDPGAKHTGIALVNDSTGEVVFAAELKHRGFAISFALTSRRQLRRGRRNRQTRYRKPRFLNRTRPDGWLAPSLQSRVENIKTWVNRLRKLTSINAISQELVRFDMQLMQNPDIQGKEYQQGTLAGYETREFLLEKWNRQCAYCGVKDVPLQIEHIYPRAKGGTNSITNLTLSCEKCNTKKGTKDIKDFLKKNSARLEKILKQAKRPLADAAAVNTTRFTLLEVLKATGFPVETGSGGLTKFNRNQQNLVKLHWLDAACVGKSTPILNIKGVKPLLITANGHGTRQSCRTDKFGFPNRHCSRTKFHFGFQTGDIVKAVVTSGKKVGGYVGRIATRATGSFNISTKNGLLQGINHKYCKHIHKKDGYSYA

SEQ ID NO: 4098 - protein, 414 aa, unidentified
  REGION 1..414: note = Human gut metagenome
MVYVINKQGQALMPTERFGEVRRLLKNSLAHVVCRIPFTIQLDYDTTDYTQPVSLGVDAGSKHIGISATTSEKELYAADVELRNDIVDKLSTRRELRRTRRSRIRYRKARFNNRVSSKRKGWLAPSVENKIQTHLTVVEKIHKFLPITNIVVETASFDIQKIKNPSISGSEYQQGEQLDFFNVREYVLFRDNHTCQHCKGKSKDKVLNVHHIESRKTGGDSPNNLITLCETCHKAYHRGEFELNVKRGKSFRDSAFMGIMRWSFYDRLKNIYPNVSMTFGYITKNTRITNNLPKEHYVDARCISGNPTAKPLGYYFYQKKVRCQNRQIHKANFLKGGRKKLNQAPFLVKGFRLFDLVEYKKELYYIFGRRSSGSFDIRKLDGTKVNKGSINCKYLRLVDKRKSILIEKRMQVNL

SEQ ID NO: 4099 - protein, 427 aa, Nitrosococcus sp.
MNRVFVLDTDRKPLMPCSPARARRLLRDGKAGVYRMQPFTIILKYRVDPNPQPVEFKVDPGSKITGLALVGNFPQQGRVVLWAANLTHRGYAIRERLASRRSLRRGRRGRKTRYRAPRFLNRTKPKGWLPPSLNSRVENVSSWFNRLLDRVPISECHIETVRFDTQKIQNPEINGVEYQQGELMGYEVREYLLEKWDRKCAYCNKKDIPLEVEHIIPRSRGGSNRVSNLTLARAPCNKKKNSKTAAEFGYTQIQSKSKLPLKDAAAVNATRYAIGCTIQSVGLPTSFWSGGRTKKNRISQGYTKDHWIDAACVGESAEQVTITEGYRALHIKATGRGTRQVVRTDKYGFPRGKAGRCRRVKGFQTGDLVRLSQPQGKYAGDHVGILASIRASGTFDVKAKAGKISANWINFKLIQRGDGYDYSLSAV

SEQ ID NO: 4100 - protein, 347 aa, unidentified
  REGION 1..347: note = Human gut metagenome
MTNYVFVLDANGKHLSPTKEQKAWFFIRKKRATLVSKYPMVIQLNKEIPDDKICKDEIRCGIDDGGLHTGIALVQKCQTKNKVLFKGVIEQRNDVKHLMDVRRGYRRYHRYHKRYRPARFNNRSSSKKEGKIAPSILQKRQATIRAVAQLNKWINITDYWLEDVAIDIRALTDGFKPYKWQYQKSNRLDENICKAVILRDGCQCVECGRTNCKLEVHHIKPRRLNGSNALSNLITLCERCHQNTEGREELFMDKYFALLNSSDNKYLNYAQHVMIGKKWLREQLSSLGILHLTNGGDTANKRIDWNIEKFHSNDAICITNLQPDTCDVKEWTIKPMRRQSKAKADNV

SEQ ID NO: 4101 - protein, 459 aa, Polaromonas sp.
MPCSEKRARKLLESGRARVHKLFPFGIRLVDRLVEDSVFQPLRLSLDPGSKTTGLAVCRVAETIDVTTGEIQPTMHIQFLMELMHRGATIKKSLGARSAMRRRRRGKLRYRAPRFSNRPKPQGWLAPSLRHRVETTMTQVKRLCRLAPITHLAQELVRFDMQKMQNPEISGAEYQQGTLQGYEVREYLLEKFNRTCAYCDAQNVPLQMEHIHPKAAGGTNRISNLALACQACNQKKGVQDIKDFLLKDPKRLAKVLKQAKAPLLDAAAVNTTRWTLFGALKQTGLPVETGTGGQTKYNRCRLSIPKTHALDAACVGQVQSVNNTNAPMLRVICTGRVSRSKTRLDKYGFPRTYLTHQKTAFGFKTGDMVIATVPKGVKKGIHKGRVAIRLTGSFNIQTGIAGAATVQGISYKHCRITQRADGYGYSHRAQTKKECGNKECALHTALSIPGLKAEVSRAI

SEQ ID NO: 4102 - protein, 445 aa, Burkholderia sp.
MPLMPCSEKRARLLLARGRARVHKVVPFVIRLTDRSTEDSEFQLLRLKLDPGSKTTGLALVLDKAGTSVGVLNLFELVHRGRQISEALMQRRRFRHRRRGANLRYRAPRFYNRARQRGWLAPSLRHRVETTMSWVRRVLRWAVVSAISMELVRFDMQALQSQNIAGVEYQQGALFGYEVREYLLEKWGRRCAYCDARDVPLQIEHVLAKARGGSNRVSNLTLGCGPCNLKKGERDVRGFVKDKARLARILAKAKTPLRDAAAVNATRWVLLNALRSTDLNVEIGSGGRTKWNRTRLGLPKTHALDAACVGTVHAIFGWQRPTLELKCSGRGSYQRTRLTGYGFPRGYLTRQKRIHGFQTGDRVRATVPTGKKAGTHVGRVAVRANGNFNIQTPQGVVQGIAHRHCTMMQRADGYAYAIVPLKRGKDQGPAQQQGAYRASCYPSPA

SEQ ID NO: 4103 - protein, 552 aa, Streptomyces sp.
MTTSLVGEQTHQAVLPQQPALESVGADTPGSRDETAHGHPATARGTGGTHGRGETGGHGTSARRRHAVTTASAVSEAANGSGDVPTGCDTYAGGIGAARVFVLSKDGKPLMPCHPARARELLDKKRAVVARQAPFVIRLKDRTRAESAVEGVHVRVDPGSKGTGFALTDEKEERSSHERKVVVRRGLVTVELQHRGDRIHRSMQRRAGYRHRRRSANCRYRPRRARNRARAQGWLPPSLRHRVDTTVSLVTRLCRYAPVTEIHLEHVAFDTHSMSAGRALRGAEHRHGSLVGTDARAYLRTKWGSACAYCGATGVPLNIDHLHARSRGGSDRISNLVLACVPCNQTKGSRPVTVFLAHEPERLATILEQVKAPLQDAAAMNTTRAGLLNALTALGRPVRCWSGSLTKQNRTVTGLPKTHSLDALCVGALDREGRNTIVRVPGHLLVVKAVGRGSYARTTPDRFGFPRLRRARSKRHYGFVSGDLAQATVPSGKWAGTWVGHISVRARGQHSLATPVGRINVSHRHLRLLQRGDGYSYARRDGILENPCEKSA

SEQ ID NO: 4104 - protein, 594 aa, unidentified
  REGION 1..594: note = Human gut metagenome
MTNFKLRLYYKGNKNMNYMDFVLIVDKNNKPCIPIKNGKAGYLLREHKAEIINHEPLVIKRTDDYNSDLENRDIFELKVDSGYLNIGFSVSDNEHEYIAGQVEMLNGMSNRLLERKSMRSSRRNRLRYRKNKNIDYKTVHNPTYKNGNEDGWFAPSIVHKMETHIRIIEQLKQWVPIDKVIVEVANFDIAAMDAYLKDGTILNGKDYQNGEMKGYENVVSYVRARDNYSCYFCNKKKKKDGTLKEKPKRIEVHHKIPRSWGGTNNPGNLICVCQGCHQKIHSNNNNNKYFKELLEQALQENTFKDSTYMNIVRWELLNRLTEKYPEFDIEAEYGYNTKINRKEAGLRKFHYNDAVCIKEFKNTTLSKKVFIVEQKRCNDRKMENFADAKYIDSRDGKKKSGNDLKVIRHSTKSKRSTNKEHIDNERVFRKEKVSKGKIQFECHSYCVKPGDLIYIKEGKHKGKIAEVSTIQIVGGKIPNPIIDINEINNKKIDFNRELKKRKTISNMTDYQKSFAKYQIRFTYKESDADGPSITLTQKEYEKLKENKSDRVKIIRTRRGLVWREYDRLTYEAENMDQEEKKLEVKNKKQELKAA

SEQ ID NO: 4105 - protein, 490 aa, unidentified
  REGION 1..490: note = Marine metagenome
VPPQHDPLEATSVDKPGQARNGMWSNAGGQHVREETSEQARHRRSNSASGVSRVFVLAKNGKPLMPMRPARARRLLKDGRAVVHKRMPFTIRLKDRVDGDTRDLELRIDPGSKTTGMAIVRQDADSDEVMHLAEMSHRGAQIRKKMEQRSGHRRRRRSANLRYRKARFNNRTRKEGWLPPSLQSRVDNISSWIARYRKLAPISSIAVERVRFDMQKLENPEISGIEYQQGTLAGYEVREYLLEKWGRHCAYCGQTDAPLQIEHIVPRASNGSDRVSNLTLACQSCNQEKGSQPVEEFLKDRPALLRSIKAQAKKSLRDAAAVNATRNALWRTLNAIGLPVTGATGGLTKFNRSTQGIPKEHCLDAACVGPIQRLSGWDQPVLQISAMGRGSHQRTRLDKYGFPRGYLMSTKSIHGFQTGDIVKAIVPKGKKAGTHTGRVAIRKTGKFNVTTSTGVVQGISHKHCRIIQRNDGYGYHIVNPNRKGGVPSPD

SEQ ID NO: 4106 - protein, 442 aa, unidentified; identical to SEQ ID NO: 3234
  REGION 1..442: note = Human gut metagenome

SEQ ID NO: 4107 - protein, 419 aa, Geobacillus sp.; identical to SEQ ID NO: 2623

SEQ ID NO: 4108 - protein, 477 aa, Blautia sp.; identical to SEQ ID NO: 2707

SEQ ID NO: 4109 - protein, 431 aa, unidentified
  REGION 1..431: note = Human gut metagenome
MPGKVYVISRLGHPLMPCSPAKARHLLDDGKAKVVKRTPFTIKLLYGSTEYTQPVILGVDAGSKTIGLSASTTKEELFAAEVMPRNDVVENLSTRREFRRARRNRTTRYRKSRFNNRVHSKNNGWLAPSVEVKIQEHITSIKRVCAILPISKIVVETAEFDLQLLKAVQDGKPVPEGEDYQKGEMYGSYDVRQYVLWRDNYTCTCCGVKGTDKKPVKLHVHHFESRKHGGNAPDNYGTLCEDCHKKLHLGIITDISLKTRKRPSTRDAAFMGIMRKTLMQRLITGLSIPVAETKGYITKAAREEILKLPKTHTNDALAIAQGRHGFGIREQAYVKPTNRIYTVRPVRHHNRQLHKATILKGGIRKLNQASKYIFGFRLYDKVLYQGGECFVWGRRRSGSFLLRTIDGTKVKDGVGYRNLTLLERSTNYLIA

SEQ ID NO: 4110 - protein, 447 aa, Marinobacter sp.; identical to SEQ ID NO: 2615

SEQ ID NO: 4111 - protein, 430 aa, unidentified
  REGION 1..430: note = Human gut metagenome
MVYVLDISGNPLTPTKRHGKVRHLLETGKAVCVKRCPFTIRLTYQNAEPELEGLSLGVDCGSKHIGLSVSSEEQEYYSSEVELRQDIPANLSTRREFRRARRHRKMRYRKPRFLNRIASKKKGWLAPSVRQKVESHLNRIDKAVKMLPIREIKVEVAAFDLQKLQADLKGLKRPKGEEYQQGPQLDFWNVREYVLFRDHHECQCCHGKSGDKVLNVHHLRSRKVGGDAPDNLITLCEYCHGQYHKGELELPESAKKPKPLRDAVFMGIMRWTLYSRLKEIYEPQGIKVKLTYGYITKHTRIENGLEEKSHRLDALCIAGHPKAKRCREWFLQKKVRCHNRQLHKATIQKGGVRKANQLPAVIKGFRLYDKVLFQNRECFIWGRRKTGYFTLKTLDGIMICDGVSSKKLTLLEKRKSYLTERRKQELCNSF

SEQ ID NO: 4112 - protein, 423 aa, Marinobacter sp.; identical to SEQ ID NO: 4009

SEQ ID NO: 4113 - protein, 442 aa, unidentified
  REGION 1..442: note = Human gut metagenome
MSTSVFVLDKKHRPLMPCRPARARRLLRAGRARVVKRFPFVIRLVDRTVEQSEVQPVLIKLDPGSRETGAAVVRDDEKKRHHALAFFVIKHRGGAIRDALKARSAFRRRRRSQNFRCRSPRFLNRVKPKGWLPPSLRHRVETTLSFVRRMCRYLPVSGIAAELVKFDSQKLQTPEVSGIEYQQGTLFEYEVREYLLEKFGRKCVYCGAEGVPLNIDHVVPRAKGGSNRVSNLVLACVSCNQKKGARSLEDFLKGKPEVLARVRRELKTPLRDAAAVNATRWVLFNELKATGLPVETGSGALTKFNRHAFGVEKEHWLDALCVGRLNGVVTRKGLNVLEIRCMGRGSRQRTRLTKYGFPRGYLMRQKCVHGFATGDMVEANVPKGKKAGLWRGRVAVRVSGSFNIQTPKGVIQGVGWKHCRLISHNDGYGYAWLGHAPHSSPA

SEQ ID NO: 4114 - protein, 435 aa, unidentified
  REGION 1..435: note = Human oral metagenome
MTKTLITCTTQACVLDQQGKPLVPTTRLGKVYRLLKTQKAHIVSYEPFTIQLDYEPDTHVIQPMTLGVDSGAIHSGYSVANEHREYYNAEVIARNDISNRLSDRRMYRQNRRSRKTRYRKPRFNNRKNKKKGWLPPSLEQKVAVQVNEINHIHRYFPIETIIVEIAEFDIQKIKNPDITGIEYQQGTLQGYNIRNYLLEKHGRKCFYCGKTVSGFEVEHMLPKSKGGSNRIDNLTLSCHDCNQKKDTLTVEEFIRQILPAKKAAAKLKQLPNEKRLFKYMAYMNATRWALYDAIKERYPNVNMTYGYITKYNRIQAGLPKSHHVDAKCITGFATVPSMSQTVVKVKMRRHNRQLHRATFSKGHVRKAASLPTTVFGFQRYDLVCFDNHRYYIKGRRSSGAFALVSVEGLKDENRNYKKLTLLAHTNSYLTNHYVN

SEQ ID NO: 4115 - protein, 470 aa, unidentified; identical to SEQ ID NO: 2825
  REGION 1..470: note = Human gut metagenome

SEQ ID NO: 4116 - protein, 553 aa, Streptomyces sp.
MTTFPAGEQTHQAVLPQQPALESVGADNPGSRDETAHGHPAAARGTGREHGRGETGGQGTRARQRHAKSAATVAQAAENGSGDTPPHNSPPYQGGIGASRVFVLSKEGHPLMPCHPARARELLRKSRAVVARHVPFTIRLKDRTLAESEVDGVQLRIDPGSKGTGLVLTDEKKETSDNGAIVTVRRGLVAVELQHRADQIRHCMRQRAGYRHRRRSANCRYRAPRANKRAHPAGWLPPSLCHRVDTTLSLANRLCRYAPVTEIHLEAVAFDTHSLSAGRQLRGAEYAQGALAGTTARAYLQAKWDNACVYCDATGVPLNIDHLHPRSRGGTNRITNLVLACVPCNQAKGNTPVEIFLAHRPDRLARILQQVRKPLHDAAAMNATRWQLIDALDTLGKPVHSWPGGLTKGNRSAMGLAKTHTLDALSVGHLDHQGGDAIVRFPSQVLVAKATGRGSYARTTPDRYGFPRLRRARTKQHFGYVTGDLVQATVPTGRWAGTWTGRISVRARGQHSLSTPVGRFNVSHWNLRLLQRGDGYAYDLRPETGPSSSRKIG

SEQ ID NO: 4117 - protein, 434 aa, Bacillus sp.
MVFVLDTNKCPLAPCHEAVARKLLKQGKAAIYRRFPFTIILKKLVDESEIKATYRLKIDYGSRHTGLAILRGQEVVWLGQLDHRIDIKERIDKRRAFRRARRNRKTRYRKPRFLNHKRKEGWLPPSLESRVQNIQTWVNRLKKLCHIGNISYENAKFDTQLMRNPEISGIEYQQGTLQGYEVREYLLEKFGRKCCYCGKENVPLEVEHIIPKSRGGTDRIDNLCIACRDCNQRKGNQTAEEFGCPHIQKQVKESLKDTSVINATRWKVYEVLKQARLDVECGTGARTKMNRIRLGLPKTHYFDACCVGESTPSHLYFKTKEVLFIKAKGRGSRSRTNLDRYGFPRGYLARQKFFFGFQTGDMVKAIVPRGKYKGVWFGEVACRKTGNFDIKGKDGKRIAQGISYKYIQVIQRFDGYTYRKEEAELAQGAIPPRA

SEQ ID NO: 4118 - protein, 456 aa, Acidithiobacillus sp.
MAVLVLDKRKKPLMPCSEKRARILLERGRARVHRMVPFTIRLVDRRVENSVLQPVRVAAAPGSKTTGLALVRDAETVDAITGEVTLTVVVLMLLELKHRGHAIRDALTQRGGHRRFRRSKLRYRPARFNNRTKPKGWLAPSLQHRVDTTLAWVARLRRWAPVTSLSTMLHRFDTQLLQNPEISGVEYQQGELQGYEVREYLLEKWGRKCAYCDAEHTPLTIDHIHPKSTGGSDRVSNLTLACLPCNQRKSNQDVRAFLAHDTKRLAHIEAVRKAPLKDAAVINSTRWALWQRLVDTGMDVEAASGGRTKWNRTRFSMPKAHCLDAACVGHVDAIDAWRQPVLSVKSTGRGSYQRTRLTKHGFPRGYLTRTKSAFGFQTGDMVRAVVTTGKKKGEYLGRVAIRASGSFNIQTGNGLVQHVHHRFCKLVQRADGYGYAFTTRPQRQGLPHGLIWSKGS

SEQ ID NO: 4119 - protein, 472 aa, unidentified
  REGION 1..472: note = Human gut metagenome
VVDNRLLSIKPLINIGEGVIYSSICTGLSLQTYQKRKEVPCMVYVLDINGQPLMPTTRHGKVRRLLNSHLAKVVKRCPFTIQLLYQSTKEIQPVSLGVDAGSKHIGMAATTEKKVVYQEELSPRNDVVKLLSARRTLCRTRRNRKTRYRKPRFNNRVHSKHKGWLAPSVEVKIQEHITAIKRICQILPISEIHVEISEFDLQRLKAMEEGRTLPVGTDYQLGEQYDFYNTRQYVLHRDGYTFQCCGTHDNNIKLHVHHIESRQTGGDAPSNLITLCEHCHKALHKGKLELPKGKKRGKTYRDATFMGIMRKTLLERLRKEVDVPASGTYGYITKYWRERAGLEKSHINDAICISKYPYAKPLDTYYLTKAVRNHNRQIHKSNFSKGGIRKRNQAPYLVKGFRLFDKVLYQGKEYFIFGRRATGYFDIRTLDGTKVNKGSISYKKLRIQDTAKAYLKEARAIPHMNKFTCVLA

SEQ ID NO: 4120 - protein, 426 aa, Geoalkalibacter sp.
MQRVFVLDNNKQPLSPCSPARARMLLRGGKAAVIRRYPFTIILKDRTGGSTQPVELKLDPGSKTTGVALVQQKDNGAAVIFAAELQHRGASIKKALSTRRALRRSRRSRKTRYRAPRFNNRTRSKGWLPPSLQSRVDNVHSWAKRLQRLCPIANIAVETVRFDTQKVDNPEIRGVEYQQGTLAGYELREYLLEKWQRRCAYCGAENVPLEVEHVVPRSRGGSDRASNLTLSCRPCNEKKGSRAVQEFLADRPEVLRKILVGLKRPLKDAAAVNATRYAIGKALKTLELPISFWSGGRTKFNRTGQRYPKAHWIDAACVGESGASVRLQPGQVALSIKATGRGSRQMCRMDKYGFPRTGAKKVSSESGFCTGDIVAARVPKGKFAGRHTGRIAVRGRPSYRLTTQDQIFDVHPKYLTAIHRADGYAY

SEQ ID NO: 4121 - protein, 443 aa, Anoxybacillus sp.
MVEENMTCFMQRKGENPMVFVLDTNKRPLAPCHEAVARKLLKQGKAAIYRRFPFTIILKKSVDESEIKATYRLKIDYGSRHTGLAILRGQEVVWLGQLDHRTDIKERIDKRRAFRRARRNRKTRYRKPRFLNRRRKDGWLPPSLESRVQNIQTWVNRLKKLCPIGYISYENAKFDTQLMRNPEINGVEYQQGTLQGYEVREYLLEKFGRKCCYCGKENVPLEVEHIIPKSRGGTDRVDNLCLACHDCNQRKGSKTAEEFGYPHIQKQVKESLKDTSAINSTRWKAYEVLKQTGLDVECGTGARTKMNRICLDLPKTHYFDACCVGESTTNHLYFKTKEVLFIKAKGRGSRSRTNLDRYGFPRGYLARQKFFFGFQTGDMVKAVVPRGKYQGVWFGEVACRKTGSFDIKGKDGKRIAQGINYRYVQVIQRFDGYAYGKGVAELA

SEQ ID NO: 4122 - protein, 410 aa, Geobacillus sp.
MTYAFVLDKTGNKLSPTKENKAWYLIRKQRATLVQRFPMVIRLNKTIPKEAIDTTPIRAGIDDGAKYVGIALVQNGKTKNKPILKGFLEHRQDVKDKIDARRAYRRYRRSYKRYRPKRFHHRSSSKRTGRIPPTIRQKKEAVLRVIQQLHKWTRINFIHLEDVQIDIRAIENGYQPYRWEYHQSNRLDENIRKAVILRDQNTCQKCGRTNCRIEVHHIIPRRLGGSNSIYNLICLCSDCHKEVTGNELAYKDEFFQKINGRPVRYWDAMHVMQGKMYLRKELETVAPVILTTGGDTANKRIDWGIEKSHANDAIVITDSFVTNEQCAIKEWHIKPMRRRSNKKTDEVDGFRHRDVVRYTKRNGETYVGYITALYPDKKQCNLTTIDGKVLKRYGLNRLTLIHRFKNLYWF

SEQ ID NO: 4123 - protein, 460 aa, Petrotoga sp.
MWTYRYIADLFPKGDLRMVYVLSKDETPLMPTKRHGKVKHLLREGKAKVVRNKPFTIQLTYDTTHYTQPITLGIDSGHKYIGFSAVTGKEELLSGEVELRDDISELIKEKVMYRRIRRSRLRYREPKFDNRVSSRKETPRKGFKEGWLAPSIKHKLDTHIRFIEFIKKILPITDIIIEVAKFDTQKIKNPEIKGKEYQQGEQRDFYNLREYILYRDNYTCQLCGKSNVPLEVHHIGFWKGDRTNRPSNLITLCTKCHDPKNHLKGGKLYGMEPVQKPLKEATFMTTVRWKLVDMLGCGYTYGYITKVRRIALNLDKTHYNDAFCIAGGTNQRRIEPIYFEQIRRNNRSLEYFYDAKYIDTRDGSTKKGQELFNGRTTRNKNYNTENLKKYRGKKVSKGRRSIRKKRYFYQPKDLVIYEGRKYTVKGVHCRGERIILAELSKSVKIETVEPYMFRKGLCVV

SEQ ID NO: 4124 - protein, 422 aa, unidentified
  REGION 1..422: note = Human gut metagenome
MQYVYVVGSNGKPLMPCSPAKARKLLKSKSAAVLQRTPFTIKLLHHAGGYKQPITLGVDAGSKHVGLSACTDTEELYKEELTPRNDVVKLLSARRECRRGRRHRKTRYRAPRFNNRVHSKHKGWLAPSVEVKIQEHITAIHRICRRLPITKIVVETAEFDTQHLKAMLEGKPLPVGIDYKRGEMYDEYNVRQYVLKRDNYTCQHCGARGSAEKGIKLHVHHLETRQTGGNAPNNLITLCKDCHTALHDGKITLKLDKKKRGKPLRDSAFMGIMRKTLLSRIRKEVAIPVVETQGYITKLLREENHIQKSHTNDARCIAGCPKALPCDTTYHTKAIRHHNRKIHKTNILKGGVRKLNQAPYKVFGFRIWDKVKYKGQECFITGRRSSGYFALKKLGGTTISNSANYKKIHFLEPANHYIIERS

SEQ ID NO: 4125 - protein, 544 aa, Ruminococcus sp.; identical to SEQ ID NO: 2457

SEQ ID NO: 4126 - protein, 424 aa, Eubacterium sp.
MRVFVLNMRGEPLMPCSQRKARLLLKSNKAIIYKYNPFTIQLAYATGEAKQGCRIGVDTGSKHIGLAVTSEDKVMWKAEVELRQDVKSKIDKRRMYRGNRRYRKTRYRKPRFLNRKREPKWLPPSLQNRVNHTFHWIDVLSSLVPNPNLHIEVGKFDTAKMINPEINGVDYQHGQTYGFYDERYFVFARDNYTCQCCGKSKDKILNTHHIIYRSNGGTNRVDNLITICTDCHTSQNHKKGGILYKWQEQHKKVTQYKESPFMNTLRRRIFTAYPDAKITYGSETTPKRKDMGLNKTHYNDAIIISGINDINENDEEWLLIKQFRKKKRSLHEATARKGRKKPNSSQVRNSKNTPYYKGFYLNDKVVVFGKSGYITGFTSDGAYIKDGDDNYITLPNKNYKQVGISKMKFECHNNNWQYIVKTTV

SEQ ID NO: 4127 - protein, 427 aa, Nitrosococcus sp.
MNRVFVLDTDKTALMPCRPSRARRLLRDGKAGVYRMQPFTIILKYRVDSNPQPVEFRVDPGSKTTGLALVGNFPQQGRVVLWAANLEHRGQSVRDRLEKRRSLRRGRRGRKTRYRAPRFLNRTRPAGWLPPSLRSRVENVSTWFNRLLDRAPLSECHIETVRFDMQKIQNPEISGVEYQQGELMGYEVREYLLEKWGRKCAYCSNKDVPLEVEHIVPRSRGGSHRVSNLTLACTPCNQKKNSKTATEFGYSQIQSKANQPLKDAAAVNATRYAVGRAIQSVGLPTSFWSGGRTKKNRISQSYGKDHWIDAACVGEIGEQVTLTEGYRALQIKATGRGTRQVARTDKYGFPRGKAGRCKRVRGFQTGDLVRLIQPKGKYGGTHTGILAGIRANGAFDIKAKARKISANWKHFKLIQRGDGYDYGLSAV

SEQ ID NO: 4128 - protein, 475 aa, Blautia sp.
MVAVVTSTGKPLMPTSAYRARKLLKKGRAVIFKYRPYFTIQLVDRADGEVQEVEYKSDTGSVHVGISVCTEKKELLSEQRDLLENEPEDHNDRKKNRRTRRNRKRYRKPRFDNRKKKPQEGHEKWLPPTLLHKMEVQVRLFREFCRVVPVTSACFEMGKFDTQALKAVSKGEPVPEGEGYQKGERYGTDTLRAAVFLRDGHTCRFCGRSVKDGAILHVHHVGYWKGDRTNRPANLASACEQCHTPANHGKNGILYGKEPEFKTLKDASYMTSVRWIMLDEIKKAAPGVQVSVTYGVTTKRKRQELHLPKSHVNDAFSMASFHPKKRSDTEYWKKIPRHDRVLQKFYDAVYLDTRDGSEKKGSELSNGRISRNHKKDSENLHQYRGHKVSKGHNSIRRGASSLKPGSIVMYKGEKMTVHGTHTRYVKGKDGKTAKKVNVQFTCPASDGKKSASLEKCTPVSRVYNTGWKRYWPDKK

SEQ ID NO: 4129 - protein, 383 aa, Moorena sp.
MVYVLDQSGQPLMPTERHGKVRHLLKSGKAKVIKRCPFTIQLLYNSTHYTQDITLGVDAGSKQIGLSATTKQKELYAAEIELRNDIVKLLAARRELRRSRRSRKTRYRKPRFQNRTHSRKPGWLAPSIRQRIQCHLTVIANVHKLLPTKTILIETASFDIQKIKHPDIHGVQYQKGEQLDFWNVREYVLFRDNHTCQCCKGRSKDNILNVHHIESRQTGGNAPNNLITLCETCHTGYHNGKVILPKTIKRGMSFKDAAFMGIMRWSCYDMLKNIYPDVHMTYGYITKNTRIGNNLAKEHYVDARCISKNPKAKPLPYYYYQKKVRCHNRQIHKTKPTKHGIRKRNQAEYVVHRYRLFDKVQYQNNEYFIFGRRKTGYFDIRTL

SEQ ID NO: 4130 - protein, 431 aa, unidentified
  REGION 1..431: note = Human gut metagenome
MPNKVYVINKHGRPLMPCSPAKARHLLDAGKAKVKKRTPFTIQLVYGSSGYTQEVILGVDAGSKTIGVSALTKKEELFAANVIPRNDVVDLLSTRREFRRARRNCKTRYRKPRFDNRVRSKHKGWLAPSVEVKIQGHITAIRRVCGILPVSKVVVETAEFDLQLLKAIEKGKPVPQGEDYQQGEMYGHYNVRQYVLWRDDYTCQCCGAHTTKKKEVRLHVHHLESRKTGGDAPSNLITLCDSCHEKLHKGLIAEKDFKKRKRRSTWDATFMGIMRKTLMQRLCSELPIHVVETRGYITKATREKLLVLPKSHINDALAIAQGKHGFNVGYLPGILQIDMIYTIRPVRHHNRQLHKATILKGGIRKSNQAEKYVFGYRLFDKVQFNGQDCFIWGRRTTGIFTIKTINGKMIKDGISFKKLKPVEKSTSYLIA

SEQ ID NO: 4131 - protein, 419 aa, unidentified
  REGION 1..419: note = Human gut metagenome
MVYVISQDSKPLMPCSNVIARLLLKQGKAKVKRREPFTIKLTCETTNYTQDLTLGVDTGSGTIGTAVSKNNGDIVYMAEVVVRNDITDKMTQRAKYRRNRRNRKTRYRKARWLNRANSIRNDRFSPTMQSKLHSHIKEIEYIKSILPVTEMVFETGQFDTHLMKNPSLINPKVKHWGYQKGTNYGFENTKAFVLNRDNYTCQYCKGKHKDSKLEVHHIVFRSQGGSDEESNLITLCHTCHKDLHSGKINTKLSGKIKGNLKYATQMNSIRKQLFRLYPNAIETFGYVTKANRLHLGVDKEHYYDACTIATQGNAFNVKSNLYKKKCVSDGDFQQTKGIRSEQPIVTDKICGFRKYDKVKYFGREYFIKGRMSTGYAILMNINGEKADFSYLPRGFKTPKLSNCKRITARTSQMVQAVAI

SEQ ID NO: 4132 - protein, 529 aa, Moorena sp.; identical to SEQ ID NO: 3816

SEQ ID NO: 4133 - protein, 431 aa, unidentified
  REGION 1..431: note = Human gut metagenome
MPDKVYVISRLGHPLMPCSPANARHLLDDKKAKVVKRIPFTIRLLYGSTKYIQPIILGVDAGSKTIGLSASTAKEEVFAAEVMPRNDVVENLSTRREFRRARRNRTTRYRKPRSDNRVRSNHERWLAPSVKVKIQEHITSIKRVCTILPISKVVIETAEFDLQLLKAIQEGKPIPEGEDYQKGEMYGSYNVCQYVLWRDNYTCICCGVRGTPKNPVRLHVHHFESRKYGGNAPDNHGTLCDDCHKKFHLGIITDVKLKTRRRQSTRDAAFMGIMRKTLMWRLRTELFIPVAETKGYITKATREKLLVLPKSHTRDALAIAQGRHGFGIKEYAYVEPANHIYTVRPVRHHNRQLHKASILKGGIRKRNQASKYVFGFRLYDKVLYQGKACFVWGRRTSGTFLLRTIDGIKVKDGVSYRNLTLLERSSNYLIA

SEQ ID NO: 4134 - protein, 413 aa, Clostridium sp.
MTKNQKEYSFVKDQKGRKLASCLCNKAWVLIRKKKARLLQKYPMAIQLNYEVCPDEETEIICGIDDGSKHVGIALVQKCKTYNKPIFKGTIELRQNVKSLMETRKSYRRYHRTYKRYRKVRFDNRSASKRKGRVAPSILQKKQSTIRIINQLLKFVNIKEFHLEDVVVDIRALSEGKKLYGWQYQKSNRLDENIRKAVILRDNCECMECGKSNCMLEVHHIVPRRLKGSNAISNLITLCSGCHQKTEGKEELFIDKYYKTIDGKNIRFDYAQHVMQGKTYLRQELSKLGKLMLTTGGDTANKRIDWNIYKTHSNDAICITDLEVNMNECNIKDWIIKPMRRKSKANIAELNGFKHRDLIKYTKKNGEYYIGYITALYSNKNQCNITTMENKILKRYGIKSCKLLWRFNIIYWF

SEQ ID NO: 4135 - protein, 531 aa, unidentified
  REGION 1..531: note = Human gut metagenome
MPMLWKLNRSRQDRISTGPELAVPGLQQKRRTMRYVYVLDMNGKPLMPTCRHGKVRRMLKSGQAKAVDTLPFTIQLLKPTKTRILQPVIAGQDPGRTNIGMAAVRSDGTELYRAHIETRNKEIVSLMNDRRSFRQASRRGERLARKRLAKKLHTTAKHLNGRILPGCKEPLAVKDIINTEARFNNRLRPEGWLTPTATQLLRTHLEAFRKLSGILPVTEVVLEVNRFAFMQLDDPDMKKRDIDFCRGPLYGTGGVKAAVSLQQDGLCLLCWEREIEHYHHIVPRSRRGSNTISNIAGLCGKCHERIHKDQAAAEKLQSKKDGLSKKYGGTSVLNQIIPSLTEALGIRYPGHAHVTNGWSTKEFREKHELEKDHDVDAYCIAASILEDAQPVMQTEPYEIKQFRRHSRALINHQTERTYRYDGKIIAKNRKKRMDQKTDSLEDWVADMTKQYGQGTASRMLSKVTVQKSTRHYNTKGRMMPGAVFIYRGKRFVMTGQLTGGAYYRAYRQDKKNFPAKAVQVVQKNKGLVYVA

SEQ ID NO: 4136 - protein, 447 aa, Marinobacter sp.; identical to SEQ ID NO: 3683

SEQ ID NO: 4137 - protein, 416 aa, unidentified
  REGION 1..416: note = Human gut metagenome
MVYVLDIDGQPLMPTNRHGKVRHLLKDGMAKVVQRCPFTIQLLYNNTNYTQEITLGVDAGSKHIGLSATTERIVLYEAEVELRNDISKLLATRKQNRRSRRNRKTRYRKSRFDNRRRKEGWLAPSVQQKVDCHLKVVENVCKLLPVTKIIAEVASFDIQKIKNPKIEGTDYQKGDQLGFWNVREYVLFRDGHTCQCCKGKSKDKILNVHHIESRQTGGNAPDNLITLCETCHKRYHKGLIKLPEKIKRGMAFKDAAFMGIMRWAFYGRLKETYLPLGIDVSLTYGYLTKNTRISHQLPKKHHIDARCISGHPDAVSDGIYYHQKKMRCHNRQIYKAKTLKRGIRKRNQAEYLVIGFRLFDKVRYQGKDYFIFGRRKSGYFDIRDLNGEKVNKGSINYKKLRLVETRRSYLTERRLA

SEQ ID NO: 4138 - protein, 458 aa, Bacillus sp.
MVEENMTCFMQRKGENPMVFVLDTNKRPLAPCHEAVARKLLKQGKAAIYKRFPFTIILKKSVDESEIKATYRLKIDYGSRHTGLAILRGQEVVWLGQLDHRTDIKERIDKRRAFRRARRNRKTRYRKPRFLNRKRKEGWLPPSLESRVQNIQTWVNRLKKLCHIGNISYENAKFDTQLMRNPEISGIEYQQGTLQGYEVREYLLEKFGRKCCYCGKENVPLEVEHIIPKSRGGTDRVDNLCLACHDCNQRKGSKTAEEFGYPHIQKQVKETLKDTSAINSTRWKVYEVLKQARLDVECGTGARTKMNRIRLGLPKTHYFDACCVGESTTNHLYFKTKEVLFIKAKGRGSRSRTNLDRYGFPRGYLARQKFFFGFQTGDMVKAIVPRGKYKGVWFGEVACRKTGNFDIKGKDGKRIAQGISYKYIQVIQRFDGYTYRKEEAELAQGAIPPVPKGRGFLA

SEQ ID NO: 4139 - protein, 443 aa, Anoxybacillus sp.; identical to SEQ ID NO: 3426

SEQ ID NO: 4140 - protein, 428 aa, unidentified
  REGION 1..428: note = Human gut metagenome
LKVFVLNMRGRPLMPCSPAKARHLLKAGKAVVRRRTPFTIQLRIATGETKQSVTLGVDAGAKHVGLSAATEKEEVFAPEVELRQDITGLLAARLSLRRERRQRKTRYRAPRFLNRVRSKHNGWLPPSVENRIQAHLSRIDAICGLLPVTKIVIETASFDIQKIKHPDVEGTDYQQGDQLGFWNVREYVLFRDGHVCQHCHGHAKDKILNVHHLESRQTGGDAPNNLITLCERCHKACHAGKIKLKVKRGQSFREEAFIGIMRWTLLDRVRKAHPGLPVENTYGYLTKNTRITLGLPKAHCVDAYCIAGNLKAVRRGVYLHQRQVRKHNRQIHKCTVLSKTLKDGTKIGYRKLNQTPHLVKNFRLFDKVRCLGQTGFIFGRRSSGYFDVRRLDGVKISSCINYRKLTLLEKRGTCLTELRKEDGASSPV

SEQ ID NO: 4141 - protein, 427 aa, Nitrosococcus sp.
MNRVFVLDTDKTALMPCRPSRARRLLRDGKAGVYRMQPFTIILKYRVDSNPQPVEFRVDPGSKTTGLALVGNFPQQGRVVLWAANLEHRGQSVRDRLEKRRSLRRGRRGRKTRYRAPRFLNRTRPAGWLPPSLRSRVENVSTWFNRLLDRAPLSECHIETVRFDMQKIQNPEISGVEYQQGELMGYEVREYLLEKWGRKCAYCSNKDVPLEVEHIVPRSRGGSHRVSNLTLVCTPCNQKKNSKTATEFGYSQIQSKANQPLKDAAAVNATRYAVGRAIQSVGLPTSFWSGGRTKKNRISQSYGKDHWIDAACVGEIGEQVTLTEGYRALQIKATGRGTRQVARTDKYGFPRGKAGRCKRVRGFQTGDLVRLIQPKGKYGGTHTGILAGIRANGAFDIKAKARKISANWKHFKLIQRGDGYDYGLSAV

SEQ ID NO: 4142 - protein, 408 aa, unidentified
  REGION 1..408: note = Human gut metagenome
MVYVQDINGKPLMPTTRHGKVRRLLKDKKAVVVNLCPFTIKLTYVTSDYKQEIVLGVDAGTKHVGLSATTKSKELYSSEVILRNDIVDLLSTRRELRRARRDRMRYRKPRFNNRIKSKRPEWVAPSVRYKVDAHICVINNVCSILPISRIVIEVAQFDTQKIKNPNISGKEYQEGDQLGFWNVREYVLCRDGHKCQHCKGKSKDEILNVHHIESRKTGGNSPSNLITLCETCHKEYHKGNIDLKIRRGKSLRDAAVMGIMKWRLYEELKSKYSNVSMTFGYVTKYNRINHGIEKSHVSDSFTISKNFDAIRLGYYYKVRLVRRHNRQIHKQKIQKGGIKRLNQSPFEIFGFRLFDRIMFENSYYFIFGRRKTGYFNIRDIDGKNQRDITYKKLKLSRCKRFMIQNEMN

SEQ ID NO: 4143 - protein, 431 aa, unidentified
  REGION 1..431: note = metagenome
MPDKVYVISRLGHPLMPCSPAKARHLLDDGKAKVVKRTPFTIKLLYGSTEYTQPVILGVDAGNKTIGLSASTTKEELFAAEVMPRNDVVENLSTRREFRRARRNRTTRYRKPRFNNRVHSKNNGWLAPSVEVKIQEHITSIKRLCAILPISKIVVETAEFDLQLLKAVQDGKPVPEGEDYQKGEMYGSYDVRQYVLWRDNYTCTCCGVKGTDKKPVKLHVHHFESRKHGGNAPDNYGTLCEDCHKKLHLGIITDISLKTRKRPSTRDAAFMGIMRKTLMQRLITGLSIPVAETKGYITKAAREEILKLPKTHTNDALAIAQGRHGFGIREQAYVKPTNRIYTVRPVRHHNRQLHKATMLKGGIRKLNQASKYIFGFRLYDKVLYQGGECFVWGRRRSGSFLLRTIDGTKVKDGVGYRNLTLLERSTNYLIA

SEQ ID NO: 4144 - protein, 453 aa, unidentified
  REGION 1..453: note = Candidatus Dependentiae bacterium
MVHVLDTLKKPVNPCHPSKARLLLTRGKASVFRLYPFTIILKEVSKEEIKPQRLKIDPGSKTTGMAIVDDATGKVVHALEIQHRSDTISQALTSRRSSRCSRRARKTRYRPARFANRMRESGFLPPSLGGRIAQIKTWINKLIRSSPITAISIEDSKFDTQLMQNAEISHIEYQQGELYGYETKEYVLEKCKYMCSYCKQKEVPLEIDHIVPKSRGGSNRVSNLTLACRPCNQSKGNLTAAEFGYHEVQELAKAPLKNAAAMNVMRAALVKLLSTYGLPLETGTGALTKCNRTQQHFEKAHWIDAACVGASTPKELLLKDAMPLYVKATGHGSRQMCAVDRYGFPRSSSKGAKKQYGFQTGDIVRAIVPEGKKKGTYWGKVAVRARGYFNITTQDGEVVQGIKHSYCKLIHRSDGYRYSFIPLVKKNSLTTQRAKDTLSFPVLVSHGVSRVCQ

SEQ ID NO: 4145 - protein, 406 aa, unidentified
  REGION 1..406: note = Human gut metagenome
MVYVQDIDGRPLMPTTRHGKVRRLLKSKKATVVNLCPFTIRLLYDTTGYKQEITLGVDTGTKHVGLSATTKSKELYASEVILRSDVVDLLSTRRELRKIRRYRLRYRKPRFMNRIKSKKRGWIAPSIRQKIDSHIRIIGFVYSILPVSKLIIEVAQFDTQKIKNPEISGKEYQEGEQLGFWNVREYVLARDGHKCQYCKGKSKDPVLNVHHIESRKTGGDSPSNLITLCKTCHKEFHKGNIKLKVNRGESLRDAAVMSIMKWELYDELKSLYPNVKMTFGYITKYNRINHGIEKSHVSDAFVISRNFDSERLGYYYKRKLVRRHNRQIHKMKAPKGGNKRMNQFPFKVFGFRLFDKVMFQGKERFIYARRLRGIFNIRDINGENKKDISYKKLEYVSHGLISIVAG

SEQ ID NO: 4146 - protein, 443 aa, Bacillus sp.
MVEENMTCFMQRKGENPMVFVLDTNKRPLAPCHEAVARKLLKQGKAAIYRRFPFTIILKKSVDESEIKATYRLKIDYGSRHTGLAILRGQEVVWLGQLDHRTDVKERIDKRRAFRRARRNRKTRYRKPRFLNRKRKEGWLPSSLESRVQNIQTWVNRLKKLCPIGYISYENAKFDTQLMRNPEINGVEYQQGTLQGYEVREYLLEKFGRKCCYCGKENVPLEVEHIIPKSRGGTDRVDNLCLACHDCNQRKGSKTAEEFGYPHIQKQVKESLKDTSAINSTRWKAYEVLKQTGLDVECGTGARTKMNRIRLDLPKTHYFDACCVGESTTNHLYFKTKEVLFIKAKGRGSRSRTNLDRYGFPRGYLARQKFFFGFQTGDMVKAVVPRGKYQGVWFGEVACRKTGSFDIKGKDGKRIAQGINYRYVQVIQRFDGYAYGKGVAELA

SEQ ID NO: 4147 - protein, 424 aa, unidentified; identical to SEQ ID NO: 3434
  REGION 1..424: note = Human gut metagenome

SEQ ID NO: 4148 - protein, 431 aa, unidentified
  REGION 1..431: note = Human gut metagenome
MPNKVYVINKHGRPLMPCSPAKARHLLDAGKAKVKKRTPFTIQLVYGSSGYTQEVILGVDAGSKTIGMSASTTKEELLSAEVKPRNDVVDLLSTRREFRRVRRNRKTRYRKPRFDNRVRSKHKEWLAPSVEVKIQEHITSIKRVCRILPVSKVVIETAEFDLQLLKAIADGKSVPQGEDYQKGEMYGHYNVRQYVLWRDNYTCQCCGAHATKKKEVRLHVHHLESRKVGGDAPSNLITLCDSCHEKFHKGIITAANLKKRKRRSMRDATFMGIMRKTLIQRLRAELTIPVAETRGYITKTTREKLLVLPKSHTNDALAIALGKHGFNVGYLPGILQIDMIYTIRPVRHHNRQLHKVTILKGGIRKSNQAEKYVFGYRLFDKVQFNGQDCFIWGRRTTGIFTIKTINGKMIKDGISFKKLKPVEKSTSYLIA

SEQ ID NO: 4149 - protein, 458 aa, Lactobacillus sp.
LKGVGMMSEIKKVDYIYVVDSNGTPLMPTSRLGMVRRWLKTGQAKWFGNSRNTIQFVRLVTTNTQELTLGVDAGFHLSLSVVGNNREYYVSESLRKSEKDRITSRRELRRTRRNRLRYRKARFNNRRRKDGWLAPSIQHRLDFTIKEIKRLYKFLPITNLVVEVTPFDNQKLLNPDIQGWQYQEGKMYGFKTIKDYLLARDNYRDALDGKQYPTSQLKVHHLVQRKDGGSNQPDNLVLLSDINHNQANHNNGILAKLKENRQKTLDYRGAYFMSILATRLSNYFDNYTITQGYLTANLRQKYEIKKSHLNDAFIIAGGTDTTLRTNNVYSRQKLRNNNRVLQKFYDAKYIDSRDGKKKTGKELSSGRTRRSQELNYDNLRQFRKEKVKKGRVSIRRGHYQLRPHDVVLNTRTNRIETVKGVQNSGTVIKFQTGKTCSIKSVVSLYHVNGILEKKMKNI

SEQ ID NO: 4150 - protein, 426 aa, Sutterella sp.
MSVSVFVQDRKHRPLMPCRPARARRLLKSGRARVVRLFPFTIRLTDRLIEDSKLQPVLVKIDPGSRQTGVALVRADEKAHHHALFFINLVHRGESIRDALWARRNCRHRRRGNLRHRAPRFLNRTKPKGWLPPSLRHRVDTTTAWVAKLMKLAPVTEIVEELVKFDTQKLQNPEISGIEYQQGTLFEYEVREYLLEKFGRKCVYCGAENVPLNIEHVVPKARGGSNRISNLVLSCENCNKKKDAQPVEVFLKNRPEVLDRIKRGLKTPLRDAAAVNATRWSLFNALQAFGLPVETGSGALTKFNRHTFDVPKEHWLDALCAGRVNGVHYPEGMGILQVRCTGRGSYQRTRVDKYGFPRGYLTCQKRVHGFATGDMVKAVIPSGKKAGTYRGRVAVRARGCFVIQTPEGKVDGIGWRHCRLLSFNDG

SEQ ID NO: 4151 - protein, 419 aa, Bacillus sp.
LFVYMINKHGKPLMPCSPRKARLLLKQKKAKVVRRTPFTIQLLYGSSGYKQPVSLGVDMGTRHVGISATTEKDVLFEAEVQLRTDIVDLLAIRRQFRRSRRNRKTRYREARFLNRRKPEGWLPPSIQHKINSHIKLIDLVHNILPVTSVTIEVATFDTQKLKNPNIQGVEYQQGEQMGFWNVREYVLYRDNHTCQYCKGKKKDPVLQVHHIESRKTGGDSPDNLITLCKTCHHEIHEKGLEHILQRKRPPMRDASQMTAMRWAMFSRIREKYSHANITYGYITKCIRIANGLPKSHMVDARCISGNPLAKPSGTVYLLKFVRKNNRQLHKATILKGGKRKSNKAPRFVKGFQLFDKVVYEGKECFIFGRRSSGYFDLRLLDGTKVHASASWKKLKRVEYASTLLIERRKGDSSPTFANA

SEQ ID NO: 4152 - protein, 431 aa, Klebsiella sp.
MNRVFVLSKTGKTLMPCHPARARQLLHDKKAVIKRLYPFTIQLTHRSEEYIQPVELKFDPGSKQTGIGIVLHGKNRLSAIYGAVLTHRGNEIKNNLDSRRMIRRSRRNRKTRYRQVRFLNRVRSKHKGWLAPSVQSRVDNIVEWSKRFIRYVTVGFITVESVKFDMQKMENADVDGIEYQRGTLFDYEVKEYLLEKYNYSCVYCGAKNVPFEKEHVIPRSRGGSNRISNLVLSCRSCNEKKDNLPIEEYLKDNPALLKKIKAQLKSSLKDAAAVNITRKQIVKELENLNVPVLTGTGAETKYNRVSQGYKKEHYIDALCAGTTGTKVYIPSTLKPLLIKKERRNNRQMCLVDKYGFPRGKAKGSKIVHGFKTGDIVKAVVLKGKKKGTYKGKVAVRSSRSFNIKVKQGVVEGIGWKNCVMLYRFDGYSYAY

SEQ ID NO: 4153 - protein, 418 aa, Exiguobacterium sp.
MFVFVLNQHGKPLMPCKPQKARCLLTDKKAKVIKRTPFTIQLLYGSSGYKQPISLGVDTGTKRIGFSATTSTTVLVEGEVQLRTDIQKLLATRRAMRNSRRSRKTRYRQARFLNRKKPKGWLAPSIQHKVDAHLKLIQMLYRLLPICNLTLEIAQFDIQKIKNPDISGDLYQKGDQLGFWNVREYVFFRDKHTCQHCKGKTKDKILNVHHIESRRTGGNAPDNLVTLCETCHHKIHQQKLEHLFQRKSRSLRDASQMTVMRWFIYNATKETYPSVRLTYGFITKNTRIGNGLDKRHAIDARCISGNPLAEPPKVSYFFRQVRANNRQLHKMTIGKKGKRKANKAERLVHGYQLFDKVQYEGQTCFVFARRKTGYFDLRTIQGFSIHKSASYKKLTLLERATIWLVDIQPERGEGRILP

SEQ ID NO: 4154 - protein, 447 aa, Marinobacter sp.; identical to SEQ ID NO: 4025

SEQ ID NO: 4155 - protein, 431 aa, unidentified
  REGION 1..431: note = Human gut metagenome
MDAWDIIVVLNKRGKPLMPCSPAKARLLLKEKKAIVKRRTPFTIQLTIATGETKQPVSLGVDAGYKHVGLSASTDKAELYASQVELRQDITDLLSARRALRRARRNRKTRYRAPRFNNRLRTKRKGWLAPSVENRINAHLSRIEAVLRLLPVTKITVETASFDMLLLKNPDIAGKEYQEGEQLGFWNVREYVLFRDGHVCQHCYGRSKDPVLNVHHLESRRTGGDSPGNLITLCETCHEALHRGEIALKTKRGHSFRAEAFMGMMRWEVLNRLKASHSELEVNNTYGYRTKHARIVNGIDKSHCADAFCIAGNLGAERLCEFFFQKQTRRNNRQIHKLSILKGGIRKRNQAPFEAKGFRLFDKVACKGEESFIFGRRSSGSFDVRKLDGTRISAGISCKKLRLLEKRRTYLTEIRKEEALPPLPEGRGLRA

SEQ ID NO: 4156 - protein, 453 aa, Moorena sp.
MSVAVLSSTGRKLMPTSNYRARKLLKSKRAVIECYRPIFTIRLTDREEGNTQPIEYACDTGYQHVGVSIKSEKHEFVHAQYDMLSDETERHNDCRKCRRTRRNRLRYRKPRFDNRSKKNKEMAPSLRHRKENQIRLFESFCKVMPITSAAFEMGKFDTQLLQAIADKKPLPKGKDYQRGSKYLYQTEREAVFGRDHYTCQVCGKSVKDGVILHTHHIGFWKGYRSNRISNLLTVCEHCHTAKNHQPGGKLWGLEPKSTNLAPATYMSTVRWAMYRDLVLTHPELDIYFQYGAKTAVTRKSLHLEKTHANDAYCIGSLHPKHRTAELVYQKKRRNNRILAKFYDAKYIDIRDGEKKSGSALSCGRTNRRESRRSDKNQRIYRGKKCSSGRTSVRKKRYSYQPGDAILFRSQRFTVNGAHCNGTRVILNTGKSVKMADLTCIKMEGGWCFLPAQA

SEQ ID NO: 4157 - protein, 470 aa, unidentified
  REGION 1..470: note = Human gut metagenome
MSVFVVGLNGCRLMPTSERKARLLLKQGKAFVEQKVPFTIRLNYKTGSTTQPSYLGIDTGSQHIGVSVVREDGTVLHKEEIGLRDSMSKRKLLEAKASLRRGRRYRKTRYRHPKWRPKTKRVYCEVPDRKGRHWQKKKITFTSKRPKGWLPPSLQSKTDHHIRWIKKLQDLLPEGYRLSIELGRFDPARMKNPEIHGDLYQKGPQYDYENVRAYVLDRDRYTCQICKKKGGKLHVHHILYRSHGATDDPQYMVTVCSDCHSAQNHLPGGILYQWMQEQKRFSRGLRDATFMNILRKRLIRAFPEAVFTYGNVTKVDREKLKLPKSHGNDATAIALVKTGITAVKDKESVICIQQVRRKKRSLHEETPRKGRKEPNRTAARNNKNTKAVTVTKRQNKKKVSMTGCLFDRVELNGKKGWISGFTGKSCYVKDADDQYLSTSPKYKQVSLSKLRILHHCGNWIIGAKKTLGKG

SEQ ID NO: 4158 - protein, 437 aa, Haloactinospora sp.
VHPYVFVLDAHHRPLQPCPPARARKLLAKGRAVVHRRVPFTIRLKDRTAEASEMEGVEVGIDPGSKHTGIAVFTAQEGQRRNRYSIQLDHRGAAIRKKLDQRCAYRRRRRTANVRYRAPRFNNRARPQGWLPPSLRHRVDTTVSWVERLARWTPVRHVHVERVAFDTHALSAGSPLEGREYQHGTLHGYEVREYLLAKFDRACVYCGAMNTPLNVDHVHPKSRGGSDRVSNLVLACIRCNQTKGEKPVKEFAPKAAARILAQAKAPLRDAAAAQSTRWALWRVLESRLPTRVGSGGRTKYNRTRNHLPKTHTLDALCVGETGAVAEVVNRVVVAACTGRGTHARTRPDKHGFPRLRLPRQKTFFGYQTGDLVQAVVPAGKKAGTYTGRVAVRARGSFNITTAHGTAKDIHYRHVRLLQRADGYGYTMRKEEAASSPA

SEQ ID NO: 4159 - protein, 463 aa, Cupriavidus sp.
MAVFVLDKHGKPLMPCSEKRARLLLERGRARVHRLMPFAIRLIDRWLNDSEVQPLRLKLDPGSKETGVAIVREATFGADGARRAYVLSLAEIIHRGRQISEALTARRSMRRARRGRKTRYRAARFDNRRRPEGWLAPSLRHRVVTTEAWVRRFIKLAPITALSLELVRFDMQAMENPEISGVEYQQGTLLGYEVKEYLLAKFGRTCSYCDAADRPLETEHIVAKACGGSNRVSNLTLACRPCNEKKGKLPLEVFLRKDPARAKRILARAKAPLRDAAAVNATRLALLDALKSFGLPVETGSGGQTKYNHRRLEIPKSHALDAACVGQVHSVLDWQRPVLRIQCTGRGSYQRTRLSANGFPRGYLMRSKRAFGFQTGDMVKAIVPTGKKAGTYVGRVAIRATGFFNIQTAAGAVQGMHCKVFQRGDGYGYQLVVQTAKESENRGDASRRALSLPGLKAEVSRAN

SEQ ID NO: 4160 - protein, 425 aa, unidentified
  REGION 1..425: note = Human gut metagenome
MKAYVISNDGYPLMPCKPVIARLLLKSKRAKVIRREPFTIKLLYETTSYVQKLTLGVDTGSGTIGTAVADEDGNILYMSEVQVRNDISRKMTQRAKYRRSRRNRKTRYRKSRFMNRKNSIRKERFSPTMVSKIQSHVKEIEFIKSVLPVHTIVLETGQFDTHLMKNPSLTNPKVKHWGYQKGPNYGFENTKAMVLNRDDYTCQCCHGKHKDSHLEVHHIVFRSQGGSDESENLITLCHTCHKALHDGKIHPSLKGKVKGTLKYATQMNSIRKQLLEIYPEAIETFGYVTKANRLNLGVDKEHYYDACVIATQGKAFKVKTVLFQKKCVPDGDFQKTKGVRSEQGICTDKILGFRKFDKVKYLGKEYFIKGRMSSGYAFLMDIFGNKIDFSDMPKGFKTPKMKNMTRVQARSSWMTTSIQVLGGMQ

SEQ ID NO: 4161 - protein, 431 aa, Moorena sp.; identical to SEQ ID NO: 3507

SEQ ID NO: 4162 - protein, 412 aa, Fervidobacterium sp.
MVFVISKNGTPLMPTKRHGKVRRLLKQGLAKVVNREPFTIQLLYETTSYTQPVTVGIDIGSKTVGVSAVTDKEEIFSAEVQLRQDIKKLLLERRQHRRFRRYRKTRYRKPRFLNRRKKDGWLPPSLQWKVDAHVRIINKLGKIIPITKVVVEVAPFDIQKVQNPDIEGKNYQNDPQKGFADVREYCLWRAGYKSELSGKTGILEVHHIIPRSKGGTDAPSNLIVLTAEEHKMLHEGKIKIPKSRLEQIKVFKDAAHVSTIGWHIVNKLRQNYHVEITYGSITKERRDMYGLEKSHRDDAFVIAGGNIQERASEWYFGKFFRRQNRSLHKANPIKGGKRPINTVKQVRGFRRFDKVECEGKIGIVTGLRSSGYFSISELSGEKISDTVKYTKLRVIERSKTLMFERMVEAAWS

SEQ ID NO: 4163 - protein, 448 aa, unidentified
  REGION 1..448: note = Fermentation metagenome
MSVYVINQRKQPLMPTTERKARLLIKQGKAKVIEIKPFTIQLLCATGETKQPITLGIDSGYNNIGFSAITDKKELITGELKLLQGMKERLQERLQYRRIRRQRLRYRKPRWNNRIKSKQKGWLAPSLQHKLNSHIKFIDYLYSILPITKCIVEIANFDIQKIKNPNIKGIEYQQGDMMGFWNLREYVLYRDGHKCQNLNCKNKDKNPILEVHHIKYKSLGGTNNPNNLITLCTKCHTSDNHKKGKFLYKWCQEGKKVRGFKDATFMSMIRWRLVNQLNEKYNNVSFTYGYITKSHRIEYKIEKSHYNDAFCIAKGINQIRCDKIWQLQQCRRNNRSLENFYDAKYIDTRTGHKVSGSELNCGRRTRNKNKNSENLHQYRGQKLSKGQRRIRKQKYFYQPNDLIKYEGKIYTVKGTQNGGKYVALKEIKKVPRIELIKPYKFQKGIVWN

SEQ ID NO: 4164 - protein, 378 aa, Moorena sp.; identical to SEQ ID NO: 2642

SEQ ID NO: 4165 - protein, 465 aa, unidentified
  REGION 1..465: note = Human gut metagenome
MSTCVCVLSNSGERLMPTFRLGKVRHLLKDGKAKIIKHHPFTIQLLYDSKMNTQPIEICEDVGYNYIGISVKSQSHEYVSAQYDTLQDEKEHHDDCRKMRRARRNRLRYRKPRFDNRKRSEGWLAPSLEHKKQLNIRLVEQYVSVIPITHATVEVGSFDTMLVKAIEEGKATPESADYQKGPRYNLATLREAVFYRDNYICKVCGRKATEGAILHMHHMFYWKGRHGNSLSELITVCEKCHTPANHQKSGKLYGFGENVKFADLSGAAFMNTVRWQIVNELYAAFGKDFVTVTYGAMTKEKRIALHLEKSHNNDAYAMGSFHPVNRCAFEHYEKVKRNNRILEKFYDSQYIDTRTGELTNGKSLFNGRISRSHKKDSENLHKYRGKRICKGHRALRRKKLALNPGDLVSLNGEILVVHGTHTKKNGSVNVEFKTPSRGGKKSASLKKLKIVKTSNLMHSAWTKVS

SEQ ID NO: 4166 - protein, 317 aa, unidentified
  REGION 1..317: note = gut metagenome
MVYVQDINGKPMMPTTRHGKVRRLLKENKAVVVSLCPFTIKLTYVTSDYKQEIVLGVDAGTKHVGLSATTKSKELYSSEVILRNDIVDLLSTRRELRKTRRNRLRYRKPRFNNRIKSKRSGWIAPSVKYKVDAHIRVIDNVCSILPIFRIVIEVAQFDTQKIKNPNISGKEYQEGDQLGFWNTREYVLARDGHKCQYCKGKSKDKILNVHHIESRKTGGNSPSNLITLCETCHKEYHKGNIDLKIRRGKSLRDAAVMGIMKWRLYEELKSKYDNISMTFGYVTKYNRINHDIEKSHVSDAFVISKNFNAIRLGYYYK

SEQ ID NO: 4167 - protein, 469 aa, Burkholderia sp.
LAVFVLDRSGKALMPCSEKRARLLLARGRARVHRVVPFCIRLIDRQHASSAMQSLRLKLDPGSKTTGIALVRDVTQPDASIGEIQRGAAVLNLFELIHRGRQISETLTARRSMRQRRRGNLRYRAPRFLNRTRPTGWLAPSMQHRVDTTMAWVKRLMRWAPVCAVTSELVRFDLQALENPEIEGVEYQQGALAGYEVREYLLAKWGRACAYCDAENTPLQIEHIHARARGGTNRVSNLTLACAPCNTKKAARALPDFLTRDPKRAARILAQAKRPLKDAAAVNATRWQLVQSLRATGLPVELGSGGRTKFNRTRFDIPKTHALDAVCVGEVEWVRTWQRPTQTVKCTGRGSYQRTRLDKYGFPRGYLTRSRRVHGFQTGDLVRADVPTGKKAGIHVGRVAVRATGSFNIQGDGAVVQGIAHRHCRLVQRSDGYGYSRIATSKGDARTGTASLSALSLPAVNDGVSRATG

SEQ ID NO: 4168 - protein, 413 aa, unidentified; identical to SEQ ID NO: 2636
  REGION 1..413: note = Human gut metagenome

SEQ ID NO: 4169 - protein, 430 aa, Desulfobacter sp.
LNVFVLDTNKKPQNPVHPAKARLLLTEGKAAVFRQFPFTIILKETVLDVASNPLRIKIDPGSRETGIAVINDDSGEIIFAMELRHRGQQIKNNLESRRAIRRSRRNRKTRYRKPRFDNRTRAEGWLPPSLKSRVHNIETWVNRLCRFCNIQAISMELVRFDMQKIQNPEISGVAYQQGELMGYEVREYLLEKWDRTCAYCGKTDIPLEIEHIVPRSKGGSNRVSNLTLACTACNRKKGNKPLEQFLSRKPRLLKRIQKQSKVPLKDAGAVNTTRWDLFRTLKKTGLPVETGSGGLTKFNRTTRGLHKTHWLDAACVGKSTPEKMFQIDKAVLIVKADGHGSRQMCRVNKFGFPRTTAKSTEKKVKGFQTGDIVKAVVTSGKKVGTYTGRVAVRKSGSFNIKTVDKTVQGISWKYCRLLHASDGYSYNTTC

SEQ ID NO: 4170 - protein, 431 aa, Escherichia sp.
MNRVFVLSKTGKTLMPCRPARARQLLHNKKARVKRLYPFTIQLTQRSEGYIQPVELKFDPGSKQTGVGLVLHGKNRLSAIYGAVLTHRGQEIKGNLDSRRMIRRARRNRKTRYRQERFLNRVRSKHKGWLAPSVHSRVDNIVEWSKRFMRLSPVGFITVESVKFDMRKMENAAVEGLEYQRGTLFDYEVKEYLLEKYNYSCVYCGAKNVPFEKEHVIPRSRGGSNRISNLVLSCHDCNQKKDNLPIEEFLKDNPALLKKIKAQLKSSLKDAAAVNITRKQIVKELRILNVPVLTGTGAETKYNRVSQKYPKEHYIDALCVGATGAKVYIPSKLRPLLIKKERRNNRQMCLVDKYGFPRGKAKGSKIVRGFKTGDIVKAVVLKGKKKGVYKGKVAVRLSGSFNINVKQGRIEGIGWKNCVMLHRFDGYSYTY

SEQ ID NO: 4171 - protein, 358 aa, unidentified
  REGION 1..358: note = Fermentation metagenome
EVFYMSEIEIRNDISDKMDKRAKYRRTRRNRKTRYRKPRFNNRKNSIKKDRFSPTMTSKINSHLKEIEFVKSILPIKNIIIETATFDPHALKNPAVLNNKWLYQKGTNYGFANTKAYVLSRDGYTCQHCKGKSKDNRLEVHHIIFRKNGGSDDAENLIVLCKTCHDSLHKGKIKLKKNGKIKGQLKHATQMNSIRQQLLKILPDAKETFGFITKEHRYLMGLPKEHYCDAIAIACLNNIEDTGLIDVSFKTEEVVLKKCISKGDYQQTKGVRSHQKIPTGKIEGFRKFDKVRYLGDEYFIKGRMSTGYAVLMDIDGDKIDFSNAPRGMKTPKMSNMQRISARKSWIICEQNRANSSHD

SEQ ID NO: 4172 - protein, 497 aa, unidentified
  REGION 1..497: note = Human gut metagenome
LVWNVQAPWDVYPSPTLCGLCLKVLRGRNGDADKKPIPTLTKDENRPSGRTTGLRAEQAEPAGIRKGDTLKVFVLNMRGKPLMPCSPAKARHMLKAGKAFVVRRTPFTIKLTIATGETKQDVTLGVDAGARHVGISATTEKEEVFASEVALRQDITGLLADRLAFRRARRNRKTRYRAPRFNNRVRSKHKGWLAPSVENRIQAHISRIEAVCRLLPVTKIVIETASFDIQKIRNPEVEGTGYQQGDQLGFWNVREYVLFRDGHICQHCRGRSKDPILNVHHLESRKTGGDAPNNLITLCETCHKAYHAGKIKLKVKRGQSFRAEAFMGIMRWTLLDRVRKAHPGLPVENTYGYLTKNTRITLGLPKAHCVDAYCIAGNLKAVQRGVYRHQRQVRKHNRQIHKCTVLSKTLKDGTKIGYRKLNQTPHLVKNFRLFDKVRCLGQTGFIFGRRSSGYFDVRRLDGVKISSCINYRKLTLLEKRGTCLTELRKEDGASSPV

SEQ ID NO: 4173 - protein, 431 aa, unidentified
  REGION 1..431: note = Human gut metagenome
VEQNLRVFVLNKRGKPLMPCSPAKARHLLKEKKAIVVRRTPFTIKLTIATGESKQPVSLGVDAGYKHVGLSASTEKAELYASEVELRQDITDLLSARLALRRSRRNRKTRYRAPRFDNRIRTKRKGWLAPSVENRINAHLSRIEAVLRLLPVTKITVETASFDLQLLKNPDISGKEYQEGEQLGFWNIREYVLCRDGHVCQHCYGRSKDPVLNVHHLESRRTGGDSPGNLITLCETCHKALHRGEITLKAKRGQSFRAEAFMGIMRWEVLNRLKASHPELEVNNTYGYWTKHARIANGIAKSHCADAFCIAGNLGAERLGEFFFQKQTRRNNRQIHKLSILKGGLRKRNQAPFEVKGFRLFDKVACKGEEGFIFGRRSSGFFDVRKLDGTRISAGISYKKLHLLEKRQTYLMEIRKEEAFPPLPEGRGLRA

SEQ ID NO: 4174 - protein, 456 aa, unidentified
  REGION 1..456: note = Human gut metagenome
MSTCVCVLSNSGERLMPTFRLGKVRRLLKDGKAKIVKHHPFTIQLLYDSKTNTQPIEICEDVGYNYIGISVKSESHEYVSAQYDTLQDEKEHHDDCRKYRRTRRNRLRYRKPRFDNRKRSEGWLAPSLEHKKQLNIRLIERYVSVIPITRATVEVGSFDTMLLQAIQKGESKPEGVDYQKGPRYNLATLREAVFYRDNYTCQVCGRKIADGAILHMHHMFYWKGRHGYQLDELVTACEKCHTPANHQKGGKLFGFGEDKEFANLSGAAFMNAVRWQIVNALYATYGKEFVTITYGAMTKEKRIILGIEKTHNNDAYAMGDYHPAHRCVFRHYQKRRRNNRVLEKFYDATYIDARTGNKAKGKELFNGRINRNHKKDSENFHKYRSKKVSKGRRSIRRQRYAIQPYDTVRLEGKTYITSGCHNKGTRLLIPANGKSKSVAISKVQVVCHAGAWIQII

SEQ ID NO: 4175 - protein, 438 aa, Moorena sp.
VAVFVLDRRGKPLMPCNEKRARLLLARGRARVHRVMPFVIRLVDRQIGVCSFQPLRLKLDPGSRVTGMALVRETDDAIAVLNLFELVHRGRQIGEALTARRACRRRRRTNLRYRTPRFLNRTRPSGWLPPSLMHRVHITIAWVNRMRRWAPVTALSSEQVRFDMQALANPEISGVMYQQGTLAGYEVREYLLGKWSRTCIYCDATDRPLQVEHLTARARNGSNRIGNLGLACGECNQDKGALDVREYVKDPKRLARILATASRPLNDAAAVNATRRALSSALRTTGLPLELASGGQTKFNRVTHNIPKTHALDAVCVGEVAALRGWQRPSLTIRATGRGSYQRTRLTRHGFPRGYLMRQKQVQGFQTGDHVRADVPHGKKAGVHTGRVAVRATGSFNIQTAMTVVQGISHRYCKLVQRGDGYAYSLQPNDSFRQDGGG

SEQ ID NO: 4176 - protein, 420 aa, unidentified; identical to SEQ ID NO: 3288
  REGION 1..420: note = Human gut metagenome

SEQ ID NO: 4177 - protein, 462 aa, unidentified
  REGION 1..462: note = Human gut metagenome
VLCAWKPWNNIGEGHLTDFPVWAACSFVAATQKEIQMVYVQNRSGQPLMPTEDHRKVRLLLKNGFAVVVKRTPFTIRLATGSKNYVQPVILGVDSGSRTVGLSASTKQRELFAAEVTLRNDVVNNLSARREFRRARRHRKTRYRKPRFHNRVHSKQKGWLAPSVEVKIQEHITVIKRVCRILPVSRVVVETAEFDLQLLKAIADGRPVPQGKDYQKGEQAGFYNVRQYVLWRDGYRCQCCKEHGKGIKLHIHHKESRNTGGDAPENLVTLCEVCHRKLHQGLIAEQGLKKRSRMSTRDAAFMGIMRRTLTERLYRELKVPVAGTKGYITKYTSVELLHLPKSHAGDALAIAQGRHGFGIRQATFIKPAERIYQIKPVRHHNRQLHKATILKGGKRKLNQAPKYVKGFQLFDKVLYQGQECFIWGRRTTGSFLLKLLDGTKVKDGVSCKHLKLLERSSQYLAA

SEQ ID NO: 4178 - protein, 466 aa, unidentified
  REGION 1..466: note = Human gut metagenome
MKILVIGRNGLGLAPTTPRKARILLKEKRAEVAYRQPFTIRLKYKTGCAHPKMCLGEDTGSQHIGFAILTEKGQVLDKTEYELRSTMEKRSLLETRKEYRRGRRYRKVRYRHSKFHPTTKRLYVEKPIKYNKHTTHWKKQTNSFDSSRPEGWLPPSIQSKLDHHIRLTSRYKEALPPDTMIRIEVGRFDVAHMKDPTINGKMYQQGPMYESENVKAYVFARDSYTCKCCKAKAGSIRKDGTQVKLKAHHIDFRSKGATDNPERMVSVCDRCHTTAAHQLGGILYQWMIEGKKFSRGYRDPAFMNILRRRMWKAFPEAAFTYGNITAADRKGLLIEKSHANDAVAIAAHGMELIRNSTETTFYKQLRKQKRSLHEATPRKGRREPNRTAKRNRKNTCVVKGWYLNDKVTVFGKTGWISGFSGKSSVYIRDCENEYITVLGKNYKLVPISQIKMITHCNNWAVYTKIA

SEQ ID NO: 4179 - protein, 342 aa, Methanosarcina sp.
VFVLNKNQKPLMPTNPAKARILLKAGKAKVVSRIPFTIKLTYNSKGYTQPVVAGMDSGSKKIGCAAVGNGKVLYQSEAEIRQDVSAKMKQRAMYRRTRRSRKTRYRPARFDNRRNSLREGRIPPSIRSKLESHFREKKFVESILPVTKWGVELASFDIHKITDPSVSGIEHQNGDQKGFYNLKAYILNRDKHTCQHCKGKSKDPKLHCHHIIFRSQKGTDTPKNLICLCNTCHDALHRGEFQLSVKRSKTKHATEIGIIKSQIKKSDWNFIETFGYETKYKREQMLELPKTHYFDAVSICCNDQKVELEDIFYLKKHVSKGDYQQRTGKDQKRRFQLVNCLG

SEQ ID NO: 4180 - protein, 448 aa, unidentified
  REGION 1..448: note = Marine sediment metagenome
MVYVLNIEGKPLMPTSNAKARKLLKQKKAKVGELKPFTIQLTYEIEKEYKQEITLGIDSGYNNIGFSALTNNKELIVGELKLLQGMKERLLEKSRYRTIRRNRLRYRKPRWNNRIKTKPKGWLAPSLRHKLYSHIKFIDYLYSILPINKTIVEVANFDIQKMKDDDISGIEYQQGDMMGFWNTREYVLHRDNHKCQNPNCKNKSKKQILEVHHIKYKSKGGTDRPNNLITLCDKCHTSPNHRKGNFLYEWCQDGKKVRGFKDATFMSMIRWYLVNKLKEKYDNIFFTYGYITKNHRIINDIKKSHYNDAFAIAKGIGQIRNESIFNINQVRRNNRSLEKFYDSKYIDIRTGKKVSGGDLNNGRRTRNKNLNSENLHQYRGEKIQKGQRRIRKGKYFYQPNDLVKYEGKIYTVRGSQNGGEYIALREIKKVPRVKVLTPYKFQRGLIWC

SEQ ID NO: 4181 - protein, 443 aa, Bacillus sp.
MVEENMTCFMQRKGENPMVFVLDTNKRPLAPCHEAVARKLLKQGKAAIYRRFPFTIILKKSVDESEIKATYRLKIDYGSRHTGLAILRGQEVVWLGQLDHRTDIKERIDKRRAFRRARRNRKTRYRKPRFLNRKRKEGWLPSSLESRVQNIQTWVSRLKKLCPIGYISYENAKFDTQLMRNPEINGVEYQQGTLQGYEVREYLLEKFGRKCCYCGKENVPLEVEHIIPKSRGGTDRVDNLCLACHDCNQRKGSKTAEEFGYPHIQKQVKESLKDTSAINSTRWKAYEVLKQTGLDVECGTGARTKMNRIRLDLPKTHYFDACCVGESTTNHLYFKTKEVLFIKAKGRGSRSRTNLDRYGFPRGYLARQKFFFGFQTGDMVKAVVPRGKYQGVWFGEVACRKTGSFDIKGKDGKRIAQGINYRYVQVIQRFDGYAYGKGVAELA

SEQ ID NO: 4182 - protein, 433 aa, Moorena sp.
MQNRVFVINKHGKALMPCKPRKARILLRDGKAKVLKKEPFTIQLLYGSSGYKQDISVGIDSGQRHIGLAVTSQDKVLFQGEVELRQDVKKLIDTRRTYRRSRRNRKTRYRKARFLNRIAKKKDNWLPPSVASKVNHNINWIKRLLSVLPKADLHIEVGKFDMQKMKNPAINGEGYQQGDLYGYQTVKQFVLARDNYTCQVCKKKGGKLKIHHIIYRSLGGTNTVDNLITVCSNCHTTKNHQTGILAKWCKDKKKVNKPYKGATFMNILRRRLFTSFPQARFQYGAWTTLQRADLDLTKSHYNDAVAISGIRKIKAKPTSIMMFKQFRKKKRSLHEATARKGRKIPNITSKRNAKNTRCAKGFWLNDYVKIKDSNKKGYISGFSQSSCYIKDIFGNYLTTSDRYKQVALSKLDRLSHYNNWSKQEINENMYQMN

SEQ ID NO: 4183 - protein, 446 aa, unidentified
  REGION 1..446: note = Freshwater metagenome
MQKLQVKLKNVPKGVYQAPCSTSLQLNKEETLSVAGIVRTCNNLDGNLLQQAGGLKAAVFVLSSNGKPLMPCTSSKARKLLQNRKAKVVKLYPFTIRLNFDCENQTQDISMGIDAGYANIGFSCITTKSELVSGTIILDNKTSERLTERRMYRRGRRNKLWYREPRFDNRKRKEGSLPPSVQRRYDTNLKIINLMKSLMPITKVTVEVANFDIQKIENEAIEGVGYQQGEMLGYQNMRSYLMAREKGVCQLCGKEFEKGNPSHIHHIIERANGGTDRAKNLAILHEKCHDKLHKKGLKLKPNKTYKPNTFMSIIRNRFWNDIPNINVTYGYETFVKRIELRLEKTHYTDAFVIAGGEYQQRCKPIGIKQKHQHNRVLQVNRKGFAPAIRKQRYKIQPKDLVWINGKREVAVGVHCKGAAVIIERNKKSFLIKKVEKIYNFGTFAYS

SEQ ID NO: 4184 - protein, 408 aa, unidentified
  REGION 1..408: note = Human gut metagenome
MVYVQDIDGKPMMPTTRHGKVRQLLKDKKAVVINTCPFTIKLMYKTSDYKQEIVLGVDAGTKHVGLSATTKSKELYSSEVILRSDIVDLLSTRRELRRTRRNRLRYRKPRFDNRIKSKRTGWVAPSVRHRIDAHIRVIDNVCSILSISRIIVEVAQFDTQKIKNPNISGNEYQEGNQLGFWNVREYVLTRDGHKCQHCKGKSKDPILNVHHIESRKTGGDSPSNLITLCETCHKEYHKGKIDLRVKRGKSLRDAAVMGIMKWKLYEELRSRYDNVSMTFGYITKYNRIKYGIEKSHISDAFVISKNFNALMLEYHYKVRLIRRHNRQIHKQKVLKGGVKKPNQSSFEVFGFRLFDRVMFEGNCYFIFGRRKSGSFNIRDIDGGNQRDITYKKLKLLRCKRFMIQKETN

SEQ ID NO: 4185 - protein, 431 aa, unidentified
  REGION 1..431: note = Human gut metagenome
MPDKVYVISRLGHPLMPCSPAKARHLLDDGKAKVVKRTPFTIKLLYGSTEYTQPVILGVDAGSKTIGLSASTTKEELFAAEVMPRNDVVENLSTRREFRRARRNRTTRYRKSRFNNRVHSKNNGWLAPSVEVKIQEHITSIKRVCAILPISKIVVETAEFDLQLLKAVQDGKPVPEGEDYQKGEMYGSYDVRQYVLWRDNYTCTCCGVKGTDKKPVKLHVHHFESRKHGGNAPDNYGTLCEDCHKKLHLGIITDISLKTRKRPSTRGAAFMGIMRKTLMQRLITGLSIPVAETKGYITKAAREEILKLPKTHTNDALAIAQGRHGFGIREQAYVKPTNRIYTVRPVRHHNRQLHKATMLKGGIRKLNQASKYIFGFRLYDKVLYQGGECFVWGRRRSGSFLLRTIDGTKVKDGVGYRNLTLLERSTNYLIA

SEQ ID NO: 4186 - protein, 431 aa, Moorena sp.
MSNFVFVLDTNKQPLDPVHPGKARRLLSRGNAAVFRRYPFTIILKEACPDIPMQDLELKLDPGSRVTGIAIVQGTKVIFGAELEHRGQQIKDALLSRRQLRRSRRNRKTRYRQARFLNRTRPKGWLPPSLQHRVDTTMTWVNRFRKLAPIARISQELVRFDLQLMQNPEISGIEYQQGELQGYEVREYLLEKWNRKCAYCGAKNVALEVDHIHPKSKGGTDQVSNLTLACHSCNQSKSNRDIRDFLSSKPDVLNRILKQSQLPLKDAAAVNSTQWALFNALKQTGLPVATGTGGQTKFNRTRLDLPKTHWLDAASVGEIDSLKVLTTKPLLIAAKGHGTRQMCGTDKFGFPKRHRSRVQTHKGFQTGDIITATVTKGKKIGSYVGRVLCRASGSFDVTTQSGRVSGISHRYCQPIHKRDGYAYAFSHTIGD

SEQ ID NO: 4187 - protein, 442 aa, unidentified; identical to SEQ ID NO: 2637
  REGION 1..442: note = Human gut metagenome

SEQ ID NO: 4188 - protein, 414 aa, unidentified
  REGION 1..414: note = Human gut metagenome
MPCSPAKARLLLKEKKAIVKRRTPFTIQLTIATGESKQPVTLGVDAGYKHVGLSASTEKAELYASEVELRQDVSDLLSARRALRQSRRNRKTRYRAPRFNNRLRTKRKGWLAPSVENRINAHLSRIEAVLRLLPVTKITVETASFDMQLLKNPDIAGKEYQEGEQLGFWNVREYVLFRDRHVCQHCYGRSKDPVLNVHHLESRRTGGDSPGNLITLCETCHKALHRGDITLKAKRGKSFRAEAFMGIMRWEVHNRLRALHPGIEVSNTYGYRTKHARIANGIAKSHCADAFCIAGNLGAERLCEFFFQKQTRRNNRQIHKLSILKGGIRKRNQAPFEVKGFRLFDKVACQGEEGFIFGRRSSGFFDVRKLDGTRISAGISCKKLHLLEKRRTYLTEIRKEEALPPLPEGRGLRA

SEQ ID NO: 4189 - protein, 319 aa, unidentified
  REGION 1..319: note = metagenome
APRFDNRIRTKRKGWLAPSVENRINAHLSRIKAVLRLLPITKITVETASFDMQRLKNPDISGKEYQEGEQLGFWNVREYVLFRDGHVCRHCHGRSKDPVLNVHHLESRRTGSDSPDNLITLCETCHKALHRGEITLKAKRGQSFRAQAFMGIMRREVLNRLKASYPELKVHETYGYLTKHARIANGIVKSHGADAFCIAGNLGAERLGEFFFQKQTRRNNRQIHKLSILKGGIRKRNQAPFEAKGFRLFDKVACQGEEGFIFGRRSSGSFDVRKLDGTRISAGISCKKLRLLEKRRTYLTEIRKEEALPPLPEGRGLRA

SEQ ID NO: 4190 - protein, 459 aa, Moorena sp.
MQRLEERDTYTPPNASQVRCNCDPALNREETLSVPGLKTSSNNSDVNQLPDCKEKEGQNLRVSVHVLNMRGKPLMPTTPRKARKLLESGKAKVVQRTPFTIRLNYTTGETRQPIWFGIDPNYTKIGFSAVTDKRELVSGEVTLRDDIPEKLTERKQYRRNRRSKLEYRKPRFQNRKREEKFPQSIQQKLDIIVNFVDQIKRILPITSVFVEVASFDTQKMVNPEISGVEYQQGELEGYEIREYLLEKYNRTCAYCGKSNVPLQVEHIIPTSRGGSDRVSNLTIACRKCNQEKGDKTAEEFGHPEVQERAKEPLKAAAFMNAIRWKLVRLLGCEHTFGYITKHNRIKLNLKKSHVNDAFVIAGGTGQRARPYQGTQTRRNNRALQTNRKGFKPSIRKKRYPLGPKDLVFLKLSSVICTVKGVFNYGNWVRIVDPIGNIINANIKNVELIKYGKGLQLRFA

SEQ ID NO: 4191 - protein, 414 aa, unidentified
  REGION 1..414: note = Mouse gut metagenome
MPCSPAKARLLLKEKKAIVKRRTPFTIQLTIATGETKQPVSLGVDAGYKHVGLSASTEKAELYASEVELRQDITDLLSARRALRQSRRNRKTRYRAPRFDNRISTKRKGWLAPSVENRINAHLSRIEAVLRLLPVTKITVETASFDMQLLKNPDIAGKEYQEGEQLGFWNVREYVLFRDGHVCQHCHGRSKDPVLNVHHLESRRTGGDSPGNLITLCETCHKALHHGEITLKTKRGQSFRAEAFMGIMRWEVLNRLKVSHPELEVNNTYGYRTKHVRIANGIAKSHSADTFCIAGNLGAERLGEFFFQKQTRRNNRQIHKLSILKGGIRKRNQAPFEVKGFRLFDKVACQGEEGFIFGRRSSGSFDVRKLDGTRISAGISYKKLRLLEKRQTYLTEIRKEEALPPLPEGRDLRA

SEQ ID NO: 4192 - protein, 323 aa, Oscillatoria sp.
VSKVFVLDTKSQPLNPIHPGRARMLLSQGMAAVFRRFPFTLILKEEVSNPAVEPLRIKIDPGAKTTGLALVNNKTGEVVWVAELQHRGFQIRDALTSRRQLRRSRRSRKTRYRKPRFLNRTRPKGWLPPSLNSRVANILTWVKRLSSLCQINAISQELVRFDTQQMENPGISGIAYQQGTLLGYEVREFLLSKWNRTCAYCGAKDTKLEIEHIHPRSKGGSNRVSNLCLACVPCNREKGNQNIKDFLKGKPDLIKRILAQAKRPLANTAAVNTTRWNLYFHLKKMWLPVEVEGGEPSTTAPSEAWTRLITGTRPALENPLPSS

SEQ ID NO: 4193 - protein, 420 aa, unidentified
  REGION 1..420: note = Human gut metagenome
MQYVYVLNKHGEPLMPCSPRKARLLLKQKKACVIKRTPFTVKLLYGSTGYKQPVTLGVDAGSKHIGISATTEKHELYREEATPRNDVVDLLSARRAFRRSRRNRKTRYRAPRFDNRVHSKHKGWLAPSVEVKIQEHITLVEHVCRILPVTLVRVETAEFDTQRLKAMLEGKPLPVGTDYQLGEMYDEYNVRQYVLKRDNYTCQCCGAHSTKTKGVKLHVHHIETRRTGGNAPNNLITLCTACHKALHAGKVTLDGKKRGKPLKDAAFMGIMRKTLMERLRKELKIPVQGTYGYITKCLREKNGIPKSHTNDARCISKNPLAIPCDTCYYTKAVRHHNRQLHKATILKGGIRKANQAPYIVKGYRLWDKVSCNGTECFITGRRTSGYFALKKLDGTVVSNSISYKKMRLLEAATNYITERK

SEQ ID NO: 4194 - protein, 512 aa, Haloactinospora sp.
LATFHTGPQTHQAVPPQRPALEPDPADTPGNRDETGVGRHDAPGVEHVREETPGAAPGAGGATPAPSGVGEQPRERHPCVMVLDAHHRPLQPCHPARARTLLAKGRAVVHRRVPFTIRLKDRTVAESDVDGVEVGVDPGSKHTGLAVFTAQGGQRRGRFALRLDHRGAQIRKKMGQRSAYRSRRRTANVRYRAPRFNNRARAEEWLPPSLRHRVDTTVSWVVRLSRWAPVRQVHVERVAFDTHALSAGHPLEGREYQRGTLHGYEVREYLLAKFGRACVYCWAVHTPLNVDHVHPKSRGGSDRVSNLVLACIRCNQTKGEKPVEEFAPAAAPHILARAKTPLRDAAAVQSSRWALWRALDARLPVRTGSGGRTKYNRTRNHLPKTHTLDALCVGETGAVAEVVNRMLVAACTGRGTHARTRCDKHGFPRLRLPRTKTFFGYQTGDLVRAVVPAGKKAGTHSGRVAVRAKGVFNITTVHGTAKDIHHRYVRLLQRADGYAYTMRKEEAASSPA

SEQ ID NO: 4195 - protein, 421 aa, unidentified
  REGION 1..421: note = Human gut metagenome
MIYVRSKEGKALMPSERGGRIGYLLRHGKAHVVSRVPFVVQLDYESTTYTQDVSLGIDAGSKHIGVSASSERKELLAAQVELRSDVVNLLSTRRELRQTRRNRKTRYREQRFYNRKKKDGWLTPSVEQKVESHLKVIRLAHKLLPITKTTIEVAQFDAQKIKNPDIKGEEYQQGEQMGFWNVREYVLARDGHKCIHCKGKSKDPILNVHHLESRKVGGNSPSNLIVLCETCHKAYHRGEFDLKIKRGTTLRDAAVMNIMRWSVYERANAEFGNVYLTYGYITKHTRIENGIAKTHAADAFCIAKNVNAMRLSFFFMCRCIPRHTRVLHVANPKKGGIRRSTIASHKIGKSRFQRFDMVRWKGKECFIFGSTNGRPILRYIEGIQVANQPSVNIKTIKFLKRIRYNILVEERTSESWIENES

SEQ ID NO: 4196 - protein, 456 aa, Halomonas sp.; identical to SEQ ID NO: 2773

SEQ ID NO: 4197 - protein, 451 aa, Moorena sp.
VLCDKPLDNSVEENFTWETSELEKAKELVLSYVFLVDANKQPLNPLHPARARRLLTAGKAVALMKHYPFTLMLKRMVEKPTLQPLRLKLDPGSKTTGVALVNDDSGEVVFAAELSHRGQAIKAALDDRRVVRRSRRQRKTRYRKARWANRKNKQKGWLPPSLESRIANVLTWVRRLSCSAPISAISMELVRFDMQLMENAEISGVEYQQGALMGYELREYLLEKWNRHCSYCGAKDIPLQIEHIHPRAHGGTNRVSNLCLACEKCNTAKGSKDIAVFLKKKPDLLKRIQAQARAPLKDAAAVNATRWALLERLKTTGLSVECGTGGLTKFNRAKRNLPKAHWLDAACVGKSTPETLVMTGIRPLLIKATGHGRRQMCVTDAYGFPKQHKERKGSYLGYRTGDMVKAITPKGTFHGRIAIRYRPSFHLGKEDIHPKYMRHVHRADGYEYRSA

SEQ ID NO: 4198 - protein, 420 aa, unidentified
  REGION 1..420: note = Human gut metagenome
MQYVYVLNKHGEPLMPCSPRKARLLLKQKKACVIKRTPFTVKLLHGSAGYKQPVTLGVDAGSKHIGISATTEKHELYREEATPRNDVVDLLSARRAFRRSRRNRKTRYRAPRFNNRVHSKHKGWLAPSVEVKIQEHITLIKHVFRILPVTLVRVETAEFDTQRLKAMLEGKPLPVGTDYQLGEMYDEYNVRQYVLKRDNYTCQCCGAHSTKTKGVKLHVHHIETRRTGGNAPNNLITLCKACHKALHAEKVTLDGKKRGKPLKDAAFMGIMRKTLMERLRKELKIPVQGTYGYITKYLREKNGIPKSHTNDARCISKNPLAIPCDTCYYTKAVRHHNRQLYRATILKGGIRKANQAPYIVKGYRLWDKVAYNGTECFITGRRTSGYFALKELDGTVVSNSISYKKLRLLEPATNYLIERM

SEQ ID NO: 4199 - protein, 512 aa, unidentified; identical to SEQ ID NO: 3720
  REGION 1..512: note = Human gut metagenome

SEQ ID NO: 4200 - protein, 431 aa, unidentified
  REGION 1..431: note = Human gut metagenome
MDAWDIIVVLNKRGKPLMPCSPAKARLLLKEKKAIVKRRTPFTIQLTIATGESKQPVTLGVDAGYKHVGLSASTEKAELYASEVELRQDVSDLLSARRALRQSRRNRKTRYRAPRFNNRLRTKRKGWLAPSVENRINAHLSRIEAVLRLLPVTKISVETASFDMQLLKNPDIAGKEYPEGEQLGFWNVREYVLFRDRHVCQHCYGRSKDPVLNVHHLESRRTGGDSPGNLITLCETCHKALHRGDITLKAKRGKSFRAEAFMGIMRWEVHNRLRALHPGIEVSNTYGYRTKHARIANGIAKSHCADAFCIAGNLGAERLCEFFFQKQTRRNHRQIHKLSILKGGIRKRNQAPFEVKGFRLFDKVACQGEEGFIFGRRSSGFFDVRKLDGTRISAGISCKKLHLLEKRRTYLTEIRKEEALPPLPEGRGLRA

SEQ ID NO: 4201 - protein, 471 aa, Caldicellulosiruptor sp.; identical to SEQ ID NO: 3375

SEQ ID NO: 4202 - protein, 414 aa, unidentified
  REGION 1..414: note = Human gut metagenome
MPCSPAKARLLLKEKKAIVVRRTPFTIQLTIATGESKQPVSLGVDAGYKHVGLSASTEKAELYASEVELRKDITDLLSARRALRQSRRNRKTRYRAPRFDNRIRTKRKGWLAPSVENRINAHLSRIEAVLRLLPITKITVETASFDMQRLKNPDISGKEYQEGEQLGFWNVREYVLFRDGHVCRHCHGRSKDPVLNVHHLESRRPGSDSPDNLITLCETCHKALHRGEITLKAKRGQSFRAQAFMGIMRREVLNRLKASYPELKVHETYGYLTKNARIANGIVKSHGADAFGIAGNLGAERLGEFFFQKQTRRNNRQIHKLSILKGGIRKRNQAPFEAKGFRLFDKVACQGEEGFIFGRRSSGSFDVRKLDGTRISAGISCKKLRLLEKRRTYLTEIRKEEALPPLPEGRGLRA

SEQ ID NO: 4203 - protein, 429 aa, Ktedonobacter sp.
LSNVFVIDSDYKPLNPVHPGHARRLLRQGKAAVFRRYPFTIVLKRVVEQPEVQPLRLKLDPGSKTTGIALVNDTNGKIVFAAELSHRGHAIKDSLDSRRASRQGRRQRKTRYRKPRFDNRRRKKGWLPPSLESRLANILTWVARLCRYAPIAALSQELVKFDMQLMENPDIAGVEYQQGTLQGYEVREYLLEKWERTCAYCGKQDVPLQVEHIHPRARSGTNRMSNLTLACEACNTAKGTQEIEVFLKKKPEVLKRLLAQVKKPLKDASAVNSTRCALLERLKALGLPVEWGSGGLTKWNRTTRGLPKTHWLDAACVGKSTPDVLLQKGVIPLRIKATGHGRRQMCVPDKYGFPKQHKERKKTFLGYQTGDLVKAITPKGTFEGRIAIRHRPSFRLEKVDIHPKYMRCVQRSDGYEYTQKGVRHAPPHG

SEQ ID NO: 4204 - protein, 442 aa, Blautia sp.
MVTVQQSTHHLPFGRVFIRRNLFMVYVISQDGKPLMPCSDPIARLLLKQGKAKVKKREPFTIKLTYETTNHTQGLTLGVDTGSGTIGTAVSKDNGDIVYMSEVVVRNDITDKMTQRAKYRRNRRNRKTRYRKARWLNRASSIKKDRFSPTMQSKLHSHVREIEYIQSILPVTEMVFETGQFDMHLMKNPSLANPKVRPWGYQKGANYGFENTKAMVLNRDNYTCQCCKGKHKDSKLEVHHIVFRSQGGSDEESNLLTLCHTCHKDLHSGKINPKLSGKVKGNLKYATQMNSIRKQLFRCYPNAIETFGYVTKANRLHLGVDKEHYYDACTIATQGNAFNVKSNLYKKKCVSDGDFQKTKGIHSEQPIVTDKICGFRKFDKVRYFGNDYFIKGRMSTGYAILMDIDGNKIDFSTMPRGYKTPKLSNCKRITARSTVMTQVKVV

SEQ ID NO: 4205 - protein, 450 aa, Moorena sp.
MVYVINFEGKPLMPTTNAKARKLLKQKKATVKRVNPFIIQLLYKTDTEYIQTITLGIDSGYLNIGFSAITDSKELIVGEVKLLQGIKDRLLEKSQYRRIRRQRLRYRKPRWNNRKIKQGWLAPSLQHKLNTHLKFIDYLNSILPIRNIVIEVANFDIQKIKNPDISGVEYQQGEQMGFWNVREYVFHRDGHKCQNPNCKNKSKEQILEIHHIKYKSEGGSDAPSNLITLCNKCHTSPNHKKGKFLYDWCENGKKVRGFRDATFMSMIRWYLLEQLKEKYTNIKATYGYLTKNHRIEHGIEKSHFNDAFAIAKGVNQVRNLEVFKVEQSRLNNRSLEKFYDAKYIDNRTGEKVSASELNCGRRTRNKNLNSENLRMFRGQKISKGQRRIRKQKSLYQPNDLIKYNGNVYTVKGSQNEGKYIALKEIKKVPNVKLIKPYIFKKGLNWSHGLC

SEQ ID NO: 4206 - protein, 426 aa, unidentified
  REGION 1..426: note = Bioreactor metagenome
MVFVLDTKKRPLAPCHEAVARKLLKQGKAAIYKRYPFTIILKEIVDNFRPKTPYRLKIDYGSKHTGLVIVRGEEVLWLAQLDHRTDIKERLDKRLAFRRARRKRKTRYRKPRFLNRRRKDWWLPPSLESRVQNIQTWVERLRKICPIEHISYENAKFDTQLMRNPEINGVEYQQGTLQGYEVREYLLEKFGRKCCYCGKEGVPLEVEHIIPKSRGGTDRIDNLCLACRDCNQRKGSQAAEEFGYPHIQKQVKESLKDASAINSTRWKVYEVLKQTGLDVECGTGARTKMNRIRLDLPKTHYFDACCVGESTPNHLYFKTKEVLFIRAKGRGSRSRTNLDRYGFPRGYLARQKFFFGFQTGDMVKVVIPRGKYKGVWFGEVACRKTGSFDIKGKDGKRIAQGINYRYVQVIQRFDGYAYGKVVAELA

SEQ ID NO: 4207 - protein, 424 aa, Bacillus sp.; identical to SEQ ID NO: 4001

SEQ ID NO: 4208 - protein, 413 aa, Clostridium sp.
MIKNNNYAFVIDNKGNKLSPCKINKAWYLIRKNKAIQVNKYPMVIQLKREIKDKEDESEFVCGIDDGSLHVGIGIIQKCKTKNKVIFKGTIEQRQDVKHLMDIRRDYRRYHRYHKRYRPKKFNNRANSKRKNRIAPSIKQKKDAILRVINKLNKYINITEYHLEDVAIDIRALIEGKKLYKWQYQKSNRLDENIRKSVILRDGCECMECGKSSCVLEVHHVVPRRLHGNNNLSNLITLCSECHQKTEGKEELFIKHYQDMIKGKNIRFDYAQHVMQGKTYLRKELSKLAKLILTTGGDTANKRIDWNIEKNHSNDALVITDLKINSDDCNIKNWAIKLMRRKSKANIENLQGFKHRDLIKYTKKNGENYIGYITALYPKKKQCNITTIEERILKRYGIKSCKLLWRFNKIYWF

SEQ ID NO: 4209 - protein, 419 aa, Moorena sp.
MYVYVLNKHGEPLMPCSSRKARVLLDNKKACVIKRTPFTIKLLHGSAGYKQPITLGVDAGSKHVGLSASTETHELYREEFTPRNDVVDLLSTRREFRRARRNRKTRHRAPRFDNRVHSKHKGWLAPSVEVKIQEHITVIKHVCQIMPVSLIRVETAEFDTQRLKAMLEGKPLPVGTDYQLGEMYDEYNVRQYVLKRDNYTCQCCGAHATKTKQVKLHVHHLESRKTGGNAPSNLIALCLTCHKAIHEGKKTLDTKKRGKPLRDAAFMGIMRKTLLMRLRKKLSIPVQQTYGYITKMLREKNNLPKSHMNDALCIAKHPKAAPCENCYRSKVVRHHNRQIHKAKILKGGIRKNNQASYIVKGFRLWDKVLCNGQECFISGRRATGYFALKKLDGTVVTNSVSYQKLRLLETAKNYLRERM

SEQ ID NO: 4210 - protein, 433 aa, Dactylococcopsis sp.
MQNYIFQLDSNKQPLDMIHPAKARRLQSQGKAATFRMYPYTIIRNISVKSPNTKSYILKIDPGATWTGFAIQCGEEIIFRMELKHRGGLIKKSLEQRADFRKGRRSRNLRYRKKRFNRKKPEGWLAPSLRHRLQTVETWVKKFLKLCPITCIEIEQVRFDLQKLENPEISGVQYQQGELQGYEIREYLLEKWGRQCVYCEKQDTPLQIEHIKPKSKGGSNRIGNLTLSCPECNQNKGNQDVEDFLSGKPDLLKRVLAEAPKPLDSGSAVNSTRYAIVEMAKNLCDHVKCWTGGRTKYNRVNQELPKSHSIDAACVGESGSKIKLLVSQPLIVESKGHGTKQARRANQQGFPALNKDNQPIKPKTKYTHCEAGDMIKFRLEKNRKTVRAGIYKGRVKTPTPKGFEVKIDGCRVSQKMEYLIRFMHRNDGYAYSF

SEQ ID NO: 4211 - protein, 417 aa, unidentified
  REGION 1..417: note = Human gut metagenome
MVYVINKQGQALMPTERFGKVRRLLKNSLAHVVCRIPFTIQLDYDTTDYTQPVSLGVDAGSKHIGISATTSEKELYAADVELRNDIVDKLSTRRELRRTRRGRLRYRKARFNNRVSSKRKGWLAPSVENKIQTHLTVVEKIHKFLPITNIVVETASFDIQKINNPSISSSEYQQGEQLDFFNVREYVLFRDNHICQHCKGKSKDKVLNVHHIESRKTGGDSPKNLITLCETCHKAYHRGEFELNVKRGKSFRDAAFMGIMRWSFYDRLKNIYPDVSMTFGYITKNTRITNNLPKDHYVDARCISGNPTAKPLGYYFYQKKVRCQNRQIHKANFLKGGRKKLNQAPFLVKGFRLFDLVEYKKDLYYIFGRRSNGSFDIRKLDGTKVNKGSINCKHLRLIDKRRSILTEKRTQGAYPCE

SEQ ID NO: 4212 - protein, 348 aa, Methanosarcina sp.
MPPQFQALRMPVKQSWEVGTVLASYKPFHIRSRGSRKTRYRPARFNNRGNSRREGRLAPSIKSKLESHFREKRFVESLLLVTKWKVELASFDIHKIKNPEVSGTGYQEGDLKGFYNVKAYVLHRDGYTCQHCRGKSKDSRLHCHHIVFRSKQGSDAPENLITLCETCHIALHAGEFELSGRRSNTKHATEVGIVKSQIKKSDWSFEEVFGYETKFRREQVLGLEKMHYFDALAICCGDKQKVEPDDTVYFKKHVPAGDYQQRKGKRSEKKIPTGKLFGLRKFDLVKTEKGIGIVRGKRSSGYFSISDLFGNKISDSVNIKKNSKRLRARTSTLIQKMELAECTHSSPV

SEQ ID NO: 4213 - protein, 427 aa, Moorena sp.; identical to SEQ ID NO: 2799

SEQ ID NO: 4214 - protein, 490 aa, unidentified; identical to SEQ ID NO: 3566
  REGION 1..490: note = Human gut metagenome

SEQ ID NO: 4215 - protein, 424 aa, Lentibacillus sp.; identical to SEQ ID NO: 3608

SEQ ID NO: 4216 - protein, 512 aa, unidentified
  REGION 1..512: note = Human gut metagenome
MSTVYVLNKDGKPLMPTTRGGHVRHLLKEQKARVVRTKPFTIQLLYETDDVVQLLYLGIDPGRTNIGVAVVKTDGTAVFTAHLETRNKEIPKLMKKRKNSRRARRTNGRRCRRQRRAKANGTISKKCVKQDTAQNGSVSKRAKKIGVIKRHLPGCEKEVLCIGIKNKEAKFSNRVRPEGWLTPTANQLLQTHINLVKKIQKFLPISDVVLEVNKFAFMQLNNPNIQKWQYQQGPLYQKANLEEAVSEMQEHHCLFCKKPIAHYHHVVPQSENGSDTIGNIVGLCTKHHDLVHKDTEWQKKLAKKKTGLNKKYGALSVLNQIIPALTKELSSLFPKHFFATNGKSTYDYRAAHGVSKDHWLDAYCIACSVLADDVCDNNINSHVPYELKQFRRHDRRALHKENMSRVYTLNGKSVATNRHKATEQTTDSLEEFRQCQPDDVCKLKVKEHYPEYRNPKRNFPGCVFLVGKHTHVMQGTSGSHNGKADGYYDTNGNSYSSGECKFVAKNEGIVFA

SEQ ID NO: 4217 - protein, 517 aa, unidentified
  REGION 1..517: note = Human gut metagenome
MVYVLDMEGKPLMPTTRHGWVRRALKSGRAKAVQTLPFTIRLQYSLDDSALQDITLGIDPGRTNIGVAAVREDGTCLYAAHCETRNRQVRKQMDDRRMHRQASRRGERLRRKRRAKRNGTLKQVTFSMTAMGPRPNINNRGEFFRMLPGCKEVSVYKDIRNTEARFQNRARPEGWLSPTAGHLLRTHLNLVRKIQRILPVSRVSLELNRFSFMEMEAGGKLPHWAYQCGPLYGKGGVQDAISEMQDGKCLLCGKSPIDHCHHLTQRAWGGTDRLANLVGLCSGCHKKIHTDMAASRKLEAKAGRRNKGFRALSTLNQIIPSLADSLEGMFGNRFYIVNGWDTKQFREDHGIEKTHEQDAYCIACSTMPGVRNVSPVVATFQVRQYRRHDRALVKRQTERCYYLGKTKVAVNRRKRMDQKTDSLEDWYQDMRTEYGDKTADGMRSRLKVKKSQRSYNNPGRLLPGAKFHYGGKTYVMESQMTNGQYYRAVGQGKKNFPAAKSRILCRNQGLVTVGVSY

SEQ ID NO: 4218 - protein, 419 aa, unidentified
  REGION 1..419: note = Human gut metagenome
MVYVISQDSKPLMPCSNPIARLLLKQGKAKVKKREPFTIKLIYETTDYTQDLTLGVDTGSGTIGTAVSKDNGDIVYMSEVVVRNDITDKMTQRAKYRRNRRNRKTRYRKARWLNRSNSIKKDRFSPTMQSKLHSHVREIEYIQSILPITEMVFETGQFDMHLMKNPSLANPKVRPWGYQKGTNYGFENTKAMVLNRDNYTCQCCKGKHKDSKLEVHHIVFRSQGGSDEESNLITLCHTCHKDLHSGKINLKLSGKVKGNLKYATQMNSIRKQLFRLYPNAIETFGYVTKANRLHLGVDKEHYYDACTIATQGNAFNVKSNLYKKKCVSDGDFQKTKGICSEQPIVTDKICGFRKFDKVRYFGKDYFIKGRMSAGYAILMDIDGNKIDFSTMPRGYKTPKLSNCKRITARSTVMTQVKVV

SEQ ID NO: 4219 - protein, 456 aa, unidentified
  REGION 1..456: note = Human gut metagenome
MNTCVCVLSNNGERLMPTFRLGKVRHLLKDGKAKIVKHHPFTIQLLYNSKTNIQPIEICEDVGYNYIGISVKSESYEYVSAQYDTLQDEKEHHDDCRKMRRARRNRLRYRKPRFDNRKRSEGWLAPSLEHKKQLNISLVERYVSVIPITHATVEVGSFDTMLLQAIQKGETKPEGADYQEGPRYNLATLREAVFYRDNYTCQVCGRKITDGAILHMHHMFYWKGRHGYKLDELVTACEKCHTPANHQKGGKLFGFGEDKEFADLSGAAFMNAVRWQIVNALHTTYSKEFVTITYGAMTKEKRIALQLEKSHNNDAYAMGDFHPVHRCGFRHYQKRRRNNRVLEKFYDATYIDARTGNKAKGKELFNGRISRNHKKDSENLHKYRSEKVSKGRRSIRKRRYAIQPYDTVRLKGKTYITSGCHNKGTRLLIPVNGKSKSVTISKVQVVCHAGPWIQII

SEQ ID NO: 4220 - protein, 421 aa, unidentified
  REGION 1..421: note = Human gut metagenome
MVYVISISGRPLMPTAHCGKVKHLLKDGKAKVVHREPFTIQLLYETTEYTQTTTLGVDTGSGTFGAAVVTDDSHKVLYMSEVEVRNDISKKMKQRSKYRRNRRYRKTRYRKARFDNRKNSIKDNRFSPTMQSKINAHEREIKFIKSILPVTHLVLETGTFDVALMNNPTLANPKIARWGYQKGPNYGFANTKAMVKARDGYTCAICKGKHKDRRLDVHHIIFRSQGGSDEAKNLITLCHTCHKKLHDGEIIYSGKGKRKGSLSFATQMNSIRKQLLARHPEAIETFGYITSENCQLYGLPKTHCIDAVVIASDVYKPIFATQDVFYKRCIAKGTYQCTKGVRSEKSMPKTKIAGFKQFDKVKYQNNLYFIKGRMSVGYAVLSDIYGTKIDFPHVPKLKEMQRIAARKSIICITAKIDLKVS

SEQ ID NO: 4221 - protein, 419 aa, Bacillus sp.
LFVYMINKHGKPLMPCSSRKARLLLKQKKAKVVRRTPFTIQLLYGSSGYKQPVSLGVDMGTRHVGISATTEKDVLFEAEAQLRTDIVDLLAIRRQFRRSRRNRKTRYRETRFLNRRKPEGWLPPSIQHKINSHIKLIDLVHNILPVTSVTIEVATFDTQKLKNPNIQGVEYQQGEQMGFWNVREYVLYRDNHTCQYCKGKKKDPVLQVHHIESRKTGGDSPDNLITLCKTCHHEIHEKGLEHILQRKRPPMRDASQMTAIRWAMLSRIREKYSHANITYGYITKCIRIANGLPKSHMVDARCISGNPLAKPSGTVYLLKFVRKNNRQLHKATILKGGKRKSNKAPRFVKGFQLFDKVVYEGKECFIFGRRSSGYFDLRLLDGTKVHASASWKKLKRVEYASTLLIERRKGDSSRTFALA

SEQ ID NO: 4222 - protein, 415 aa, Bacillus sp.; identical to SEQ ID NO: 2431

SEQ ID NO: 4223 - protein, 441 aa, Ktedonobacter sp.
MSNVFVLDTMKRPLTPVHPGRARLLLKASKAAIYRTSPFTIILKREVEHPAPAPLRLKIDPGAHTTGLALVDDAGGDVVWAAELTHRGAAIKKALDTRRTVRRGRRSRKTRYRAPRFANRRRRAGWLPPSLVSRVENILTWVTRISRIAHVTALSQELVRFDLQKMEYPDISGIEYQQGTLFGYEVREYCLEKWGRACAYCGSTGVPLQLEHIVARAKGGSQRVSNLTLACEACNRKKGTQDIRVFLAHDPVRLERILRQAKTPLTAAAAVNVTRWELFERLKATGLPVETGSGGLTKYNRTTRALPKTHWLDAAVVGASTPERLRTADVVPLLVQATGRGHRRLCNVNALGFPVSHRKRHKRYFGYQMGDLVRAVVPERFACWGTHVGRVAVKASGYFTITTAHGKVTDVPHRFCWLIGRSTGYAYQVGTRHAAPTPTSP

SEQ ID NO: 4224 - protein, 443 aa, Bacillus sp.
MVEENMTCFMQRKGENPMVFVLDTNKRPLAPCHEAVARKLLKQGKAAIYRRFPFTIILKKSVDESEIKATYRLKIDYGSRHTGLAILRGQEVVWLGQLDHRTDIKERIDKRRAFRRARRNRKTRYRKPRFLNRRRKDGWLPSSLESRVQNIQTWVNRLKKLCPIGYISYENAKFDTQLMRNPEINGVEYQQGTLQGYEVREYLLEKFGRKCCYCGKENVPLEVEHIIPKSRGGTDRVDNLCLACHDCNQRKGSKTAEEFGYPHIQKQVKESLKDASAINSTRWKAYEVLKQTGLDVECGTGARTKMNRIRLDLPKTHYFDACCVGESTTNHLYFKTKEVLFIKAKGRGSRSRTNLDRYGFPRGYLARQKFFFGFQTGDMVKAVVPRGKYQGVWFGEVACRKTGSFDIKGKDGKRIAQGINYRYVQVIQRFDGYAYGKGVAELA

SEQ ID NO: 4225 - protein, 420 aa, unidentified
  REGION 1..420: note = Human gut metagenome
MQYVYVLNKHGEPLMPCSPRKARLLLKQKKACVIKRTPFTVKLLYGSTGYKQPVTLGVDAGSKHIGISATTEKHELYREEATPRNDVVDLLSARRAFRRSRRNRKTRYRAPRFDNRVHSKHKGWLAPSVEVKIQEHITLVEHVCRILPVTLVRVETAEFDTQRLKAMLEGKPLPVGTDYQLGEMYDEYNVRQYVLKRDNYTCQCCGAHSTKTKGVKLHVHHIETRRTGGNAPNNLITLCTACHKALHAGKVTLDGKKRGKPLKDAAFMGIMRKTLIERLRKELKIPVQGTYGYITKYLREKNGIPKSHTNDARCISKNPLAIPCDTCYYTKAVRHHNRQLHRATILKGGIRKANQAPYIVKGYRLWDKVAYNGTECFITGRRTSGYFALKELDGTVVSNSISYKKMRLLEAATNYIIERK

SEQ ID NO: 4226 - protein, 425 aa, unidentified
  REGION 1..425: note = Microbial mat metagenome
MSNSVLVIDANKQPLSPCHPSVARKLLNQGRAWVYRRYPFTIIITKTVENPNPEPIELKLDPGSKTTGIALVQGNKLLWGAELTHRGQTIKSSLESRRLLRRNRRNRHTRYRQARFLNRTRHKGWLAPSLQHRVETTLTWVNKLIKFVPIKGIYQELVRFDLQQLENPEISGVEYQQGELVGYELREYLLNKWERKCAYCGIENVPLQVEHIHPKAKGGSNRISNLCLACEKCNIKKGTQSIEQFLAKKPDVLKRIRSQAQRPLKDATAVNSTRWTLFNRLKETGLPVSTGSGGLTKFNRTRLNLPKTHWLDAACVGQVESLLVLTNKPLLIKATGHGTRQMCRTDKFGFPSRYVPMLKCVKGFQTGDIVRAIVTSGKKIGTYVGRVAVRTTGSFNVSTASGLIQGINQKYCSLIHRKDGYLYAT

SEQ ID NO: 4227 - protein, 435 aa, unidentified
  REGION 1..435: note = Human gut metagenome
LDKKHRPLMPCRPARARRLLRAGRARVVKRFPFVIRLVDRTVEQSEVQPVLIKLDPGSRETGAAVVRDDEKKRHHALAFFVIKHRGGAIRDALKARSAFRRRRRSQNFRCRSPRFLNRVKPKGWLPPSLRHRVETTLSFVRRMCRYLPVSGIATELVKFDSQKLQNPEVSGVKYQQGTLFEYEVREYLLEKFGRKCVYCGAEGVPLNIDHVVPRAKGGSNRVSNLVLACVSCNQKKGARSLEDFLKGKPEVLARVRRELKTPLRDAAAVNATRWVLFNELKATGLPVETGSGALTKLNRHAFGVEKEHWLDALCVGRLNGVVTRKGLNVLEIRCMGRGSRQRTRLTKYGFPRGYLMRQKCVHGFATGDMVEANVPKGKKAGLWRGRVAVRVSGSFNIQTPKGVIQGVGWKHCRLISHNDGYGYAWLGHAPHSSPA

SEQ ID NO: 4228 - protein, 408 aa, Bacillus sp.
MFVYIVNKQGEPLMPCSPRKAKILLKEKKAKVVKQTPFTLQLLFGSSGYKQPISLGVDAGTKYVGLSATTEKQVLLEGQSQLRNDIKELLATRLQFRRARRSRTTRYRKPRFLNRKRKEGWLAPSVQNKVDAHIKLVKLIYSILPVTKLTVEVAQFDTQLLKNPSIEGEQYQQGDQMGFWNVREYIFYRDGHTCQWCKGKKKEKILNVHHMESRKTGGDSPDNLITLCESCHNDLHQKGLEHLFKRKSKPLRDASQMTVMRWFIYNQIKEKYHDAQFTYGYITKHTRIAHGLAKEHSVDARCISGNPLANPTETVVQWKAVRKNNRQLHKATISKGGKRKNNKAPRFVKGFQLFDKVRYNGIECFIFGRRRSGYFDLRYLDGTKVHASANCKQLHLIEYANTLLCERR

SEQ ID NO: 4229 - protein, 355 aa, unidentified
  REGION 1..355: note = Human gut metagenome
LSASTEKRELYREEFTPRNDVVDLLSTRRQNRRSRRNRKTRYRAPRFDNRVHSKHKGWLAPSVEVKIQEHITVIKRICRILPITLVRVETAEFDTQRLKAMLKGKPLPVGTDYQLGEMYDEYNVRQYVLKRDNYTCQCCGAHPTEKKPVRLHVHHLESRHVGGNTPNNLITLCVACHKALHEGKITLDKGKKRGKPLRDAAFMGIMRNTLLARLKDELNIPVKQTYGYITKLLREKNKIPKSHVNDARCIAKTPNAKPCDTMLYTRALRHHNRQIHKAKILNGGIRKKNQAPYLVKGFRLWDKVRYNGEECFITGRRSSGYFALKKYDGTVISNSASYKKLMLLEAATNYITERS

SEQ ID NO: 4230 - protein, 456 aa, unidentified; identical to SEQ ID NO: 3495
  REGION 1..456: note = Human gut metagenome

SEQ ID NO: 4231 - protein, 441 aa, Sulfobacillus sp.
VLRARQAVPTLAKDNALRKEIDVMLVYVLNQYGKPLMPCAPRKARLLLKAGKAQVVRRTPFTIQLLYGSSGYQQAVSLGVDAGTMYIGLSATTEKKVLFEAEVMLRTDIQELLSTRREFRRARRHRKTRYRKPRFLNRQKPERWLAPSVQNKVDTHAKVIQRVLSILPITNITVEVAQFDIQKIKNPDIAGTEYQQGEQMGFWNVREYVLFRDKHTCQHCKGKSGDKILNVHHIESRKTGGDAPGNLITLCDACHVKIHREGLTHLFQRQQKSFRDASQMTVMRWFIYRGIQKVFPHAEVTYGYITKNTRIQNGLEKSHLVDARCISGNPTATSLAGTYLIKQVRGQNRQLHKATILKGGVRKANKSPSFVFGFQLFDKVRYNGQECFVFGRRLRGAFDLRLLDGTKITSGASHNKLTLLERASTLLIQLEKGGKAASSPA

SEQ ID NO: 4232 - protein, 462 aa, unidentified
  REGION 1..462: note = Human metagenome
LAKALKGVVYTRLPHKINQFKRKDFVKRMTTQKVIQVCVLDQNNIPLMPTQRLGKVYRLLKTKKAHIVNYEPFTIKLDYELKTHIIQPLTLGVDSGAIHSGYSLANEHREYYNAEIMARDNISKNISDKRMYRRNRRSRKTRYRKPRFNNRKNKGKGWIPPSLEQKVYVQVNEIEHLHKYFPINNIIIEVAEFDIQKIKNPDISGKEYQQGTLQGYNIRNYLLEKYHHKCFYCNKEVSAFEVEHMIPRARNGSNRIDNLTLSCHNCNQKKGTLTAEEFIRQTLTPQKAAQKLRQIPKTKQLLKYMAHMNATRWVLYNTIKETYNSVSLTYGYITKHNRINAGLPKAHHIDAKCITGFSTVPSFGVTVVKTKMRRHNRQLHRATFSKGHIRKAATLPRFVHGFQLYDIVMFNKHHYYIQSRRSSGSFRLVSLEGLKDENRNYKKITFLTHTNAYLTNYYVNGK

SEQ ID NO: 4233 - protein, 413 aa, unidentified; identical to SEQ ID NO: 2636
  REGION 1..413: note = Human gut metagenome

SEQ ID NO: 4234 - protein, 423 aa, Microcoleus sp.; identical to SEQ ID NO: 3992

SEQ ID NO: 4235 - protein, 421 aa, unidentified
  REGION 1..421: note = Human gut metagenome
MVYVLDITGQPLMPTDRHGKVKHLLKDGKAKVVKRCPFTIQLLYTTTTYTQEITLGVDAGSKVIGLSASTPRKELYSSEVTLRNDIVKLLSLRREYRRSRRNRTTRYRAARFNNRVHSKNKGWLAPSIENKINTHIKVVADIHKILPISKIVVETASFDIQKIKNPNISGEEYQQGEQLDFWNVRQYVLFRDNYTCQCCKGKSKDNRLAVHHIESRQTGGNAPNNLITLCITCHEKYHKGKIKLPDTIKRDKIFKDAVFMGIMRWAFYERLKNIYPNIRMTYGYITKNTRIQHNLPKTHYTDALCISGNPLAKPLEVLYIQKAIRTRNRQIHKATISKGGIRKLNQAPKYVFGFQLYDKVLYKGKECFIFGRRSSGSFDIRTLDGTKISPGVSHKKLKLLEKRKTILTERVFKNQEGGKQG

SEQ ID NO: 4236 - protein, 373 aa, Lyngbya sp.; identical to SEQ ID NO: 3006

SEQ ID NO: 4237 - protein, 427 aa, Nitrosococcus sp.
VNSVFILDTDKTPLMPCRPSRARRLLREGKAAVYRMQPFTIILKYRVDPSPQPVGFKVDPGSKTTGLALVGNFPQQGRVVLWGANLEHRGQSVRDRLEKRRLLRRGRRGRKTRYRAPRFLNRTRPKGWLAPSLRSRVENVSTWFNRLLDRAPISECHIETVRFDMQKIQNPEINGVEYQQGELQGYEVREYLLEKWGRKCAYCGKNSAPREVEHIVPRSRGGSHRVSNLTLACTPCNQKKNSKTATEFGYPQIQSKANRPLKDAAAVNATRYAIGGVIQSIGLPTSFWRGGRTKKNRISQGYAKDHWIDAACVGESGEQVTITKGHRALHIKATGRGTRQVVLTDKYGFPRGKAGRCKRVKGFQTGDLVRLSQPRGKYEGIHTGILASIRANGTFDIKAKAGKISANWKHFKLIQRGDGYDYGLSAV

SEQ ID NO: 4238 - protein, 421 aa, unidentified
  REGION 1..421: note = Human gut metagenome
MMVYVLSHTGQPLMPTEDYRKVRILLKQHKAKVLQRTPFTIKLLHYTHEYKQPVSLGVDAGSKVIGLSATTEQKELFASEVILRDDIVKLLSVRREFRRARRNRKTRYRAPRFNNRVHSKNKGWLAPSIENKISVHLKTVRNVCRILPITNIVAEVAAFDTQMLRAKELSLPLPEGVDYQQGEQLYAYNVREYVLFRDNHTCQHCKGKSKDPVLQVHHIESREVGGNAPNNLIALCKTCHAKYHAGLIKDLKVKRGASFRDAAFMGIMRWAFYDRLKTIYPNVSMTFGYITKHTRIEHNLEKKHCVDARCISGHPDALPTENFYLQKAVRKKNRQLHKATINKGGIRKSNQSPKYVYGFQLFDKVLYDNKECFIFGRRASGYFDIRMLDGTKLSASVSYKKLKLLERRKTILMQQVEDFAA

SEQ ID NO: 4239 - protein, 442 aa, unidentified; identical to SEQ ID NO: 2903
  REGION 1..442: note = Human gut metagenome

SEQ ID NO: 4240 - protein, 443 aa, Caldicellulosiruptor sp.; identical to SEQ ID NO: 2385

SEQ ID NO: 4241 - protein, 429 aa, Parasutterella sp.
LRVLVWNKRGKPLMPCSPAKARLLLKEKKAIVVRRTPFTIQLTIATGESKQPVSLDVDAGYKHVGLSASTEKAELYASEVELRQDITDLLSARRALRESRRNRKTRYRAPRFDNRIRTKRKGWLAPSVENRINAHLSRIESVLRLLPVTKITVETASFDTQLLKNPDISGKEYQEGEQLGFWNIREYVLCRDRHVCQHCYGRSKDPVLNVHHLESRRTGGDSPGNLITLCETCHKALHRGEITLKAKRGQSFRAEAFMGIMRSEVPNRLKASHPELEVNNTYGYRTKHARIANDIAKSHCADAFCIAGNLGAERLCEFFFQKQTRRNNRQIHKLSILKGGIRKRNQAPFEVKGFRLFDKVACQGEEGFIFGRRSSGFFDVRKLDGTRISAGISCKKLHLLEKRRTYLTEIRKEEALPPLPEGRGLRAKM

SEQ ID NO: 4242 - protein, 441 aa, Marinobacter sp.
MSVFVLDRQKKPLMPCSEKRARLLLTRKRAVVVRVYPFTIRLKDRTGGAVQKAVFKIDPGSKETGLAVSRVSAQGEHVLCLIELIHRGRQISKALDQRRGFRSRRRGKLRHRAPRFNNRTKPKGWLAPSLQHRVDTTTSVIKRLCALVPVTSISQELVRFDLQQMENPEISGVEYQQGTLLGYEVREYLLEKWGRECAYCTVTDTPLEIEHIVSKANGGSNRISNLTIACHDCNQEKGSQTLAEFFQTSSRLRDKQPRMDNVLIQCKRPLRDAAAVNSTRWALFQSLKNTELPVNVGTGGQTKFNRQRLGIPKTHALDAACVGVVEQVFDWEKPTLRIKATGRGSYKRTRLTKHGFPRGYLMREKSVHGFQTGDMIRAIVPIGKKEGTWLGRAAIRKTGNFNIQISDGAVQGIHHRHCHLMQRADGYGYHLQPTPQKGEGK

SEQ ID NO: 4243 - protein, 489 aa, unidentified
  REGION 1..489: note = Human gut metagenome
MTMVYVQNKDGKPLMPTTRYCYVRLLLKEKKARVVCTTPFTIQLNYDTPDVTQDLILGIDPGRTNIGVAVVKEDGSCVFSAHLETRNKEVPLLMKKRAAFRRQHRTQDRRRKRQRRAIAAGTTVESNTIERLLPGYEKPVVCHYIRNKEARFNNRSRPVGWLTPTANHLLQTHINLIAKIAKFLPITKVVVELNRFAFMAMDNPNIHRWEYQQGPLYGLGSVKDAVYAQQDGHCLFCKKPIDHYHHVVPRHKGGSETLANRCGLCERHHALVHKDKAWADKLVTRKEGMNKKYHALSVLNQIIPFLMEYLGSETLYDVYAIDGRSIKGFRIAKNVPKEHYTDAYCIACSTLDTDNKVSAPVEPFELKQFRRHDRQACIRQMVDRKYLLHGKVVAANRHKAFEQKSDSLQEFREAYSDVAVSQLTVKPHPPQYKDMSRIMPGAVMDFDGIVGVMQSSIVGQFYKSTKGHKATPRRCVLLAQNAGMVFLPA

SEQ ID NO: 4244 - protein, 432 aa, Moorena sp.
MEGLMSKIFLIDTAKRPLNPIHPAQARQMLRNGKAAIFRRFPFTLILKTEQPETLVDKLRIKIDPGAKTTGLALINDLSGEVIFAAELQHRGFEIKHLLTSRSQLRRSRRSRKTRYRARRYKNRSRKEGWLAPSLQSRVDNILTWVSRLRKFAEIGAISQELVKFDTQIMQNPEITGKEYQQGTLAGYETREYLLEKWGRKCAYCDTENVPLQVEHICPLAKGGSNRISNLTLSCEKCNVKKGTKYIKDFLKKDPQRLDAILKQVKKPLADTAAVNTTKYALLKSLEATGLPVETGSGGLTKFNRTQQGLKKTHWIDAACVGQSTPRLIAKNIKPLLIKAEGNGNRKLCITDKFGFPKKHRPRKKLHFGFRTGDIVKAVVTKGKNVGSYIGRVAIRSNGSFDISIKDRHKKQGVSYKYCQTVHRKDGYSYLF

SEQ ID NO: 4245 - protein, 211 aa, unidentified
  REGION 1..211: note = metagenome
TRRSSDLYGGNAPDNHGTLCDDCHKKFHLGIITDVKLKTRRRQSTRDAAFMGIMRKTLMWRLRTELFIPVAETKGYITKATREKLLVLPKSHTRDALAIAQGRHGFGIKEYAYVEPANHIYTVRPVRHHNRQLHKASILKGGIRKRNQASKYIFGFRLYDKVLYQGKACFVWGRRTSGTFLLRTIDGIKVKDGVSYRNLTLLERSSNYLIA

SEQ ID NO: 4246 - protein, 477 aa, unidentified; identical to SEQ ID NO: 3241
  REGION 1..477: note = Human gut metagenome

SEQ ID NO: 4247 - protein, 424 aa, unidentified
  REGION 1..424: note = Human gut metagenome
MRVFVFNMRGRPLMPCSQRKARLLLRENKAMIYKYHPFTIQLTYTTGETKQDCHIGIDTGSKYIGAAVRSEDKVFWKGEIELRQDIRSNLDTKRIYRRSRRNRKTRYRKPRFLNRKRRDEWLPPSLQSRVNHTFHWIDTLSSLVPNPILHIEVGKFDVAKMINPEIHGVDYQHGQTYGFFDERYFVFARDNYTCQCCGKSKNKILNTHHIIYRSNGGTNRVDNLITVCTDCHTSQNHRKGGIFYQWQEQHKKVKQYKEPPFMNTLRKRIFVAYPDAEITYGSETTPKRKAMKLDKTHYNDAIVISGINEIKENPEEWLLIKQFRKKKRSLHEATARKGRKKPNRNQTRNSKNTPYYKGFYLNDKVSVFGKSGYITGFTSNAAYIKDENNDYITLPNKTYKQVSINKMKLECHNNNWQYIIKNAV

SEQ ID NO: 4248 - protein, 411 aa, unidentified; identical to SEQ ID NO: 2663
  REGION 1..411: note = Human gut metagenome

SEQ ID NO: 4249 - protein, 443 aa, Caldicellulosiruptor sp.; identical to SEQ ID NO: 2385

SEQ ID NO: 4250 - protein, 427 aa, Parasutterella sp.
LRVFLLNKRGKPLMPCSPAKARLLLKEKKAIVVRRTPFTIQLTIATGESKQPVSLGVDAGYKHVGLSASTEKAELYASEVELRPDVSDLLSARRTLRQSRRNRKTRYRAPRFDNRIRTKRKGWLAPSVENRINAHLSRIGAILRLLPVTKITVETASFDTQLLKNPDISGKEYQEGEQLGFWNVREYVLFRDGHACQHCHGRSKDPVLNVHHLESRRTGGDSPGNLLTLCETCHKALHRREIKLKTKCGQSFRAEAFMGIMRWEVLNRLKASHPELEVHNTYGYRTKHTRIVNGIDKSHCADAFCIAGNLGAKRLGEFFFQKQTRRNNRQIHKLSILKHGLRKRNQAPFEVKGFRLFDKVVCQGEEGFIFGRRSSGSFDVRKLDGTRISAGISYKKLRLLEKRRTYLKEIRKEEALPPLPEGRSLRA

SEQ ID NO: 4251 - protein, 552 aa, Streptomyces sp.
MTTFPAGEQTHQAVLPQQPALEPVRADTPGSRDETAHGHPATARGTGREHGRGETDGTGTKARRRHAKRAATVAQAAENGSGDAPTQPPEYAGGSGDSRVFVLSRDGHPLMPCHPARARELLRKGRAVVARQTPFAIRLKDRTRAESAVDGLQLRIDPGSKGTGLALTDEKKETGTDGRVVTVRRGLFSIELQHRGDQIHHTMGQRAGYRHRRRSANCRYRAPRSNNRGVAQGWLPPSLRHRVDTTFSLAKRLCRYAPVTEIHLERTAFDTHSMSAGRRLRGTEYSQGTLAGSTTRSYLHARWNSACAYCDATGVPLNIDHVRPRSQGGSNRITNLVLACIPCNKAKDSRSVESFLAHRPDRLAKILEQLRTPLRDAAAMNSTQSRLAEALETLGRPVHAWPGHLTMANRVRTGLGKTHALDALSVGHLDHESGDAIVRFPERVLVAKATGRGSYARTTPDRYGFPRLRRSRTKQHFGYVTGDLVRAVVPSGKWAGTWTGRISVRARGQHSLTTPQGRLNVSHWNLRLLQRGDGYGYSTQREAPPQASPKNS

SEQ ID NO: 4252 - protein, 414 aa, unidentified
  REGION 1..414: note = Human gut metagenome
MVYVLNMDGQPLMPTNRHGKVRHLLKDGMAEVVKRCPFTIKLLYRSTNYTQPVTLGVDAGSKHIGLSATTEDKELFASDVELRNDIVDLISTRRQNRRGRRSRKTRYRKPRFLNRTGNRKSGWVAPSIENKIQTHLTVVDKVCRMLPVSKIVVETASFDIQKIKNPDICGTEYQQGEQLNFWNVREYVLFRDGHKCQCCKGKSKDKILNVHHIESRKTGGDAPNNLITLCETCHTGYHKGTVKLPKTIHRGMVFRDAAFMGIMRWAFYNELKRRYPNVSHTYGYITKNIRIENNLPKYHYIDARCISGHPLAVPSGEVFYQKKVRCHNRQIHKNTIGKGGYRKRNQAEYIVKGFRLFDKVSYKGQECFIFGRRSSGSFDIRLLDGTKISAGVTYKKLRLLETRGSFLIERRLVG

SEQ ID NO: 4253 - protein, 624 aa, Streptomyces sp.
MAPISRPRVSSASALRAAHPPNPRRPTASSADHPRIRSASRFQCVIVPSASSAHSAASIPSSNAANRSAPAPGTEAVSLAAPVKALIPVPPMLRPFNWNVTQSTSPSSKSLRSGNGRGTGHDSRTTGARDPDHSPRSRGQDHRARSLGCSHGLVRSLAPRRQPDSRVERSGSHRVFVLSRDGMPLMPCHPARARALLARGRAVVARHTPFAIRLKDRRRAEAEVAGVELRIDPGSRGTGLALTETRTQASPGGSVATVRRGLVAIELRHRGPQIHQAMVRRAGYRRRRRSAGLRYRPPRFANRARRPGWLAPSLRHRVDSVRSVVARLRRYAPVVEIHVEDNSFDIPALSAAEESEALGGQARTRPRTGERCTYCGASGVPLNVDHIRARARGGTDRPANLVLACVPCNEAKAARPVEEFLAHRPEHLAAVLSRLRSPLGDSAAMNATKAQLLQLLEGTGLPVRCWPAALTSANRTAAGLAKSHTLDALCVGPLRSGAGDTIVRVVASVYVFASTGRGSYARTTPDRYGFPRLLRPRRKRHQGFASGDLVRATVPKGRWTGVWTGRVSVRSTGRHSVATPLGRFNASHENLRLLQRADGFAYAWRGEAEQNSSNKSVEPPERSS

SEQ ID NO: 4254 - protein, 448 aa, Clostridium sp.
MVAVLSKTGIRLMPTSSYRARKLLARKKAVICGYRPFTIRLTERETGDVQPVELAVDTGYFHVGNSLKTAKHELAAVEIRTLMDEKQRYDDRRRYRRMRRSRLRYRAQRFDNRRRPEGWLAPSIQGRMEQNLAFLRRVLSVVPVTRIVMEMGQFDTQVLKAVEEGRPIPEGTDYQQGERYGIATLREAVFTRDNYTCQCCEKTVHDGVILHVHHIVYRSQGGTNRMGNLITVCERCHTPKNHKPGGKLYKWKPTVKSFKGATFMTAVRWIMYRSVKDSFPDVDVRITYGAKTKLQRRTLDITKSHVNDAYVMGDFHPKHRVRPVILQKKRRNNRILEKFYDAKYIDTRDGSKKTGQQLFNGRTNRNHNTDTGNLRLYRGKKLSKGKRAIRTTRYRIQPHDILVYQGQEIEASGCHCKGTRVMTTAKKSLPIGKVRVRRYSGGYYAVAE

SEQ ID NO: 4255 - protein, 424 aa, Lentibacillus sp.
MIVFVINKHGKPLMPCKPRKARLLLKEKKAKIVSRNPFGIQLLYETNSYTQEVKIGIDLGAKYVGIAITSEDKVLAKGEVELRQDVKSAIDTRRTYRRSRRNRKTRYRKPRFQNRTRGKRWLPPSIQSRVENTFFWIDKFCDLVPNPKLTMEVSKFDVQKMIDPAIQGVAYQEGQTYGYHDVRYFVLARDHYTCQVCKKKGKILNTHHIIYRTHGGSNRADNLITVCTDCHTHDNHQRGNILWKWMVEGKRLPQYKEGPFMNIVRKRVFTKYPHARITYGSVTTPKRKALELEKTHANDAIAISGISSIKENAKTTFKIKQFRKKKRSLHEATARKGRKSKNITSKRNEKNKKYLKGFYLNDKVRLYEKTGYITGFTGTSGAYVKSIDGDYITMPNKSYKQVSLKKLTQISHHNNWQFEYKAFG

SEQ ID NO: 4256 - protein, 548 aa, Thermanaeromonas sp.
MTSLGAGPEGQGDEGTTLAAGPGPTPGCSSSSGPWKPRLQTAIGVRAKRAGASAGCQHWRGGCRGESAPARHQPRKGFPRKGEKMGVRSMIFVLDRKKKPLMPCSEKRARELLREGRAAVHRLVPFVIRLKDRVRGESSFQPLKLKIDPGYEVTGISVVRVAEGKEVVIFFIEVHHRTDISDALKARRDYRRNRRSRKTRYRAPRFDNRKRRRGWLPPSVEARIQEVMSVVEKLCRWLPIGEIVVESAKFDTQKLQNPEISGVEYQRGTLFGYEVREYLLEKWGRKCAYCGKEGVPLEIEHVIPESRGGTNRVSNLTLACRECNEAKDDRLPQEWLEELKKSERSIDRKRAENLEKVMGQLKEPLKAAAYMNATRYALVERLKALNLPISTATAARTKYNRARFNLPKTHYYDACCVGEIPGGLEIATEYVLQFRAVGRGSRQMSNVDDSGFSRGHRMKKKVYFGFMTGDLVLAEIPGGKYAGRHVGFVAVRASGYFDLKNFSGDRVCQGISWKHFRLLQRFDGWRYEKFKVAALSSPYLKAGASSAA

SEQ ID NO: 4257 - protein, 443 aa, unidentified
  REGION 1..443: note = Human gut metagenome
LTKDENRPSGRTTGLRAEQAEPAGIRKGDTLKVFVLNMRGKPLMPCSPAKARHMLKAGKAFVVRRTPFTIKLTIATGETKQDVTLGVDAGARHVGISATTEKEEVFASEVALRQDITGLLADRLAFRRARRNRKTRYRAPRFNNRVRSKHKGWLAPSVENRIQAHISRIEAVCRLLPVTKIVIETASFDIQKIRNPEVEGTGYQQGDQLGFWNVREYVLFRDGHICQHCRGRSKDPILNVHHLESRKTGGDAPNNLITLCETCHKAYHAGKIKLKVKRGQSFRAEAFMGIMRWTLLDRVRKTHPKLPVENTYGYLTKHKRIALGLPKTHCADAFCIAGNLKALRRGDFLFQQQTRKHNRQIHKCSILKGGVRKLNQAPFLVKGFRLFDKVRIGGQIGFVFGRRVRGTFNIRRLDKTVIGTDINCKKLSLLETRKTFLTELRKE

SEQ ID NO: 4258 - protein, 449 aa, Allochromatium sp.
MAVFVLDKQKHPLMPCTEKRARLLLERGRAVVVRLAPFTLRLKDRIGGAVQPLRLKLDPGSRVTGLAIVRESETCDPETGAIERLEHGLWFGELAHRGQAIREALTLRRHYRRARRSRKTRYRAPRFLNRTRREGWLPPSLQHRLDTTLNWVARLRRLAPITALSQELVRFDTQALQNPEISGVEYQQGELAGYEVREYLLETWHRTCAYCGATNVPLEIEHIVPRARGGSDRVSNLTLACRPCNQRKGNRSIEDFLKRQPALLHRIQAQAKAPLQDAAAVNATRWALLNALQTTGLAVETGSGGRTKFNRTRLDIPKTHALDAACVGAVDQVRDWNRPVLAICATGRGAYSRTRTFNNGFPRGYLMRHKRVHGFQTGDWVRAEVPKGKKAGVHVGRVAVRQTGSFNIQAQGGTVQGVSYRHCRVLQRADGYGYAFQPKPDTEKARRAA

SEQ ID NO: 4259 - protein, 421 aa, unidentified
  REGION 1..421: note = Human gut metagenome
MLVYVLSKNGQPLMPTHRCGFVRRLLNSQKAKVVRRCPFTIQLQYDTDCKTQPVTLGIDAGSKHIGVSATTESKVLYEADIELRNDIVDLLATRRQMRRARRSRKTRYRKARFDNRKRNDKWLAPSIQHKVNCHLEAVRFVHKLLPISKIIVEVASFDIQKIKNPLITSTDYQNGELLDWKNVRECVLFRDSHICQCCKGKSKDPVLQVHHIESRKTGGNAPNNLITLCKTCHNGYHHGTVKLPAKIKRGMKFNDATFMGIMRWGFYNQLKSLYPDVSLTYGYITKDIRISNGLAKTHFIDARCISGNPLATSDNTVYFLKKRRRHNRQIHKFNILKGGRKKRNQAAYLVKGYRLFDKVNYNRKEYFIFGRRASGFFDIRTLSGEKVNKGSISCKKLKLLEASKGYLTERRNAFLSPLNSV

SEQ ID NO: 4260 - protein, 406 aa, unidentified; identical to SEQ ID NO: 2752
  REGION 1..406: note = Human gut metagenome

SEQ ID NO: 4261 - protein, 424 aa, Anaerostipes sp.; identical to SEQ ID NO: 3434

SEQ ID NO: 4262 - protein, 355 aa, unidentified
  REGION 1..355: note = Human gut metagenome
MMDGRVGAIRDALKARSAFRRRRRSQNLRCRSPRFLNRVKPKGWLPPSLRHRVETTLSFVRRMCRYLPVSGIATELVKFDSQKLQNPEVSGVEYQQGTLFKYEVREYLLEKFGRKCVYCGAEGVLLNIDHVVPRAKGGSNRVSNLVLACMSCNQKKGARSLEDFLKGKPKVLARVRRELKTLLRDAAAVNATRWVLFNELKATGLPVETGSGALTKLNRHAFGVEKEHWLDALCVGRLNGVVTRKGLNVLEIRCMGRGSRQRTRLTKYGFPRGYLMRQKCVHGFATGDMVEANVPKGKKAGLWRGRVAVRVSGSFNIQTPKGVIQGVGWKHCRLISHNDGYGYAWLGHAPHSSPA

SEQ ID NO: 4263 - protein, 424 aa, Caldicoprobacter sp.
MVYVISKAGKPLMPTERHGKVRRLLKQGLAKVVKREPFTVQLLYDTTTYTQPVTVGLDIGSKTTGVSAVTEKKEIFSAEVELRDDIKGLLLERRQYRRMRRYRKVRYRKPRFLNRARDDGWLAPSLQWKVDAHIRIVDMLGRIMPIERVVVEVAPFDTQKILNPDIEGADYQNGAQKGFWDVREYCLWRAGYRSELSGKRGILEVHHIVPRSEGGTDTPSNLIVLTADEHKGVHEGRIRIPKSKVEKVKMFKDAAHVSTIGWHIVNRLRERYSVEVTYGSTTKAKRLSCGMEKSHRVDAFIIAGGDLQERLREWYLGKFLRRQNRSLHKANPIKGGVRPVNTIKEAYGFRRYDRVEYEGIIGIIAVLRSSGYFAVRSLSGEKIHDSAKHNRLRLVEKAKTLMLERREERIPLHLEEDGVSCARI

SEQ ID NO: 4264 - protein, 414 aa, unidentified
  REGION 1..414: note = Human gut metagenome
MVYVINKQGQALMPTERFGKVRRLLKNSLAHVVCRIPFTIQLDYDTTDYTQPVSLGVDAGSKHIGISATTSEKELYAADVELRNDIVDKLSTRRELRRTRRSRLRYRKARFNNRVSSKRKGWLAPSVENKIQTHLTVVEKINKFLPITNIVVEIASFDIQKINNPIISGSEYQQGEQLDFFNVREYVLFRDNHICQHCKGKSKDKVLNVHHIESRKAGGDSPNNLITLCETCHKAYHRGEFELNVKRGKSFRDSAFMGIMRWSFYDRLKNIYPNVSMTFGYITKNTRITNNLPKDHYVDARCISGNPTAKPLGYYFYQKKVRCQNRQIHKANFLKGGRKKLNQAPFLVKGFRLFDLVEYQKELYYIFGRRSSGSFDIRKLDGTKVNKGSINCKYLRLIATRKSILTEKRMQVNL

SEQ ID NO: 4265 - protein, 423 aa, unidentified; identical to SEQ ID NO: 3538
  REGION 1..423: note = Human gut metagenome

SEQ ID NO: 4266 - protein, 466 aa, Ralstonia sp.; identical to SEQ ID NO: 3625

SEQ ID NO: 4267 - protein, 476 aa, Ferroplasma sp.
MVKNMKEKQKLDWRNTYTPTDAPQVRGNCDHALNREETLSVHGLKTPSNNPDVDLQSGMTGQDLRVPVINMRNEPLMPTTLGKARKLLKGKKAKVAFSNPFTIQLLYATGETKQPVTLGIDAGYKHIGFSALTERKELVSGEAVIRTDMPKLNVEKSMYRKGRRDKLWYRKPRFMNWGNNREGWLAPSIDHKLQTHIRLIEKLKKILPISDIIIEVASFDTQKMKNPEMSGIEYQQGELQGYEIREYLLEKFHRKCVYCGKTNIPLEIEHLTPKSRGGSNTVDNLAISCHECNQKKNNLTAEEFGYPDLRKSALMPLRDAAFMNTVRWKLTQLTGADHTFGYITKRNRISLGLDKSHANDAFVIAGGTNQARTSPFTITQRRRNNRSIQTNRKGFRPSIRRRRYPLQPGDVVEFGESRYDVVGVHSYGNYVIIRNGEKKMNISTKKVKLARYGKGLRFSAQFLHTLPHGVSLGAVR

SEQ ID NO: 4268 - protein, 416 aa, unidentified
  REGION 1..416: note = Human gut metagenome
MVYVLDKNGQPLMPTDRHRKVRLMLQSGQAKVIKRCPFTIQLNYDSGHQTQEISLGIDAGSKHIGVSTTTKIKVLYEADVELRNDIVDLLSSRRELRRGRRNRKTRYRQAKFNNRRRGNGWLAPSIRQKIGTHLTVVENICKILPISRIMVETASFDIQKIKNPDIQGAEYQQGDQLGFWNVREYVLFRDGHTCQCCKGKSKDKILNVHHIESRKTGGNAPNNLITLCETCHTGYHKGTVQLPKAIKRGMRFKDAAFMGIMRWAFYEALKQQYEPVGTPVHNTYGYITKHTRIEHNLPKEHYVDARCISGNPDAFPNGEYYYQKKVRCHNRQMHKLTILKGGIRKQNQATYLVKGYRLFDKVSYQRKEYFVFGRRKSGFFDIRTLSGKQVNKGSLSCKKLKFIATRMYYLIERRAV

SEQ ID NO: 4269 - protein, 430 aa, unidentified
  REGION 1..430: note = Human gut metagenome
MVYVLDISGNPLTPTKRHGKVRHLLETGKAVCVKRCPFTIRLTYQNAGPEPEGLSLGVDCGSKHIGLSVSSEEQEYYSSEVELRQDIPANLSTRREFRRARRHRKTRYRKPRFLNRIASKKKGWLAPSVRQKVESHLNRIDKAVKMLPIREIKVEVAAFDLQKLQADLKGLKRPKGEEYQQGPQLDFWNVREYVLFRDHHECQCCHGKSGDKVLNVHHLRSRKVGGDAPDNLITLCEYCHGQYHKGELELPESTKKPKPLRDAVFMGIMRWTLYSRLKEIYEPQGIKVKLTYGYITKHTRIENGLEEKSHRLDALCIAGHPKAKRCREWFLQKKVRCHNRQLHKATIQKGGVRKANQLPAVIKGFRLYDKVLFQNRECFIWGRRKTGYFTLKTLDGIMICDGVSSKKLTLLEKRKSYLTERRKQELCNSF

SEQ ID NO: 4270 - protein, 413 aa, unidentified; identical to SEQ ID NO: 2636
  REGION 1..413: note = Human gut metagenome

SEQ ID NO: 4271 - protein, 406 aa, unidentified
  REGION 1..406: note = Human gut metagenome
MVYVQDIDGKPMMPTTRHGKVRRLLKDNKAVVVNTCPFTIKLTYKTSDYKQEIVLGVDAGTKHVGLSATTKSKELYSGEVILRNDVVELLSTRRESRRARRNRLRHRKPRFGNRVKSKHHGWVAPSVRHRIDAHIRVIDNVCSILPISRIIIEVAQFDTQKINNPNISGNEYQKGDQLGFWNVREYVLARDGHKCQHCKGKSKDHILNVHHIESRKTGGDSPSNLITLCETCHKEYHKGNIDLKVKRGKSLRDAAVMGIMKWKLYDELKSKYDNVSMTFGYITKYNRIKYGIEKSHTSDAFVISRNFNAKRIERQYLKRLIRRHNRQIHKMKILKGGKKKNNQAPFEVFGFRLFDKVLYNNEINFIYGRRKSGCFDIRDFDGKNSKNVTYKKLKLIRGKRYPIILK

SEQ ID NO: 4272 - protein, 436 aa, Moorena sp.; identical to SEQ ID NO: 3599

SEQ ID NO: 4273 - protein, 291 aa, unidentified
  REGION 1..291: note = Human gut metagenome
EVKIQEHITIIKRICKILPISLVRVETAEFDTQRLKAMLAGKPLPVGTDYQLGEMYDEYNVRQYVLKRDNYTCQCCGAHTTAKKLVKLHVHHLESRKTGGNAPSNLVTLCTTCHKNLHKGKVTLDGKERGKPLRDAAFMGIMRKTLMARLKEELPIPVQGTYGYITKMRREQNDIKKGHTNDARCISKHPLAEPCSVCYRTKAIRHHNRQTHKANFSKGGIRKRSQMPYVVEGYRLWDKVLYKGQECFVSGRRASGSFTLKKLDGTRISKGVTFKKLRLLEPATNYLIERM

SEQ ID NO: 4274 - protein, 468 aa, Moorena sp.
LAVFVLDKVGRPLMPCSEKRARLLLARGRARVHRLMPFAIRLVDRELHSSALQPLRIKLDPGSKATGLALVRDAEHVDTSTGEIHRGAVVLNLFELIHRGRQISEALTARRTMRRHRRSTLRYRAPRFLNRTRPAGWLPPSLQHRVDTTLAWVERLRCWAPIAAVSTELVRFDMQALDNPEVTGIEYQHGTLFGYELREYLLQKWTHKCCYCDAQNVPLNIEHLVPRARGGSKRVSNLAIACVACNVSKGARRLDVFVKDEARLARIIAQALRPLKDASAVNTTRWALVNALRATGVPVETASGGRTKHNRSQLGIPKTHALDAVCVGDVSTVLGWRKPTLQVKCTGRGSYQRTRRNKYGFPVGYLMRAKRVQGFGTGDVVRADVPTGKKAGPYHGRVAVRAKGNFNIQTHDRVVQGVAHRYCRLLQRADGYGYSRMATNKGEAGVGAVMRPAPSLPGPAAEVSRDEG

SEQ ID NO: 4275 - protein, 442 aa, unidentified; identical to SEQ ID NO: 2834
  REGION 1..442: note = Human gut metagenome

SEQ ID NO: 4276 - protein, 529 aa, Burkholderia sp.
LEVAAADKPRVGTKRAATGELTLTLCCTTWSRGAAPQGARHQARKGNAPDVFRRHNKELGLAVCVLDRSGKALMPCSEKRARLLLARGRARVHRVVPFIIRLVDRRAHASRFQPLRIKVDPGSRTTGLALVRDTQLVDATSGEIQRGAAVLNLFELVHRGRQISEALSARRAMRRRRRGNLRYRAPRFLNRTRPAGWLAPFLEHRVATTMAWVNRVMDWTPVAALSSELVRFDMQALENPEIASVEYQQGTLAGYEVREYLLAKWGRRCAYCDQEHVPLQIEHILARASGGTNRISNLTLACACCNAKKAARPIEAFLARDPKRLAVILAQAKRPLKDAAAVNATRWALANALRATGLPVELASGGCTQFNRKQLGLPKTHALDAVCVGKVASVSVWYKPTLAVKCTGRGSYQRTRLDRYGFPRGYLTRSRRVHGFQTGDLVRAEVPTGKKAGRHTGRVAVRATGSFNIQVAGNVVQGIAHRHCRLIQRSDGYGYSRIALLKGDASDGTASLSALSLPAVNDGVSRAAG

SEQ ID NO: 4277 - protein, 304 aa, Moorena sp.
VEVIGRVKEHIKGSSSSLLLYNISRTVLANNNSAQDIPSGRSGKNLRVPVLNMSGKPLMPTSPRKARILLKQGKATVVQRMPFTIQLKYPSGETKQDITLDINNRYSTIGFSAVTEKSELISGELTLRKGISKPLEQKRNYRRVRRNKLLHRKPRLNNRSKPKSWLASGIHHKLNTHLRLIEKLKEVLPITKVIVEVSAFDTQKLQNPEIKDVEYQQEELQGHEVIEYLLEKWKHKCAYCGKDNLPLEIEHIIPKSRGGSDRVSNLTLACHKCNQNKGDKTAAEFGHPEIQKVGPYRKKTGVIL

SEQ ID NO: 4278 - protein, 532 aa, Nocardiopsis sp.
LWLRAAFTSTSRPTREVTRLATFRAGQKTHQAVLPQQPALESESADTPRIGHETGPGPRPTAEPGADHVRGETTRISPDAGGVTPNSVGEKPRERHPSVFVLDKDHTPLQPCHPARARKLLAKDRAVVARHTPFTIRIKDRSVQASEVDGVQVGIDPGPRHTGIAVFTAQGGERRGRYSIQLDHRGAQIRKKLGQRSAYRRRRRSANLRHRAPRFSNRTRPRGWLAPSLEHRVQTTTAWVARIARWAPVTAVHVERVVFDTHVLSARTPLEGVEYQQGTLAGYEVREYLLAEFDRACVYCAATDTPLNIDHVHPRARGGSDRVSNLVLACMPCNRAKSDRPVEEFITDTRTLARILARAKAPLRDAAAVQSTRWALWRALDERLPTRVASGGRTKWNRTRNHLPKSHTLDALAVGKADTLTRTVSRVRVAGCAGRGSYARTRTDKHGFARLRLPRTKGFFGFSTGDLVRAVVPKGKKAGTRTGRVAVRASGSFNITTSQGTVQGINRKYVRLLQRADGYGCTWKGEGVSSRP

SEQ ID NO: 4279 - protein, 449 aa, unidentified
  REGION 1..449: note = Human gut metagenome
MITPEITIKGNSVGRILRNQSKRASLAYPIQAAGSVRIHIVRNIKNRKEKKAKVVKRCPFTIQLLYDSTRYVQEINLGIDAGSKHIGVSATTKEKVLYEADVELRNDIVDLISTRRELRHLRRIRKTRYRKARFNNRVSTKKTGWLAPSVKQKIHTHLTVINNVYKILPIKNLIVETASFNIQKIKNPDISGEEYQQGEQKDFWNVREYVLFRDNHTCQCCKGKSKDKVLNVHHIESRKIGGNAPNNLITLCETCHKGYHNGSVKLPKSIHRGVSFRDAAFMGIMRKTLLSELRKIYPNVKETYGYITKDTRITHNLPKDHYVDARCISGNPDAKPLGYYFYQKKARCHNRQIQKMSILRGGLRKNNQAEYLVKGFRLFDKVKHNSKEYFIFGRRKTGYFDIRNFFGEKVNKGSVSYKKLKFLETRHNMLTERRKAISYPAIKAEGSLA

SEQ ID NO: 4280 - protein, 493 aa, unidentified; identical to SEQ ID NO: 2644
  REGION 1..493: note = Human gut metagenome

SEQ ID NO: 4281 - protein, 461 aa, unidentified
  REGION 1..461: note = metagenome
LKGVGMMSEKKKVNYIYVVDSNGTPLMPTSRLGMVRHWLKTGQARWFGNSRKTIQFVRPVTTNTQELTLGVDAGFHLGLSVVGNNCEYYASESLRKSEKDRITNRRELRRSRRGRLRYRKARFDNRRRKDGWLTPSIQHRLDFTIKEIKRLYTFLPITNLVVEVTPFDNQKLLNPNIKDWQYQKGKMYGFKTIKDYLLARDNYRDALDGKQYPASQLRVHHLVQRKNGGSNQPDNLVLLSDINHNQANHNNGVLAKLRENRQKTIDYRGAYFMSILATRLSNYFDNYTITQGYLTANLRQKYEIEKSHLNDAFIIAGGTDVTLRTNNIYSRQKLRNNNRSLQKFYDAKYIDSRDGKQKAGKGLSSGRTRRSKELNYDNLRQFRKEKVKKGRVSIRRNHYQLRPHDVVLNTRTNRIETVKGVNNKGKAVIFQTGKTCSINRIVSLYHVNGTLERRIGDENRR

SEQ ID NO: 4282 - protein, 359 aa, Bacillus sp.
MVEENMTCFMQRKGEYPMVFVLDTNKCPLAPCHEAVARKLLKQGKAAIYKRYPFTIILKEIVDNFRPKTPYRLKIDHGSKHTGLAILRGQEVVWLGQLDHRTDIKERMDKRRAFRRARRNRKTRYRKPRFLNRRRKDGWLPPSLESRVQNIQTWVNRLKKLCPIGYISYENTKFDTQLMRNPEISGIEYQQGTLQGYEVREYLLEKFGRKCCYCGKENVPLEVEHIIPKSRGGTDRVDNLCLACHDCNQRKGSKTAEEFGYPHIQKQVKESLKDASAVNSTRWKVYEVLKQSGCEVECGTGARTKMNRIRLDLPKTHYFDACCVGESTPNHLYFKTKEVLFIRAKGRGSRSRTNLDRLP

SEQ ID NO: 4283 - protein, 463 aa, Cupriavidus sp.
MAVFVLDKHGKPLMPCSEKRARLLLERGRARVHRLMPFAIRLIDRCLNDSEVPPLRLKLDPGSKETGVAIVREATFGADGARRAYVLSLAEIIHRGRQISEALTARRSMRRARRGRKTRYRAARFDNRRRPEGWLAPSLRHRVVTTEAWVRRFIKLAPITALSLELVRFDMQAMENPEISGVEYQQGTLLGYEVKEYLLAKFGRTCSYCDAADRPLETEHIVAKACGGSNRVSNLTLACRPCNEKKGKLPLEVFLRKDPARAKRILARAKAPLRDAAAVNATRLALLDALKSFGLPVETGSGGQTKYNHRRLEIPKSHALDAACVGQVHSVLDWQRPVLRIQCTGRGSYQRTRLSANGFPRGYLMRSKRAFGFQTGDMVKAIVPTGKKAGTYVGRVAIRATGFFNIQTAAGAVQGMHCKVIQRGDGYGYQLVVQTAKESENRGDASRRALSLPGLKAEVSRAN

SEQ ID NO: 4284 - protein, 423 aa, Arthrospira sp.; identical to SEQ ID NO: 3193

SEQ ID NO: 4285 - protein, 420 aa, unidentified; identical to SEQ ID NO: 3504
  REGION 1..420: note = Human gut metagenome

SEQ ID NO: 4286 - protein, 429 aa, Methanosarcina sp.; identical to SEQ ID NO: 3990

SEQ ID NO: 4287 - protein, 435 aa, Halobacteroides sp.
MILRQRREVPIMEVAEMPNKYAFVLDSKGKLLDPTKSKKAWYLIRKGKASLVEEYPLIIKLKREVPKDQVNSDKLILGIDDGTKKVGFALVQKCQTKNKVLFKAVMEQRQDVSKKMEERRGYRRYRRSHKRYRPARFDNRSSSKRKGRIPPSILQKKQAILRVVNKLKKYIRIDKIVLEDVSIDIRKLTEGRELYNWEYQESNRLDENLRKATLYRDDCTCQLCGTTETMLHAHHIMPRRDGGADSIYNLITLCKACHKDKVDNNEYQYKDQFLAIIDSKELSDLKSASHVMQGKTWLRDKLSKIAQLEITSGGNTANKRIDYEIEKSHSNDAICTTGLLPVDNIDDIKEYYIKPLRKKSKAKIKELKCFRQRDLVKYTKRNGETYTGYITSLRIKNNKYNSKVCNFSTLKGKIFRGYGFRNLTLLNRPKGLMIV

SEQ ID NO: 4288 - protein, 466 aa, unidentified
  REGION 1..466: note = Cyanobacteria bacterium UBA11368
MSNRNAVFVLDSSRNPCNPVHPAVARKMLSQGIAAVFRQYPFSIILKEGKCDNPKQLRIKIDPGARFTGLALVSDTNIVWAAELEHRGFAIRDSLTIRLQQRRSRRQRKTRYRKPRFLNRRRQDGWLPPSLMSRVYNIQTWVNRLCKLAPVFAISQELVKFDMQKIVNPEVNGIEYQHGELWGYEVKQYLLEKFNHTCVYCGATDKPFNLDHFHPKSKGGSDQVSNFVLSCVDCNQAKSNKLPAEFLSDRPDIFAKIDKQRKQPLADAAAVNTTRWKLKQVLESLGLPVELGSGGLTKYNRQRLGIQKSHWADAVCVGHSTPNSFNITGYQPLIIKAMGRGSRQMVNPDKYGFPRTKPKLRQKAFYGFQTGDIVKAVVTKGKKVGTYVGRIAVRKTGSFNIKTKTDTVQGISHKYCRILHKSDGYTYSFGEALNQKSSQLKPKVTETKLKEFQEFKGFQGEQLSLF

SEQ ID NO: 4289 - protein, 421 aa, Moorena sp.
MNKVFVLDDRKRPLMPCRPARARRLLAAGKAAVYRRMPFTIILSYDVKPANQEIEFKVDPGSKTTGVALIGKFDRGNELLWGANLSHRGHTIKDAMESRRSLRRGRRNRKTRYRAKPEGWLPPSLQSRVDNVSSFLKKLCFRTPISECHVETVRFDMQKLVNPEISGVDYQQGELFGYEIREYLLEKWRRTCAYCDKKDVPLEIEHIHPKSKGGSDRVSNLTLACHCCNQAKGNLPIEQFVKDNTRLLRILAQAKAPLKDAAAVNATRYAIGHAIRAFGLPTAFWSGGRTKCNRTQQGYPKDHFIDAACVGESGASVMINADIKPLLIKATGRGTRQTVRTDKFGFPRNKAGRVKRVHGFSTGDLVRLTQPNGKYAGTYVARLAGIRADGRFDIATAMGKVTANFKHFSLIQRGDGYAYAH

SEQ ID NO: 4290 - protein, 451 aa, Burkholderia sp.; identical to SEQ ID NO: 3380

SEQ ID NO: 4291 - protein, 465 aa, unidentified
  REGION 1..465: note = Human gut metagenome
MSTCACVLSKNGERLMPTIRLGKVRHLLKDGKAKIIKHHPFTIQLLYDSETNIQPIEICEDVGYNYIGIGVKSQSHEYVSAQYDTLQDEKSCHDACRRMRRTRRNRLRYRQKRFDNRKRDKGWLAPSLKHKKELNVNVIKMYCEVVPITHATVEVGSFDTMLVKAIEEGKATPEGADYQKGPRYNLATLREAVFYRDNYTCQVCGREASEGAILHVHHMFYWKGRHDNSLSELITVCEKCHTPANHQKGGKLYGFGEDIKFANLSGAAFMNTVRWQIVNELYAAFGKPFVTFTYGAMTKEKRIALHLEKSHNNDAYAMGEFHPNCRCTFEHYEKVRRNNRILEKFYDSRYIDIRTGEIATGKELFNGRINRSHKKDSENLHKYRGKRIRKGYRALRRKKVALNPGDLVSLNGEILTVHGTHTKKNGSVNVEFKTPSKSGKKSTSLKKLKIIKTISPMRSAWDKVS

SEQ ID NO: 4292 - protein, 451 aa, unidentified
  REGION 1..451: note = Human gut metagenome
MSVAVISKTGERLMPTSEYRARKLLKLGKAVKYSYHPFTIQLTEREDGDVQPIELCMDTGYIHIGISVKSEKHEYLAEQIDTLTDERARHDACRMYRRQRRGRKRYRQPQFNNRKRDKGWIAPSLEHKKDIHVQAISRINKVMPLTDITMEMGNFDTQVLRAKEEGKPLPQGADYQHGERYGTATLREAVFSRDNYKCQCCGRTISDGAILHVHHIKYRSHGGTNSMVNLATVCDKCHTPKNHKPGGKLYNWKPKLPDFKGTTFMTTIRWQLYSEVKSLFPDVNIHVTYGAATKEQRRELSIGKSHVNDAFAMGKFHPKHRINAVLYKKKRRNNRCLEKFYDAKYIDSRDGSKKTGQELFNGRINRNHKKDSENLHQYRLQKTTAGKRTVRKQHYSIQPHDIVIYENRKRETLGCHNNGTRVMLLPDKKSVAIKKIKIYKYTGGYFKSAFN

SEQ ID NO: 4293 - protein, 440 aa, Fervidobacterium sp.
MVFVLDKNKKPLMPCSEKRARQLLSRGRAVVHKMHPFTIRLKDRTVQQSQLQPLRLKLDPGAKTTGVAVLREDGDVAETVFLCEIHHKTDIKQKLDARCAVRRSRRNRKTRYRKPRFLNRRRPEGWLPPSLKARVDQLINAVRKLTKLLPISAISIEDAKFDTQKLQNPETSGIEYQRGTLFGYEVREYLLEKWGRKCAYCGRSDVPLEIDHIVPRSRGGTDRVSNLTLACRECNQKKGNKTAAEFGYPHVEEQARQTYKQAAFMNSIRSYLSKSLSSFGIPVEYGTGALTKANRIRLGFPKEHYFDACCVGESTPSEIRITQRYVQIWRAVGRGTRQMCNTDKFGFPRGHRQRRKKHFGFQTGDIVKAIVPRGKYAGIWVGAVAVRASGFFDIKDKNGKRVCQGIRYKYCNLIQTADGWQYSKTKTNYSISHTTEVACL

SEQ ID NO: 4294 - protein, 376 aa, unidentified
  REGION 1..376: note = Human oral metagenome
MTIQLKKVVDTPNNDEIRMGIDDGAKYVGLALVQKCKTKNKVIFVATMEHRIDVHKKIVQRHEYRRYRRYLKRYRKDKSLNRANSRKQGWISPTIKQKRHAVIRIVDVLSKYICIDSIYLEDVAIDIRVLTEGHQIYGEQYQISNRLDENLRKATVLRDNCKCQLCGKKNCRLEVHHITPRRMNGSNTIGNLITLCSDCHSKVTGREMEFADQFYSKIGKKRNNYGLIYASHVMIGKTWLREELAKRAQLTLTTGGDTANKRINWNLEKSHEVDAVCITSLRPEFVNVKKWRIKPLRHQIKKRKTIEVLRFRHRDIVSYVYRNGEYHEGYVTAIFPLSKRRKENLSFQSQTKHCCRVAINKCKFICRPNKFYWLSS

SEQ ID NO: 4295 - protein, 413 aa, unidentified; identical to SEQ ID NO: 2636
  REGION 1..413: note = Human gut metagenome

SEQ ID NO: 4296 - protein, 502 aa, unidentified
  REGION 1..502: note = Bacteroidales bacterium
VQDKVYVVSMNKKPLMPTTNFGYVRILLKRKMAKVILSKPFTVQLLFETEENVVPTVLGLDPGRVNLAITVLEKESGNVLISSELVTRNKSVSNLMKERKAHRMIHRGCRRAKKIRRAKHSKTVFKNAKNIIQSGALKPIKVTYIKPKPARFLNRTRKENWLTPTANHLLETHLHYVNLICRIIPVSEIVIEYSKFDTQKLNNPAIQGNEYQEGLLKGYDSVHDYIYQAQDKHCLMCKNKIKHDHHIVPQHEGGSDHPDNIAGLCKKCHTKAHTDKTFVAEIKVKKEGSKKSYDSVGILNSIMPRVLQTIQELYGTENVTITTGDRTSQARKAYGLKKMHCNDSYVIALSNVDHVSRIRDILPYQFMQYRRHNRKVCDAVRERHYKNNDKKLVASNRTKRYEQKDNSLFEYKKQLKEAGLTKKKIKQSISNLNVEPSKKRLKTPTKKLAINAGCTVLYRSKRYVVNGTLNKGITLKFHGFDKETFSIEKCKLITRNSGLVCS

SEQ ID NO: 4297 - protein, 470 aa, unidentified; identical to SEQ ID NO: 2825
  REGION 1..470: note = Human gut metagenome

SEQ ID NO: 4298 - protein, 424 aa, unidentified; identical to SEQ ID NO: 3351
  REGION 1..424: note = Human gut metagenome

SEQ ID NO: 4299 - protein, 457 aa, unidentified
  REGION 1..457: note = Human gut metagenome
MDAVAVISASGKPLMPTNPVRARKLIKKGKAVIYKYRPLFTIRLTERTDGDIQTIEYCCDTGYQHIGLSIKSRKHEYVNERRDLLPNETERHNDSRKYRKARRRRKLRHRACRRDNRHDNQICKDGYAPSIRNKRDQHISLYRSYTEILPVERAVFEMGQFDTQVLKAIEKGEPLPQGKDYQHGERYGYATLREAVFARDDYTCICCGKNSFKDKRILCVHHLGFRIGDRTNRLANLATVCTKCHTPKNHQPKGKLYNLKPELKDFKGATFMTMVRWDMLDKLKVVSKDIQVDVTYGAATKEARRDLKIKKSHANDAYCMGSFHPSHRTDLKRYEKCRRNNRVLSKFYDATYIDIRDGKKKKANALGCNRTKRRESRRSEKNERIYRGEKVSKGRIVLRTKRAVIRPGDIVYVGKKKYIVASSKNLGAQLKLADGSLLTTSKVTKIIHCGGWKTVTL

SEQ ID NO: 4300 - protein, 471 aa, Caldicellulosiruptor sp.; identical to SEQ ID NO: 3375

SEQ ID NO: 4301 - protein, 428 aa, Moorena sp.
MNRVFVLSRTRTPLMPCHPARARKLLRHGRAAVFRRQPFTIILSDREAGEIQPVVFKADPGSKTTGLALVAEFQRGRQVVWAANLTHRGHRIKAALTDRRMFRRGRRGRHCRYRPARFDNRTRKAGWLPPSLMSRVNNVSAWYSRLLDRTPITAAQVETVRFDTQAMQTPGISGVQYQQGTLAGYEVREYLLEKWCRRCAYCGAENVPLEIDHIHPKSRGGSERISNLTLACVPCNQAKSNRPVEDFLARDLKRLARIKAQAKAPLKDAAAVNATRYAIGDTLKTFGLPVSFWSGGRTKFNRTAQGYAKAHWIDAACVGEEGSDVKVPYGFQPLIIQATGRGRRRVRGNDRYGFPRGKPRTQKRVYGFQTGDLAELKCLAGKSAGAHVGRIKSIRSRGWFVLDKHDRPAREFRLLQRADGYAYTAATA

SEQ ID NO: 4302 - protein, 443 aa, Eubacterium sp.
MYWLIALNISKKEVSCMVYVLDIDGQPLMPTTRHGKVRRLLNSHLAKVVKRCSFTIQLLYQSTKETQPVSLGVDAGSKHIGLAATTDKKVVYQEELVSHNDVVKLISARRILRRSRRNRKTRYRKARFNNRVHSKHKGWLAPSVEVKIQEHITTIKRICQILPISEIQVETAEFDLQRLKAMKEGKPLPVGTDYQLGEQYDFYNTRQYVLHRDGYTCQCCGTHDNNIKLHVHHIESRQTGGDAPNNLIILCEHCHKALHEGKLELPKGKKRGKSYRDATFMGVMRKTLLERLKKEIDVPVEGTYGYITKCWREKTGLEKSHINDAICISKHPYAKPLDTYYLTKAVRHHNRQIHKSNFSKGGIRKRNQAPYLVKGFRLFDKVLYQGKEYFIFGRRATGYFDIRTLDGTKVNKGSIKYKKLRIQDTAKAYLKEARAIPHVNKFT

SEQ ID NO: 4303 - protein, 326 aa, Moorena sp.
MDTGSKHIGSAAVANGQVVYQTQIEIRNDVSGKMEQRAMYRRTRRSRKTRYRPARFDNRGKVGKIAPSIKSKVDSHLREKKFVESILPISEWKVELASFDIHKISNPSVSKLQSVKLHVHHIKFRSQGGSDTPGNLITLCEDCHDSLHAGKLGDRVHEKLTKKTASKTKHATEMGIVKSQLKKSEWVFTETFGYETKFKRETCLNLPKTHFFDAIAICLGEGEIVNGSSFVYLKRHIANGDFQQTSGRRSEEKIPTGKIQGFKKFDKVLWEGKEFFIKGRMSTGYAILMGIDNKKVTLKPIPKFLFMKRLTARKSCLSMSRGLENS

SEQ ID NO: 4304 - protein, 463 aa, Cupriavidus sp.; identical to SEQ ID NO: 4283

SEQ ID NO: 4305 - protein, 407 aa, Succinivibrio sp.
MVYVLNCKGVPIMPTTRHGMVRRLLREHKAKVVKRCPFTIQLRYECANITQPITLGVDTGYENVGISACTEKKVLFEAKAKIRTDIVKLLSTRRETRHTRRVRKTRYRKARFLNRGIANGWLPPSIRAKVESHLRLVAKAHEILPIGKIVVEIASFDIQKIKNPEIKCAEYQQGDQLGFKNVKAYVLARDGCTCRCCNGKSKDKVLRVHHLESRLIGGDAPNNLVTLCDSCHTKFHKGLISLDDIKRGKSFKAETFMGLMRNFFFKELCNKYPCVKCTYGYITKHLREKYHLKKDHHVDARCICGVPQALPSDVYLMKKVRCHNRQIHKFTTLKGGRRKLNQAPYTVKGFRLFDKVKVGDRVGFIFGRRTSGAFDIRTVYGERINGSISYKKLQLIETRKIWLIEKC

SEQ ID NO: 4306 - protein, 431 aa, unidentified
  REGION 1..431: note = Human gut metagenome
MPDKVYVISRLGHPLMPCSPAKARHLLDDKKAKVVKRMPFTIRLLYGSTKYIQPIILGVDAGSKTIGLSASTAKGEVFAAEVMPRNDVVENLSTRREFRRARRNRTTRYRKPRSDNRVRSNHERWLAPSVKVKIQEHITSIKRVCTILPISKVVIETAEFDLQLLKAIQEGKPIPEGEDYQKGEMYGSYNVCQYVLWRDNYTCICCGVRGTPKNPVRLHVHHFESRKYGGNAPDNHGTLCDDCHKKFHLGIIADVKLKTRRRQSTRDAAFMGIMRKTLMWRLRTELFIPVAETKGYITKATREKLLVLPKSHTRDALAIAQGRHGFSIKEYAYVEPANHIYTVRPVRHHNRQLHKASILKGGIRKRNQASKYVFGFRLYDKVLYQGKACFVWGRRTSGTFLLRTIDGIKVKDGVSYRNLTLLERSSNYLIA

SEQ ID NO: 4307 - protein, 512 aa, unidentified
  REGION 1..512: note = Human gut metagenome
MSTIYVLNKDGKPLMPTTRGGHVRHLLKEQKARVVQSNPFTIQLLYETDDAVQPLYLGIDPGRTNIGVAVVKTDGTAVFTAHLGTRNKEIPKLMQGRKKARRARRTNGRRCRRQRRAKANGTISKKCVKQDTAQNGSVSKRAKKIGVIKRHLPGCEKEVLCIGIKNKEAKFNNRTRPEGWLTPTANQLLQTHVNLVKKIQKFLPISDVVLEVNKFAFMQLDNPNIQKWQYQQGPLYKKESLESAVSEMQEHHCLFCKKPIDHYHHVVPQHKNGSNTIGNIVGLCTKHHDLVHKDSAWEKKLAKKSTGLYKKYAALGVLNQIIPALTNKLSVLFPKHFFVTTGKSTHDYRESHGVSKDHWLDAYCIACSALPGSVCDSDINNHVPYELKQFRRHDRRALHKENMSRVYTLNGKKVATNRHKAVEQTTDSLEEFRQCQPNDVCKLKVKEHHPTYRNMNRNYPGSVFLVDGQIHVMQGVGGSHNGKADGYYDTNSNAYPYYKCKFVAKNEGIVFA

SEQ ID NO: 4308 - protein, 456 aa, Halomonas sp.; identical to SEQ ID NO: 3676

SEQ ID NO: 4309 - protein, 431 aa, unidentified
  REGION 1..431: note = Human gut metagenome
MPDKVYVISRLGHTLMPCSPAKARHLLDDGKAKVVKRTPFTIKLLYGSTEHTQPVILGVDAGSKTIGLSASTTKEELFAAEVMPRNDVVETLSTRREFRRARRTRTTRYRKPRFNNRVHSKNNGWLAPSVEVKIQEHITSIKRVCAILPISKIVVETAEFDLQLLKAVQDGKPVPEGEDYQKGEMYGSYDVRQYVLWRDNYTCTCCGVKGTDKKPVKLHVHHFESRKHGGNAPDNYGTLCEDCHKKLHLGIITDISLKTRKRPSTRDAAFMGIMRKTLMQRLITGLSIPVAETKGYITKAAREEILKLPKTHTNDALAIAQGRHGFGIREQAYVKPTNRIYTVRPVRHHNRQLHKATMLKGGIRKLNQASKYIFGFRLYDKVLYQGGECFVWGRRRSGSFLLRTIDGTKVKDGVGYRNLTLLERSTNYLIA

SEQ ID NO: 4310 - protein, 430 aa, unidentified
  REGION 1..430: note = Human gut metagenome
MVYVLDISGNPLTPTKRHGKVRHLLETGKAVCVKRCPFTIRLTYQNAGPELEGLSLGVDCGSKHIGLSVSSEEQEYYSSEVELRQDIPANLSTRREFRRARRHRKMRYRKPRFLNRIASKKKGWLAPSVRQKVESHLNRIDKAVKMLPIREIKVEVAAFDLQKLQADLKGLKRPKGEEYQQGPQLDFWNVREYVLFRDHHECQCCHGKSGDKVLNVHHLRSRKVGGDAPDNLITLCEYCHGQYHKGELELPESAKKPKPLRDAVFMGIMRWTLYSRLKEIYEPQGIKVKLTYGYITKHTRIENGLEEKSHRLDALCIAGHPKAKRCREWFLQKKVRCHNRQLHKATIQKGGVRKANQLPAVIKGFRLYDKVLFQNRECFIWGRRKTGYFTLKTLDGIMICDGVSSKKLTLLEKRKSYLTERRKQELCNSF

SEQ ID NO: 4311 - protein, 499 aa, unidentified
  REGION 1..499: note = Human gut metagenome
MRYVYVLDVDGKPLMPTCRFGKVRRMLKSRQAKAVDTLPFTIQLTYKPRTRILQPVTLGQDPGRTNIGMAAVRFDGKELGRFHCITRNQEIPKLMADRMAARKASRRGERLARKRLARKLHTTAKHLEGRMLPGCSEPIAVKDIINTESRFNNRLRPEGWLTPTATQLLRTHINLFRKLSGILPVTDVAVELNKFAFMQLDNPEMKKREIDFCHGPLCGTGGLEAAVKEQQDGKCLLCGKESIGHYHHIVPRSRRGSNTIANIAGLCPKCHELVHKDADTAERLTEMKTGLTKKYGGTSVLNQIIPKLVETLADLFPGHFHVTNGWNTKEFREKHHLEKDHDVDAYCIACSHLKPEETLVETEPFEILQFRKHNRAIIHHQTERTYKLDGVTVAKNRKKRMEQKTDSLEDWYVDMAKEHGKTQADAMRSRLTVIKSTRYYNTPGRMMPGTVFLYEGKRYVMTGQITNGKYYRAYDQEKRNFPAVKVRILTKNTGLVFVA

SEQ ID NO: 4312 - protein, 442 aa, unidentified; identical to SEQ ID NO: 2903
  REGION 1..442: note = Human gut metagenome

SEQ ID NO: 4313 - protein, 443 aa, Anoxybacillus sp.
MVEENMTCFMQRKGEYPMVFVLDTNKCPLAPCHEAVARKLLKQGKAAIYKRYPFTIILKEIVDNFRPKTPYRLKIDHGSKHTGLAILRGQEVVWLGQLDHRTDIKERMDKRRAFRRARRNRKTRYRKPRFLNRRRKDGWLPPSLESRVQNIQTWVNRLKKLCPIGYISYENTKFDTQLMRNPEISGIEYQQGTLQGYEVREYLLEKFGRKCCYCGKENVPLEVEHIIPKSRGGTDRVDNLCLACHDCNQRKGSKTAEEFGYPHIQKQVKESLKDASAVNSTRWKVYEVLKQSGCEVECGTGARTKMNRIRLDLPKTHYFDACCVGESTPNHLYFKTKEVLFIRAKGRGSRSRTNLDRYGFPRGYLARQKFFFGFQTGDMVKAVIPRGKYQGVWFGEVACRKTGSFDIKGKDGKRIAQGINYRYVQVIQRFDGYTYRREGMNIA

SEQ ID NO: 4314 - protein, 490 aa, unidentified; identical to SEQ ID NO: 3566
  REGION 1..490: note = Human gut metagenome

SEQ ID NO: 4315 - protein, 463 aa, Cupriavidus sp.; identical to SEQ ID NO: 4159

SEQ ID NO: 4316 - protein, 451 aa, unidentified; identical to SEQ ID NO: 3061
  REGION 1..451: note = Human gut metagenome

SEQ ID NO: 4317 - protein, 529 aa, Paraburkholderia hospita; identical to SEQ ID NO: 3816

SEQ ID NO: 4318 - protein, 423 aa, Moorena sp.
MRVFVLNKNRQPLDPCKPARARILLSTGKAKVYRRYPFTIILTEEVKNPVIHKHQVKIDPGSKTTGLAIVQGERVVWGSELTHRGSQIRDNLISRGQLRRSRRNRKTRYRKPRFLNRTKPKGWLAPSLTSRVQNILTWVKKLIRFCPITGISQELVRFDTQKLQNPEISGIEYQQGTLYGYELREYLLEKWNRKCAYCGATGTQLEIEHIKPLSKGGSNRVSNLTIACHSCNQAKSNQDIELFLSKKPSILKRILTQSKRPLADAASVNSTRWKLYHDIKSIGLPVEVGSGGLTKFNRCRQDLPKTHWLDAANVGKVETLIIEVTKPLLITAKGHGTRQLCRTNKYGFPIRHCSRMKFHKGFQTGDIVRAVVTKGKKIGTYVGRVATRKSGSFNISTLGGLVQGISHKYCRFIHRKDGYAYTN

SEQ ID NO: 4319 - protein, 415 aa, unidentified
  REGION 1..415: note = Human gut metagenome
MIYVRSKKGKALMPSERGGRIGYLLRHGKAHVVSRVPFVVQLDYESTTYTQEVSLGIDAGSKHIGVSASSEKKELLAAQVELRNDVVNLLSTRRELRRTRRNRKTRYRKVRFDNRKRKDGWLAPSIELKVESHLKVIRLVHKLLPITKTTIEVAQFDAQKIKNPDIKGEEYQQGEQMGFWNVREYVLARDGHRCIHCKGKSRDPILNVHHLESRKTGGNSHSNLVTLCETCHKAYHRGEFELKIKRGSSLRDAAVMNIMRWAVYERAKEEFGNVNLTYGYITKHTRIENGIAKTHAADAFCIAKNVHAMRLSSFFMCRCVPRHTRALHVANPKKGGIRRSCIASHKIGKSRFQRFDMVRWMGKECFIFGSTNGKPVLRDIKGIKMHENASVNIKTIKFLRRLRNNILMEEKTSES

SEQ ID NO: 4320 - protein, 430 aa, unidentified
  REGION 1..430: note = Human gut metagenome
MPKVYVLNRHGRPLMPCTPAKARHLLDAGKAKVKHRTPFTIQLLYGSTGYAQEVILGVDAGSKTIGLSASTETEELFSAEVKPRNDVVELMSVRRQFRRARRNRTTRYRKPRFDNRVRSKHKGWLAPSVEVKIQEHITAIKTVCRILPVSKVVVETAEFDLQLLKAIADGKPVPQGEDYQKGEMYGHYNVRQYVLWRDGYTCQCCGAHATQKKEVRLHVHHLESRRVGGDAPDNLVTLCTACHDKLHKGIIMAADIKKRKRRSTRDATFMGIMRMTLLRRLREQLPVPVVETRGYITKATRENLLVLPKSHTNDALAIAHGPQGFRAEYLPNIRQADRLYTIRPVRHHNRQLHKATILKGGVRKANQAEKYICGFRLYDKVLYNGIECFVWGRRTSGSFLLRQLNGEKVKDGVSYKHLKLLERSQSYLVA

SEQ ID NO: 4321 - protein, 407 aa, Sutterella sp.
VRLFPFTIRLTDRLIEDSKLQPVLVKIDPGSRRSGFAVVRVDEKGDHHALFFIELVHRGASIRDALTGRSACRRWRRGNLRHRAPRFLNRTKPQGWLPPSLRHRVDTATAWVAKLVKLAPVTGIVEELVKFDAQKVQNPEISGTEYQQGTLFEYEVREYLLEKFGRKCVYCGAENVPLNIDHVVPKARGGSNRVSNLVLSCVDCNQKKDAQPVDVFLKNRPEVLDRIKRQIKKPLRDAAAVNATRWSLFNALKAFGLPVKTGSGALTKFNRHTFGVPKEHWLDALCAGRVNGVHYPKGMGILQVRCTGRGSYQRTRVDKYGFPRGYLTRQKRVHGFATGDMVKAVVPSGKKAGAYLGRVSVRKSGSFNIQTPEGVIQGIGWRHCRLLSFNDGYGYAWLCPAPHSFPV

SEQ ID NO: 4322 - protein, 442 aa, Lactobacillus sp.
MKHENANRVFLLNKDGKPLMPCRPRKARLLLTSGKAFVVKKYPFTIQLKYGSYGYKQKVSLGVDTGQRHIGFAIVSQNKVLHQSEVELRQDVHKNLYTRKIYRRSKRNRKTRYRQAHFLNRVHGKRDGLWLPPSIKGKVSHNIAWIKRYLAVLPNPDLHIEVGKFDMAKMVNPEISGKQYQEGSLKDWKNYEYYVLARDEYTCQLCHKHGEGVKLVVHHIVYRSQGGTDRVDNLITLCTNCHTTKNHQPGGKLYKWMKAKKKVIKQLKGATFMNILRKRIMTAFPEASFQYGSQTYVDRKNLLLPKGHFMDAIAISGIKSVGQLSDTVTMISQFRKKKRSLHEATARKGRKQPNTSSKRNEKNTKHARGLWLNDYVRVIGNHAKGYVKGFKSNGYYVYLTDGLGNYVLNNGKNYINGQQCRLIMHNGNWQKAEQKLSLYKFK

SEQ ID NO: 4323 - protein, 445 aa, Moorena sp.; identical to SEQ ID NO: 4102

SEQ ID NO: 4324 - protein, 427 aa, Enterococcus sp.; identical to SEQ ID NO: 2410

SEQ ID NO: 4325 - protein, 396 aa, unidentified
  REGION 1..396: note = Ga0373627_0011171
LRVSTNVYVLNKRGEPLMPCSPRKARVLIKENKAKVIKNYPFVIQLTESTGEQMQECSLGIDSGAKNVGFSVITDKKEIVSGTLILDQRASERLTEKRMYRRNRRNRLWYRKPRFNNRNRQEGWLPPSVQRRFNTHVSLINKLKKIIPIKRVTVEVGNFDIQKINNPEIEGVGYQRGDLFGYRNIKNFLMHRENGKCQLCGKESSKDNKFHIHHIILRKDGGTNSQKNLALLHEKCHKKLHKQNLYNLLKKNKIYKEATFMNIIKSKFQEFGFNLVYGYETFVKRNILGLEKAHYNDAFVIADGNIQERINPIEIEQKRRNNRILQTNRKGFIPSIRRKRYTIQNRDFVWIKGKMCLCGGIASKGYSVYVFDKKKIKSVISSKTIEKVYHTGNLVW

SEQ ID NO: 4326 - protein, 431 aa, unidentified
  REGION 1..431: note = Human gut metagenome
MPNKVYVINKHGRPLMPCSPAKARHLLDAGKAKVKKRTPFTIQLVYGSSGYTQEVILGVDAGSKTIGVSALTKKEELFAANVIPRNDVVDLLSTRREFRRARRNCKTRYRKPRFDNRVRSKHKGWLAPSVEVKIQGHITAIRRVCGILPVSKVVVETAEFDLQLLKAIEKGKPVPQGEDYQQGEMYGHYNVRQYVLWRDDYTCQCCGAHTTKKKEVRLHVHHLESRKTGGDAPSNLITLCDSCHEKLHKGLIAEKDFKKRKRRSTWDATFMGIMRKTLMQRLCSELPIHVVETRGYITKATREKLLVLPKSHTNDALAIALGKHGFNVGYLPEIAQIDKIYTIRPVRHHNRQLHKVTILKGGIRKSNQTGKYVFGYRLFDKVQFNGQDCFIWGRRTTGIFTIKTINGKMIKDGISFKKLKLVEKSTSYLIA

SEQ ID NO: 4327 - protein, 418 aa, unidentified
  REGION 1..418: note = Human gut metagenome
MVYVIGKEGQALMPTERFGKVRRLLKNGLAHVVCRIPFTIQLDYETTYFVQPISLGVDAGSKHIGISATTSEKELYAADVELRNDIVEKLSTRREQRRTRRNRLRYRKVRFNNRVSSKRKGWLAPSVENKIQTHLTVVEKIHKFLPITNIVVETASFNIQKIKNPSISSEEYQKGEQLGFWNVREYVLFRDNHTCQHCKGKSKDHILNVHHIESRKIGGNSPSNLITLCESCHKAYHNGKIDIKVKRGASFRDAAFMGITRWTTYERLKNIYPNVNMTFGYITKNNRITNGLPKDHYVDARCISGNSKAKPLGYYFYQKKVRCQNRQIHKVNFLKGGRKKLNQAPFLVKGYRLFDLVEYQNDLYYIFGRRDSGFFDIRKLDGTKVNKGSISCKYIRLVDIRRSVLTERRKSCSIPPTN

SEQ ID NO: 4328 - protein, 340 aa, Bacillus sp.
MVFVLDTNKCPLAPCHEAVARKLLKQGKAAIYKRYPFTIILKEIVDNFRPKTPYRLKIDHGSKHTGLAILRGQEVVWLGQLDHRTDIKERMDKRRAFRRARRNRKTRYRKPRFLNRRRKDGWLPPSLESRVQNIQTWVNRLKKLCPIGYISYENTKFDTQLMRNPEISGIEYQQGTLQGYEVREYLLEKFGRKCCYCGKENVPLEVEHIIPKSRGGTDRVDNLCLACHDCNQRKGSKTAEEFGYPHIQKQVKESLKDASAVNSTRWKVYEVLKQSGCEVECGTGARTKMNRIRLDLPKTHYFDACCVGESTPNHLYFKTKEVLFIRAKGRGSRSRTNLDR

SEQ ID NO: 4329 - protein, 512 aa, unidentified
  REGION 1..512: note = Human gut metagenome
MSTVYVLNKDGKPLMPTTRCGHVRHLLKEQKARVVTSKPFTIQLLYEADDVVQSLCLGIDPGRTNIGVAAVKADGTAVFTAHLETRNKEIPKLMKKRKESRRARRTNGRRCRRQRRAKANGTISKKCVKNDTAQNGSVSKRAKEIGVIKRHLPGCEKDVLCIGIKNKEAKFSNRTRPEGWLTPTANQLLQTHINLVKKIQKFLPISDVVLEINKFAFMRLDNPNVQKWQYQQGPLYQKANLEETVSEMQEHHCLFCKNTIDHYHHVVPQSENGSNTIGNIVGLCTKHHDLVHKDATWQKRLAKKKTGLNKKYGALSVLNQIIPALTKELSSLFPKHFFVTNGKSTYDYRAAHGVSKDHWLDAYCIACSVLPNDTCDKTINSRVPYELKQFRRHDRRALNNENMSRVYTFNGKMVATNRHKATEQTTDSLEEFRQRQPNDVCNLKVKEHHPTYRNMNRNYPGSVFLVGNQVHVMQGIAGSKDGEATTYKDTNANSIAAGKCKFVAKNSGILFV

SEQ ID NO: 4330 - protein, 521 aa, Mahella sp.
MSRIKPGETYQPVWLSIYLERGGKMVYVISKDGKPLMPTKRHDRVRILLKQKKACVVQSKPFTIQLLYDSTTYTQDVASAYDTGRTHQSITAIDSSTTDVLYSSVNHCRNKDVPKLMKERKMYRMIRRHNRRRKKIRRAIANHTYFRAPRKVVQPGTKEPITAKYVKPKQARFSNRKRPEGWLTPTAHQLLQTHINYFNKVAKILPIRKVVLEYGKFDIQKLENPDIAGKQYQQGTLYSYNNMREYIIAKQEGKCLLCGKRKIEHLHHIVPRSKGGSDTYKNIAGLCGKCHEKVHKDPKAKTKLAQKAAGAAKEYADPSILNIIMPYLYEYLKSKLGEENVEIRYGYETETMRRQLGLSKTHYNDSYALALMGAGHISRIEKIKPYEYKQYRRHNRSFTDAQRDRLYKQDSKIVARNRHKKTEQEEPSLEEYRQEIAEAAEKEEASCAISGLKVYRAVKRMRTPAKDVPITSGSSVLYKGQRFIVKGILHKGQSLLLEGHDGYVSTGSCRLMTRNTGIVCL

SEQ ID NO: 4331 - protein, 472 aa, Cupriavidus sp.
MSVFVLDKHGKPLMPCTEKRARLLLERRRARVHRVVPAVIRLVDRTVDDCEFQPLRIKLDPGSKMTGGALVRDTELACSVSGEIQRGAAVLSLFELVHRGGQISERLTARRSMRRRRRGANLRYRAPRFLNRTRPAGWLAPSLQHRVDTTMAWVQRIRRWAPVNGVSSELVRFDMQAMENPEISGVEYQQGTLAGYEVREYLLERWGRACIYCDAEGVPLQVEHLTSRARGGTNRVGNLGLACECCNQKKGSRDVREFVKDPTRLARILTTAARPLKDAAAINATRWALANALRATGLPLELASGGRTKFNRAAHTIPKTHALDAACVGDVNAITGWQRPTLEVKATGRGSYQRTRLTASGFPRGYLMRRKQVKGFQTGDRVHAVVPSGKKAGTYAGRVAVRASGSFNIQTPNGVVQGISHRHCSLVQRADGYGYHFRSKDSLYKGEAGEGRAAHAALSIPVLKDGVSRASR

SEQ ID NO: 4332 - protein, 493 aa, unidentified; identical to SEQ ID NO: 3154
  REGION 1..493: note = Human gut metagenome

SEQ ID NO: 4333 - protein, 456 aa, Halomonas sp.
MAVFVLDKHKRPLMPCSEKRARLLLARGRAVVHKRYPFTIRLKDRVSGETQPLRLGIDPGSKTTGLALMREPDSQQRHVLCLFELIHRGFQIKKALQQRAAFRRRRRSANLRYRAPRFNNRIKPKGWLAPSLQHRVDTVMAWVNRLSRLAPVTAISQELVRFDTQKLDNPEISGVEYQQGTLLGYEVREYLLEKWGRECAYCGTGDTPLEIEHVVPRSRGGSNRVSNLTLSCHPCNAEKDSQTLTDFFATNKGLKKRLKANGLSADAQLERVQRQLKQPMRDASAVNATRWALFSALKTTDLPVAVSSGGRTKYNRQRLNIPKTHALDAACVGAFGKLHDWTVPTLTIKAMGRGSYQRTRLTKHGFPRGYLMRQKQVHGFQTGDMVRAIVPTGKKAGTHTGRVAIRKTGSFNIQTEQGAVQGISHKYCTVIQRGDGYGYYITPFTNLTGGAGQAVA

SEQ ID NO: 4334 - protein, 426 aa, Dactylococcopsis sp.
MSNYVFVIDQKKTPLKPVHPKRARQLLSSGKAAVFRLFPFTLILKKEVPNPDIHPLTLKIDPGSKVTGFALVTDQGEVVWRMQLEHRGGIIKKRLEQRRALRRKRRSRLRYRQPRFLNRKRQEGWLPPSLMHRVQTTETWAKRLIKFCPVQEIWIEKVKFDTQAMENPEIDGKEYQQGTLQGYSVREYLLEKWDRKCAYCKKENVPLQVEHIHSKSKGGSNQVSNLCLACERCNQKKGDKSIKDFLKKKPTILESVLKQAKSPLKDASAVNATRNKIVEVISQHSSVKTATGAQTKMNRVRLGLPKEHCLDAACVGEVETLTILSHQPLMVTATGTGGRQKCQTNKYGYPIKHRPLRPIQGFQTGDIVQVDIPKGKNQGQWTGRLCPYSDGNCEICPKGRKRLGTKLSYVSRVVHQKDSYKYRHLS

SEQ ID NO: 4335 - protein, 428 aa, Enterococcus sp.
MVYVLSINNEPLMPCSNVIARLLLKQGKAKVKYREPFTIKLTYETTTYTQPLTLGVDTGSQTFATAVTNGKGNILYTSEVVLREDKNHSIKKKMDQRRMYRRNRRNRKTRYRKARFNNRKNSKRKNRFSPTMTSKLHSHQKEIEFIKSILPIAKLILETGTFDPHLMKNPSLANLKVKPWGYQQGPNYGFENMKARILARDNHTCQICKKKPKNERLEVHHIIFRSQGGSDEENNLVTVCHSCHVELHKGLIHPNFEGSLKNALKYATQMNSIRVQLLKLYPDAIETFGYVTKANRLNLGLPKEHYVDAAVIATAGNQVNFACNLMIKRCIPKGDFQRTKGIRSEKIIPKGKIDGFKKYDKVRYFGNEYFVKGRMTTGYIQLMNIYGEKISFNHMPKGFKTPKTKNCQRISARKTWITTTEPLIKNIA

SEQ ID NO: 4336 - protein, 480 aa, unidentified; identical to SEQ ID NO: 2726
  REGION 1..480: note = Human gut metagenome

SEQ ID NO: 4337 - protein, 437 aa, Haloactinospora sp.; identical to SEQ ID NO: 4158

SEQ ID NO: 4338 - protein, 423 aa, Moorena sp.
MRVFVLNKNRQPLDPCKPARARILLSVGKAKVYRRYPFTIILTEEVKQPITHDHQLKIDPGAKISGLAIVQGKRVIWGSELTHRGFQIQEALTSRRQLRRSRRNRKTRYRKPRFLNRTRSKGWLAPSLTSRVQNILTWVKKLIRFCPITGISQELVRFDTQKLQNPEISGIEYQQGTLYGYELREYLLEKWNRKCAYCGATGTQLEIEHIKPKSKGGSNRVSNLTIACHPCNQAKSNQDIELFLSKKPSILKRILSQSLRPLADAASVNSTRCTLYYELKSIGLPVEVGSGGLTKFNRCRQNLPKTHWLDAANVGKVETLIIEVTLPLVITAKGHGTRQLCRTNKYGFPIRHCSRIKFHKGFQTGDIVRAVVTKGKNIGTYVGRVATRKSGSFNISTKSGLVQGISHKYCRFIHRKDGYAYTN

SEQ ID NO: 4339 - protein, 491 aa, Pseudomonas sp.; identical to SEQ ID NO: 3597

SEQ ID NO: 4340 - protein, 451 aa, Moorena sp.; identical to SEQ ID NO: 4197

SEQ ID NO: 4341 - protein, 418 aa, Moorena sp.
MSNYVFLIDANKTQLNPVHPKQACKLMESGKAAVFRHYPFTLILNRAVDNTMVHPLTLKIDPGSKVTGISLVTDQSEVIWGMELEHRGQAIKDALQTRRAVRRARRSRNTRYRKARYLNRKRPKGWLAPSLMHRVLTVETWIKRLCKFVPIGEIRMELVRFDMQKLENPEISGVEYQQGTLAGYEVRQYLLEKWGRKCTYCSKENVPLQIEHITARANGGSNRVSNLCLACHKCNQKKGTKDLKGFLKGKPDLVAKILKQSKAPLKDASAVNSTRWKLFEVLRSTKLSVTTGTGGQTKYNRSRFGLAKEHWLDAACVGITESLAILTQKILSQKATGFGTRRLCRMDKFGFPCSKPRQTYNTPWKTGDIGRTIQGVVGRVVVQNEKRLEIRVNGVRHYCKPHEVKPMHRKDGYSYAEI

SEQ ID NO: 4342 - protein, 437 aa, unidentified
  REGION 1..437: note = Sediment metagenome
LIRGLKGKTFMQKFEAKFQNVPMDAPQVHSSTSTLLNRDQNLSEVSIVRTSNNLEVDLLQHKGEQGLRVPATAYVLNQRGRPLMPCSERKARVLLQKGEAKVIRNYPFVIQLMKATGEQVQQCFLGIDSGYKYVGFSAITDKKEIVCGTFTLDGKTSERLTERRMHRKNRRNRLWYRKPRFNNRMRKVGWLPPSIQRKFNTHITLINILKKLLPTERVTIEVGNFDIQRIENPDIKGIQYQQGSLFEHQNMRSFLMAREHGKCQLCGKEFSKTNPSHIHHIIPRNKGGTDREKNLALLHKKCHDKLHKKSLYNSLKKNKQYKEATFMSIIRNKFRETIVGCRIVFGNETFVKRQQLRLEKSHSNDAFVIAGGTTQIKTIPNDMGQKHKNNRSLQTVRRRLGICVRRKRYSIQPFDLVTVDNLKYVFRGCSNRGKIVL

SEQ ID NO: 4343 - protein, 443 aa, Anoxybacillus sp.
MVEENMTCFMQRKGENPMVFVLDTNKRPLAPCHEAVARKLLKQGKAAIYRRFPFTIILKKSVDESEIKATYRLKIDYGSRHTGLAILRGQEVVWLGQLDHRTDIKERIDKRRAFRRARRNRKTRYRKPRFLNRKRKEGWLPPSLESRVQNIQTWVERLRKICPIEHISYENAKFDTQLMRNPEINGVEYQQGTLQGYEVREYLLEKFGRKCCYCGKENVPLEVEHIIPKSRGGTDRVDNLCLACHDCNQRKGSKTAEEFGYPHIQKQVKESLKDASAINSTRWKAYEVLKQTGLDVECGTGARTKMNRIRLDLPKTHYFDACCVGESTPNHLYFKTKEVLFIRAKGRGSRSRTNLDRYGFPRGYLARQKFFFGFQTGDMVKAVVPRGKYQGVWFGEVACRKTGSFDIKGKDGKRIAQGINYRYVQVIQRFDGYAYGKGVAELA

SEQ ID NO: 4344 - protein, 529 aa, Burkholderia sp.; identical to SEQ ID NO: 3816

SEQ ID NO: 4345 - protein, 493 aa, unidentified
  REGION 1..493: note = Human gut metagenome
MAAVYVISASGKPLMPTTRCGHIRGLLNAGKARVVEREPFTIQLKYETPDVTQPLYLGIDPGRTNVGSAVVREDGECVFTAQLTTRNKDVPKLMKARKQFRMAHRRLKRRCKRQRRAKAAETLSQKGEFQRLLPGYEEPILCKGIRNKEARFNNRQRPAGWLTPTANHLLLTHLNMVKKLQKFLPITDVVLEVNRFAFMAMENPSIRRWQYQQGPLYGKGSVEDAVYAQQDGHCLFCGKPIAHYNHVVPQHKNGSETLENRVGLCNEHHDLVHKDRAWDAKMKETKAGLNKKYHALSVLNQIIPALTEQLTAMFPQHAFVTTGKDTADFREDYGIAKEHHLDAYCIACSVLAEPTKVAAPTGKPHRLMQFRRHDRQVCHKENIKRVYLSEGKAVATNRHKAIEQKDDSLEEFRKTHTQQEVSALTVKDHQPVYKDMRRFMPGGVFLFNGKVHTLQRSHGRYKGMPFYYIDTDGSKNHAKGCIFLQQNCGLRWV

SEQ ID NO: 4346 - protein, 445 aa, Moorena sp.; identical to SEQ ID NO: 4102

SEQ ID NO: 4347 - protein, 414 aa, unidentified
  REGION 1..414: note = metagenome
MPCSPAKARLLLKEKKAIVVRRTPFTIQLTIATGEAKQPVSLGVDAGYKHVGLSASTEKAELYASEVELRQDVSDLLSARRALRQSRRSRNTRYRAPRFDNRIRTKRKGWLAPTVENRINVHLSRIETVLRLLPVTKITVETASFDTQLLKNPDIAGKEYQEGEQLGFWNVREYVLFRDGHVCQHCHGRSKDPVLNVHHLESRRTGGDSPGNLITLCETCHKALHRGEIKLKAKRGRSFRAETFMGIMRWGVLNRLKASHPKLEVHNTYGYRTKHARIANGIAKSHCADAFCIAGNFGAKRLGEFFFQKQTRRNNRQIHKLSILKGGIRKRNQAPFEVKGFRLFDKVACQGEEGFIFGRRSTGYFDVRKLDGTCISAGISYKKLHLLEKRRTYLTEIRKEEALPPPPEGRGLRA

SEQ ID NO: 4348 - protein, 415 aa, Bacillus sp.; identical to SEQ ID NO: 2431

SEQ ID NO: 4349 - protein, 406 aa, unidentified; identical to SEQ ID NO: 2752
  REGION 1..406: note = Human gut metagenome

SEQ ID NO: 4350 - protein, 512 aa, unidentified
  REGION 1..512: note = Human gut metagenome
MSTVYVLNKDGKPLMPTTRGGHVRYLLKEKKARVVTSKPFTIQLLYETDDVVQPLYLGIDPGRTNIGVAVVKTDGTAVFTAHLETRNKEIPKLMQGRKKARRARRTNGRRCRRQRRAKANGTISKKCVKQTTAQNGSVSKRAKKIGVIKRHLPGCEKKVLCIGIKNKEAKFSNRTRPEGWLTPTANQLLQTHINLIKKIRKFLPVNDVVLEINKFAFMQLDNPNIQKWQYQQGPLYQKASLEEAVSEMQEHHCLFCKQSIVHYHHVVPQSENGSDTIGNIVGLCTKHHDLVHKDTAWQKKLAKKKTGLNKKYGALSILNQIIPALTKELSSLFPKHFFATNGKSTHDYRAAHDVSKDHWLDAYCIACSILPNDTCDKNINGRVPYKLKQFRRHDRRALHKENMSRVYTLDGKKVATNRHKAIKQTTDSLEEFRQRQPNDVCKLKVKEHHPEYRNPERNFPGCVFLVGKHTHVMQGTSGSHNGKADGYYDTNGNSYPSGKCKFVAKNKGIVFA

SEQ ID NO: 4351 - protein, 427 aa, Methanosarcina sp.
MFVFVLSKGGNPLMPTKPAKARILLKTGKAKVVRTTPFTIKLLFESSSYTQPVIAGMDTGSKVVGCAAIANGKVLYQSEIHLRENVSKKMDQRKMYRRNRRGRKTRYRPARFANRGNSRREGRLAPSIKSKLEAHFREKRFVESLLPVTGWKVELASFDIHKITNPEVSGVGYQEGDLKGFYNVKAYVLDRDGYTCQHCMGKSKDFRLHCHHIVFRSQKGSDAPENLITLCETCHKALHNGEFKLSGKKSKTKHATEIGILKSQIRKSGWNFAETFGYETKYRREQVLKLLKTHYFDAVAICCRDDQKVEVEDSVFLKRNVPAGDYQQRRGKRSEKKMPTGKLFGFRKFDQVKTEKGIGFIRGKRSSGYFSISDIFGNKISDSVNVKKKCRRLSARSTTLVQIVQMTHSSPTCHFRQARNVEEGVSC

SEQ ID NO: 4352 - protein, 454 aa, Calothrix sp.
MNFLLVQLQTTKMKVLVINKHGQPLMPTSPRKARLLLSSGKAKIVGRDPFTIQLIYGSSGYKQEVTLGIDAGYQHIGFSAITEKEELIGGELELLDGVSERITERFKYRRQRRNRLRHRAPRFDNRTREEGWLTPSVQHKLDTHIKIVERIKSILPVTKIIIETANFDIQKIKNPKIEGKQYQEGEQLGYYNLTCYIRHRDGYKCQNPNCKGKSEVLQIHHIGYWKIPPDRSDRPGNLITLCEKCHTPANHEKGKLLFGWEPKVKSFKPETFMSTIYGKLLNILNAEQAYGYETKFNREQLQLPKTHHNDAFVIAGGSTQIRSTPLILEQIRRNKRSMEQFYDAKYIDTKTKEKTSGSILSSGRRTRNKNLNSENLRVYRGHKVSKGQRRIKKQRYPYNPNDYIEFENNKYRVIGMQNLGTGVKIANYPGVNNKVVSVSKVKPIKRRSGICTST

SEQ ID NO: 4353 - protein, 427 aa, Methanosarcina sp.
MFVFVLNTDGNPLMPTKPAKARILLKTGKAKVVRNTPFTIKLLFESISCTQPVTAGMDTGSKVVGCAAIASGKVLYQSEIYLREDVSKKMEQRRMYRRSRRSRKTRYRPARFDNRGNSRREGRLAPSIKSKLESHFREKRFVESLLTVTKWKVELASFDIHKIKNPEVSGTGYQEGDLKGFYNVKAYVLHRDGYTCQHCRGKSKDSRLHCHHIVFRSKQGTDSPENLITLCETCHEALHSGEFELSGRRSNTKHATEVGIVKSQIKKSGWNFEEVFGYETKFRREQVLGLEKKHYFDALAICCGDNQKVEPDDTIYFKKHVPAGDYQQRRGKRSEKKIPTGKLFGLRKFDLVKTEKGIGFIRGKRSSGYFSISDLFGNKISDSVNIKKKYRRLSARSTTLVQMVQLTHSSPTCHFRQAGTAEEGVSC

SEQ ID NO: 4354 - protein, 436 aa, unidentified
  REGION 1..436: note = Human metagenome
MTKTLTTQTTQVCVLDQQDKPLMPTTRLGKVYRLLKTKKAHIVSYEPFTIQLDYEPDTHIIQPMTLGVDSGAIHSGYSVANEHREYYNSEVIARNDISDRLSDRHMYRRNRRSRKTRYRKPRFNNRKNKKKSWLPPSLQQKVAAQINEIDHLHRYFPIEKIIVEVAEFDIQKIKNPDISGIEYQQGTLQGYNIRNYLLEKHKRKCFYCGKAVSDFEVEHMFPKSRGGSNSIDNLTLSCHDCNEKKGTLTAEEFIQQTLSAKKAAVKLKQLPNEKHLFKYMAHMNATRWTLYNTIKEKYPNVKITYGYITKYERIQAGLPKAHHIDAKCITSFATVPSMSQTVVKVKMRRHNRQLHRATFSKGHIRKAANLPTVTFGFQLYDLVLFNNHRYYIKGRRSSGYFALVSVEGLKNEERSYKKLKLLAHTNAYLTNRYVNA

SEQ ID NO: 4355 - protein, 469 aa, Moorena sp.; identical to SEQ ID NO: 4167

SEQ ID NO: 4356 - protein, 431 aa, unidentified
  REGION 1..431: note = Human gut metagenome
MPNKVYVINKHGRPLMPCSPAKARHLLDGGKAKVKKRTPFTIQLLFGSTGYTQEVILGVDAGSKTIGLSASAETKELFSAEVKPRNDVVDLLSTRRESRRARRNRKTRYRKPRFDNRVRSKHKGWLAPSVEVKIQEHITSIKRVCRILPVSKVVIETAEFDLQLLKAIADGKPVPQGEDYQKGEMYGHYNVRQYVLWRDGYTCQCCGAHTTKKKEVRLHVHHLESRKTGGDAPGNLVTLCDSCHEKLHKGLITEDDFKKRKRRSTRDATFMGIMRKTLMQRLCSELPIPVIETRGYITKATREKLLVLPKSHTNDALAIALGKQGFNVGYLPGIAQIDKIYTIRPVRHHNRQLHKAAILKGGIRKSNQAGKYVFGYRLFDKVQFNGQDCFIWGRRTTGIFTIKTINGKMIKDGISFKKLKPVEKSTSYLIA

SEQ ID NO: 4357 - protein, 447 aa, Petrotoga sp.
VQRVFVLDKNKRPLMPCHPARARELLKKGKAAVFRYHPFTIILKDRAGGDTQPTHVKIDPGSKITGVALIGNFKNGKKVIWSAEIQHRGQSIKKALDTRRALRRSRRNRKTRYRKARFDNRERSKDWLPPSLMSRVENILTWIKRMRHFALITGISMELVRFDTQKLQNPEIKGIEYQRGTLYGYEIKEYLLEKWGRKCVYCGKENVPLEIEHIIPKSKGGSDRISNLTLAFHECNQKKGNQSIEEFLANNPERLNQIKSESKKSLKDTAAVNATRWYLFNQLKKERLLIEVGTGGKTKYNRETQNYPKKHWIDAACVGESGQNVQIEPDMQVLEITAMGHGTRKMCNVDKYGFPRSHRRAKNAPNGVKGRTYMGYKTGDIVLAVIPKGKNAGIHIGRIAIRQQPNFKLNDLDGINPKYLRLLQRNDGYGYQTARKEGEKLLHSSYH

SEQ ID NO: 4358 - protein, 453 aa, unidentified
  REGION 1..453: note = Ga0315279_10000169
MNMQTLQPKFKNVPTDASLVCSSTTLPLNRNESASVVEKVLSCNNPEVNLHWKRVSGLKVIVPVLSLKRSPLMPCGLIKARHLIKGGKAKVVKLNPLVIQLKFDCENQIQDVSLGIDSGYKTIGFSAVSEIREVSAGELNLDNGTSKKLIEKKMYRRHRRNRLRYRKPRFNNRKKSSGWLPPSIQRKFDTHLNLIKKIKAIVPVKKLTIEIGEFDIQKIMNPEISGKKYQQGNLFGYNNMRSFLIAREKGKCQLCGKKFSRDDPSHMHHIKPRIMGGTDRPDDLALVHKSCHDKIHKEKLFNKLKKAKEYKAETFMAIVGAKFKKVLDCDITYGYETKTKRDLLEIDKSHINDAFVIAGGSTQKRCKPYKIEQKRINNRTLQTNRKGFSKSIRKQRHKIQNRDFIWIDSKKYLSGGVACRGTQVYYFDANEKRLISSKKIEKVYHTGSLVWLN

SEQ ID NO: 4359 - protein, 475 aa, Blautia sp.; identical to SEQ ID NO: 4128

SEQ ID NO: 4360 - protein, 443 aa, Bacillus sp.
MVEENMTCFMQRKGENPMVFVLDTNKRPLAPCHEAVARKLLKQGKAAIYRRFPFTIILKKSVDESEIKATYRLKIDYGSRHTGLAILRGQEVVWLGQLDHRTDIKERMDKRRAFRRARRNRKTRYRKPRFLNRKRKEGWLPSSLESRVQNIQTWVNRLKKLCPIGNISYENAKFDTQLMRNPEISGIEYQQGTLQGYEVREYLLEKFGRKCCYCGKENVPLEVEHIIPKSRGGTDRVDNLCLACHDCNQRKGSKTAEEFGYPHIQKQVKESLKDASAINSTRWKAYEVLKQTGLDVECGTGARTKMNRIRLDLPKTHYFDACCVGESTTNHLYFKTKEVLFIKAKGRGSRSRTNLDRYGFPRGYLARQKFFFGFQTGDMVKAVVPRGKYQGVWFGEVACRKTGSFDIKGKDGKRIAQGINYRYVQVIQRFDGYAYGKGVAELA

SEQ ID NO: 4361 - protein, 421 aa, unidentified
  REGION 1..421: note = Human gut metagenome
MLVYVLSKNGQPLMPTHRCGFVRRLLNSQKAKVVRRCPFTIQLQYDTDCKTQPVTLGIDAGSKHIGVSATTESKVLYEADIELRNDIVDLLATRRQMRRARRSRKTRYRKARFDNRKRNDKWLAPSIQHKVNCHLEAVRFVHKLLPISKIIVEVASFDIQKIKNPLITSTDYQNGELLDWKNVREYVLFRDSHICQCCKGKSKDPVLQVHHIESRKTGGNAPNNLITLCKTCHNGYHHGTVKLPAKIKRGMKFNDATFMGIMRWGFYNQLKSLYPDVSLTYGYITKDIRISNGLAKTHFIDARCISGNPLATSDNTVYFLKKRRRHNRQIHKFNILKGGRKKRNQAAYLVKGYRLFDKVNYNRKEYFIFGRRASGFFDIRTLSGEKVNKGSISCKKLKLLEASKGYLTERRNAFLSPLNSA

SEQ ID NO: 4362 - protein, 431 aa, Escherichia sp.; identical to SEQ ID NO: 3801

SEQ ID NO: 4363 - protein, 443 aa, Anoxybacillus sp.
MVEENMTCFMQRKGENSMVFVLDTNKRPLAPCHEAVARKLLKQGKAAIYRRFPFTIILKKSVDESEIKATYRLKIDYGSRHTGLAILRGQEVVWLGQLDHRTDIKERIDKRRAFRRARRNRKTRYRKPRFLNRKRKEGWLPPSLESRMQNIKTWVERLRKICPIEHISYENAKFDTQLMRNPEINGVEYQQGTLQGYEVREYLLEKFGRKCCYCGKENVPLEVEHIIPKSRGGTDRIDNLCLACRDCNQRKGSQAAEEFGYPHIQEMVKKTLKDASVVNATRWKVYEVLKQSGCEVECGTGARTKMNRIRLGLPKIHYFDACCVGKSTPLQLHFKTKEVLFIKAKGRGSRSRTNLDRYGFPRGYLARQKYFFGFQTGDMVKANVPKGKYQGVWFGEVACRKTGSFDIKGKDGKRIAQGINYRYVQVIQRFDGYAYGKGVAELA

SEQ ID NO: 4364 - protein, 412 aa, unidentified
  REGION 1..412: note = Lachnospiraceae bacterium
MVYVLNQNGQPLMPTENHAKVRILLKQGKAKVVNKCPFTIQLLYSSTNYTQKVTLGVDSGSKHIGLSATTKNKVLFESDVELRNNIVDLLSTRRELRRSRRSRKLRYRKPRFNNRKRSDGWLAPSVKQKVDSHITMIAKVHKILPISNIIVEAASFDIQKIKNPAISGADYQQGEQLDFWNVREYVLFRDGHKCQCCHGKSKDKILTVHHIESRKTGGNAPNNLITLCETCHTGYHKGIVKLPKTIHRGMSFKDATFMGIMRWALYEKLKTIYSDVKLTYGYITKNIRIKNGLPKDHYIDARCISGNPNAVNNGDVYYYKKVRCHNRQIHKNTILKGGYRKRNQAAYEVKGFRLYDKVLWKGQKCFIFGRRSTGRMDLRLLDGTHLNASVGYKNLKLLKMRSNYLIEQRKVG

SEQ ID NO: 4365 - protein, 457 aa, Moorena sp.
MSKTLPNQVFVLDTDKKPLTPCLPVIARKLLNAGKAKVFKLYPFTIILKKSVNDIPEPIEIRIDPGSKTTGIALIQGTQVIWGAQVTHRGQAIKSRLETRRAIRRSRRNRKTRYRKARFLNRTRPKGWLPPSWQHRVLTTMTWVSRLRKLAPIQSIAFELVSFDTQKMQNPEISGVEYQQGELQGYEVRQYLLEKWNRKCAYCGIENLPLQVEHINPRAKGGSNRVSNLCLACEKCNLKKGTQDVKDFLKKKPEILRKVMSQAKTPLKDAAAVNATKSALFQALKATAIELIYVGRGSLTKFNRTNLKFPKAHWIDAACCGDVSQGLTLAVNQPLLIKAMGWGSRQVVQTDKYGFPRSGYKPKKKVAGWNTGDIVSVIDGKHQGVKCKRIKTTRFKGNFDIRVNDSVISVSRNQIKPVHRNDGYNYSFVRDCREMSEKKVREHCVTYYRYEYLRRGC

SEQ ID NO: 4366 - protein, 529 aa, Burkholderia sp.; identical to SEQ ID NO: 3816

SEQ ID NO: 4367 - protein, 436 aa, unidentified
  REGION 1..436: note = Human metagenome
MTKTLTQKTTQACVLDLQGNPLMPTTRLGKVYRLLKTKKAHIVSYEPFTIQLDYEPDTNIIQPMTLGVDSGAIHSGYSVANEHREYYSAEVIARDDISRNLSDRHMYCRNRRSRKTRYRKPRFKNRKNKKKGWLAPSLQQKIAVQLNEIDHLHRYFPIETIIVEVAEFDIQKIKNPDIAGIEYQQGTLQGYNIRNYLLEKHGRKCFYCGKAVSDFEVEHMLPKSKGGSNRIDNLTLSCHDCNEKKGTLTAEEFIQQTLPAKKAASKLKQLPNEKRLFKYMAYMNATRWALYDAIKERYPNVKMTYGYITKYNRIQAGLPKAHHIDAKCITGFATVPSMEQTVVKVKMRRHNRQLHRATFSKGHVRKAASLPTVIFGFQLYDLVLFNNHRYYIKGRRSSGSFVLVSVEGLKNEERNYKKLTLLAHTNAYLTNRYVNT

SEQ ID NO: 4368 - protein, 420 aa, unidentified
  REGION 1..420: note = Human gut metagenome
MQYVYVLNKHSEPLMPCSPGKARLLLKRQKACVVKRTPFTIKLLHGSAGYKQPITLGVDAGSKHVGLSASTEKRELYSEEFTPRNDVVELLSTRRQNRCSRRNRKTRYRTPRFNNRVHSKHKGWLAPSVEVKIQEHITVIKRICRILPITLVRVETAEFDTQRLKAMLAGKPLPVGTDYQLGEMYDEYNVRQYVLKRDNYTCQYCGAHTTAKKAVKLHVHHLESRKVGGNAPSNLITLCVTCHNNLHKGKITLDGKKRGKTLRDAAFMGIMRNTLLTRLRNELNIPVQNTYGYITKLLREQNDIKKSHVNDARCISKHPLAEPCSVCYRTKAIRHHNRQIHKAKILKGGIRKANQAPYIVKGFRLWDKVLYDGQECFISGRRSSGYFALRKLDGTAITNSISFKKLWLLEPATNYLIERK

SEQ ID NO: 4369 - protein, 420 aa, unidentified
  REGION 1..420: note = Human gut metagenome
MQYVYVLNKHGEPLMPCFPGKARLLLKQQKACVVKRTPFTIKLLYGSAGYKQPITLGVDAGSKHVGLSASTEKRELYREEFTPRSDVAELLSTRKQNRRSRRNRKTRYRAPRFDNRVHSKHKGWLAPSVEVKIQEHITVIKHICRILPISLVRVETAEFDTQRLKAMLAGKPLPVGTDYQLGEMYDEYNVRQYVLKRDHYTCQCCGAHNTAKKVVKLHVHHLESRKTGGNAPGNLITLCATCHENLHKGKVTLDGKERGKPLRDAAFMGIMRKTLTARLKEELPIPVQGTYGYITKMSREQNDIKKSHTNDARCISKHPLAEPCSVCYRTKAIRHHNRQTHKANFSKGGYRKRSQTPYIVEGYRLWDKVLYKGQECFVSGRRSSGSFALKKLDGTTISKGVTFKKLRLLEPATNYLIERM

SEQ ID NO: 4370 - protein, 336 aa, unidentified
  REGION 1..336: note = metagenome
LRVFLEQTRKTADAGYKHVGLSASTEKAELYASQVELRQDITDLLSARRALRRARRNRKTRYRAPRFDNRIRTKCEGWLAPSVENRINAYLSRIEAVLRLLPITKITVETASFDTQLLKNPDIAGKEYQEGEQLGFWNVREYVLFRDGHVCQHCHGRSKDPVLNVHHLESRRTGGDSPGNLITLCETCHKALHRGEIKLRAKRGQSFRAETFMGIMRWGVLNRLKASHPKLEVHNTYGYRTKHARIANGIAKSHCADAFCIAGNFGAKRLGEFFFQKQTRRNNRQIHKLSILKGGIRKRNQAPFEVKGFRLFDKVACQGEEARVWQNLVNKKLSTL

SEQ ID NO: 4371 - protein, 443 aa, Oligella sp.; identical to SEQ ID NO: 3969

SEQ ID NO: 4372 - protein, 515 aa, unidentified
  REGION 1..515: note = Human gut metagenome
MTHQERRHLMPEYIYVLGMDGRPQMPTTRRRHVQKLLNIGKARIAEHVPFTIQLLYKNDPVLQSVMLAEDPGRTNIGLAVLSLEGDLLLSAVTETRNKEIAKLMLDRRKNRRASRNGERKARQRLAKKFGTVIKAGMLMRKLPKYAADKFVTCNLIRNTESRFCNRKRPEGWLNPTVNHLVETHIHLIHKMQKYLPVTDIAFEVNRFAFLLLEDPSVSGVDFQNGPLKGYDNLKDAVYDLQDGKCLMCGHEIEHYHHIVPRAKDGSNTLGNIAGLCKCCHDKVHKDAEFKKKLKDCKKGLDQKYGALSALNQAIPFICKRLEEEFGKEHIFYCTGRDTARVRNSLGYQNTKESQLHEVDAWCIGLLAVGKAPESLPDFSQTHRIRQFRRRDRSLIQAQVERTYKMNGKTVAKNRKKRMDQRTDSLEEWYQKQVRSVGKKEAERKRSQLTVVKSYRRYNELGRIMAGAILIYQGKRYVLQNRITNGQYYHVFGSEKNIPAKKCMIEKHNEGLVFLS

SEQ ID NO: 4373 - protein, 371 aa, unidentified
  REGION 1..371: note = Human gut metagenome
VDAGYKHVGLSASTEKAELYASEVELRQDITDLLSARRALRQSRRNCKTRYRAPRFDNRIRTKRKGWLAPSVENRINAHLSRIEAVLRLLPVTKITVETASFDLQLLKNPDISGKEYQEGEQLGFWNIREYVLCRDGHVCQHCYGRSKDPVLNVHHLESRRTGGDSPGNLITLCETCHKALHRGEITLKAKRGQSFRAEAFMGIMRWEVLGRLKASHPELEVNNTYGYRTKHARIANDIAKSHCADAFCIAGNLGAERLGEFFFQKQTRRNNRQIHKLSILKGGIRKRNQAPYEIKGFRLFDKVACQGEEGFIFGRRSSGYFDVRKLDGTRISAGISYKKLRLLEKRQTYLTEIRKEEALPPLPEGRGLRA

SEQ ID NO: 4374 - protein, 493 aa, unidentified; identical to SEQ ID NO: 2644
  REGION 1..493: note = Human gut metagenome

SEQ ID NO: 4375 - protein, 461 aa, Moorena sp.
MSHVFVVDTNKQPCAPVHPGHACLLLKQGRAAVWRRYPFTIMLKGGVPAQEAQSLRLKIDPGSKTTGLALVNDESGVVVFAAELSHRGQQITKSLNTRRGVRRGRRQRKTRYRAPCWRNRRRPQGWLPPSLLSRIHNVVTWVERVRRLAPIQAISMELVRFDLQAMDNPEISGTQYQQGTLAGYETREYLLEKWQRKCAYCGKEGVPLQVEHIVPRAKGGSNCVSNLTLVCEACNRKKGTLDLSVFLKKKPEVLKRIQAQAKAPLKDAAAVNATRLALLERLKAVRLPIECGSGGRTKYNRVMRNLPKTHWLDAACVGASTPDVLQVAGVHPLRIEACGHGCRRMRNVNTISLPCSAPKGPKNVQGFQTGDITRAIVTRGKKQGIYVGRVLVRATGSFDITTRRGRIAGLDVRFFRHLHRSDGYSYAKGEGYANPAAQSTSTEGTALPPPLKRQGHPGPAG

SEQ ID NO: 4376 - protein, 424 aa, unidentified
  REGION 1..424: note = Human gut metagenome
MRVFVFNMRGRPLMPCSQRKARLLLRENKAMIYKYHPFTIQLTYTTGETKQDCHIGIDTGSKYIGAAVRSEDKVFWKGEIELRQDIRSNLDTKRIYRRSRRNRKTRYRKPRFLNRKRRDEWLPPSLQSRINHTFHWIDTLSSLVPNPILHIEVGKFDVAKMINPEIHGVDYQHGQTYGFFDERYFVFARDNYTCQCCGKSKNKILNTHHIIYRSNGGTNRVDNLITVCTDCHTLQNHRKGGIFYQWQEQHKKVKQYKEPPFMNTLRKRIFVAYPDAEITYGSETTPKRKAMKLDKTHYNDAIVISGINEIKENPEEWLLIKQFRKKKRSLHEATARKGRKKPNRNQTRNSKNTPYYKGFYLNDKVSVFGKSGYITGFTSNAAYIKDENNDYITLPNKTYKQVSINKMELECHNNNWQYIIKNAV

SEQ ID NO: 4377 - protein, 431 aa, unidentified
  REGION 1..431: note = uncultured cyanobacterium
MEGLMSKILLVDIKKQPLNPIHPAQARQFLKNGIAAIYRRFPFTLILKNERNTPSIEPLRIKLDPGAKTTGIALVNDTIGEVPFVAELEHRGFQIRDKLTSRRQLRRGRRARTTRYRAPRFDNRKRPGGWLAPSLQSRIDNTLTWVNRLRKFAPITAISQELVKFDMQLMQNPDIQGKEYQQGTLAGYETREYLLEKWDRQCTYCLKKDLPLQVEHIHPRAKGGSNRISNLTLACEKCNTDKGTQDISDFLSQKPDLLKKILAQAHIPLADAAAVNSTRWVLLNALKQTKLPVETGSGGLTKLNRTQQNLEKTHYFDAACVGLSTPKLIVKGVKPLLIKATGHGGCQSCRTDKFGFPDRHCARIKFHFGFQTGDIVKAVVTKGKKVGTYVGRIATRATGSFNISTKKGLVQGISHKCCQPIHKKDGYGYTF

SEQ ID NO: 4378 - protein, 423 aa, Moorena sp.; identical to SEQ ID NO: 3865

SEQ ID NO: 4379 - protein, 470 aa, Moorena sp.; identical to SEQ ID NO: 4092

SEQ ID NO: 4380 - protein, 419 aa, unidentified; identical to SEQ ID NO: 3927
  REGION 1..419: note = Human gut metagenome

SEQ ID NO: 4381 - protein, 457 aa, Lactobacillus sp.; identical to SEQ ID NO: 2458

SEQ ID NO: 4382 - protein, 512 aa, unidentified
  REGION 1..512: note = Human gut metagenome
MPTVYVLNKDGKPLMPTTRCGHVRRLLKEQKAQVVTSKPFTIQLLYETDDVVQPLYLGIDPGRTNIGVAVVKIDGTAVFTAHLETRNKEIPKLMQGRKKARRARRTNGRRCRRQRRAKANGTISKKCVKQATAQNGSASKRAKKIGVIKRHLPGCEKEVLCIGIKNKEAKFSNRTRPEGWLTPTANQLLQTHINLVKKIQKFLPISDVVLEINKFAFMRLDNPNVQKWQYQQGPLYQKASLEEAVSEMQEHHCLFCKNTIDHYHHVVPQHKNGSNTIGNIVGLCAKHHDLVHKDTSWQEKLAKKKTGLNKRYGALSVLNQIIPALTKELSSLFPKHFFATNGKSTYDYRAAHGVSKDHWLDAYCIAGSVLPNDACDNNINSHVPYELKQFRRHDRRALHKENMSRVYTLNGKSVATNRHKAIKQTTDSLEEFRQRQPNDVCKLKVKEHHPEYRNPKRSFPGCVFLVGKQTHVMQGTSGSHNGKADGYYDTNGNSYSSGKCKFVAKNEGIVFA

SEQ ID NO: 4383 - protein, 424 aa, Moorena sp.
MSNYALVLDTNKQPLSPCHPSVARKLLDSGKAALFRMYPFTIILNKSCSDIVNQAIELKIDPGSKTTGIALVQGEKIIFGVELSHRGSAIKASLESRRSLRRGRRNRHTRYRQARFLNRTRTENWLAPSLQHRVETTLTWVNKLIKFIPITRISQELVRFDLQQIDNPEISGIEYQQGTLSGYEVREYLLEKWQRKCAYCGIENVPLQVEHIHPQARGGTNRISNLCLACEKCNIKKGTQDIKDFLAKKPDLLKCILAQAKRPLKDAAAVNSTRWALFSRLQETGLPVFTGSGGQTKFNRTRLNFPKTHWLDAACVGQIGELEILTNKPLLIKATGHGTRQMCRTDKFGFPSRYVPRIKFVKGFQTGDIVKAIVTTGKKIGKYIGRVAVRATGSFNISASKLVQGISYKYCKIIHRKDGYDYAF

SEQ ID NO: 4384 - protein, 424 aa, Microcoleus sp.; identical to SEQ ID NO: 2643

SEQ ID NO: 4385 - protein, 393 aa, unidentified
  REGION 1..393: note = Human gut metagenome
HGTLSKKCKKQDTAQGGNISKRAQTIGVFERNLPGCENSVLCIGIKNKEARFNNRVRPARWLTPTANQLLLTHVNFVKKICKFLPISDVVLEVNKFAFMQLDNPNIQKWQYQQGPLYQKGSLENAVSEMQEHHCLFCEKPIEHYHHVVPKSENGSNTIANIVGLCTEHHNLVHKDATWQKKLVKEKVGLVKKYSALSVLNQIIPALTKEMNSLFPKHFFVTNGKSTYDYRTAHGVSKDHWLDAYCIACSVLPNDVCDSNINSHVPYELKQFRRHDRRVLHKANMSRVYTLNGKTVATNRHKAIKQTTDSLEEFRQSHPGDVCKLKVKEHHPAYRNLNRNYPGSVFLVDGQVHVMQGVSGSHNGKADGYYNTNGNAYPYYKCKFVVKNEGIVFA

SEQ ID NO: 4386 - protein, 529 aa, Moorena sp.; identical to SEQ ID NO: 3440

SEQ ID NO: 4387 - protein, 434 aa, Moorena sp.
MSNTNYVFVIDTNKKPLQPCKPSVARRLLNSGLAAVWRRFPFTLILKKAVETVAKTTLTLKIDPGSKFTGMALLEGNKVIWMLEIQHRGSLISEKLSKRSQRRRARRTKNLRYRKPGLPNKKKPTGWLAPSLIHRVETTMTWVKRLIKFCPIESISMELVRFDTQLIQNPEISGTEYQQGELAGYELREYLLEKWHRKCAYCGKTDTPLQVEHIYPKSKGGSDRASNLTLACTKCNQAKGNQDVKDFLSGQPELLKRIGNQAKAPLKDAAAVNSTKWKLFNTLKTMGLEVETASGGRTKFNRIKQELPKAHCIDAACVGVVDKLNFQTRQAILAICKGQGGRQKAAVNKYGYPIRYNPLKPIKGWNSGDLALNIETGQVGRVNPRSKSNSFNFTVPGQKAKSVHVSKLKVVHKKDGYTYTFCPHLCINVEENAV

SEQ ID NO: 4388 - protein, 520 aa, Thermanaeromonas sp.
MMVLVQNKDGSPLSPCHPARARIMLKKGKAKVVCTYPFTIKLTYKVENPVFAPTRAVLDDGKTCGLGVVQENRTHNLALCKAEMETRGEEISDNLKRRKELRAQRRRRRNKKRGREGRIKIRYRKGQEYPQSIVADVQAKVNAVKRLMKMYPITEIVLEPVKLDIVKELNPGVRGKDYQRGLSYGIEADTRNQKRRLAILRRDGYRCLYCGREVTEETARIHHFVQRKHGGTKRYDILGTLCEECHTSVSTGELALAFDLESYPNIRAAGRCMHGRHLLERELRKLGVPVVVKYGYEAQKLRERYGFPKSHGNDAVVLGCNPEKGLIDRSTVYKVKLHARHGGRKLFDANPGVAAYRGQADRQPHVDWARMVVDDHNHEWNRKNRSYRRHVRNKYYKKLKEEGKFNYDLLPGRKHLNEIFTVNRAMLLTEGGPVLVKNQRIREWRYPHPWPDRRRVIERYDLVRTQKGGVGIVTSIMSDCTVRVDFVKKREGYKTDFSFYRPEALEIIQKGSSQTWVIQE

SEQ ID NO: 4389 - protein, 476 aa, Moorena sp.
MVFVLDKHKQPLMPCSEKRARLLLRRGRAVVHKLAPFTIRLKDRTVGQSEVQPLQVKLDPGSKISGVAVLRGDEVVFLGEIHHRTDIKDRLEKRRMIRRNRRNRKTRYRKPRFLNRRPEKCAGCGRNAKHGSRYCRKCGQQPKDNGYRETRLPPSLRARVDQVMNASRKIRVPIGGISMELIRFDMQKLENPEISGVEYQHGTLWGYEVKEYLLQKFGHRCAYCLGESGDPVLEVEHVVPRSRGGTDRVSNLAIACRTCNEEKDNLMPNEWLGTLQRSKRKLDQVRADNLPKVLGQLKAPLRDAAAVNTTRWALYRRLLSLCIPEEVGSGGRTKWNRERMELPKEHYWDAACVGESTPERFWNIPAWVQVWEAKGRGNRQVCRTDKHGFPIRHLSRQKRHYGFQTGDMVVAEIPRGKYAGKWRGRVTVRASGTFDVFVRAVRAVQGVNHKYCRVLQRGDGWAYEQTRTAIAVPPHA

SEQ ID NO: 4390 - protein, 442 aa, unidentified; identical to SEQ ID NO: 2637
  REGION 1..442: note = Human gut metagenome

SEQ ID NO: 4391 - protein, 266 aa, unidentified
  REGION 1..266: note = metagenome
KAVAEGKPVPQGEDYQKGEMYGHYNVRQYVLWRDSYTCRICGAHGSVRKGVPLHVHHLESRRVGGDAPDNLVTLCTACHDKLHKGIIMVADIKKRKRRSTRDTTFMGIMRMTLLRRLWEQLPVPVVETRGYITKATREKLLVLPKSHTNDALAIAHGPQGFRAEYLPNIRQADRLYTIRPVRHHNRQLHKATILKGGVRKANQAEKYICGFRLYDKVLYNGIECFVWGRRTSGSFLLRQLNGEKVKDGVSYKHLKLLERSQSYLVA

SEQ ID NO: 4392 - protein, 448 aa, Moorena sp.; identical to SEQ ID NO: 3648

SEQ ID NO: 4393 - protein, 418 aa, Anoxybacillus sp.
MVEENMTCFMQRKGEYPMVFVLDTNKCPLAPCHEAVARKLLKQGKAAIYKRYPFTIILKEIVDNFRPKTPYRLKIDHGSKHTGLAILRGQEVVWLGQLDHRTDIKERMDKRRAFRRARRNRKTRYRKPRFLNRKRKEGWLPPSLESRVQNIQTWVNRLKKLCPIGYISYENAKFDTQLMRNPEINGVEYQQGTLQGYEVREYLLEKFGRKCCYCGKENVPLEVEHIIPKSRGGTDRVDNLCLACHDCNQRKGSKTAEEFGYPHIQKQVKETLKDTSAINSTRWKAYEVLKQTGLDVECGTGARTKMNRIRLDLPKTHYFDACCVGESTTNHLYFKTKEVLFIKAKGRGSRSRTNLDRPPCRKKFGTIGRMKTNIVEISPCSWGHEVDVSMVRKSPKDRRTPVAWCTTECRSRVGKHAG

SEQ ID NO: 4394 - protein, 416 aa, Moorena sp.
MLVYVLNKHGKPLMPCKPSKARKLLKQDKAKITQREPFTIQLIYGSSGYKQPITLGIDAGSKFIGVSATTEKQELFSAEVELRNDIVQLLSERRQYRRSRRYRKTRYRKPRFSNRVRSKNKGWLAPSIENKIQTHLKIVEKIHKILPITKIITEVASFDIQKIKNPNIEGVEYQQGEQLGFWNVREYVLWRDNYTCQICKGKSKDNRLNVHHIESRQTGGNAPNNLITLCETCHNKYHKGELNVKLKRGQSFRDTAFMGIMRWTFYNRLKNIYPNVELTYGYITKNTRITHKLPKSHRIDALCISGNPKAKQLDYWYYIKQVRKHNRQIHKAKILKGGIRKLNQAPYLVKGFRLFDKVKYKGQECFIFGRRSSGYFDLRKLDGTVVHRSASYKDLKLLSKRKTLLWERRKGVSSPT

SEQ ID NO: 4395 - protein, 443 aa, Caldicellulosiruptor sp.; identical to SEQ ID NO: 2385

SEQ ID NO: 4396 - protein, 427 aa, Enterococcus sp.; identical to SEQ ID NO: 2410

SEQ ID NO: 4397 - protein, 420 aa, unidentified; identical to SEQ ID NO: 3089
  REGION 1..420: note = Human gut metagenome

SEQ ID NO: 4398 - protein, 511 aa, Halomonas sp.
MRAQGKTPKVLIAVGSAIVSRSRLSTFPRGDGAHASRHKTRKGIYTGENRMAVFVIDKQKQPLMPCSEKRARLLLGRGRAVVHKRYPFTIRLKDRVGGDMQPLRLGIDPGSKTTGLALMRESNSAKPDDQQRHVLRLFELVHRGYQIKKALQQRAAFRRRRRSKNLRYRAPRFNNRTKSKDWLAPSLQHRVDTVMAWVNRLSRLAPITGICQELVRFDTQQLENPEISGVEYQQGTLLGYEVREYLLEKWGRECAYCGDTDTPLEVEHVVPRSRSGSNRVSNLTLSCHPCNQAKNSQALADFFAHDKGLHRRLKANGHTAAIRLERVQRQLKQSLRDASAVNATRWALFSALKTTDLPVVVSSGGRTKYNRQRLGIPKTHGLDAACVGAFDTLHAWQVPTLTIKAMGRGSYQRTRLNKYGFPRGFLMRQKQVRGFQTGDMVRAMVPTGKKAGMHTGRVAVRKTGSFNIQTEHGAVQGVSHNYCTVIQRGDGYGYHHTPSINLTGGAGQAVA

SEQ ID NO: 4399 - protein, 419 aa, Geobacillus sp.; identical to SEQ ID NO: 3993

SEQ ID NO: 4400 - protein, 359 aa, unidentified
  REGION 1..359: note = Human gut metagenome
KDEVRCGIDDGGLHVGVALVQKCQTRNKVVFKGTIEQRNDVKHLMDVRRGYRRYHRYHKRYRPARFNNRDSSKREGRIAPSILQKRQATIRVINQLNRWINITNYWLEDVAIDIRALTDGYKPYRWQYQKSNRLDENIRKAVILRDGCRCMECGKSNCRLEVHHIKPRRLKGSSTLGNLITLCTKCHQKTEGIEELYMDRYFALLNSSDNRNLDYAQHVMIGKKWLREQLSNLGMLYLTNGGDTANKRIDWDITKSHSNDAICITDLRPDTCEIKEWVIKPMRRQSKAKTDNVLGIKHRDLVEYTFRNGETHRGYVTALYPEQNAINFQSPAKHCKKVNAGKCKVLWKYSKIYWLDNVS

SEQ ID NO: 4401 - protein, 427 aa, Methanosarcina sp.
MFVFVLSKGGNPLMPTKPAKARILLKTGKAKVVRTTPFTIKLLFESSSYTQPVIAGMDTGSKVVGCAAIANGKVLYQSEIHLRENVSKKMDQRKMYRRNRRGRKTRYRPARFANRGNSRREGRLAPSIKSKLEAHFREKRFVESLLPVTGWKVELASFDIHKITNPEVSGVGYQEGDLKGFYNVKAYVLDRDGYTCQHCMGKSKDFRLHCHHIVFRSQKGSDAPENLITLCETCHKALHNGEFKLSGKKSKTKHATEIGILKSQIRKSGWNFAETFGYETKYRREQVLKLLKTHYFDAVAICCRDDQKVEVEDSVFLKRNVPAGDYQQRRGKRSEKKMPTGKLFGLRKFDQVKTEKGIGFIRGKRSSGYFSISDIFGNKISDSVNVKKKCRRLSARSTTLVQIVQMTHSSPTCHFRQARNVEEGVSC

SEQ ID NO: 4402 - protein, 442 aa, Tepidiphilus sp.
MAVFVLDKRKKPLMPCSEKRARLLLERGRARVHRLMPFTIRLIDRTQEESVLQPLRLKLDPGSKTTGIAVVREAESVDEETGEIQRQVHVLWLAELVHRGRQISEALTARRQMRRRRRSMLRYRAPRFLNRRKPEGWLPPSLRHRVGTTLAWVRRLQRLAPVSGIAQELVRFDMQAMENPEISGIEYQQGTLAGYEVREYLLEKWGRKCAYCGAQDVPLQIEHIHPKARGGSDRVSNLTLACAPCNRKKDSQDVRVFLAKDPQRLAKLLEQAKRPLHDAAAVNSTRWALYEALKATNLPLETGSGGRTKFNRMRLGIPKTHALDAACVGVTHAAFDWGRPVLQIKATGRGSYQRTRLDRFGFPRGYLTRQKRHFGFQTGDWVRAEVTKGKKAGTYVGRVAVRASGSFNIQTREEVIQGIAHHHCTLLQRADGYGYSWIKRAT

SEQ ID NO: 4403 - protein, 441 aa, Sulfobacillus sp.; identical to SEQ ID NO: 4231

SEQ ID NO: 4404 - protein, 509 aa, unidentified
  REGION 1..509: note = Human gut metagenome
MVLTYVLSVDGKPLMPTTRCNRVAWLLKHSMAKVVSKNPFTIRLAYDTPDVTQSLILGIDPGRTNIGLTVIRETGESVYTAHLETRNKKIPKLMKARKQFRTERRTLKRRRKRQCRAIASNTVSPKCVKTSNSQSSNESKKGMKQGVLERLLPGCDTPILCIGIKNKEARFNNRIRKTGWLTPTANHLLQTHLNAMNKICKILPVTKTVLEINKFAFMQLDNPCVKKWQYQRGQLFGYGSVEEVVYEQQNSHCLFCDKAIDHYHHVVPRSKRGSETLANRVGLCAEHHTLVHNDEKWNTKLIAKKQGMNKQYHALSVLNQIIPALSNALVKLFPDRFYATSGKSTYTFREAYGINKDHHIDAYCIAASILPDVNVKLSQTVYEIKQFRRHDRQVCHKANLNRRYALNGKVVATNRHKAMNQKTDSLEEYTTNGGKTENLTVIEHKAQYKRLDRIMPGAIFELDNKRKVMFKTDGFHNNQSDYVCFIDGSKIGYSKCNKPVTLNSGLVYC

SEQ ID NO: 4405 - protein, 424 aa, Moorena sp.
MRVFVLDKNRKPLDPCKPARARILLKQGKARVIKRYPFTIIIQEKEVKNCVTHKHQLKIDPGAKTTGLAIVQDNQVIWGAELTHRGFQIKDALTSRRQLRRSRRNRKTRYRKPRFLNRKRPEGWLAPSLMSRVHNILTWTKKLIKLCPITGISQELVRFDTQKMENPEISSVEYQQGTLYGYELREYLLEKWNRKCAYCGAANTRLEIEHIKPLAKGGSNRVSNLAIACYKCNQTKGAQEIEQFLSGKPSILKRVLAQGKKPLADAAAVNSTRWKLYEELKSTGLPIETGSGGLTKYNRCRQNLPKTHWLDAANVGQVDNLHIEDFQPLLITAKGHGTRQMCRTDKFGFPSRYVTRLKFVKGFQTGDIVKAIVTKGNKIGTYTGRVAIRQTGSFNISTKNGLLQGISHKYCSTVHNKDGYSYSF

SEQ ID NO: 4406 - protein, 421 aa, unidentified
  REGION 1..421: note = Human gut metagenome
MQYVYVLNKHGEPLMPCSPGKARLLLKQQKACVVKRTPFTIKLLYGSAGYKQPITLGVDAGSKHVGLSASTEKRELYREEFTPRNDVVDLLSTRRQNRRSRRNRKTRYRAPRFDNRVHSKHKGWLAPSVEVKIQEHITVIKRICRILPITLVRVETAEFDTQRLKAMLKGKPLPVGTDYQLGEMYDEYNVRQYVLKRDNYTCQCCGAHPTEKKPVRLHVHHLESRHVGGNAPNNLITLCVACHKALHEGKITLDKGKKRGKPLRDAAFMGIMRNTLLARLKDELNIPVKQTYGYITKLLREKNKIPKSHVNDARCIAKTPNAKPCDTMLYTRALRHHNRQIHKAKILNGGIRKKNQAPYLVKGFRLWDKVRYNGEECFITGRRSSGYFALKKYDGTVISNSASYKKLMLLEAATNYITERS

SEQ ID NO: 4407 - protein, 363 aa, unidentified
  REGION 1..363: note = Human gut metagenome
GLSASTEKAELYASEVELRQDVSDLLSARRALRQSRRSRNTRYRAPRFDNRIRTKRKGWLAPTVENRINVHLSRIETVLRLLPVTKITVETASFDTQLLKNPDIAGKEYQEGEQLGFWNVREYVLFRDGHVCQHCHGRSKDPVLNVHHLESRRTGGDSPGNLITLCETCHKALHRGEIKLKAKRGRSFRAETFMGIMRWEVLNRLKASHPKLEVHNTYGYRTKHARIANGIAKSHCADAFCIAGNFGAKRLGEFFFQKQTRRNNRQIHKLSILKGGIRKRNQAPFEVKGFRLFDKVACQGEEGFIFGRRSSGFFDVRKVDGTRISAGISYKKLHLLEKRRTYLTEIRKEEVLPPLPEGRGLRA

SEQ ID NO: 4408 - protein, 427 aa, Moorena sp.
VCKVFVLDTEKRHLDPIHSAQARQLLRNKKAAIYRRFPFTIILKESRPDSPVTPLRLKLDPGARTTGIALVNDTTGEVVFAAELKHRGFAIRDALTSRRQLRRGRRNRKTRYRKPRFLNRTRPLGWLAPSLQSRIENIKTWVEKLRKLAPITAISQELVKFDMQLMRNPDIEGKEYQQGTLAGYETREYLLEKWGRQCAYCGVKDVPLQIEHIHPRSKGGSNSITNLTLSCSKCNIKKGTKDIRDFLKKDPNKLQKILLQVKRPLTDAAAVNATRHALLEGLKATGLTVECGSGGLTKFNRSNQSLPKTHWIDAACVGKSTPILNIKGVKPLLITANGHGTRQMAGTDKFGFPNRHRSNKQIHFSFSTGDIVKAVVTSGKKIGEYVGRILCRATGSFDIATKLGRISGINYKYCLAIHKKDGYSYAF

SEQ ID NO: 4409 - protein, 413 aa, unidentified
  REGION 1..413: note = Human gut metagenome
MTNYAFVLDVNGKQLAPTKEQKAWFLIRKKRATLISKYPMVIQLKKEISDEQICKDEICCGIDDGGLYVGVALVQKCKTKNKVVFKGTIEQRNDVKHLMEVRKGYRGYHRFHKRYRQARFNNRKSSKRKERIAPSILQKRQATIRVIKQLNKWINIANYLLEDVAIDIRALTDGYKLYRWQYQQSNRLDENIRKTVILRDDCKCMECGKSNCRLEVHHIKPRRLNGSNTLDNLISLCETCHQRTEGQEELYMDRYFSILNSTDNKNLNYAQHVMIGKKWLREQLSELGILILTTGGDTANKRIDWNIEKSHSNDAICITGLQPDTCNVKEWTIKPMRRQSKAKTDNVLGIKHRDLVEYTFRNGETHRGYVTALYPEQNALNFQSPTKHCKRVNAKKCKLIWKYSKIYWLDNVS

SEQ ID NO: 4410 - protein, 424 aa, Enterococcus sp.
MRVFVRNMRGKPLMPCSNRKARLLLKEGKAKIYQYNPFTIQLCYATGEYMQECHIGIDTGSEHIGIAVTSEEKVLFKGEVELRQDVKSNLDTRRSYRRDRRNRKTRYRKARFLNRKKKESWLPPSIENRVNHTFKWINKLIALLPNPKLHIEVGKFDVAKMINPDIQGVDYQHGQTYGFYDMRYFVFARDNYTCQCCGKSKGKILQTHHIIYRSNGGSNRADNLITVCTDCHTYENHQKGGILYQWQEKHKKTKQYKEPSFMNVLRKRIFKKYPNAVITYGSETTPKRKELGLEKTHYNDAIIISGISTIKENPNEWLLIKQFRKKKRSLHEATARKGRKEPNRLQKRNAKNKPYYKGFYLNDKVEVFGRIGYITGFTSGGAYIKNAENEYIILPNKSYKQVGISNIKLLHHNNNWQYVNKRIS

SEQ ID NO: 4411 - protein, 441 aa, Marinobacter sp.; identical to SEQ ID NO: 4242

SEQ ID NO: 4412 - protein, 442 aa, unidentified; identical to SEQ ID NO: 2834
  REGION 1..442: note = Human gut metagenome

SEQ ID NO: 4413 - protein, 356 aa, unidentified
  REGION 1..356: note = Human gut metagenome
MENTLKVFVLNMRGQPLMPCSPPKARKLLRAGKAVPVRRTPFVIQLTVPTGETKQPITLGVDAGYKHVGLSATTAKEELLASEVELRQDVTGLLSNRLALRRARRNRKTRYRAPRFDNRVRSKHKGWLAPSVENRIQAHISRIEAVCRVLPITKIVIETASFDIQKIKNPEIEGEGYQQGEQLGFWNVREYVLFRDGHVCQACKGRSKDLILNVHHIESRKTGGDAPGNLITLCEACHKAYHAGKLKQFSPRRGASFRAETFMGIMRWTVLNRLRERHPELPVTNTYGYLTKHKRIVAGLPKTHCADAFCIAGVLDAKRRGEYLFQKQTRRHNRQIHKLTILKGGVRKRHQAPYLV

SEQ ID NO: 4414 - protein, 425 aa, Nodularia sp.; identical to SEQ ID NO: 3165

SEQ ID NO: 4415 - protein, 429 aa, Marinobacter sp.
  SITE 380: note = misc_feature - Xaa can be any naturally occurring amino acid
LLGRGRAVVVRAYPFTIRLKDRTGGDTQPVRIKIDPGSKTTGMAVVRENGQKQHVLALMELAHRGRQISKSLEQRRAFRRRRRNQLRYRAPRFLNRTKPKGWLAPNLQHRVDTTKSLLNRLRSLVPVVSISQELVRFDTQRMTNPEISGVEYQQGTLLGYEIREYLLEKWGRECAYCTDKDTPLQIEHIDPKANGGSNRISNLTLACRPCNQEKDRQSLADFFASSKRLKNHQARLDRILKQCKKPLRDASAVNSTRWALYQTLKQTGLSVEVGTGGRTKFNRCRLRMPKTHALDAACVGEVEIVEGWDVPTLAVKATGRGSYKRTRLTKHGFPRGYLMRQKQVKGFQTGDMVRAVVPTGTKAGTWLGRVAVRKTGSFNXQTNSGAIQGISHRHCVLTQRADGYGYHIQPNQRKEEGDRKNESCYPSPS

SEQ ID NO: 4416 - protein, 427 aa, Methanosarcina sp.
MFVFVLNKDGTPLMPTKPAKARILLKTGKAKVVRTTPFTIKLLFESSSYTQPVTAGMDTGSKTVGCAAIASEKVLYQSEIYLRENVSKKMQQRQMYRRTRRSRKTRYRPARFNNRGNSRREGRLAPSIKSKLDSHFREKQFVESILPVTKWKVELASFDIHKIKNPEVSGKGYQEGDLKGFYNAKAYVLYRDGYTCQHCKGKSKDSRLNCHHIIFRSKQGSDAPENMIVLCETCHGSLHAGNFELSGRRSNTKHATEIGIVKSRIKKSGWNFENVFGYETKFRREQVLGLEKTHYFDAVAICCRDNQKVEPDDTVYFKKHVPAGDYQQRKGKRSEKKIPTGKLFGLRKFDLVNTEKGIGFIRGKRSSGYFSISDIFGNKISDSVNIKKKYRRLSARSTTLVQMVQLTHSSPTCHFRQAGNAEERVSC

SEQ ID NO: 4417 - protein, 425 aa, Burkholderia sp.
MPCNEKRARLLLARGRARVHRVMPFVVRLVDRQIGVCSFQPLRLKLDPGSRVTGMALVRETDDAIAVLNLFELVHRGRQIGEALTARRACRRRRRTNLRYRTPRFLNRTRPSGWLPPSLMHRVHITIAWVNRMRRWAPVTALSSEQVRFDMQALANPEISGVMYQQGTLAGYEVREYLLGKWSRTCIYCDATDRPLQVEHLTARARNGSNRIGNLGLACGECNQDKGALDVREYVKDPKRLARILATASRPLNDAAAVNATRRALSSALRTTGLPLELASGGQTKFNRVTHNIPKTHALDAVCVGEVAALRGWQRPSLTIRATGRGSYQRTRLTRHGFPRGYLMRQKQVQGFQTGDHVRADVPHGKKAGVHTGRVAVRATGSFNIQTAMTVVQGISHRYCKLVQRGDGYAYSLQPNDSFRQDGGG

SEQ ID NO: 4418 - protein, 442 aa, unidentified
  REGION 1..442: note = metagenome
MVTVQQSTHHLPFGRVFIRRNLFMVYVISQDGKPLMPCSDPIARLLLKQGKAKVKKREPFTIKLTYETTNYTQGLTLGVDTGSGTIGTAVSKDNGDIVYMSEVVVRNDITDKMTQRAKYRRNRRNRKTRYRKARWLNRASSIKKDRFSPTMQSKLHSHVREIEYIQSILPVTEMVFETGQFDMHLMKNPSLANPKVRPWGYQKGANYGFENTKAMVLNRDNYTCQCCKGKHKDSKLEVHHIVFRSQGGSDEESNLLTLCHTCHKDLHSGKINPKLSGKVKGNLKYATQMNSIRKQLFRFYPNAIETFGYVTKVNRLHLGVAKEHYYDACTIATQGNAFNVKSNLYKKKCVSDGDFQKTKGIRSEQPIVTDKICGFRKFDKVRYFGNDYFIKGRMSTGYAILMDIDGNKIDFSTMPRGYKTPKLSNCKRITARSTVMTQVKVV

SEQ ID NO: 4419 - protein, 449 aa, Allochromatium sp.
MAVFVLDKQKHPLMPCTEKRARLLLERGRAVVVRLAPFTLRLKDRIGGAVQPLRLKLDPGSRVTGLAIVRESETGDADTGAVERLEHGLWLGELAHRGQAIREALTLRRHYRRARRSRKTRYRAPRFLNRPRREGWLPPSLQHRLDTTLNWVARLRRLAPITALSQELVRFDTQALQNPEISGVEYQQGELAGYEVREYLLETWHRTCAYCGATHVPLEIEHIVPRARGGSDRVSNLTLACRACNQRKANQSIEDFLKRQPALLHRIQAQAQAPLQDAAAVNATRWALLNALQTTGLAVETGSGGRTKFNRTRLDIPKTHALDAACVGAVDQVRDWNRPVLAIRATGRGAYRRTRTFNNGFPRGYLMRHKRVHGFQTGDWVRAEVPKGKKAGVHVGRVAVRQTGSFNIQAQGGTVQGVSYRHCRVLQRADGYGYAFQPKPDAEKARRAA

SEQ ID NO: 4420 - protein, 518 aa, unidentified; identical to SEQ ID NO: 2751
  REGION 1..518: note = Human gut metagenome

SEQ ID NO: 4421 - protein, 456 aa, unidentified
  REGION 1..456: note = Human gut metagenome
MSTCACVLSKNGERLMPTIRLGKVRHLLKDGKAKIIKHHPFTIQLLYDSETNIQPIEICEDVGYNYIGISVKSQSHEYVSAQYDTLQDEKDCHDSCRKLRRTRRNRLRYRKPRFDNRKRGEGWLAPSLEHKKQLNIRLIERYVSVIPITHATVEVGSFDTMLLQAIQKGKSKPEGVDYQKGPRYNLATLREAVFYRDNYTCQVCGRKIADGAILHMHHMFYWKGRHGYQLDELVTACEKCHTPANHQKGGKLFGFGEDKEFANLSGAAFMNAVRWQIVDALHATYGKEFVTITYGAMTKEKRIILGIEKTHNNDAYAMGDYHPAHRCVFRHYQKRRRNNRVLEKFYDATYIDARTGNKAKGKELFNGRINRNHKKDSEDLHKYRSKKVSKGRRSIRRQRYAIQPYDTVRLESKTYITSGCHNKGTRLLIPVNGKSKSVAISKVQVACHAGAWIQII

SEQ ID NO: 4422 - protein, 511 aa, Halomonas sp.; identical to SEQ ID NO: 4398

SEQ ID NO: 4423 - protein, 379 aa, Arthrospira sp.; identical to SEQ ID NO: 3223

SEQ ID NO: 4424 - protein, 418 aa, unidentified
  REGION 1..418: note = Human gut metagenome
MVYVLGQDGHPLMPTCRHGKVRRMLKSGMAKVVKRCPFTIQLQYESTIHTQEINLGIDAGSKTIGVSATTEKKVLYESEVILRNDIVGLLSGRRALRSSRRNRKTRYRKPRFDNRKKPDGWLAPSIRQKIETHVTVVGNVIKILPVTKIIVETASFDIQKIKNPEIEGEGYQHGEQLNFWNVREYVLFRDGHTCQCCKGKSKDSILNVHHIESRKTGGNAPNNLITLCETCHKAYHKGIITLPKEIYRGMRFRDAAFMGVMRWAFYDRLKELYNPLGVEVINTYGYITKNTRIEYGLPKEHYVDARCISGNPAAKHLGHYYFQKKVRCHNRQIHKNTILKGGTRKRNQAAYLVKGFRLFDKVKYQDQEYFIFGRRTRGSFDIRTLDGTKVNKGSISCKKLQLVEKSKHYLTEQRKVTA

SEQ ID NO: 4425 - protein, 443 aa, Anoxybacillus sp.
MVEENMTCFMQRKGENPMVFVLDTNKRPLAPCHEAVARKLLKQGKAAIYRRFPFTIILKKSVDESEIKATYRLKIDYGSRHTGLAILRGQEVVWLGQLDHRTDIKERIDKRRAFRRARRNRKTRYRKPRFLNRKRKEGWLPSSLESRVQNIQTWVNRLKKLCPIGYISYENAKFDTQLMRNPEINGVEYQQGTLQGYEVREYLLEKFGRKCCYCEKENVPLEVEHIIPKSRGGTDRVDNLCLACHDCNQRKGSKTAEEFGYPHIQKQVKESLKDASAINSTRWKVYEVLKQTGLDVECGTGARTKMNRIRLDLPKTHYFDACCVGESTTNHLYFKTKEVLFIKAKGRGSRSRTNLDRYGFPRGYLARQKFFFGFQTGDMVKAVVPRGKYQGVWFGEVACRKTGSFDIKGKDGKRIAQGINYRYVQVIQRFDGYAYGKGVAELA

SEQ ID NO: 4426 - protein, 419 aa, Butyrivibrio sp.
MVYVISQDGKPLMPCSNTIARLLLKQGKAKVKRREPFTIKLTYETTSYTQDLTLGVDTGSGTIGTAVSKNNGDIVYISEIIVRNDITDKMTQRAKYRRNRRNRKTRYRKAKWLNRANSIKNDRFSPTMQSKLHSHVKEIEYIKSILPITKLVFETGQFDMHLMKNPSLASPKVKHWGYQKGANYGFENTKAMVLNRDNYTCQCCRGKHKDSKLEVHHIIYRSQGGSDEADNLITLCHTCHKALHDGKINPKLSGKTKGNLKYATQMNSIRKQLFRLYPGAIETFGYITKANRLRLGVNKEHYHDACTIATQGDSFTLKTNLYKKKCISDGDFQKTKGIRSEQPIETKKICGFRKFDKVRYFGKEYFIKGRMSTGYAILMDIEGKKIDFSSMPKGYKTPKLNNCMRIAARTSQIIQTVAM

SEQ ID NO: 4427 - protein, 424 aa, Moorena sp.
MSNFVFVLDTNKQMLNPVHPGEARCLLSQGKAAVFRRYPFTIILKQEAESEIKPLQLKIDPGSKTTGLAILNGSKVVWAAELTHRGQAIKNALLSRSQLRRGRRNRKTRYRAPRFLNRTRAEGWLAPSLMHRVKTTLTWVNRLCRYAPVAGISQELVRFDTQVIQNPEISGTEYQQGTLAGYEVREYLLEKWGRKCAYCKAKNTPLQIEHIQPRSKGGSDRVSNLTLACEPCNKAKSNLPVQEFLSGKSDLLKRILAQAKAPLKDAAAVNSTRWALFNALKETGLPVSTGSGGQTKYNRTRLNLPKTHWLDAACVGMVNRLEILTTQPLLIKATGHGTRKMCGTNKYGFPFRHRSRVQIHKGFQTGDIIVANVTALKKIGSYLGRVLCRASGSFDIATKIGKVAGISHKYCKSIHKRDGYAYAL

SEQ ID NO: 4428 - protein, 423 aa, Moorena sp.; identical to SEQ ID NO: 3576

SEQ ID NO: 4429 - protein, 439 aa, Campylobacter sp.
MVLVIDKHKHPCNAISKAYARILLHSKQAVIHRQYPFTIRLKNNNAVKKDTTYVIKIDPGASVTGISIVDNSNNVIMFAELIHRGKVIKRNLDSRRAVRRSRRQRKTRYRPARFQNRTKPQSWLAPSVKSRADNVINFVRKLKRFLNINKVEIERVSFDTAQMSSEKPLYGSDYQQGTLYQTELRSYLFKKYNCRCIYCGNKAEEIEHVIPKSKGGTNSVHNLVIACRKCNELKDKLSLKEFGKLVGKDFSHLEPKKLPKYAAIVQSARNYMFQEIIKIVPDTASYDAWLTKYNREELELPKQHYYDALSVGEINNYKFLTDKVLIISAKGRGSRQMCRMDSYGFPRTSAKAFKSVKGFQTGDIVKAIVPTGLKQGEYLGRVAVRVNGYFNITTQDGSTQQGVGYKFCRLLQRNDGYSYNYKERDFLSAMNCRVSVANF

SEQ ID NO: 4430 - protein, 443 aa, Anoxybacillus sp.
MVEENMTCFMQRKGEYPMVFVLDTNKCPLAPCHEAVARKLLKQGKAAIYKRYPFTIILKEIVDNFRPKTPYRLKIDHGSKHTGLAILRGQEVVWLGQLDHRTDIKERMDKRRAFRRARRNRKTRYRKPRFLNRRRKDGWLPPSLESRVQNIQTWVNHLKKLCPIGYISYENTKFDTQLMRNPEINGVEYQQGTLQGYEVREYLLEKFGRKCCYCGKENVPLEVEHIIPKSRGGTDRVDNLCLACHDCNQRKGSKTAEEFGYPHIQKQVKESLKDASAVNSTRWKVYEVLKQSGCEVECGTGARTKMNRIRLDLPKTHYFDACCVGESTPNHLYFKTKEVLFIRAKGRGSRSRTNLDRYGFPRGYLARQKFFFGFQTGDMVKAVIPRGKYQGVWFGEVACRKTGSFDIKGKDGKRIAQGINYRYVQVIQRFDGYTYRREGMNIA

SEQ ID NO: 4431 - protein, 441 aa, Sutterella sp.
MSVSVFVQDRKHRPLMPCRPARARRLLKSGRARVVRLFPFTIRLTDRLIEDSKLQPVLVKIDPGSRRSGFAVVRVDERGDHHALFFIELVHRGASIRDALTGRSACRRRRRGNLRHRAPRFLNRTKPQGWLPPSLRHRVDTATAWVAKLVKLAPVTGIVEELVKFDAQKLQNPEISGTEYQQGTLFEYEVREYLLEKFGRKCVYCGAENVPLNIDHVVPKARGGSNRVSNLVLSCVDCNQKKDAQPVDVFLKNRPEVLDRIKRQIKKPLRDAAAVNATRWSLFNALKAFGLPVETGSGALTKFNRHTFGVPKEHWLDALCAGRVNGVHYPEGMGILQVRCTGRGSYQRTRVDKYGSPRGYLTRQKRVHGFATGDMVEAVVPSGKKAGTHRGRVAVRASGSFNIQTPQGVIQGISWRRCRLLSYNDGYGYAWLRPAPHSSSV

SEQ ID NO: 4432 - protein, 472 aa, unidentified
  REGION 1..472: note = Human gut metagenome
VVGNRLLSIKPLINIGEGVIYSSICTGLSLQTYQKRKEVPCMVYVLDINGQPLMPTTRHGKVRRLLNSHLAKVVKRCPFTIQLLYQSTKEIQPVSLGVDAGSKHIGMAATTEKKVVYQEELSARNDVVKLLSARRTLRRTRRNRKTRYRKPRFNNRVHSKHKGWLAPSVEVKIQEHITTIKRICQILPISEIQVETAEFDLQRLKAMEEGRTPPVGTDYQLGEQYDFYNTRQYVLHRDGYTCQCCGTHDNNIKLHVHHIESRQTGGDAPNNLIILCEHCHKALHEGKLELPKGKKRGKSYRDATFMGVMRKTLLERLKKEIDVPVEGTYGYITKYWRERAGLEKSHIHDAVCISQYPYAKPLDIYYLTKTVRHHNRQIHKSNFSKGGIRKRNQAPYLVKGFRLFDKVLYQGKEYFIFGRRATGYFDIRTLDGTKVNKGSISYKKLRIQDTAKAYLKEARAIPHMNKFTCVLA

SEQ ID NO: 4433 - protein, 470 aa, Thermoanaerobacterium sp.
VWQTQKAEITLARRDYLLIALLVLYRTPKGEFYMVFVLDKHKKPLMPCTEKRARLLLESGRAVIHKINPFVIRLKDVTVDNCIIQPCRIKIDPDSKVTGIAILQGEKVLLLVELYHKQGIKKSLDDRRNHRRFRRNKLRYREPRFDNRKREKGWLPLSLEARVQQVINTVKKLAKYIPIDNISIEHVKFDTQLMQNPEISGVEYQQGELQGYEVREYLLVKWGRKCAYCGKENVPLEVEHIVPKSRGGTDRVSNLTIACHECNQKKGNMTAEEFGYPDIQKQAKQPLKDAAMINATRWKTYNLLKEMYPVECGTGALTKKNRIDRNLPKEHYCDACCVGQSTPKEFVFKADYILEFHAKGRGTRQRTLLNKYGFPRAYLSRQKEYFGFQNGDYVKAEVPKGKYKGQYTGYVAVRKSGYFDIRDANGKNIAQGISYQYCHIIQRYDGYKYGRRKRHILLHPSDAMDGVSCA

SEQ ID NO: 4434 - protein, 470 aa, Cupriavidus sp.
MSVFVLDKHGKPLMPCTEKRARLLLERRRARVHRVVPAVIRLVDRTVDDCEFQPLRIKLDPGSKMTGGALVRDTELACSVSGEIRRGAAVLNLFELVHRGRQISESLTARRSMRRRRRGANLRYRAPRFLNRTRPAGWLAPSLQHRVDTTMAWVQRIRRWAPVNGVSSELVRFDMQAMENPEISGVEYQQGTLAGYEVREYLLKKWGRTCIYCDATDRPLQIEHLTARAKGGTNRIGNLGLACGPCNQDKGANDVREYVDDPKRLARILAAASRPLKDAAAVNATRWALANALKSTGLAVELASGGRTKYNRVTLGVPKTHALDAMCVGDVCDVSGWRRPTLQIKAMGRGSYQRTRLTAHGFPRGYLMRRKQVKGFQTGDRVCANVPSGKKAGVHTGRVAVRASGSFNIQTDGAVVQGISHKYCRIIQRGDGYHYQTKDSYSQGETGEGRAKHAALSIPVLKDGVSRASR

SEQ ID NO: 4435 - protein, 427 aa, Parasutterella sp.
LRVFVRNKRGKPLMPCSPAKARLLLKEKKAIVVRRTPFTIQLTIATGETKQPVSLGVDAGYKHVGLSASTEKAELYASEVELRQDITDLLSARRALRQSRRNRKTRYRAPRFDNRIRTKRKGWLAPSVENRIDAHLSRIEAVLRLLPVTKITVETASFDLQLLKNPDISGKEYQEGEQLGFWNIREYVLCRDGHVCQHCYGRSKDPVLNVHHLESRRTGGDSPGNLITLCETCHKALHRGEITLKAKRGQSFRTEAFMGIMRWEVLNRLKASHPELEVNNTYGYRTKHARIANDIAKSHCADAFCIAGNLGAERLGEFFFQKQTRRNNRQIHKLSILKGGIRKRNQAPFEVNGFRLFDKVACQGEEGFIFGRRSSGFFDVRKLDGTRISAGISYKKLHLLEKRRTYLTEIRKEEVLPPLPEGRGLRA

SEQ ID NO: 4436 - protein, 466 aa, Cupriavidus sp.
MAVFVLDRHGKPLMPCSEKRARLLLERGRARVHHLIPFAIRLTDRRLVDSELQPLRLKLDPGSKETGVAIVRVTASDAGGAPVAFVLSLAEIIHRGRQISEALTARRAMRRARRGRMTRNRAARFDNRRKPEGWLAPSLRHRVETTAAWVRRFRKLAPITALSIELVRFDMQAMENPEISGVEYQQGTLLGYEVKEYLLAKLGRTCAYCDATDRPLETEHILAKANGGSNRVSNLTLACRPCNQKKGNLPLEVFLRKDPDRAKRILARAKAPLRDAAAVNATRFALLNALKSFGLPLETGSGAQTKYNRRRLDIPKSHALDAACVGNVHSVWTWQRPILRIKCAGRGSYQRTRLTAHGFARGYLMRSKRAFGFQTGDMVKAVVPSGKKAGTHIGRVAIRATGSFNIQTAAGAVQGISYKHCNLLQRGDGYGYSFITPTTKESETRGDASRRALSLPGLKAEVSRAN

SEQ ID NO: 4437 - protein, 443 aa, Oligella sp.; identical to SEQ ID NO: 3678

SEQ ID NO: 4438 - protein, 423 aa, unidentified; identical to SEQ ID NO: 3951
  REGION 1..423: note = Human gut metagenome

SEQ ID NO: 4439 - protein, 431 aa, unidentified
  REGION 1..431: note = Human gut metagenome
MPNKVYVINKHGRPLMPCSPAKARHLLDAGKAKVKKRTPFTIQLVYGSSGYTQEVILGVDAGSKTIGMSASTTKEELLSAEVKPRNDVVDLLSTRREFRRARRNRKTRYRKPRFDNRVRSKHKGWLAPSVEVKIQEHITAIRRVCGILPVSKVVIETAEFDLQLLKAIADGKPVPQGEDYQQGEMYGHYNVRQYVLWRDGYTCQCCGAHATKKKEVRLHVHHLESRKVDGDAPDNQVTLCESCHEKLHKGLIAEKDFKKRKRKSTRDATFMGIMRKTLMQRLCSELPIPVIETRGYITKATREKLLVLPKSHTNDALAIAQGKQGFNVGYLPGIVQINKIYTIRPVRHHNRQLHKATILKGGIRKSNQTEKYVFGYCLFDKVQFNGQDCFIWGRRTTGIFTIKTINGKMIKDGISFKKLKPVEKSTGYLIA

SEQ ID NO: 4440 - protein, 428 aa, Moorena sp.
MEDFMSNFVFVLDSHKQPLNPIRPGMARKLLTTGKAAVFKRYPFTIILKVEITAPQEPITLKLDPGSKTTGIALVQGKNVIFGAELTHRGQSIKASLESRRSLRRGRRSRHTRYRKARFLNRTRSKGWLAPSLQHRVETTLTWVTRLMKVAPISFIVQELVRFDLQQLENPEISGLEYQQGILCGYEIREYLLNKWDRKCAYCGVADTPLQIEHIHPKAKGGSDRISNLCLACENCNTRKGTQDIEQFLSKKPDVLKKILSQAKRPLKDATVVNSTRWALFNRLRMTGLPVSTGSGGLTKFNRTRLQLPKSHWLDAACVGKVEELKVLTFQPLLIKATGHGTRQMCGTNKFGFPIRHKSRKQIHFGFQTGDIINATVTAGKKVGSYVGRILCRASGSFDIATMKGRVAGISHKYCQSIHKKDGYSYGV

SEQ ID NO: 4441 - protein, 462 aa, unidentified
  REGION 1..462: note = Human gut metagenome
MSVLVIGRNGRALMPTNPRKARLLLKKKTASVVCRHPFTIQLLYKTGCATQEGCIGIDTGSQHIGVGITCGDRVILKDEHALRSSMEKRSLLATRAVMRRGRRYRKVRYRKPKWRHHTKRMYFEKANRRGRHWRKVKTTTQSPRPKGWLPPSLQSKCDHHFRIIDRYLKYLPDPITRNLVIEAGRFDMARMNDPTIHGEMYQRGPMYDAENLRAYIFARDNYQCACCKAKAGTTRKADGTTVKLVAHHILFRSRGATDNPKYIISVCDHCHTTKAHQPGGILYSWMENNKKVARGLRDAVFMNILRKRLFARYPQSAFTYGNITAADRKQLRLPKSHANDAVAISLFGKEASTVKNICQTMHYKQIRKSKRSLHEAIPRKGRKNPNTKAVRNKKNTTQVNGFKLWDSVLANGKKLFICSFTGTSAYLIDKNGCYISQPGKTYKQWPLSKLKRLHPNGNWLMA

SEQ ID NO: 4442 - protein, 428 aa, Pseudomonas sp.
MCLKHIHTHNLKKEHVMFVFVLNKENTPLMPCKPRKARVLLEKGQAKVVARTPFTIKLIGGSSGYKQPLTAGMDTGSKAIGCAVVGLGQVIYQSQVQLRQDVSKKMQQRAMYRRGRRGRKCRYRPARWANRASMRATNRLAPSIKSKLDSHLREKTFVESIIPISEWKVETASFDIHKITRPDVSGAEYQHGNQKGFYNVKAFVLHRDGYTCRSGRKIRHSQKLHVHHIQFRAKGGTDTPANLVTLCETCHQDLHAGQFEIKTQRSKTKHATEIGVIKSQLYKHWSFRETFGYETKFKREQILGLPKEHYFDAVAICLEDDELVQPNATVYAKRHVSKGDYQLTKGARSEKRIPTGKLFGIRKHDFIQTPQGSGFVKGKRSTGYFALETLFGEKVHASANVKNNTIRLAARSTTLIQKLESASNSSSR

SEQ ID NO: 4443 - protein, 406 aa, Geobacillus sp.; identical to SEQ ID NO: 3747

SEQ ID NO: 4444 - protein, 431 aa, unidentified
  REGION 1..431: note = Human gut metagenome
MPNKVYVINKHGRPLMPCSPAKARHLLDEGKAKVKKRTPFTIQLVYGSSGYTQEVILGVDAGSKTIGMSASTTKEELLSAEVKPRNDVVDLLSTRREFRRARRNRKTRYRKPRFDNRVRSKHKGWLAPSVEVKIQEHITSIKMVCRILPVSKVVIETAEFDLQLLKAIEEGKPVPQGEDYQQGEMYGHYNVRQYVLWRDGYTCQCCGAHATKKKEVRLHVHHLESRKVGGDAPDNQVTLCESCHEKLHKGLIAEKDFKKRKRKSTRDATFMGIMRKTLMQRLCSELPIPVVKTRGYITKATREKLLVLPKSHTNDALAIAQGKQGFNVGYLPGILQIDKIYTIRPVRHHNRQLYKATILKGGIRKSNQTEKYVFGYRLFDKVQFNGQDCFIWGRRTTGIFTIKTINGKMIKDGISFKKLKLVEKSTSYLIA

SEQ ID NO: 4445 - protein, 529 aa, Moorena sp.; identical to SEQ ID NO: 3816

SEQ ID NO: 4446 - protein, 512 aa, unidentified
  REGION 1..512: note = Human gut metagenome
MSTVYVLNKDSKPLMPTTRGGHVRHLLKEQKARVVRTNPFTIQLLYETDNLVQPLYLGIDPGRTNIGVAVVKTDGTAVFTAHLETRNKEIPKLMQGRKKARRARRTNGRRCRRQRRAKANGTISKKCVKQATAQNGSVSKRANEIGVIKRHHPGCEKEVLCIGIKNKEAKFSNRTRPEGWLTPTANQLLQTHINLVKKIQKFLPISDVVLEINKFAFMRLDNPNVQKWQYQQGPLYQKASLEEAVSEMQEHHCLFCKNTIDHYHHVVPQHKNGSNTIGNIVGLCAKHHDLVHKDTSWQEKLAKKKTGLNKRYGALSVLNQIIPALTKELSSLFPKHFFATNGKSTYDYRAAHGVSKDHWLDAYCIAGSVLPNDVCDNNINNHVPYELKQFRRHDRRALHKENMGRVYTLNGKSVATNRHKAIKQTTDSLEEFRQRQPNDVCKLKVKEHHPEYRNPKRSFPGCVFLVGKHTHVMQGTSGSHNGKADEYYDTNGNSYSSGKCKFVVKNEGIVFT

SEQ ID NO: 4447 - protein, 427 aa, Moorena sp.
MRVFVLDKNRKPLDPCHPAKARKLLKSGRAKVLRRYPFTIIIKDLEAENCSTHNHQLKIDPGAKTTGLAIVQGDRVIWGAELTHRGFQIKEALTSRRQLRRSRRNRKTRYRQPRFLNRTRQKGWLAPSLMSRVHNILTWVNKLIKFCPIAGISQELVRFDTQKMLNPEISGIEYQQGTLYGYELREYLLEKWDRTCAYCGAKNTRLEIEHIKPKSKGGSDRVSNLAIACHNCNQAKGNLEIEEFLSSKPDILKRILSQAKKPLADAAAVNATRWRLHDELKLIGLPVEVGSGGLTKYNRCRQNLPKTHWLDAANVGKVETLYISDYQPLLIAAKGHGKRQVCGTNKYGFPIRHHSRKKIHKGFQTGDIVKAVVTKGKKIGTYIGRVATRKTGSFDITTVQGKVSGISYKYCQAIHRKDGYSYQFHGG

SEQ ID NO: 4448 - protein, 424 aa, unidentified
  REGION 1..424: note = Human gut metagenome
LVWNKRGKPLMPCSPAKARLLLKEKKAIVVRRTPFTIQLTIATGETKQPVSLGVDAGYKHVGLSASTEKAELYASEIELRQDITDLLSARRALRQSRRNRKTRYRAPRFDNRIRTKRKGWLAPSVENRINSHLSRIEAVLRLLPVTKITVETASFDLQLLKNPNISGKEYQEGEQLGFWNIREYVLCRDGHVCQHCYGRSKDPVLNVHHLESRRTGGDSPGNLITLCETCHKALHRGELTLKAKRGQSFRAEAFMGIMRWEVLNRLKASHPELEVNNTYGYRTKHARISNGIAKSHCADAFCIAGNLGAKRLGEFFFQKQTRRNNRQIHKLSVLKHGLRKRNQVPFEVNGFRLFDKVACKGEEGFIFGRRSSGYFDVRKLDGTRISAGISYKKLHLLEKRQTYLMEIRKEEAFPPLPEGRGLRA

SEQ ID NO: 4449 - protein, 442 aa, Ktedonobacter sp.
MNDASLGGPCIGENRKETMSRVLIVDQQRRPLMPCTPARARLLLKQKKAAVLRRCPFTLILHESRPEAVVQPLRLKIDPGSKVSGLALVNDTSGEVVWAAEVTHRGGQVHKDLQKRAGVRRGRRQRHTWYRPARYLNRRRPKGWLPPSLESRVQNVETWTQRLIFWAPVGSLSYEAVRFDTQALQNPEIEGTQYQHGTLAGLEVKEYLLLKWGQRCAYCEKMGLPLQLEHIIPKIRGGSNRVTNLTLACEQCNGKKGNQTAEEFGFPHLQAQAKAPLKDAAAVNSTRRVLHQRLMRTGLPIEASSGGHTKWNRGERDIAKTHWLDAANVGPSTPARLLFQHVRPWLIEANRRQDRQLCLVNALGFPRSKPKKKSPKHDFRTGDIVRAVVPAHLENPGIYVGRMAAKASGAFTITTKQRKVSDIGYRYCTRLQHTDGYSYLIK

SEQ ID NO: 4450 - protein, 432 aa, Ktedonobacter sp.
MSVFVVDRHHQPLMPCSEKRARLLLARKRAVVHRHVPFVIRLTDRKREQSEVQPVALKLDPGSKTSGMALVRVEQRGEGEVHHALHLAHLSHRGEQVHQALLQRRGYRRRRRTVNLRYRAARFANRRRKAGWLPPSLRSRIGNVLTWATRLQSWAPLTRIEVERVKFDMHLMQHPEVSGIAYQRGELVGWEIRAYLLEKFVRRCVYCGKQNVPFEIDHVRPRSRGGSHRVSNLVLSCHACNQAKGDLTAAEFGHAEVQKQARVPLKDAAAVNATRFALVEALRALGLPVGTWSGGRTRWNRDRFGVEKEHCLDALCVGDVVGITRGRSQMLLIQAQGRGSYQRTNVDGSGFPVGYFTRAKRMRGFATGDLVRAEVPQLPKPLKTEGTHVGRVAVRASGSFRVGKCDGINAKYCVVLQRADGYAYGQAPCPKP

SEQ ID NO: 4451 - protein, 438 aa, Geobacillus sp.; identical to SEQ ID NO: 3789

SEQ ID NO: 4452 - protein, 453 aa, unidentified
  REGION 1..453: note = Ga0315279_10001150
MNMQTLQREFKNVPTDASLVRSSTTLPLNRNESASVVGKVLSCNNPEVNLHWKRVSGLKVIVPVLSLKGSPLMPCGLIKARHLIKGGKAKVVKLNPLVIQLKFDCENQIQNVSLGIDSGYKTIGFSAVSEIREVSAGELNLDNGTSKKLIEKKMYRRSRRNRLRYRKPRFNNRRKFSGWLPPSIQRKFDTHLNIIKQVKAIIPIKKLTVEIGEFDIQKIMNPEISGKEYQQGNLFGYNNMRSFLMAREKGKCQLCEKKFNRDNPSHMHHIKLRSEGGTDRPDDLALVHKSCHDKIHKEKLFHKLKKAKEYKAETFMAIVGAKFKKVLDCDITYGYETKTKRDLLEMDKSHINDAFVIAGGSTQKRCKPYKLEQKRINNRILQTNRKGFSPSIRRQRHIIQNRDFVWIEGKKYLCGGVFNKGTWIYYFERAEKKLISLKKIEKVYHTGSLVWLN

SEQ ID NO: 4453 - protein, 414 aa, unidentified
  REGION 1..414: note = Human metagenome
MPCSPAKARLLLKEKKAIVKRRTPFTIQLTIATGETKQPVGLGVDAGYKHVGLSASTDKAELYASQVELRQDITDLLSARRALRRARRNRKTRYRAPRFNNRIRTKRKGWLAPSVENRINAHLSRIEAVLRLLPVTKITVETASFDMLLLKNPDIAGKEYQEGEQLGFWKVREYVLFRDGHVCQHCYGRSKDPVLNVHHLESRRTGGDSPGNLITLCETCHEALHRGEIALKTKRGHSFRAEAFMGMMRWEVLNRLKASHSELEVNNTYGYRTKHARIVNGIDKSHCADAFCIAGNLGAERLCEFFFQKQTRRNNRQIHKLSILKGGIRKRNQAPFEIKGFRLFDKVACKGEESFIFGRRSSGYFDVRKLDGTRISAGISYKKLRLLEKRRTYLTEMRKEEALPPLPEGRGLRA

SEQ ID NO: 4454 - protein, 424 aa, Moorena sp.
MSNYVFVIDQNQTPLKPVHPKRARQLLSFGKAAVFRLFPFTLILKQEVSEPNVHPLILKIDPGSQVTGFALVTEGGEVVWRMQLEHRGGIIKKRLEQRRALRRQRRSRLRYRKPRFLNRKRKEGWLPPSLMHRVQTTETWVKRLLKFCPIQEIWIERVKFDTQLMENPEISGQEYQQGTLQGYTVREYLLEKWYRKCTYCKKEGIPLQVEHIYPRSKGGSNRVSNLGLACEKCNQKKGNTLIEDFLKRKPTLLESVLKQAKTPLKDTSAVNATRKKIVEVISKHSSLKTATGAQTKMNRVRLGLPKEHCLDAACVGEVERLTILSDQPLMVTATGTGGRQKCQTNKFGYPIKHRPLRPIQGFQTGDIVKVDIPKGKNQGQWRGRLCPYSDGNCEIYPKGRKRLGTKLSYVSEVMHRKDGYKYRH

SEQ ID NO: 4455 - protein, 421 aa, unidentified; identical to SEQ ID NO: 2738
  REGION 1..421: note = Human gut metagenome

SEQ ID NO: 4456 - protein, 515 aa, unidentified
  REGION 1..515: note = Human gut metagenome
MTALEEKLSKTEYIYVLGFDGKPQMPTRRKRHVLKLLKTGRARIAEDIPFTIRLTYRNSPVLQPVTLAEDPGRTNIGAAVLSPLGGLLFAAVIETRNKEIKKLMADRQKSRQASRRGERKARQRLAKRYGSMVKSGMVMRKLPMYAADKFVTCKFIRNTQARFCNRKRCPDWITPTVQHLVQTHLNIIRKISRYLPVTDIAFEVNRFAFMHMENPKAMGVDFQNGPLKGYDDVKEAICTQQHGKCLMCKKPISHFHHIVPRSRGGSDTIQNLAGLCPECHTKVHTDTTFRKDFDRKKSGQLKKYGALSALNQAVPFICKKLLEEYGEEHVHFCGGLDTSLIRTALGFEKTKKNQMHEVDAYCIGLAALEINEVETPAFDHTFQIRQFRRQDRSIIHHQTGRSYYQGKEKVAQNRKPGFEQKTTALSQWYEEQVRIHGEKEAEKLRSQLRVEKSCRHYNDMDRFLPGAVFLYEGKRYVLSGRITNGKYLRACGQGMKNFPAAECTFIRHNAGLVFI

SEQ ID NO: 4457 - protein, 450 aa, Moorena sp.; identical to SEQ ID NO: 2935

SEQ ID NO: 4458 - protein, 532 aa, Acidithiobacillus sp.
MLAKGKAPKVPAASARLSAGTDGASYKPSRGDIDRKVRVTSVRKDIGEKMAVFVLDRWKKPLMPCSEKRARMLLERGRARVHHMVPFTIRLVDRLVENSALQPVRLKLDPGSKATGLALVREKETVDVSTGEIIRTLTVLMLLELKHRGHAIRDALTSRGAFRRRRRGNLRYRPARFDNRTKPEGWLAPSLQHRVGTTLAWVERLMRWAPVTALSQELVRFDTQQMQNPEISGTEYQQGTLLGYEVREYLLEKWGRECVYCGVENVPLEIDHIHPRSKGGSDRVSNLTVSCHDCNQAKSNMPVEQFLAKRPERVRKILAQAKAPLRDAAAVNSTRWALFQRLKATGLDVESASGGRTKWNRHQLDIPKEHCLDGACVGHVDAIERWQQPVLSIKATGRGSYQRTRLTKYGFPRGYLTRSKSAFGFHTGDMVKAVVTKGKKSGTWLGRVAIRASGSFNIQTAVCKTGNGLVQGGIHHRFCTLIQRADGYGYSWTKIASTSARTNTQGDAEMGRSVTAALSLPGLNPGVSRATG

SEQ ID NO: 4459 - protein, 471 aa, Caldicellulosiruptor sp.; identical to SEQ ID NO: 3268

SEQ ID NO: 4460 - protein, 431 aa, Moorena sp.; identical to SEQ ID NO: 2831

SEQ ID NO: 4461 - protein, 419 aa, Bacillus sp.
LFVYVINKHGNPLMPCSPRKARILLKNKKAKVVKRTPFTIQLLYGSSGYKQPISLGVDTGTKHVGLSATTKNQVLLEAEVQLRTDIQELLATRRQFRRSRRNRNTRYRKARFLNRKKPNGWLAPSIQHKVDSHIKLVKWVHSLLPITHITVEVAQFDTQKIKNPDIQGAAYQQGEQLGFWNVREYVLYRDGHTCQWCKGKSKDPVLNVHHIESRKTGGDSPSNLMTLCKTCHDMIHREGLEHEIQRRFSSLKDASHMTVMRWFIWNGLKKVYPHANITYGYITKCIRIANGLPKSHMVDARCISGNPLAKPSGTVYLLKFVRKNNRQLHKATILKGGKRKSNKAPRFVKGFQLFDKVVYEGKECFIFGRRSSGYFDLRLLDGTKVHASASWKKLKRVEYASTLLIERRKGDSSPTFALA

SEQ ID NO: 4462 - protein, 529 aa, Moorena sp.; identical to SEQ ID NO: 4276

SEQ ID NO: 4463 - protein, 431 aa, unidentified
  REGION 1..431: note = Human gut metagenome
MPDKVYVISRLGHPLMPCSPAKARHLLDDKKAKVVKRMPFTIRLLYGSTKYIQPIILGVDAGSKTIGLSASTAKEEVFAAEVMPRNDVVENLSTRREFRRARRNRTTRYRKPRSDNRVRSNHERWLAPSVKVKIQEHITSIKRVCTILPISKVVIETAEFDLQLLKAIQEGKPIPEGEDYQKGEMYGSYNVCQYVLWRDNYTCICCGVRGTPKNPVRLHVHHFESRKYGGNAPDNHGTLCDDCHKKFHLGIITDVKLKTRRRQSTRDAAFMGIMRKTLMWRLRTELFIPVAETKGYITKATREKLLVLPKSHTRDALAIAQGRHGFGIKEYAYVEPANHIYTVRPVRHHNRQLHKASILKGGIRKRNQASKYVFGFRLYDKVLYQGKACFVWGRRTSGTFLLRTIDGIKVKDGVSYRNLTLLERSSNYLIA

SEQ ID NO: 4464 - protein, 442 aa, unidentified; identical to SEQ ID NO: 3161
  REGION 1..442: note = Human gut metagenome

SEQ ID NO: 4465 - protein, 439 aa, Moorena sp.
VAVFVLDRSGKPLMPCTEKRARLLLARGRARVHRIIPFVIRLTGRRASGCSLQPLRVKLDPGSRVTGIALVREADDGIAVLNLFELVHRGRQISEALTARRAFRRRRRGADLRYRAPRFLNRGKAKGWLAPSLMHRVHTMIAWVNRVRRWAPVAALSSELVRFDMQALANPEIAGIGYQQGTLAGYEVRNYLLEKWNRTCIYCDATDHRLQIDHLTARARNGSNRIGNLGLACGDCNQDKGALDVREYVRDPKRLARILATASRPLQDAAAVNATRCALASALRATGLPLELDSGGRTKFNRVTHNIPKTHALDAVCVGQVDALRDWQRPSLTIRATGRGSYQRTRLTRHGFPRGYLMRQKQVHGFQTGDHVCANVPHGKKAGVHTGRVAVRATGSFNIHTGTAVVQGIGHRFCALIQRGDGYAYCFEPKNRLRQGDAI

SEQ ID NO: 4466 - protein, 451 aa, unidentified
  REGION 1..451: note = Mouse gut metagenome
MTTFVFVLDRKGRSLMPCHPARARKLLKKGRARVHKVFPFTIRLTDRELENSSVQPMLIKIDPGSKETGIALLREEKNKGHHALYFINLQHRGQQIRNALHKRLCLRRSRRSRNLRYRSPRFLNRRRAEGWLAPSLQHRADSILSWVSRLRKITPVERISQELVKFDTQLIQNSKIEGIEYQQGELAGYELREYLLEKFGRKCIYCGADNVPLNIDHVIPKSKGGSNRVTNLVLACVQCNQKKGSRSIEEFLKDKPEVLRQIKNQLKQPLKDAASVNATRWKLFNKLKSTDFPFEVGSGALTKFNRKKFGIPKAHWLDALCVGNVPSVTNWRNLNVLNIKCCGRGAYQRTRTDKYGFPRGICMRQKKVYGFSTGDMVKAIIPKGKKKGVYVGKVAVRKTGSFNLQTSGQTIQGISYRYCRLITHSDGYSYSWKSCPIPPRVETRGIPGEVR

SEQ ID NO: 4467 - protein, 442 aa, unidentified
  REGION 1..442: note = Human gut metagenome
MSTSVFVLDKKHRPLMPCRPARARRLLRAGRARVVKRFPFVIRLVDRTVEQSEVQPVLIKLDPGSRETGAAVVRDDEKKRHHALAFFVIKHRGGAIRDALKARSAFRRRRRSQNFRCRSPRFLNRVKPKGWLPPSLRHRVETTLSFVRRMCRYLPVSGIAAELVKFDSQKLQTPEVSGIEYQQGTLFEYEVREYLLEKFGRKCVYCGAEGVPLNIDHVVPRAKGGSNRVSNLVLACVSCNQKKGARSLEDFLKGKPEVLARVRRELKTPLRDAAAVNATRWVLFNELKATGLPVETGSGALTKFNRHAFGVEKEHWLDALCVGRLNGAVTRKGLNVLEIRCMGRGSRQRTRLTKYGFPRGYLMRQKCVHGFATGDMVEANVPKGKKAGLWRGRVAVRVSGSFNIQTPKGVIQGVGWKHCRLISHNDGYGYAWLGHAPHSSPA

SEQ ID NO: 4468 - protein, 455 aa, Halomonas sp.
MAVFVLDKHNRPLMPCSEKRARLLLERGRAVVHKRYPFTLRLKDRTGGDTQPLRLKLDPGSQTTGLAVVREANDGQHVLCLFELVHRGFQIKKALQQRAAFRRRRRSANVRYRASRFDNRTKPKGWLAPSLQHRVDTVMAWVQRLNKLAPMTALDQELVRFDMQKLETPDISGVEYQQGTLLGYEVREYLLEKWGRECAYCSATDTPLEVEHIQPRSRGGSNRISNLTLSCHNCNQEKDRQSLADFFATSKGLKKRLKKHGHNAETRVEHVQREQQRLLRDASAVNATRWALFNALNATGLPVAVSTGSRTKYNRQQLGIPKTHALDAACVGVFDTLRNWAVPTLTIKAMGRGSYQRTRLSRHGFPRGVLMREKQVYGFQTGDMVKAIVPTGKKAGIHTGRVAMRKTGSFNIQTKQGAVQGISYKHCTLTQRGDGYGYYLTPFTNLKGGAGQALA

SEQ ID NO: 4469 - protein, 443 aa, Oligella sp.
MAVFVLGKNKRPLMPCSEKRARLLLERGRARVHRLVPFTIRLVDRTVADCVLQPLELKIDPGSKTSGLALVRTRQSVNAQSGEITATAHVLNLFELIHRGFQISQALTARSQMRRRRRSANLRYRAPRSLNRTRPTGWLAPSLQHRVDTIQSWVQRIRRYAPVTHLAQELVRFDMQQLENPEITGVEYQQGELAGYEVREYLLEKWQRQCAYCDATDVPLQIEHIHPKARGGSNRISNLTLACAPCNVKKAAQHITEFLAKDPKRLAKIQAQAKRPLRDAAAVNATRWALLNTLNATGLPVNTGSGGLTKFNRTRLQIPKTHALDAVCVGSVDHVKQWQKPTLVIKATGRGSYQRTRLNRFGFPRGYLTRQKQIHGFQTGDRVKAVVTQGKKIGTYVGRVAVRASGSFNIQTAQSLIQGISHRYCTLIQRGDGYGYSLRTDSN

SEQ ID NO: 4470 - protein, 425 aa, Moorena sp.; identical to SEQ ID NO: 4417

SEQ ID NO: 4471 - protein, 447 aa, Bacillus sp.
MNEQKSNWKIPQKRILKILYEEGYFMLVFVQNKHGEALMPCKPRKARLLLKAKKAVIVSYKPFTIKLLYGSSGYKQAVNVGVDLGTKHTGIAITSQNNVLTKGEIELRQDVKSLLNTRRIYRRSRRNRKTRYRKPRFQNRKRPEGWLPPSIRSRVDNTFFWIDKFCSLVPNPNLTIEVGKFDPHKMINLDIQGVDYQKGQTYGYYDVRYFVFARDQYTCQVCKKKNKILKTHHIVYRSYGGTDRADNFITVCTDCHTHENHQKGAIFWKWMNEGKKLLRYKEGTFMNIFRKRVFTKYPQAEITYGSITTPRRKELGLEKSHANDAIAISGIELIHHNEESIFKIKQFRKKKRSLHEATARKGRTTKNVTCKRNLKNVKQLKGFYLNDKVRVYGQVGFITGFTGTSMAYVKDIHNQYIKKSNKIYKQVNLKDLTLISHNNNWQYEQSL

SEQ ID NO: 4472 - protein, 489 aa, unidentified
  REGION 1..489: note = Human gut metagenome
MTMVYVQNKDGKPLMPTTRYCYVRLLLKEKKARVVCTTPFTIQLNYDTPDITQDLILGIDPGRTNIGVAVVKEDGSCVFSAHLETRNKEVPLLMKKRTAFRRQHRTQDRRRKRQRRAIAAGTTVESNTIERLLPGYEKPIVCHHIRNKEARFNNRSRPAGWLTPTANHLLQAHINLIAKAAKFLPITKVVVELNRFAFMAMDNPNIRRWEYQQGPLYGLGSVKDAVYAQQDGHCLFCKKPIDHYHHVVPRHKGGSETLANRCGLCEKHHDLVHKDKAWAEKLVTRKGGMNKKYHALSVLNQIIPFLMEYLGEETPYDVYATDGKSTKGFRIAKNVPKEHYTDAYCVACSILDTDIDVSAPAEPFELKQFRRHDRQACIRQMVDRKYLLDGKVVATNRHKAIEQKSDSLEEFREAYGDAAVSQLTVKPHPPQYKDMTRIMPGAVMDFNGTIGVMQSSIVGRFYKSTKGYKATPRRCVLLAQNAGMVFLPA

SEQ ID NO: 4473 - protein, 458 aa, Desulfobacter sp.
MKVYVRSQSGKWLMPTNPANTRILLKKGKARVIQRTPFAIQLLYETTEYVQPVTVGIDDGGIHVGIAAVSQGKSVFQQEITLRSDIKSKLDTRRQYRRSRRHRKTRYRKSRFLNRKSSIPTCKVCGGNAPASQVICRSCLNRADGVHQKYAGIKKRSFRIPPSIKAKKEAIVRVVKQVPLPISRIVLEDLYFDFQAMENPDISGEQYQHGDLLYHKNFKQACLVRDKFRCRVCGAQIKLQCHHIRPRAKGGTDKLSNLMTLCDVCHDRHHKERLQLPKQKSSFYMSAAHVQQGKHYLQRELSKAAPLSTTFGYITGHHRNRAGIEKSHVNDAVVIADKNAIPFDGYIKTNHVQSRKRSLHEATARKGRKSPNRTQKRNNKNVFTLKGFTRWDTVQYKGRVGFISGFTGSSSCRIIDIHGEYIKNPEKKYTQVNLSEVRKIHGNRSTVRYYANSSPTES

SEQ ID NO: 4474 - protein, 458 aa, Lactobacillus sp.
LKGVGMMSEIKKVDYIYVVDSNGTPLMPTSRLGMVRRWLKTGQAKWFGNSRNTIQFVRPVTTNTQELTLGVDAGFHLGLSVVGNNREYYVSESLRKSEKDRITSRRELRRTRRNRLRYRKARFNNRRRKDGWLAPSIQHRLDFTIKEIKRLYKFLPITNLVVEVTPFDNQKLLNPDIQGWQYQKGKMYGFKTIKDYLLARDNYRDALDGKQYPASQLRVHHLVQRKDGGSNQPDNLVLLSDINHNQANHNNGILAKLRENRQKTLDYRGAYFMSILATRLSNYFEHYTTTQGYLTANLRQKYEIEKSHLNDAFVIAGGTDTTLRTNNVYSRQKLRNNNRVLQKFYDAKYIDSRDGKQKAGKELSSGRTRRSQELNYDNLRQLRKEKVKKGRVSIRRGHYQLRPHDVVLNTRTNRIETVKGVQNSGTVIKFQTGKTCSIKSVVSLYHVNGILEKKMKNI

SEQ ID NO: 4475 - protein, 318 aa, unidentified
  REGION 1..318: note = Human gut metagenome
PRFDNRISTKRKGWLAPSVENRINAHLSRIEAVFRLLPVTKITVETASFDLQLLKNPDIAGKEYQEGEQLGFGNIREYVLCRDGHVCQHCYGGSKDPVLNVHHLESRRTGGDSPDNLLTLCETCHKALHRGEITLKTKRGQSFRAETFMGIMRWEVLNRLKASHSELKVHNTYGYLTKHARIENGIAKSHGADAFCIAGNLGAERLGEFFFQKQTRRNNRQIHKLSILKGALRKRNQAPFEVKGFRLFDKVACQGEEGFIFGRRSSGFFDVRKLDGTRISAGISYKKLHLLEKRQTYLIEIRKEEAFPPLPEGRGLRA

SEQ ID NO: 4476 - protein, 409 aa, unidentified
  REGION 1..409: note = Ga0307928_10020956
MFVYVINKNGNPLMPCTPAKAKHLLKAGKAKVISNEPFTIKLLWDCEEHTQEITAGMDTGTKTIGCAAITSDKVIYQSEIGIRQDVSRKMTQRKAYRRSRRGRKLRYRKPRFLNRASMRREGRLAPSIRSKVDSHLRERNFVESILPVTRWKVELASFDINKITNSDVKGKDYQQGPQKDYYNTKAYILHRDNYQCQNKKCKNKKKNIKLHVHHIIPRAAGGTNIPSNLIVICEDCHYDLHQGKFKIEGNRSKTKHATEMGIVKSQLEKQFGDFTKTYGYETKFKREKVLQLPKSHINDAIAICCEDGELVTPDNIIYFKKHVPSGDYKQTNGRRSERTIPTGKLFGLRKFDLVQTSKGIGFVRGKRSTGFFKITDLDWNVIGAAINIKKNCKRLSASSTTLIKRRHYV

SEQ ID NO: 4477 - protein, 418 aa, unidentified; identical to SEQ ID NO: 2425
  REGION 1..418: note = Human gut metagenome

SEQ ID NO: 4478 - protein, 431 aa, Acidithiobacillus sp.
MTVFVLDSRKKPLMPCSEKRARLLLERGRARVHRMVPFAIRLLDRLQAESVLQPVRLKADPGSKTTGLALVREKETVHPETGEVVLTAVVLMLLELQHRVDTTDSLVNRLMRLAPITALSQELVRFDMQQMQNPEISGAEYQQGTLAGYEIREYLLEKWGRECVYCDAENTPLEIDHIHPRSRGGSDRVSNLAIACHDCNQRKGNMPLEQFLAKAPERAEKILKQAKARLNDAAAVNSTRWALFQRLKATGLDVEVASGGRTKWNRIRLGLPKAHCIDAACVGYVDAINQWQQPVLGIKATGRGSYQRTRLTKHGFPRGYLTRSKSAFGFQTGDMVHAVVPTRAGRKPGKKAGAYLGRVAIRASGNFNIQTGNGLVQGIHHRFCTLIQRADGYGYSWTKIATTQGDAGMGQASPAALSLPGLNPGVSRATG

SEQ ID NO: 4479 - protein, 372 aa, Ferroplasma sp.
MEKNMKEKQKLDRRNTYTPTDAPQVRGNCDHALNREETLSVHGLKTPSNNPHVDLLSPVGGHKADMPVFILNDDGKPLIPCKPAKARHLLSDKKAKVISSNPFTIQLLWHCEGNVETITLGIDSGYKHIGFSAVTDNKELISGEVVIRTDIPKLNEEKAMYRRKKRNKLWYRKPRFMNRGNNKEGRFAPSIEHKLETHIRLIEKLKRILPVSNTVIEVASFDTQKMKNPEISGIEYQQGELQGYEIREYLLEKFHRTCVYCGKTGVPLEIEHLTPRSRDGPDTVNNLAISCHDCNQKKNNLTAEEFGYPEVRKRALITMRDAAFMNTVRWKLTQLTGSEHTLGFITKKNRISLGLDKTHANDAFVIAGGTCR

SEQ ID NO: 4480 - protein, 414 aa, unidentified; identical to SEQ ID NO: 4264
  REGION 1..414: note = Viral metagenome

SEQ ID NO: 4481 - protein, 254 aa, unidentified
  REGION 1..254: note = Human gut metagenome
MLAGKPLPVGTDYQLGEMYDEYNVRQYVLKRDHYTCQCCGAHTTTKKTVKLHVHHLESRKVGGNAPSNLITLCTTCHDALHKGKVSLDGKERGKPLRDAAFMGIMRKALMARLREELPIPVQGTYGYITKMRREQNDIKKSHVNDARCISKHPLAEPCSVCYRTKAIRHHNRQTHKANFSKGGIRKRSQMPYVVEGYRLWDKVLYKGQECFVSGRRASGSFTLKKLDGTRISKGVTFKKLRLLEPATNYLIERM

SEQ ID NO: 4482 - protein, 419 aa, Geobacillus sp.; identical to SEQ ID NO: 2623

SEQ ID NO: 4483 - protein, 431 aa, unidentified
  REGION 1..431: note = Human gut metagenome
MPNKVYVINKHGRPLIPCSPAKARHLLDDGKAKVKKRTPFTIQLIYGSSGYTEDVILGVDAGSKTIGLSASTEQEELFAANVTPRNDVVDLLSTRREFRRTRRSRKTRHRKARFNNRVHSKHKGWLAPSVEVKIQEHITCIKRVCNILPISKVVVETAEFDLQLLKAVEEGKPVPQGEDYQKGEMYGHYNVRQYVLWRDGYTCQCCGAHSTKKKDVKLHVHHLETRKTGGDAPSNQITLCEDCHQKLHKGLIPAADFKKRKRKSTRDAAFMGIMRNTLMQRLRSELPIPVAETRGYITKATREKLLVLSKSHTNDALAIAQGRHGFNVGYLQSIPQNNRIYTIRPVRHHNRQLHKATVLKGGIRRVNQAVKYVYGFRLYDKVRYNGVECFVWARRVMGYFRLRHLGGENVKCGANYKNLELLERSQNYLIA

SEQ ID NO: 4484 - protein, 420 aa, unidentified; identical to SEQ ID NO: 3247
  REGION 1..420: note = Human gut metagenome

SEQ ID NO: 4485 - protein, 456 aa, unidentified
  REGION 1..456: note = Human gut metagenome
MSTCVCVLSNSGERLMPTFRLGKVRRLLKDGKAKIVKHHPFTIQLLYDSKTNTQPIEICEDVGYNYIGISVKSESHEYVSAQYDTLQDEKEHHDDCRKYRRTRRNRLRYRKPRFDNRKRSEGWLAPSLEHKKQLNIRLIERYVSVIPITRATVEVGSFDTMLLQAIQKGESKPEGVDYQKGPRYNLATLREAVFYRDNYTCQVCGRKIADGAILHMHHMFYWKGRHGYQLDELVTACEKCHTPANHQKGGKLFGFGEDKEFANLSGAAFMNAVRWQIVNALYATYGKEFVTITYGAMTKEKRIALQLEKTHSNDAYAMGDYYLAHRCVFRHYQKRRRNNRVLEKFYDATYIDARTGNKAKGKELFNGRINRNHKKDSENFHKYRSKKVSKGRRSIRRQRYAIQPYDTVRLEGKTYITSGCHNKGTRLLIPANGKSKSVAISKVQVVCHAGAWIQII

SEQ ID NO: 4486 - protein, 492 aa, unidentified
  REGION 1..492: note = Human gut metagenome
MTPVWEGRTFAYLPQSQKEEPAMSVFVVGLNGCRLMPVSERKARLILNDGKASVYRKVPFTIKLNYKTGSTTQPGYLGIDTGSQHIGVSVVREGGTVLHKEEIGLRDSMTKRKLLEAKASLRRGRRCRKTRYRHPKWRPKTKRVYCEVPDKKGRHWQKQKNTFISGRPEEWLPPSLQSKTDHHIRWIKKLQGLLPEWYRLSIELGRFDPARMKDPEIHGNLYQKGPQYDYENVRAYVLDRDRYTCQVCRRKGRKLHVHHILYRSQGASDTPQYMATVCSSCHTTENHLPGGILYQWMQEQKKFTRGLRDATFMNILRKRLMKTFPDAVFTYGNITKVDREKLKLPKSHGNDATAIALVRTGVTSVQDEEPVLYIQQVRRKKRSLHEETPRKGRKEPNRTAARNSKNTKAVTVTKRRDGKKVSVTACLFDRVELNGKKGWITGFTGKACRIVDTEGNYVAATDKYTQVNISSIRILHHTGNWVTGLKWNVGKR

SEQ ID NO: 4487 - protein, 443 aa, Bacillus sp.
MVEENITCFKQRKGENPVVFVLDTNKRPLAPCHESVARKLLKQEKAAIYKRFPFTIILKKSVDEPEIKTTYRLKIDYGSRHTGLAILRNNEVIWLGQVDHRTDIKERLDKRRAFRRARRNRKTRYRKPRFLNRRRKEGWLPPSLESRVKNIETWVNRLRKLCPITHISYENAKFDTQLMRNPEISNIEYQQGTLYGYEIREYLLEKFNRKCCYCGKTNVSLEVEHIIPKSRGGTNRIDNLCLACHECNQKKGSRTAEEFGYPHIQQMVKKTLKDASVVNTTRWKVYEVLKQSGCEVECGTGARTKMNRIRLGLPKTHYFDACCVGESTPIQLYFKTKEVLFIKAKGRGSRSRTNLNKYGFPKGYLARQKFFFGFQTGDMVKAVVSKGKYEGVWFGEVACRKSGSFDIKGKDGKRIAQGISYKYIQVIQRFDGYTYRKEGAELA

SEQ ID NO: 4488 - protein, 471 aa, Caldicellulosiruptor sp.; identical to SEQ ID NO: 3268

SEQ ID NO: 4489 - protein, 418 aa, unidentified; identical to SEQ ID NO: 4327
  REGION 1..418: note = Human gut metagenome

SEQ ID NO: 4490 - protein, 390 aa, unidentified
  REGION 1..390: note = Human gut metagenome
MVYVQDIDGKPMMPTTRYGKVRRLLKNKKAVVVNLCPFTIRLTYVTSDYKQEIVLGVDAGTKHVGLSATTKSKELYSSEVILRNDIVDLLSTRRELRRARRNRLRYRKPRFNNRIKSKRPGWIAPSVKYKIDAHIRVVENVCSILPISRIVIEVAQFDTQKIKNPNISGKEYQEGDQLGFWNTREYVLARDGHKCQYCKGKSKDKILNVHHIESRKTGGDSPSNLITLCETCHKEYHKGNIDLKIKRGKSLRDAAVMGIMKWRLYEEIKSKYDRVSMTFGYVTKYNRINHGFEKSHVSDAFVISKNFNAIRLGYYYKVRLVRRHNRQIHKQKIQKGGIKRLNQSPFEVFGFRLFDRVMFENSYYFIFGRRKTGSFDIRYIDGKKPEECHI

SEQ ID NO: 4491 - protein, 428 aa, unidentified
  REGION 1..428: note = Human gut metagenome
LKVFVLNMRGQPLMPCSPAKARHLLKAGKAVVKRRTPFTIQLRIATGETKQNVTLGVDAGAKHVGLSATTEKEEVFASEVELRQDITGLLAARLSLRRDRRHRKTRYRAPRFLNRVRSKHKGWLAPSVENRIQAHMSRIDAVCRLLPVTKIVIETASFDIQKIKDPSVEGTDYQQGDQLGFWNVREYVLFRDGHVCQHCHGRSKDKILNVHHLESRQTGGDAPNNLITLCETCHKAYHAGKIKLKVKRGQSFRAEAFMGIMRWTLLDRVRKAHPGLPVENTYGYLTKHTRITHGLPKTHCVDAYCIAGNLKAVRRGVHLYQRQVRKHNRQIHKCTVLSKTLKDGTKIGYRKLNQTPHLVKSFRLFDKVRCLGQTGFIFGRRSSGYFDVRRLDGVKLSSGISYRKLTLLEKRSTYLTELRKEDGASSPV

SEQ ID NO: 4492 - protein, 414 aa, unidentified
  REGION 1..414: note = metagenome
MPCSPAKARLLLKEKKAIVKRRTPFTIQLTIATGETKQPVGLGVDAGYKHVGLSASTDKAELYASQVELRQDITDLLSARRALRRARRNRKTRYRAPRFNNRIRTKRKGWLAPSVENRINAHLSRIEAVLRLLPVTKITVETASFDMLLLKNPDIAGKEYQEGEQLGFWNVREYVLFRDGHVCQHCYGRSKDPVLNVHHLESRRTGGDSPGNLITLCETCHEALHRGEIALKTKRGHSFRAEAFMGMMRWEVLNRLKASHSELEVNNTYGYRTKHARIVNGIDKSHCADAFCIAGNLGAERLCEFFFQKQTRRNNRQIHKLSILKGGIRKRNQAPFEIKGFRLFDKVASKGEESFIFGRRSSGYFDVRKLDGTRISAGISYKKLRLLEKRRTYLTEIRKEEALPPLPEGGGLRA

SEQ ID NO: 4493 - protein, 339 aa, unidentified
  REGION 1..339: note = Human gut metagenome
LLSARRALRQSRRSRNTRYRAPRFDNRIRTKRKGWLAPTVENRINVHLSRIETVLRLLPVTKITVETASFDTQLLKNPDIAGKEYQEGEQLGFWNVREYVLFRDGHVCQHCHGRSKDPVLNVHHLESRRTGGDSPDNLLTLCETCHKALHRGEITLKTKRGQSFRAETFMGIMRWEVLNRLKASHSELKVHNTYGYLTKHARIENGIAKSHGADAFCIAGNLGAERLGEFFFQKQTRRNNRQIHKLSILKGGIRKRNQAPFEVKGFRLFDKVACQGEEGFIFGRRSSGFFDVRKLDGTRISAGISYKKLHLLEKRQTYLIEIRKEEAFPPLPEGRGLRA

SEQ ID NO: 4494 - protein, 421 aa, unidentified; identical to SEQ ID NO: 2610
  REGION 1..421: note = Human gut metagenome

SEQ ID NO: 4495 - protein, 411 aa, unidentified; identical to SEQ ID NO: 2606
  REGION 1..411: note = Human gut metagenome

SEQ ID NO: 4496 - protein, 401 aa, unidentified
  REGION 1..401: note = Human gut metagenome
LDANNKQLTPTKEQKAWFLIRKKRATLVSKYPMVIQLKKKIPDKEICKDEVRCGIDDGGLHVGVALVQKCQTRNKVVFKGVIEQRNDVKHLIDVRCGYRRYHRYHKRYRSARFNNRNSSKREERIAPSILQKRQATIRVINQLNKWINITNYWLEDVAIDIRALTDGYKPYRWQYQKSNRLDENIRKAVILRDGYKCMECGKSNCRLEVHHIKPRRLKGSSTLDNLITLCIKCHQKTESVEELYMDRYFALLNSSDNKNLNYAQHVMIGKKWLREQLSNLGMLYLTNGGDTANKRIDWDIAKSHSNDAICITDLRPDTCEIKEWAIKPMRRQSKAKTDNVLGIKHRDLVEYTFRNGETHRGYVTALYPEQNAINFQSPTKHCKKVNAKNVKYFGNILKFTG

SEQ ID NO: 4497 - protein, 512 aa, Haloactinospora sp.; identical to SEQ ID NO: 4194

SEQ ID NO: 4498 - protein, 428 aa, unidentified
  REGION 1..428: note = Human gut metagenome
LKVFVLNMRGRPLMPCSPAKARHLLKAGKAVVRRRTPFTIQLRIATGETKQSVTLGVDAGAKHVGLSAATEKEEVFASEVELRQDITGLLAARLSLRRERRQRKTRYRAPRFLNRVRSKHNGWLPPSVENRIQAHLSRIDAICGLLPVTKIVIETASFDIQKIKHPDVEGTDYQQGDQLGFWNVREYVLFRDGHVCQHCHGHAKDKILNVHHLESRQTGGDAPNNLITLCETCHKACHAGKIKLKVKRGQSFRAEAFMGIMRWTLLDRVRKAHPGLPVENTYGYLTKNTRITLGLPKAHCVDAYCIAGNLKAVRRGVYLHQRQVRKHNRQIHKCTVLSKTLKDGTKIGYRKLNQTPHLVKNFRLFDKVRCLGQTGFIFGRRSSGYFDVRRLDGVKISSCISYRKLTLLEKRSTCLTELRKEDGASSPV

SEQ ID NO: 4499 - protein, 443 aa, Anoxybacillus sp.
MVEENMTCFMQRKGENPMVFVLDTNKRPLAPCHEAVARKLLKQGKAAIYRRFPFTIILKKSVDESEIKATYRLKIDYGSRHTGLAILRGQEVVWLGQLDHRTDIKERIDKRRAFRRARRNRKTRYRKPRFLNRKRKEGWLPSSLESRVQNIQTWVNRLKKLCPIGYISYENAKFDTQLMRNPEINGVEYQQGTLQGYEVREYLLEKFGRKCCYCGKENVPLEVEHIIPKSRGGTDRVDNLCLACHDCNQRKGSKTAEEFGYPHIQKQVKETLKDTSAINSTRWKVYEVLKQTGLDVECGTGARTKMNRIRLDLPKTHYFDACCVGESTTNHLYFKTKEVLFIKAKGRGSRSRTNLDRYGFPRGYLARQKFFFGFQTGDMVKAVIPRGKYQGVWFGEVACRKTGSFDIKGKDGKRIAQGINYRYVQVIQRFDGYAYGKGVAELA

SEQ ID NO: 4500 - protein, 453 aa, Moorena sp.
MSVAVLSRTGQKLMPTSNYRARKLLKSGRATIECYRPIFTIRLTDRAEGETQPIEYACDTGYQHVGVSIKSEKHEFVHAQYDMLSNETERHNDCRKYRRTRRNRLRYRKKRFNNRSKKNKDMAPSLRHRKENQIRLFESFCKVMPITTATFEMGQFDTQLLQAIADGRPLPEGKDYQHGSKYLYQTEREAVFGRDHYTCQVCGKSVKDGVILHTHHIGFWKGYRSNRISNLLTVCEHCHTAKNHKPGGKLWGLEPFGSNLAGATYMSAVRWSMYRELVLRYPEIDIHIQYGAKTAITRKSLHLAKTHANDAYCIGSLHPKYRAAELIYQKKRRNNRILAKFYDAKYIDIRDGKKKSGSVLSCGRANRRESRRSDKNQRIYRGKKCSSGRVSIRKKHYALQNGDLVVYKDKKYFVSGTQNLGTYAKLIGGKPVPIKKIAVIKKGDGWQFIPAQA

SEQ ID NO: 4501 - protein, 480 aa, unidentified; identical to SEQ ID NO: 2726
  REGION 1..480: note = Human gut metagenome

SEQ ID NO: 4502 - protein, 471 aa, Caldicellulosiruptor sp.; identical to SEQ ID NO: 3375

SEQ ID NO: 4503 - protein, 447 aa, unidentified
  REGION 1..447: note = Human gut metagenome
VPAYRIKHITKKEVPYMVYVLDIDGQPLMPTSRHRKVRKLLNSHLAKVAKRCPFTIQLLYQSTKETQPVSLGVNAGSRHIGLAATTEQKVVYQEELVPRNDVVKLLSARRALRSSRRSRKTRYRKPRFNNRVHSKHKGWLAPSVEVKIQEHITAIKRICQILPISDIHVETAEFDLQRLKAMEEGRPLPVGTDYQLGEQYDFYNTRQYVLHRDEYTCQCCGTHDNNVKLHVHHIESRQTGGDAPNNLITLCEHCHKLLHAGKTIIPKGKKRGKSYRDATFMGIMRKTLLERLKKEIDVPVEGTYGYITKYWRERAGLEKSHIHDAVCISKYPYAKPLDIYYLTKTVRHHNRQIHKSNFSKGGIRKRNQAPYLVKGFRLFDKVLYQGKSYFIFGRRATGFFDIRTLNGAKVNKGSISYKKLRIQGTANAYLKEIKAIPHMNKFTCVLA

SEQ ID NO: 4504 - protein, 430 aa, unidentified
  REGION 1..430: note = Human gut metagenome
MPKVYVLNRHGRPLMPCTPAKARHLLDAGKAKVRHRTPFTIQLLYGSTGYTQEVILGVDAGSKTIGLSAATETEELFSAEVKPRNDVVELMSARRQFRRARRNRTTRYRKPRFDNRVRSKHKGWLAPSVEVKIQEHMTAIRRACAILPVSKVVVETAEFDLQLLKAVAEGKPVPQGEDYQKGEMYGHYNVRQYVLWRDSYTCCICGVHGSVRKGVPLHVHHLESRRVGGDAPDNLVTLCTACHDKLHKGIIMAADIKKRKRRSTRDATFMGIMRMTLLRRLREQLPVPVVETRGYITKATRENLLVLPKSHANDALAIAHGPQGFRAEHLPNIRQADRLYTIRPVRHHNRQLHKATILKGGVRKTNQAEKYICGFRLYDKVLYNGIECFVWGRRTSGSFLLRQLNGEKVKDGVSYKHLKLLERSQSYLVA

SEQ ID NO: 4505 - protein, 456 aa, unidentified
  REGION 1..456: note = Marine metagenome
MAVFVLDKKKQPLMPCSEKRARLLLARGRAVVHKRYPFTIRLKNRVGGEAQPLRLGIDPGSKTTGLALMHEPDSQQRHVLCLFELIHRGFQIKKALQQRAAFRRRRRSANLRYRAPRFNNRIKPKGWLAPSLQHRVDTVMAWVNRLSKSAPITGISQELVRFDTQKLESPEISGVEYQQGTLLGYEVREYLLEKWGRECAYCGTADTPLEIEHVVPRSRGGSNRVSNLTLSCHPCNAEKDSQTLTDFFATNKGLKKRLKANGLSADAQLERVQRQLKQPMRDASAVNATRWALFSALKTTDLPVAVSSGGRTKYNRQRLNIPKTHALDAACVGAFGKLYDWTVPTLTIKAMGRGSYQRTRLTKHGFPRGFLMRQKQVHGFQTGDMVRAIVPTGKKAGTHTGRVAIRKTGSFNIQAEYGAVQGISHKYCTLIQRGDGYGYHFTLFSNLTGGAGQAVA

SEQ ID NO: 4506 - protein, 447 aa, Moorena sp.
VAGIKTSLNSPDASLTARGHAGQNLRVSVVYVLNKRGKPLMPCSPGKAKVLLKESKAKVAKRTPFTIQLTTATGETRQLITLGVDSGYSSLGLSAVSQDKELYRAQVRLREDLVKLNSERKGYRRARRHRKTWYRSPRFLNRKKPEGWLAPSIQHKLDSHIKLINKVKKILPISKISIEVAAFDIQKIKNPDIDGKGYQSGKQAGFWNVREYVFHRDNHKCQHCKGKSKSSVLEIHHLKSRQTGGDRPENLITLCSTCHDKTSRGALELKAKPSKGFKAETFMSTVRWKLINKLRELGNVVTHTYGYITKQKRRELKLPKSHTSDAFVIADGTTQKRTTSEDFIKQVRKCNRKLFKGDRSHIRNTTERFVCGFQRFDKVLCNGVECFIFGRRKTGYFDLRKLDGTNIHSSAKHTKLTLLESAKTLLTERKPAFLPMPEGRGFRAGGF

SEQ ID NO: 4507 - protein, 420 aa, unidentified; identical to SEQ ID NO: 3685
  REGION 1..420: note = Human gut metagenome

SEQ ID NO: 4508 - protein, 396 aa, unidentified
  REGION 1..396: note = Human gut metagenome
VVRRTPFTIQLTIATGESKQPVSLGVDAGYKHVGLSASTEKAELYASEVELRKDITDLLSARRALRQSRRNRKTRYRAPRFDNRIRTKRKGWLAPSVENRINAHLSRIEAVLRLLPITKITVETASFDMQRLKNPDISGKEYQEGEQLGFWNVREYVLFRDGHVCRHCHGRSKDPVLNVHHLESRRTGSDSPDNLITLCETCHKALHRGEITLKAKRGQSFRAQAFMGIMRREVLNRLKASYPELKVHETYGYLTKHARIANGIVKSHGADAFCIAGNLGAERLGEFFFQKQTRRNNRQIHKLSILKGGIRKRNQAPFEAKGFRLFDKVACQGEEGFIFGRRSSGSFDVRKLDGTRISAGISCKKLRLLEKRRTYLTEIRKEEALPPLPEGRGLRA

SEQ ID NO: 4509 - protein, 457 aa, Dactylococcopsis sp.
MYVFVLDKNSQPLDPTHPAKARKLLKAGRAKVFRRYPFTIIMQDLEVRNVLTFAPAPHCPRLNPIQAGSGVQNCVTHKHQLKIDPGSKTTGLAILKNNQVLWGAELTHRGSQIRDALTSRRAIRRSRRNRKTRYRKPRFLNRKRPEGWLPPSLQSRVDNTMTWVNRLTKICPITGLSQELVRFDLQKLENPEISCIQYQQGELQGYEVREYLLEKWGRQCVYCSVKDVPLEIEHIKPKSKGGSNRISNLTLACNECNQDKGNQEIEDFLSGKPNLLKRIQSKTKKPLADATAVNTTRWKLYESLQQTGLPVETGSGGLTKFNRIQRGVSKTHWLDAACVGKSTPNPLYVKTQSILSIQANGHGCRQMIQMNKYGFPRKGYKPKNPPRDWRTGDIVHVREGKNKGIRSARIKTVRAKGSFDLRVNGKVVSVSRKHIQSVFKRDGYDYKVNKSQFLSSK

SEQ ID NO: 4510 - protein, 413 aa, unidentified; identical to SEQ ID NO: 2636
  REGION 1..413: note = Human gut metagenome

SEQ ID NO: 4511 - protein, 431 aa, Moorena sp.; identical to SEQ ID NO: 3507

SEQ ID NO: 4512 - protein, 413 aa, unidentified
  REGION 1..413: note = Human gut metagenome
MTSYAFVLDANGKQLAPTKEPKAWFLIRKKRAALVSKYPMVIQLKKEIPENEICKDEIRCGIDDGGLHVGIALVQKCKTKNKVVFKGTIEQRNDVKHLMEVRRNYRRYHRYHKRYRQARFDNRKSSKRKGRIAPSILQKRQATIRVINRLNKWINITNYWLEDVSIDIRVLTDGYKSYSWQYQKSNRLDENIRKATILRDGGKCMECGKSNCRLEVHHIKPRRRNGSNTLDNLITLCESCHQKTEGQEELYMDRYFSLLKSSDNKNLNYAQHVMIGKMWLRKQLSGLGVLYLTSGGDTANKRIDWNIEKSHTNDAVCITDLQPDTCDIKEWAIKPMRRQSKAKTDHVLGIHHRDLVEYTFKNGETHRGYVTALYPDQKAINFQSQTKHCKKVNARKCKLLWNYSKIYWFENAS

SEQ ID NO: 4513 - protein, 451 aa, Verrucomicrobium sp.
MVLVLDKRKKPLMPCTEKRARLLLTRKRAVVHRRYPFTIRLKDRENGMHQPIRLKLDPGSRTTGLALVREAANGTQHVIWLAELEHRGSAIRDRMAGRRAFRRRRRSTLRHRPARFDNRRRPEGWLAPSLRHRMDTTMSWVGRLRRLAPVAAISQELVRFDLQKMQNPEITGVEYQQGTLAGYEVREYLLEKWNRQCAYCDAENVPLEIDHIHPRSRGGSDRVSNLTLACHECNQNKGNRDIREFLAKRPERLAAILARAKTPLHDAAAINSTRWALYNRIKATGLPVETGSGARTKWNRGKLNIPKAHCLDAACVGDLDGLLGWNSPAFAIQTTGRGSYQRTRLTKDGFPRGYLTRNKRHYGFQTGDLVRASVPRGIKAGLHLGRVAVRASGSFNIQTLHGVVQGIGHRHCSLIQRADGYGYRIKPKIAETKGGCGNRGGLQPPRYPSPA

SEQ ID NO: 4514 - protein, 494 aa, unidentified
  REGION 1..494: note = Human gut metagenome
MAMVYVQNKDGKPLMPTTRYCYVRLLLKENKARVVSTTPFTIQLNYDTPDITQDLILGIDPGRTNIGVAVVKEDGQCVFSAHLETRNKDVPLLIQKRAGFRKQHRTLNRRRKRQRRAKVAGTTVEGETIERLLPGYEKPVVCHYIRNKEARFNNRSRPAGWLTPTANHLLQTHINLIAKVAKFLPITKVVVELNRFAFMAMDNPNIRRWEYQQGPLYGLGSVEDAVYAQQDGRCLFCKKPIDHYHHVVPRHKGGSETLANRCGLCREHHALVHTDKVWADKLVTRKEGVNKKYHALSVLNQIIPHLMEYLGSETRYDVYATDGRSTKGFRVAKNVPKEHYTDAYCIACSILDTDIEVSTPVEPFELKQFRRHDRQACHQQRVDRKYYLNGKQVATNRHKAIEQKSDSLQEFRESYGDTAVSQLAVKPHSPQYKDMTRIMQGAVMDFGGTVGVFQGSDGFHNGKPDYYKSAKGARVLTKRCVLLAQNTGIVFIPA

SEQ ID NO: 4515 - protein, 415 aa, unidentified
  REGION 1..415: note = Human gut metagenome
MVYVLANDGQPLMPTERHGKVCRMLKSGIAKVVKKCPFTIQLQYESERNVQPVALGIDAGSKHVGVSATTKAKVLYESDVELRDDIVKLLATRRQLRRRRRSRKTRYRPARFDNRRRKEGWLTPSIRQKIESHLTVVANVCKILPVSQIIVETASFDIQKIKNPDIQGIEYQQGEQMDFWNIREYVLFRDGHTCQCCKGKSKDKVLNVHHIESRKTGGNAPNNLITLCETCHKGYHNGTVTLPKNIKRGMKFKDAAFMGIMRWTFYNTLKEQYEPDIPVHYTYGYITKNTRINHNLPKGHCIDARCISGNPDAVSDGTYYYQKKVRCHNRQIHKQTILKGGIRKSNQAEYLVRGFRLFDKVRYQGREYFIFGRRKSGFFDIRTLSGEKVSKGSISVKKLTFADTRKNYLIERRTV

SEQ ID NO: 4516 - protein, 426 aa, unidentified
  REGION 1..426: note = Human gut metagenome
MVYVQNRLGQPLMPTKDHRKVRLLLDRGAAVVVKRTPFTIRLTTRSKTYVQPIILGVDAGSKTIGLSASTEAEELFAAEVTPRNDVVDNLSTRREFRRARRNRKTRYREPRFNNRVRSKHKGWLAPPVEVKIQEHITAVKRVCAVLPVGKVVVETAEFDLQLLKAVEAGLPVPQGEDYQRGEMLGHYNVRQFVLWRDGYTCRCCGAHWKGVKFHVHHLESRKTGGDAPDNLVTLCDGCHKKFHKGIITPDILKKRKRRPTRDAAFMGIMRKTLMERLRAELPIQVVETKGYITKYTRVELLKLNKTHTNDALAIAQGRRGVGVEELTAIPQSDYIYHIRPVRHHNRQLHKAAILPGGIRKSNQAPRYVRGFRLFDKVSYLGKECFIWGRRSSGSFLLKLLDGTKVKDGVGYKRISLLERSASYLIS

SEQ ID NO: 4517 - protein, 446 aa, Halomonas sp.
MAVFVMGKNQQPLMPCSEKRARLLLQRGRAVAHKRYPFTIRLKDRVGGNTQPLRLGIDPGSRITGLALIRESVGEQRHVLRLFELAHRGFQIKKALEQRAAFRRRRRSKNLRYRAPRFNNRTKPKGWLAPSLQHRVDTVMAWVNRLSRLAPITAISQELVRFDTQKLENPEISGIEYQQGTLLGYEVREYLLEKWGRECAYCGDTDTPLEIEHVVPRSRGGTNRVSNLALSCHPCNQAKDNGTLDDFFATDKGLKKRLKTNGHTADARLERVQRQLKQPLRDASAVNATRWALFNALKATGLPVAVSSGGRTKYNRQRLGIPKTHALDAACVGAFDMLHDWAVPTLTIKAMGRGSYQRTRLTQYGFPRGYLMRQKQVHGFQTGDMVKAVVPTGKKAGTHMGRVAVRKTGSFNIQTEQGTVQGISHKHCTVIQRGDGYGYHLHPSPT

SEQ ID NO: 4518 - protein, 452 aa, Eubacterium sp.
MVFVLSSTNKKLMPTNEYRARKLLKSGKAAVYKHRPFTIILTKRKDGYTQPIEYCCDTGYQHIGISIKSQKHEYVNEERILLKDETERHNDCRKYRRTRRNKLRYRKARWSNRHNNLICKDGFAPSIRNKRDVHINLFKMYHEVCPITSATFEMGQFDTQLLKAVENGDNVPQGTDYQHGERYGYSTLREAVFARDNYKCVCCRKSAIKSGLILKMHHLGYRIGDRSNRMSNLATVCSNCHTSKNHQKGGKLYDLKPKLKTFKGATFMTMVRYDMFSKLKESAPDIKFNMTYGALTKLKRKDYSIKKSHSNDAYCMGVFHPKHRTDFKCYQKLRRNNRILSKFYDAKYIDLRDGTVKSGKQLSCNRTNRRELRNSNKNERIYRGPKISKGKTVVRKQHYQYRPYDFVWYKNVKYAVKGVQDKGKRIALQNHLPVSISKIKRSVHVNGWKLVI

SEQ ID NO: 4519 - protein, 422 aa, unidentified
  REGION 1..422: note = Nitrospiraceae bacterium UBA665
MQRVLVVSSNRKQLMPCHPARARMLLRQGKAAVLKRYPFTIILKDRVDGDCQAMELKVDPGSKATGIALVADFKKGKTVIWASELKHRGQQIKDALESRRAIRRSRRNRKTRYRQPRFLNRTRPKGWLPPSLMSRVHNVDTWASRLQRFTPITTMVVETNRFDTQKIVNPEISGIEYQQGTLFGYEVKEYLLEKWGRKCVYCGKTDVPLEVEHIVPRTRGGSDRITNLTLSCEKCNQKKDNLTAEEFGHPNVQKQALKPLKDAAAVNATRYAIGNMLRQYGLPISFWSGGRTKYNRTRQGYPKAHWIDAACVGETGENVRLNPEMQRLIMTAKGHGSRQVCRVDRFGFPRTSAKELRIVHGFRTGDLVCAVVPNGKKKGFYTGRIAVRSSGSFNIQTSNGTVQGINHQYCSVLQKADGYNYN

SEQ ID NO: 4520 - protein, 462 aa, Moorena sp.
MSAFVLDRNGRPLMPCSEKRARLLLARGRARVHRVMPFVIRLVDRMADSCALQPLRIKLDPGSMVTGVALVREADRRIAVINLFELIHRGRQISEALTARRNFRRRRRGANLRYRAPRFLNREKSEGWLPPSLQHRVDTTMAWVQRIRRWAPVTALSSELVRFDLQQLENPEISGLEYQQGTLAGYEVREYLLEKWKRTCIYCDAKERPLQIEHLTARARQGSNRVGNLGLACGDCNQDKGALDVRAYVKDPKRLARILATASRPLRDAAAVNATRWALTDMLRATGLPLELASGGRTKFNRITHDLPKTHALDAVCVGRVDAIDDWERPPLSIKASGRGSYQRTRLTRHGFPRGYLMRQKQVQGFQTGDHVRADVPNGKKAGMHVGRVAVRATGYFNIQTASIVVQGINHRHCRLIQRGDGYAYSLQSTGGYRQGDAGVWRAAHAALSLPGLKPEVSRAFS

SEQ ID NO: 4521 - protein, 318 aa, unidentified
  REGION 1..318: note = Human gut metagenome
LVKKIQKFLPISDVVLEVNKFAFMQLDNPNIQKWQYQQGPLYQKANLEEAVSEMQEHHCLFCKKPIAHYHHVVPQSENGSDTIGNIVGLCTKHHDLVHKDTEWQKKLAKKKTGLNKKYGALSVLNQIIPALTKELSSLFPKHFFATNGKSTYDYRAAHGVSKDHWLDAYCIACSVLADDVCDNNINSHVPYELKQFRRHDRRALHKENMSRVYTLNGKSVATNRHKATEQTTDSLEEFRQRQPNDVCKLKVKEHHPEYRNPKRNFPGCVFLVGKHTHVMQGTSGSHNGKADGYYDTNGNSYSSGECKFVAKNGGIVFA

SEQ ID NO: 4522 - protein, 442 aa, unidentified
  REGION 1..442: note = Human gut metagenome
MSTSVFVLDKRHRPLMPCRPARARRLLRAGRARVVKRFPFVIRLVDRTVEQSEVQPVLIKLDPGSRETGAAVVRDDEKKRHHALAFFVIKHRGGAIRDALKARSAFRRRRRSQNFRCRSPRFLNRVKPKGWLPPSLRHRVETTLSFVRRMCRYLPVSGIATELVKFDSQKLQNPEVSGVKYQQGTLFEYEVREYLLEKFGRKCVYCGAEGVPLNIDHVVPRAKGGSNRVSNLVLACVSCNQKKGARSLEDFLKGKPEVLARVRRELKTPLRDAAAVNATRWVLFNELKATGLPVETGSGALTKLNRHAFGVEKEHWLDALCVGRLNGVVTRKGLNVLEIRCMGRGSRQRTRLTKYGFPRGYLMRQKCVHGFATGDMVEANVPKGKKAGLWRGRVAVRVSGSFNIQTPKGVIQGVGWKHCRLISHNDGYGYAWLGHAPHSSPA

SEQ ID NO: 4523 - protein, 426 aa, unidentified; identical to SEQ ID NO: 4516
  REGION 1..426: note = Human gut metagenome

SEQ ID NO: 4524 - protein, 414 aa, unidentified
  REGION 1..414: note = Human gut metagenome
MPCSPAKARLLLKEKKAIVVRRTPFTIQLTIATGETNQPVSLGVDAGYKHVGLSASTEKAELYASEVELRQDITDLLSARRALRQSRRNRKTRYRAPRFDNRIRTKRKGWLAPSVENRINAHLSRIEAVLRLLPITKITVETASFDTQLPKNPDIAGKEYQEGEQLAFWNVREYVLFRDGHVCQHCHGRSKDPVLNVHHLESRRTGGDSPGNLITLCETCHKALHRGEIKLSAKRGQSLRAEAFMGIMRWEVLNRLKLSHPELEVNNTYGYRTKHARIANGIAKSHCADAFCIAGNLGAKRLGEFFFQKQTRRNNRQIHKFSILKDGIRKRNQAPFEVNGFRLFDKVACKGEEGFIFGRRSSGYFDVRKLDGTCISAGISYKKLHLLEKRRTYLTEIRKEKALPPLPGGSGLRA

SEQ ID NO: 4525 - protein, 432 aa, Anoxybacillus sp.
MVFVLDTNKRPLAPCHEAVARKLLKQGKAAIYRRFPFTIILKKSVDESEIVDESEIKATYRLKIDYGSRHTGLAILRGQEVVWLGQLDHRTDIKERIDKRRAFRRARRNRKTRYRKPRFLNRKRKEGWLPSSLESRVQNIQTWVNRLKKLCPIGYISYENAKFDTQLMRNPEINGVEYQQGTLQGYEVREYLLEKFGRKCCYCGKENVPLEVEHIIPKSRGGTDRVDNLCLACHDCNQRKGSKTAEEFGYPHIQKQVKESLKDTSAINSTRWKVYEVLKQTGLDVECGTGARTKMNRIRLDLPKTHYFDACCVGESTTNHLYFKTKEVLFIKAKGRGSRSRTNLDRYGFPRGYLARQKFFFGFQTGDMVKAVVPRGKYQGVWFGEVACRKTGSFDIKGKDGKRIAQGINYRYVQVIQRFDGYAYGKGVAELA

SEQ ID NO: 4526 - protein, 536 aa, unidentified
  REGION 1..536: note = Human gut metagenome
VLRPRYQYPTRWYPSREQGSGNGCLSGEENTDLKQEVSGTLSKGDHSHPGEQDFCVPAITIQGGPAMSVFVVGLNGCRLMPTSERKARLLLKHGKASVYRKVPFTIKLNYKTGSTTQSGYLGIDTGSQHIGVSVVREDGAVLHKEEIGLRDSMSKRKLMQSRASSRRGRRHRKTRYRHPKWRPKAKRVYCEIPDRKRRHWKKKEITFTSKRPKGWLPPSLQSKTDHHIRWIKKLQDLLPEGYRLSIELGRFDPARLKDPEIHGELYQKGPQYDYENVRAYVLNRDRYTCQVCGKKGGKLHVHHILYRSYGATDDPQYMATVCSDCHNTENHHQGGILYQWMQKQKKFTRGLRDATFMNILRKRLIEAFPGATFTYGNITKADRERLRLPKSHGNDATAIAIVKTGIMTVKDKEPVIYIQQVRRKKRSLHEETPRKGRKEPNRKASRYDKNTKAVTVTKRKNKKKISITGCLFDRVELNGKKGWISGFTDKSCYVKDENDQYIRTSPKYKQVSLSKLKILHHCGNWAIGARRSLGKG

SEQ ID NO: 4527 - protein, 512 aa, unidentified; identical to SEQ ID NO: 4307
  REGION 1..512: note = Human gut metagenome

SEQ ID NO: 4528 - protein, 443 aa, Anoxybacillus sp.
MVEENMTCFMQRKGENPMVFVLDTNKRPLAPCHEAVARKLLKQGKAAIYRRFPFTIILKKSVDESEIKATYRLKIDYGSRHTGLAILRGQEVVWLGQLDHRTDIKERIDKRRAFRRARRNRKTRYRKPRFLNRKRKEGWLPSSLESRVQNIQTWVNRLKKLCPIGYISYENAKFDTQLMRNPEINGVEYQQGTLQGYEVREYLLEKFGRKCCYCGKENVPLEVEHIIPKSRGGTDRVDNLCLACHDCNQRKGSKTAEEFGYPHIQKQVKESLKDTSAINSTRWKVYEVLKQTGLDVECGTGARTKMNRIRLDLPKTHYFDACCVGESTTNHLYFKTKEVLFIKAKGRGSRSRTNLDRYGFPRGYLARQKFFFGFQTGDMVKAVVPRGKYQGVWFGEVACRKTGSFDIKGKDGKRIAQGINYRYVQVIQRFDGYAYGKGVAELA

SEQ ID NO: 4529 - protein, 424 aa, unidentified; identical to SEQ ID NO: 3434
  REGION 1..424: note = Human gut metagenome

SEQ ID NO: 4530 - protein, 418 aa, unidentified
  REGION 1..418: note = Human oral metagenome
MVYVINKDGQALMPTERFGKVRRLLKNGLAHVICRIPFTIRLDYETTHFVQPISLGVDAGSKHIGISATTSKKELYAADVELRNDIVDKLSTRREQRRTRRNRLRYRKARFNNRVSSKYKGWLAPSVENKIQTHLTVVEKIHKFLPITKIIVETASFDIQKIKNPSISSKEYQQGEQLGFFNVREYVLFRDNHTCQHCKGKSKDHILNVHHIESRKTGGNSPSNLITLCESCHKAYHNGKIDIKVKRGASFRDAAFMGIARWTTYERLKNIYPNVSMTFGYITKNTRITNGLPKEHHVDARCISGNPKSKPLGYYFYQKKVRCQNRQIHKANFLKGGRKKLNQSPFLVKGYRLFDLVEYQKKLYYIFGRRDSGFFDIRRLDGTKVNKGSISCKHIRLISKRRSILTERRNSCSIPPTN

SEQ ID NO: 4531 - protein, 457 aa, unidentified
  REGION 1..457: note = Human gut metagenome
DSLFTKGVPCMSTCVCVLSNSGERLMPTFRLGKVRHLLKDGKAKIVKHHPFTIQLLYDSKTNTQPIEICEDVGYNYIGISVKSQSHEYVSAQYDTLQDEKACHDSCRKLRRSRRNRLRYRKPRFDNRKRGEGWLAPSLKHKKELNVNVVKMYCAVMPITHATVEVGSFDTMLVKAIQEGKAIPEGADYQKGPRYNLATLREAVFYRDNYVCKVCGRKATEGAILHVHHMFYWKGRHGNSLSELITVCEKCHTPANHQKGGKLYGFGENVKFADLSGAAFMNTVRWQIVNELYAAFGKDFVTVTYGAMTKEKRIALRLEKSHNNDAYAMGEFHPNCRCTFEHYEKVRRNNRILEKFYDSRYIDIRTGEIATGKELFNGRINRNHKKDSENLHRYRGKRTYAGHRALLRKKVNLNPGDLVSLNGEVLVVHSTHTNKKGAVIHRQYHVAKLCESQTIKSE

SEQ ID NO: 4532 - protein, 431 aa, unidentified; identical to SEQ ID NO: 3235
  REGION 1..431: note = Human gut metagenome

SEQ ID NO: 4533 - protein, 442 aa, unidentified
  REGION 1..442: note = Human gut metagenome
MVTVQQSTHHLPFGRVFIRRNLFMVYVISQDGKPLMPCSDPIARLLLKQGKAKVKKREPFTIKLTYETTNYTQGLTLGVDTGSGTIGTAVSKDNGDIVYMSEVVVRNDITDKMTQRAKYRRNRRNRKTRYRKARWLNRASSIKKDRFSPTMQSKLHSHVREIEYIQSILPVTEMVFETGQFDMQLMKNPSLANPKVRPWGYQKGANYGFENTKAMVLNRDNYTCQCCKGKHKDSKLEVHHIVFRSQGGSDEESNLLTLCHTCHKDLHSGKINPKLSGKVKGNLKYATQMNSIRKQLFRFYPNAIETFGYVTKANRLHLGVDKEHYYDACTIATQGNAFNVKSNLYKKKCVSDGDFQKTKGIRSEQPIVTDKICGFRKFDKVRYFGNDYFIKGRMSTGYAILMDIDGNKIDFSTMPRGYKTPKLSNCKRITARSTVMTQVKVV

SEQ ID NO: 4534 - protein, 427 aa, Enterococcus sp.; identical to SEQ ID NO: 2410

SEQ ID NO: 4535 - protein, 431 aa, unidentified
  REGION 1..431: note = Human gut metagenome
MDAWDIIVVLNKRGKPLMPCSPAKARHLLKEKKAAVVRRTPFTIQLTIATGESKQPVSLGVDAGYKHVGLSASTEKAELYASEVELRQDITDLLSARRALRQSRRNRKTRYRAPRFDNRIRTKRKGWLAPSVENRINAHLSRIETVIRLLPVTKISVETTSFDMQLLKNSDIAGKEYQEGEQLGFWNVREYVLFRDGHVCQHCHGRSKDPVLNVHHLESRRTGGDSPGNLITLCETCHKALHRGEITLKAKRGQSFRAETFMGIMRWEVLDRLKASHPKLEVQNTYGYRTKHARISNGIAKSHCADAFCIAGNLGAERLGEFLFQKQTRRNNRQIHKLSIPKGGIRKRNQVPFEVKGFRLFDKVAYKGEEGFIFGRRSSGYFDVRKLDGTHISAGISYKKLRLLEKRQTYLTEIRKEEALPPLPEGRGLRA

SEQ ID NO: 4536 - protein, 451 aa, Geobacillus sp.
MVEENITCFMQRKGENPMVFVLDTNKFPLAPCHEAVARKLLKQGKAAIYKRFPFTIILKKSVDESEIKTTYRLKIDYGSRHTGLAILRGQEVVWLGQLDHRTDIKERIDKRRAFRRARRNRKTRYRKPRFLNRKQKEGWLPPSLESRVQNIQTWVNRLKKLCPIGYISYENAKFDTQLMRNPEISGIEYQQGTLQGYEVREYLLEKFGRKCCYCGKENIPLEVEHIIPKSRGGTDRIDNLCLACRDCNQRKGNQTAEEFGCPHIQKQVKKSLKDASVINATRWKVYEVLKQAGLDVECGTGARTKMNRIRLGLPKTHYFDACCVGESTPSHLYFKTKEVLFIKAKGRGSRSRTNLDRYGFPRGYLARQKFFFGFQTGDMVKAIVPRGKYKGVWFGEVACRKTGSFDIKGKDGKRIAQGISYKYIQVIQRFDGYAYRKEGVELAQGAIPPRA

SEQ ID NO: 4537 - protein, 424 aa, Planktothrix sp.
MSNFVLVIDTNRKPLNPCTPGVARSLLKSGKAKVFRRFPFTIVLNKAVDDKPIPMQLKLDPGSKVTGIALLQGEKVVFGAEIIHRGQQIKDALESRRALRRGRRNRKTRYRQPRFLNRNRPDGWLAPSLQHRVETILTWVNRLRRYTPIEGISQELVRFDLQHIENPEISGIEYQQGTLFGYEVREYLLAKWSRKCAYCGKENVLLQIEHIHPKAKGGTNRISNLCLACEPCNIKKGTQDIEAFLKKKPDVLKRVLAQAKRPLKDAAAVNSTRWALFNRLKQTGLPVKVASGGKTKFNRCRLELPKTHWLDAACVGNVEQLDVKTIQPLLIKAMGHGTRQMCGTDKYGFPIRHRSRTQIHQGFQTGDIVKAVVTSGKKIGTYIGRVLCRASGSFDIATKDGRVQGISHKYCQAIHRKDGYAYSW

SEQ ID NO: 4538 - protein, 420 aa, unidentified
  REGION 1..420: note = Human gut metagenome
MQYVYVLSKHGEPMMPCSPGKARLLLKQQKACVVRRTPFTIKLLYGSAGYKQPITLGVDAGSKHVGLSASTEKRELYREKFAPRNDVVELLSTRRQNRRSRRNRKTRYRAPRFDNRVHSKHKGWLAPSVEVKIQEHITIIKRICKILPISLVRVETAEFDTQRLKAMLAGKPLPVGTDYQLGEMYDEYNVRQYVLKRDNYTCQCCGAHTTAKKLVKLHVHHLESRKTGGNAPSNLITLCTTCHKNLHKGKVTLDGKERGKPLRDAAFMGIMRKTLMARLKKELPIPVQGTYGYITKMRREQNDIKKSHTNDARCISKHPLAEPCSVCYRTKAIRHHNRQTHKANFSKKGIRKRSQMPYLVEGYRLWDKVLYKEQECFVSGRRSSGSFTLKKLDGTSVSKGVTFKKLRLLEPATNYLIERM

SEQ ID NO: 4539 - protein, 406 aa, unidentified; identical to SEQ ID NO: 2752
  REGION 1..406: note = Human gut metagenome

SEQ ID NO: 4540 - protein, 388 aa, Ammonifex sp.
MAPTFVGYPKVFVVDAEGKPLLPCHPARARKLLKSGKAEVLRGSPFTIKLKYPVSTPVGSLRAKVDDGSRYVGIALVNEHTGEVVFRGVLVQRGDVVRLLTLRREYRRGRRYRIVRHRPCRNRARQQVVPFPSVRQKKEAIYRVLADLAKIAPISGVDVELVSSGVKNPALPGKSTREKVLNRDGACVLCGSTRRLQRHHLVPRSKGGTDTPENQVLLCAECHRKLHAGGATLDRRGKTFAWVAHAVLGKAYLLALLSRFGEVRVAEGWQTKEWRESLGLPKSHTNDALSLFLPGGPLKVFGPEYLIWPLRRRRWEGNPTKTCEEKNGFRHWDVVRAVRAGKVVFGCVRSLKARAMTLRTAKDDNFEVSYSKARLLHRPRGLAYMPVW

SEQ ID NO: 4541 - protein, 513 aa, unidentified
  REGION 1..513: note = Human gut metagenome
LKKEAAGHRQGKDCRPVRYGPPYRAGMPDGRRKPERKHMVAVVTSTGKPLMPTSAYRARKLLKKGRAVIFKYRPYFTIQLVDRADGEVQEVEYKSDTGSVHVGISVCTEKKELLSEQRDLLENEPEHHNDRKKNRRTRRNRKRYRKPRFDNRKKKPQEGHEKWLPPTLLHKMEVQVRLFREFCRVVPVTSACFEMGKFDTQALKAVSKGEPVPEGEGYQKGERYGTDTLRAAIFLRDGHTCRFCGRSVKDGAILHVHHVGYWKGDRTNRPANLASACEQCHTPANHGKNGLLYGKEPEFKTLKDASYMTSVRWIMLDEIKKAAPGVQVSVTYGVTTKRKRQELHLPKSHVNDAFSMASFHPKKRSDTEYWKKIPRHDRVLQKFYDAIYLDTRDGSEKKGSELSNGRISRNHKKDSENLHQYRGHKVSKGHNSIRRGASSLKPGSIVMYKGEKMTVHGTHTRYVKGKDGKTAKKVNVQFTCPASDGKKSASLEKCTPVSRVYNTGWKRYWPDKK

SEQ ID NO: 4542 - protein, 415 aa, unidentified
  REGION 1..415: note = Human gut metagenome
MVYVVANDGQPLMPTERHGKVCRMLKSGMAKVVKKCPFTIQLQYESERNVQPVALGIDAGSKHVGVSATTKAKVLYESDVELRDDIVKLLATRRQLRRRRRSRKTRYRPARFDNRRRKEGWLAPSIRQKIESHLTVVANVCKILPVSQIIVETASFDIQKIKNPDIQGIEYQQGEQMDFWNIREYVLFRDGHTCQCCKGKSKDKVLNVHHIESRKTGGNAPNNLITLCETCHKGYHNGTVTLPKNIKRGMKFKDAAFMGIMRWTFYNTLKEQYEPDIPVHYTYGYITKNTRINHNLPKGHCIDARCISGNPDAVSDGTYYYQKKVRCHNRQIHKQTILKGGIRKSNQAEYLVRGFRLFDKVRYQGREYFIFGRRKSGFFDIRTLSGEKVNKGSINVKRLTFVDTRKNYLTERRTV

SEQ ID NO: 4543 - protein, 494 aa, unidentified
  REGION 1..494: note = Human gut metagenome
MDMVYVLNKDGKPLMATTRGGRVRYLLKEKKARVVSSTPFTIQLNYDTPDATQDLILGIDPGRTNIGVAVVKEDGSCVFSAHLETRNKDVPLLMKKRAAFRRNHRTLDRRRKRQRRAKAAGTTIAEGSVERLLPGYEKPIMCHHIRNKEARFNNRSRPAGWLTPTANHLLQTHINLIAKVAKFLPITKVVVELNRFAFMAMDNPNIRRWEYQQGPLCGLGSVEDAVYAQQDGHCLFCKKPIDHYHHVIPRHKRGSETLANRCGLCAKHHDLVHTDKAWADKLVTRKEGMNKKYHALSVLNQIIPHLMEYIGSETLYDAYATDGRSTKGFRIAKNVPKEHYTDAYCIACSILDTDIEVSAPVEPFEMKQFRRHDRQACIRQMVDRKYILDGKVVATNRHKTIEQKSDSLEEFREAHGNAAVSQLTVKPHHPQCKDMARIMPGAVMVFDGAVGVFQGSSGRNNGTPNYYNSTKGERFLTRSCVLLAQNAGMVFIPA

SEQ ID NO: 4544 - protein, 362 aa, unidentified
  REGION 1..362: note = Human gut metagenome
MVYVQDIDGKPMMPTTRHGKVRRLLKANKATVVNLCPFTIQLTYKSTDHKQPVTLGIDAGAKHIGFSATTEKEELFACETILRTDIVDLLSTRSQNRRTRRSRLRYRKPKFNNRVFSKKKGWVAPSVKQRIDSHLNEVNEIHKILPITKIVIEAAQFDTHKMKNPNISGIDYQNGEQLGFWNVREYVLFRDGHKCSYCKGKSKDLILNIHHIESRKTGGDSPSNLITLCETCHKEYHKGNIDLKVRRGKSLCGAAIMGIMKWRLYDELKSRYSNVSMTFGYITKYNRIKYGIEKSHTSDAFVISKNFNAKRIEYQYLKRLVRRHNRQIHKMKILKGGKKKNNQAPFEVFGFRLFDKVLYNNE

SEQ ID NO: 4545 - protein, 512 aa, unidentified
  REGION 1..512: note = Human gut metagenome
MSTVYVLNKDGKPLMPTTRGGHVRHLLKEQKARVVRAKPFTIQLLYETNDAVQPLYLGIDPGRTNIGVAAVKANGTAVFTAHLESRNKEILKLMQDRKKARRARRTNGRRHRRQRRAKANGTISKKCVKQDTAQSKNPSKRAKEIGVIKRRLPGHKKDLLCIGIKNKEAKYTNRARPEGWLTPTAIQLLQTHINLVKKIQKFLPISDVVLEVNKFAFMRLDNPDIQKWQYQQGPLYQKGSLESAVSEIQEHHCLFCKKPIDHYHHVVPQHKNGSNTIGNIVGLCAKHHDLVHKDSAWEKKLAKKSTGLYKKYGALGVLNQIIPTLTNELSSLFPKHSFVTNGKSTYDYRAAHGVSKDHWLDAYCIACSVLPSNVCDSNINNHMPYELKQFRRHDRRVLNNENMNRVYTLNNKAVAINRHKAKDQKTVSLEEFRKEHPDDVCKLKVKEHHPTYRNMNRNFPGSVFLVGKQIHVMQGIASSKDGKATKYNDTSATAIAAGKCKFVAKNTGILFV

SEQ ID NO: 4546 - protein, 427 aa, Moorena sp.; identical to SEQ ID NO: 4408

SEQ ID NO: 4547 - protein, 421 aa, unidentified
  REGION 1..421: note = Human gut metagenome
MQYVYVLNKHGEPLMPCSPGKARLLLKQQKAHVVKRTPFTIKLLYGGAGYKQPITLGVDAGSKHVGLSASTEKRELYCEEFTPRNDVVDLLSTRKQNRRSRRNRKTRYRAPRFDNRVHSKHKGWLAPSVEVKIQEHITVIKRICRILPITLVRVETAEFDTQRLKAMLEGKPLPVGTDYQLGEMYDEYNVRQYVLKRDNYTCQCCGAHPTEKKPIRLHVHHIESRHVGGNAPNNLITLCVACHKALHEGKITLDKGKKRGKPLRDAAFMGIMRNTLLARLKDELNIPVKQTYGYITKLLREKNKIPKSHVNDARCIAKAPNAKPCDTMLYTRALRHHNRQIHKAKILKGGIRKKNQAPYLVKGFRLWDKVRYNGEECFITGRRSSGYFALKKYDGTVISNSASYKKLMLLEAATNYITERS

SEQ ID NO: 4548 - protein, 481 aa, unidentified
  REGION 1..481: note = Human gut metagenome
MWTTVLRGEKPYGRSSALPVRECVSIAKKRRHHMVAVLSKTGIRLMPTSSYRARKLLAKKKAVICGYRPFTIRLTERETGDVQPVELAVDTGYFHVGNSLKTAKHELAAVEIRTLMDEKQRYDDRRQYRRMRRSRLRYRAMRFDNRRRPEGWLAPSIQGRMEQNLAFLRRVLSVVPVTRIVMEMGQFDTQVLKAVEEGRPLPEGTDYQQGERYGIATLREAVFTRDNYTCQCCKKTVRDGTILHVHHIVYRSQGGTNRMGNLITVCEKCHTPKNHKPGGKLYKWNPTVKSFKGATFMTAVRWIMYRSVKESFPDVDVRITYGAKTKLQRRALDITKSHVNDAYIMGNFHPKHRVRPVILQKKRRNNRILEKFYDAKYIDTRDGIKKTGQQLFNGRTNRNHNTDTENLRPYRGTKLSKGKRAIRTTRYRIQPHDILVYQGQEMEASGCHNKGTRVMTTAKKSLPIGKVRVRRYSGGYYAVAE

SEQ ID NO: 4549 - protein, 442 aa, Lactobacillus sp.
MKHENANRVFLLNKDGKPLMPCRPRKARLLLKSGKAFVVKKYPFTIQLKYGSYGYKQKVSLGVDTGQRHIGFAVVSQDKVLHQSEVELRQDVHTNLYTRKIYRRGRRTRKTRYRQARFLNRVHGKRDSLWLPPSVKSKVSHNIAWIKRYLAVLPNPDLHIEVGKFDMAKIVNPDISGKQYQEGSLKDWKNYEYYVLARDEYTCQLCYKHGEGVKLVVHHIVYRSQGGTDRVDNLITLCTNCHTTKNHQPGGKLYKWMKAKKKVTKQLKGATFMNILHKRIMTTFPEASFQYGSQTYVDRKNLLLPKGHFMDAIAISGIKPVGQMPETVTMISQFRKKKRSLHEATARKGRKQPNTSSKRNEKNTKYACGLWLNDYVRVIGNHVKGYVKGFKSNGYYVYLTDGLGNYVLNNGKNYINGQQCRLIMHNGNWQKAEQKLSLYEFK

SEQ ID NO: 4550 - protein, 478 aa, Acidiferrobacter sp.
MAVLVLDRRKKPLMPCAARRARLLLARGRARVHRMVPFTIRLVDRLQENSTLQPVRLKLDPGSKTTGLALVREQDITDTTREESVRTLTVLMLLELQHRGSVIRDRLTARRAFRRRRRGNLRYRPARFDNRAKPAGWLAPSLRHRVDTTIAWVARLSRLAPVTSLSQELVRFDMQQMQNPEISGAEYQQGTLFGCEIREYLLEKWGRKCAYCGAENAPLEIDHIHPKSLGGSDRVSNLTIACHDCNQAKGNSLPEQFLSKQPERAKKILAQAKAPLRDAAAVNSTRWALCQRLKETGPEVEVASGGRTKWNRHRLHIPKTHSLDAACVGHVDAIRRWQQPVLTIKATGRGSYQRTRLTRHGFPRGYLTRNKSAFGFQTGDLVKAVVTTGTKAGTYLGRVAIRASGSFNIQTGSRLIQGIHHRFCKLIQRADGYGYSWTKRALNKGDAGMGRSATATLSLPGMMGHAAHNDAGVSRATG

SEQ ID NO: 4551 - protein, 382 aa, unidentified
  REGION 1..382: note = Human gut metagenome
SHEYVSAQYDTLQDEKEHHDDCRKMRRARRNRLRYRKPRFDNRKRSEGWLAPSLEHKKQLNIRLVEQYVSVIPITHATVEVGSFDTMLLQAIQKGESKPEGVDYQKGPRYNLATLREAVFYRDNYTCQVCGRKIADGAILHMHHMFYWKGRHGYQLDELVTACEKCHTPANHQKGGKLFGFGEDKEFANLSGAAFMNAVRWQIVDALHATYGKEFVTITYGAMTKEKRIILGIEKTHNNDAYAMGNCHPAHRCEFGHYQKRCRNNRVLEKFYDATYIDTRTGNKAKGKELFNGRISRNHKKDSEDLHKYRCKKVSKGRRSIRRQRYAIQPYDTVRLESKTYITSGCHNKGTRLLIPANGKSKSVAISKVQVVCHAGAWIQII

SEQ ID NO: 4552 - protein, 419 aa, Bacillus sp.
LFVYMINKHGKPLMPCSPRKARLLLKQKKAKVVRRTPFTIQLLYGSSGYKQPVSLGVDMGTRHVGISATTEKDVLFEAEAQLRTDIVDLLAIRRQFRRSRRNRKTRYREARFLNRRKPEGWLPPSIQHKINSHIKLIDLVHNILPVTSVTIEVATFDTQKLKNPNIQGVEYQQGEQMGFWNVREYVLYRDNHTCQYCKGKKKDPVLQVHHIESRKTGGDSPDNLITLCKTCHHEIHEKGLEHILQRKRPPMRDASQMTAMRWAMFSRIREKYSHANITYGYITKCIRIANGLPKSHMVDARCISGNPLAKPSGTVYLLKFVRKNNRQLHKATILKGGKRKSNKAPRFVKGFQLFDKVVYEGKECFIFGRRSSGYFDLRLLDGTKVHASASWKKLKRVEYASTLLIERRKGDSSPTFALA

SEQ ID NO: 4553 - protein, 373 aa, Moorena sp.; identical to SEQ ID NO: 3006

SEQ ID NO: 4554 - protein, 477 aa, Caldanaerobius sp.
LAREDCRSAICGVTSPVRGSERRGGRMVFVLDKKKKPLMPCTEKRARKLLQSGRAVVHRLMPFVIRLKDRTAEESNFQPLRLKFDPGSKTTGFSLLREESAEKSAAIIMGEIHHKQGIKDRLDSRRVLRRGRRNHKTRYRKPRFDNRRREEGWLPPSLEARVEETVRAAEKLMKWLPITSISTEHVKFDTQLMQNPEISGIEYQQGELYGYEIREYLLEKYGRKCAYCGTENVPLQIEHVVPRNPKHGPKGTNRVSNLTISCERCNKDKGNKQPEEWLEELQKSKRKIDRVRAENLLKVLANLKKPLKDAAMMNATRWTLYERLKRTGLPVECGTGARTKKQRIEHGFPKAHYFDACCVGASTPKTIKIKTKYTEIWTAVGRGNRKMCNTDKYGFPISHRQRKKRHFGFQTGDIVEAEVLSGKYKGTWRGRVAVRASGYFDIKDSKGNRICQGISYRYVRLLQYVDGWQYEKEKVAY

SEQ ID NO: 4555 - protein, 529 aa, Burkholderia sp.; identical to SEQ ID NO: 3440

SEQ ID NO: 4556 - protein, 413 aa, unidentified; identical to SEQ ID NO: 2636
  REGION 1..413: note = Human gut metagenome

SEQ ID NO: 4557 - protein, 436 aa, unidentified
  REGION 1..436: note = Human oral metagenome
MTKTLTKQTTQACVLDQQGKPLMPTTRLGKVYRLLKTQKAHIVSYEPFTIQLDYEPDTHIIQPMTLGVDSGAIHSGYSIANEHREYYNAEVIARDDISKRLTNRRMSRYNRRSRKTRYRKPRFNNRKNKKKGWLPPSLEQKVAVQLNEIDHVHRYFPIETIIVEVAEFDIQKIKNPDISGIEYQQGTLQGYNIHNYLLEKHGRKCFYCGKSVSKFEVEHMIPKTRGGSNRIDNLTLSCHDCNQKKDTLTAKEFIQQTLPAKKAAAKLKQLSTEKRLFKYMAHMNATRWTLYNAIKKKYTNVKMTYGYITKYNRIRSGLPKAHHIDAKCITNFPTVPSMKQTVVKVKMRQHNRQLHRATFSKGHVRKAASLPTIIFGFQLYDLVLYNNHYYYIKGRRSSGSFALISIEGLKDENRMYKKLIRLAHTNAYLTNHYLVN

SEQ ID NO: 4558 - protein, 471 aa, Caldicellulosiruptor sp.; identical to SEQ ID NO: 3268

SEQ ID NO: 4559 - protein, 464 aa, unidentified
  REGION 1..464: note = Human gut metagenome
MYVFVIGLDGTRLMPCKPRKARKLIEAHKAEIYKKQPFTIRLLYKTGCATQPVTIGIDTGSQHIGIAVTSGNKVLYQAEIELRSTMDKRSLMETRRSYRRSRRYRKTRYRSPKFRFHTKRTYSETLVKRKTTGVMTHWVKHTNSMSTNRPDGWLAPSMQSKADHHIRWINRFLDVLPPDTKLRLEIARFDIARMKNPEVHSELYQYGPQYDYENLKAYVFDRDHYKCVVCKRKLGSKQPDGHSLKGMMHHITFRSKRATDNPDQLVTVCEYCHTPQAHKKGGVLWDLKEKHRPVQRGLRDATQMNIIRTRLVKAFPDAELTYGNITAADRKKMHLPKSHAGDAVAIAMKGKTVNICEPTVYIKQVRKKKRSLHEATPRKGRKNPNTQAVRNPKNTKSIGIYHIYDTVRFQNKTGFISGFTGRSAYVQDFDGNYITMPGKSYKQINLSNLELVRHNNNWIQKTGN

SEQ ID NO: 4560 - protein, 471 aa, Caldicellulosiruptor sp.
LVIFTVDKHGRPGHPTRRFDMVRKLVKQGRAKIIGGGASGKPPVVMFLDREFDYSKTIERRLFVVLDPGYHHIGFAVCELRWGVLIVYCIGVLETRIPEIKDLMTKRRGYRRNRRYHSRCRKKRMSKRHSRVLTKFKAPRNVRTKDRTNATLRHGIETHLNLYKKLLKFFPFPAEQVVFVMEDNIFDVRTMTWGKTYGTGYQKSPRVPAEKKCIICGTEDNLQKHHLIQRKCGGTDVQENLVYLCRDCHEDVHAGRVYIPVEGVRQWRALGTMNAIIGQLREIPWLKFVPASDAAQMRKKLGLKKGHANDALATAAVFCSCTEADRTHMIELTLVKFRRHNRARIHAVRDRLYKVDGKIVAKNRRKRTDQKEPSFADISPLPPEIQRKLKVYPGTKILNPLRKEMPTIAGDVWIHEPTGKRFVTTGVVSQKYLYSPQLKKIVGKMYVQPEECRQVLHNEGMVVMYNSLYHS

SEQ ID NO: 4561 - protein, 611 aa, unidentified
  REGION 1..611: note = Candidatus Poribacteria bacterium
MFKVAVIDSKKNVLEPCHPAVARRLLRERHAAVWCKHPFTIILKRSIDTEEIVTSEYQLNWDPGSKTSGFAVLDAENSIVLKAELHHRGGKIKTYLAKRAGFRRGRRTRNLRHRPARWANRSRKVPVLTPDGWVYKSADETDPSKDSSKTQNKFVRVSHAQLKDPRYQWSRIQKRKRKKFTPEMTNAKVARLTRDELIQQIKMRDKKATSETLTSKTLGDLRRLLKSKLRNTPPVKQRWERKRIAHKKRSENGWIAPSLMSRVFNIETWTRRILKLYPIKRLAIEHVKFATQLLENPDIHGIEYQQGTLWGREIREYLLELTNRKCAYCGKGGQRLEVEHIIPRSHKGSSRIDNLTMACHACNEKKGALVGDALEKQYPDIAKKVKSALQKSKRGLSDAAAVNTIRWKLTETLNATELPVFLGTGGRTAHNRIDNAVHLPKTHYYDAASVENPVVDPCSQAPVLVVQAIGYGRRDNLKYNFGVKAGGKFPEFRQPNSKVSHAGGFHKGDHVFMMKKGRQIEGVINCFNQTDPGKPRECRVSNFYSKKKDNRVSGNISQLRRFRHRDGYLSAYRQDRPQRTVTAQQQSPELKQTLKPTKEKKSEPSQLLLFA

SEQ ID NO: 4562 - protein, 512 aa, Acidithiobacillus sp.
MLPQSRTLEGWGRERQRQRPEGSRRVCESTRSRYPSAPRGDGFHHPRHRRKASSRSNFMHILVLDKRKKPLMPCHPARARELLREGRARVHRMVPFTIRLVDRLQADSVLQPLRLKLDPGSRTTGLALVREKETVDISTGEIIRTITVLMLLELKHRGHAIRDALTSRRAFRRRRRGNLRYRPARFNNRTRKDGWLAPSLQHRVDTTLAWVKRLMRWAPVMALSQELVRFDTQAMQNPEISGTEYQQGTLLGYEVREYLLEKWGRECVYCGAEHTPLEIDHIHPRSKGGSDRVSNLTVSCHDCNQAKGNRPLEQFLAKHPERIRKILAQAKAPLRDAAAVNSTRWALFQRLKATNLPVEVASGGRTKYNRHRLHISKEHCLDAVCVGHVDAIKNWQQPVLSIKATGRGSYQRTRLTKYGFPRGYLTRSKSAFGFQTGDMVKAVVTKGKKAGIYLGRVAIRASGSFNIQTGNGLAQHIHHRFCTLVQRGDGYGYNLTLLHPALNHGVAEAGEY

SEQ ID NO: 4563 - protein, 419 aa, Aneurinibacillus sp.
MVVYVINRHGEPLMPCTPRKARILLKQQKAKVVKRTPFTIQLFYGSRGYRQPVSLGVDAGTKHIGLSATTETRVLFEGDVQLRTDIPQLLAIRLQFRRSRRSRTTRYRKARFLNRKKPKGWLAPSVQHKVDSHLKVVQLVHQILPVTKITVEVAQFDTQLLKNPSIKGEEYQQGEQMGFWNVREYVLFRDKHTCQRCKGKKKDNILNVHHIESRKTGGDSPDNLITLCETCHNKIHQKGLEHIIKRKTQTLRDASQMTVMRWFIYNGLKERYPHIQLTYGYITKNTRITNGLGKSHEVDARCISGYPLAKPMDTVYHLKFVRKNNRQLHKATISKGGKRKSNKAERFVKGFQLFDKVLYEGQECFIFGRRSRGYFDIRKLDGTKIHASASYKKLTRIEYARTLLIERRKGDSSPTYATA

SEQ ID NO: 4564 - protein, 419 aa, Geobacillus sp.
LFVYIINKHGKPLMPCSPRKARLLLKQKKAKVVRRTPFTIQLLYGSSGYKQPVSLGVDMGTRHVGISATTKKDVLFEAEAQLRTDIVELLAIRRQFRRSRRNRKTRYREARFLNRRKPEGWLPPSIQHKINSHIKLIDLVHNILPVTSVTIEVAAFDTQKLKNLNIRGVEYQQGEQMGFWNVREYVLYRDNHTCQYCKGKKKDPVLQVHHIESRKTGGDSPDNLITLCKTCHHEIHEKGLEHIFQRKRPPMRDASQMTAMRWAMFSRIREKYSHANITYGYITKCIRIANGLSKSHMVDARCISGNPLAKPSGTVYLLKFVRKNNRQLHKATILKGGKRKSNKAPRFVKGFQLFDKVVYERKECFIFGRRSSGYFDLRLLDGTKVHASASWKKLKRVEYASTLLIERRKGDSSPTFALA

SEQ ID NO: 4565 - protein, 416 aa, unidentified
  REGION 1..416: note = Human gut metagenome
MVYVLDKNGQPLMPTDRHRKVRLMLQSGQAKVIKRCPFTIQLNYDSGHQTQEISLGIDAGSKHIGVSTTTKIKVLYEVDVELRNDIVDLLSSRRELRRGRRNRKTRYRQAKFNNRRRGNGRLAPSIRQKIGTHLTVVENICKMLPISRIMVETASFDIQKIKNPDIQGAEYQQGDQLEFWNVREYVLFRDGHTCQCCKGKSKDKILNVHHIESRKTGGNAPNNLITLCETCHTGYHKGTVQLPKAIKRGMRFKDAAFMGIMRWAFYEALKQQYEPVGTPVHNTYGYITKHTRIAYNLPKEHYVDARCISGNPEASSNGEYYYQKKVRCHNRQIHKLTVLKGGIRKQNQATYLVKGYRLFDKVSYQGKGYFVFGRRQSGFFDIRTLSGEKVNKGSLSCKKLKFIATRTYYLTERRAV

SEQ ID NO: 4566 - protein, 449 aa, Allochromatium sp.; identical to SEQ ID NO: 2388

SEQ ID NO: 4567 - protein, 434 aa, unidentified
  REGION 1..434: note = Human gut metagenome
LDRKHRPLMPCRPARARRLLKSGRARVVRLFPFTIRLVDRLLEDSSVQPVLVKIDPGSRQTGVALVRADEKAHHHALFFINLVHRGESIRDALTARRNCRRRRRGNLRHRAPRFLNRTKPQGWLPPSLRHRVDTATAWVAKLVKLAPVTGIVEELVKFDAQKLQNPEISGTEYQQGTLFEYEVREYLLEKFGRKCVYCGAENVPLNIDHVVPKARGGSNRISNLVLSCVNCNQKKDSQPVEVFLKNRPEVLDRIKRRLKTSLAHAATVNATRWSLFNALKVFGLPVETGSGALTKLNRHTFGVPKEHRLDALCAGRVNGVHYPEGMGILQVRCTGRGNYQRTRVDKYGFPRGYLTRQKRVHGFATGDMVEVVVPSGKKAGTYRGRVAVRKSGYFNIQTPEGVIQGIGWRHCRLLSFNDGYGYAWLRPASHSSPV

SEQ ID NO: 4568 - protein, 405 aa, Desulfotomaculum sp.
LDARRSQRRSRRNRKTRYREPRFNNRHPEKCAACGKNARHGSRYCRPCEKAKNFVGNGHREKRLVPSLEVRVNQTLSMVDKLTRWLPITAISTEHAKFDTQLMQNPDISGVEYQQGELFGYEVKEYLLEKWGRKCAYCGKEGVPLEVEHVVPRNPKRGPKGTDRISNLTLACEECNKAKGNLQPKEWLEKLKQSRRKLDQVRAENLPKILRKLKEPLRDAALMNTTRWVLYDRLKKTGLPVECGTGARTKYNRLRMGLPKTHYFDACCVGESTPENLAIEQEYVQVWTALGRGSRKMCNTDKYGFPVSHRARQKMYFGFMTGDLVVAEVPEGKYAGRWVGRVAVRTSGYFDIKGGTGHRVCQGISHRYMRLLQRADGWQYEKIRIEKGGSGASSPGVNAGASGAV

SEQ ID NO: 4569 - protein, 477 aa, Blautia sp.
MIIALDKYKRPLGFLTERRCRILMERKRAVLYRVFPTVVILMDVDARTIPDLPSFRIKIDPGAKYTGIAIIRNDTDEFVYAMQIEHRGDAVRATLNKRKNARRNRRSRETGYRRAKWGNRCLSEKDKKSYDSSREDGWLPPSIRSAADNVISWVRRLGRWINLTECSFEAVRFDTQLMEDPDIEGEVYQHGTLFGLEIKEYLMEKFGHTCQYCGGKSGDPVLEWEHMRPKSRGGSDRVKNALLSCSSCNKDKGNRTPEEWLEQIKARLPREKGKRKELDEERVKLIQKVIDGKPQGSALRYAAWVSSSRRYLENALFGIFGDVECSSGGRTKYNRTELGYPKEHHYDALCVGTVPEKGYHDRTNGYYLYAKAAGRGTRLRGHLNKCGVIVTKWTDRKKGFFGFQTGDIVVAEVPHKTPKPYKYEGRFVGRVMVRATGSFDIKTTDGKMVTVKEQYCRLLQANSGYHYIMKRAIPLGH

SEQ ID NO: 4570 - protein, 420 aa, unidentified
  REGION 1..420: note = Human gut metagenome
MQYAYVLNKRGEPLMPCSPGKARILLKQQKACVVKRTPFTIKLLHGSAGYKQPITLGVDAGSKHVGLSASTEKRELYSEEFTPRNDVVELLSTRRQNRRSRRNRKTRYRAPRFNNRVHGKHKGWLAPSVEVKIQEHITVIKRICRILPITLVRVETAEFDTQRLKAMLAGKPLPVGTDYQLGEMYDEYNVRQYVLKRDNYTCQCCGAHTTAKKTVKLHVHHLESRKVGGNAPSNLITLCTTCHNNLHKGKITLDGKKRGKMLRDAAFMGIMRNTLLTRLRNELNIPVQNTYGYITKLLREQNDIKKSHVNDARCISKHPLAKPCSVCYRTKAIRHHNRQIHKAKILKGGIRKANQAPYIVKGFRLWDKVLYNEQECFISGRRSSGYFALRKFDGTTITNSISFKKLRLLEPATNYLIERK

SEQ ID NO: 4571 - protein, 419 aa, Geobacillus sp.; identical to SEQ ID NO: 2623

SEQ ID NO: 4572 - protein, 512 aa, unidentified
  REGION 1..512: note = Human gut metagenome
MSTVYVLNKDGKPLMPTTRCGHVRHLLKEQKARVVTSKPFTIQLLYEADDVVQSLYLGIDPGRTNIGVAVVKADGTAVFTAHLETRNKEIPKLMKKRKESRRARRTNGRRCRRQRRAKANGTISKKCVKQDTAQNGSVSKRAKEIGVIKRHLPGCEKDVLCICIKNKEAKFSNRTRPEGWLTPTANQLLQTHINLVKKIQKFLPISDVVLEINKFAFMRLDNPNVQKWQYQQGPLYQKANLEETVSEMQEHHCLFCKKKIDHYHHVVPQHKNGSNTIDNIIGLCTQHHDLVHKDATWQKRLAKKKTGLNKKYGALSVLNQIIPALTKELSSLFPKHFFVTNGKSTYDYRAAHGVSKDHWLDAYCIACSVLPNDTCDKTINSRVPYELKQFRRHDRRALNNENMSRVYMFNGKMVATNRHKATEQTTDSLEEFRQRQPNDVCNLKVKEHHPTYRNMNRNYPGSVFLVGNQVHVMQGIAGSKDGEATTYKDTNANSIAAGKCKFVAKNSGILFV

SEQ ID NO: 4573 - protein, 427 aa, Nostoc sp.; identical to SEQ ID NO: 2670

SEQ ID NO: 4574 - protein, 377 aa, unidentified
  REGION 1..377: note = Human gut metagenome
LYGSTGYKQPITLGVDAGSKHIGISAATEKYEFYREEATPRNDVVDLLSARRAFRQGRRNRKTRYRAPRFNNRVHSKHKGWLAPSVEVKIQEHITVIKRICRILPVTLVRVETAEFDTQRLKAMLAGKPLPVGTDYQLGEMYDEYNVRQYVLKRDNYTCQCCGAHTTAKKTVKLHVHHLESRKVGGNAPNNLITLCTTCHNNLHKGKITLDGKKRGKPLKDAAFMGVMRKTLMERLRKKLKIPVQGTYGYITKYLREKHSIPKSHTNDARCISKNPLAIPCDTCYYTKAIRHHNRQLHKATILKGGIRKANQAPYTVKGYRLWDKVSYNGSECVITGRRTSGYFALKKLDGTVVSNSASYKKLRLLEVATNYITERR

SEQ ID NO: 4575 - protein, 375 aa, unidentified
  REGION 1..375: note = Human gut metagenome
VVRRTPFTIQLTIATGESKQPVSLGVDAGYKHVGLSASTEKAELYASEVELRKDITDLLSARRALRQSRRNRKTRYRAPRFDNRIRTKRKGWLAPSVENRINAHLSRIKAVLRLLPITKITVETASFDMQRLKNPDISGKEYQEGEQLGFWNVREYVLFRDGHVCRHCHGRSKDPVLNVHHLESRRTGSDSPDNLITLCVTCHKALHRGEITLKAKRGQSFRAQVFMGIMRREVLNRLKASYPELKVHETYGYLTKHARIANGIVKSHGADAFCIAGNLGAERLGEFFFQKQTRRNNRQIHKLSILKGGIRKRNQAPFEAKGFRLFDKVACQGEEGFIFGRRSSGSFDVRKLDGTRISAGISARSCVCWRRDGPI

SEQ ID NO: 4576 - protein, 560 aa, Streptomyces sp.
VTTFQVSEKTHQAVLPQRPALESMAADNPGSRDETGCGPSVRQHGGADLGHGRGETRESGLKVHARHPEAIASASAEGEHAAGNGGTTQPDVACGAAYVPVLDRHGVPLMPCHPARARELLTKGRAVVVRHTPFAIRLRDRDAERSAVPGVAVRIDPGSKGTGIAVTADSEAANDEYGAGRQVRRGLMAIELQHRGAQIHKAMQQRANYRRARRSRNLRYRSPRFDNRTRPAGWLAPTLQHRVDTVVSTVRRLTGYLPVTEIHIERVCFDTHAMSEGVDRLEGVRYQQGTLAGYEVRRYLLEKWGRACAYCGAQGVALQVEHIESKARGGSDRISNLTLACGPCNQTKGARPVAEFLSRRPHVLERILRQVKAPLRDAAAVNTTRWRIADQLQSIGLPVYTWSGGRTQYNRMTQCLAKSHTLDALAVGYIEDDRSIVRYPKTVLVAAAMGRGSYSRTRPDRNGFPRLRLPRSKQYFGYSTGDLVQAVIPTGMHAGVKVGRIAVRATGRFNIRCAQGVIQGIHYRHMRLLQRAEGYGYTTREEEGVRLEDECQRHADHPND

SEQ ID NO: 4577 - protein, 430 aa, unidentified
  REGION 1..430: note = Human gut metagenome
VEQNLRVFVLNKRGKPLMPCSPAKARHLLKEKKAIVVRRTPFTIKLTIATGESKQPVSLGVDAGYKHVGLSASTEKAELYASEVELRQDITDQLSARLALRRSRRNRKTRYRAPRFDNRIRTKRKGWLAPSVENRINAHLSRIEAVLRLLPVTKITVETASFDMQLLKNPDIAGKEYQEGEQLGFWNVREYVLFRDGHVCQHCHGRSKDPVLNVHHLESRRTGGDSPGNLITLCETCHKALHRGGITLKAKRGQSFRAEAFMGIMRWEVLNRLKASHPELEVNNTYGYWTKHARIANGIAKSHCADAFCIAGNLGAERLGEFLFQKQTRRNNRQIHKLSILKGGRRKRNQASFEVKGFRLFDKVACKGEEIFIFSRRSSGYFDVRKLDGTRISAGISYKKLRLLEKRRTYLTEIRKEAFSPLPEGRSLRA

SEQ ID NO: 4578 - protein, 411 aa, unidentified
  REGION 1..411: note = Human gut metagenome
MENKIEYCFVIDKNNKPLAPTKVNKGWYLIRKGRAKLKSKYPMVIQLEKEVKSNEYDESHMVCGIDDGSTHVGLAIVQKCLTKNKVVFKGTIEQRQDVKRLMDVRRGYRRYHRCHKRYRQARFNNRSSSKRTCRLAPSIKQKKDAILRVLYQLNSWIDIQEYYLEDVCIDIRAMTDDYKPYRWQYQKSNRLNENLRKATILRDGCRCQECGKSNCILEVHHIRARRYGGADTIGNLITLCKKCHDKTESREKDFEEGYFNMIKSKPKRFDYAMHVMQGKTYLREKISELGILHLTNGGETANKRIEWNIVKSHSNDAICITDGIPDTCDIKEWIIKPMRRKSKAKTDNVLGIKHRDLVSYTYKSGETHTGYVTALYPEQLALNFQSKTKHCKKVNARKCRLLWKFNKIYWL

SEQ ID NO: 4579 - protein, 419 aa, Geobacillus sp.
LFVYIINKHGKPLMPCSPRKARLLLKQKKAKVVRRTPFTIQLLYGSSGYKQPVSLGVDMGTRHVGISATTKKDVLFEAEAQLRTDIVELLAIRRQFRRSRRNRKTRYREARFLNRRKPEGWLPPSIQHKINSHIKLIDLVHNILPVTSVTIEVAAFDTQKLKNLNIRGVEYQQGEQMGFWNVREYVLYRDNHTCQYCKGKKKDPVLQVHHIESRKTGGDSPDNLVTLCKTCHHEIHEKGLEHIFQRKRPPMRDASQMTAMRWAMFSRIREKYSHANITYGYITKCIRIANGLSKSHMVDARCISGNPLAKPSGTVYLLKFVRKNNRQLHKATILKGGKRKSNKAPRFVKGFQLFDKVVYERKECFIFGRRSSGYFDLRLLDGTKVHASASWKKLKRVEHASTLLIERRKGDSSPTFALA

SEQ ID NO: 4580 - protein, 443 aa, Anoxybacillus sp.
MVEENMTCFMQRKGENPMVFVLDTNKRPLAPCHEAVARKLLKQGKAAIYRRFPFTIILKKSVDESEIKATYRLKIDYGSRHTGLAILRGQEVVWLGQLDHRTDIKERIDKRRAFRRARRNRKTRYRKPRFLNRKRKEGWLPSSLESRVQNIQTWVSRLKKLCPIGYISYENAKFDTQLMRNPEINGVEYQQGTLQGYEVREYLLEKFGRKCCYCGKENVPLEVEHIIPKSRGGTDRVDNLCLACHDCNQRKGSKTAEEFGYPHIQKQVKESLKDASAINSTRWKAYEVLKQTGLDVECGTGARTKMNRIRLDLPKTHYFDACCVGESTTNHLYFKTKEVLFIKAKGRGSHSRTNLDRYGFPRGYLARQKFFFGFQTGDMVKAVVPRGKYQGVWFGEVACRKTGSFDIKGKDGKRIAQGINYRYVQVIQRFDGYAYGKGVAELA

SEQ ID NO: 4581 - protein, 424 aa, Lentibacillus sp.; identical to SEQ ID NO: 4255

SEQ ID NO: 4582 - protein, 399 aa, Ktedonobacter sp.
  SITE 399: note = misc_feature - Xaa can be any naturally occurring amino acid
MSYVFVIDQEKRPLDPVHPGRARKLLSSGKAAVYRRFPFVLILKHPVSEAHPQPLRLKIDPGSKTTGLAVLNDTSGQVLWAAELVHRGEEVHQALQKRAGVRRGRRSRHTRYRAARFSNRRRKRGWLAPSLCSRMQNVQTWTRRLMRWCPLGAISYEAVRFDTQAIQNPEIKGVAYQHGTLAGLEVKEYLLLKWRHKCVYCQKGDIPLEVEHIVPKRRGGSDRITNLTLACEACNQQKGSQTAQAFGFPHLQAQALQPLKDAAAVNSTRWALYERLKATGLPIEVSTGGQTKWNRKQRGIPKSHWLDAVCVGPSTPERVQWQHVIPLLITARGRQCRQLCNVDGWGFPRSRPKGPSKVFGFQTGDMVQAVVTRGKRMGTYVGRVAIKTDGYFKITGTHX

SEQ ID NO: 4583 - protein, 456 aa, Fervidobacterium sp.; identical to SEQ ID NO: 2394

SEQ ID NO: 4584 - protein, 458 aa, Moorena sp.; identical to SEQ ID NO: 3968

SEQ ID NO: 4585 - protein, 431 aa, Escherichia sp.; identical to SEQ ID NO: 3801

SEQ ID NO: 4586 - protein, 426 aa, Bacillus sp.
MVFVLDTNKRPLAPCHEAVARKLLKQGKAAIYRRFPFTIILKKSVDESEIKATYRLKIDYGSRHTGLAILRGQEVVWLGQLDHRTDIKERIDKRRAFRRARRNRKTRYRKPRFLNRKRKEGWLPSSLESHVQNIQTWVNRLKKLCPIGYISYENAKFDTQLMRNPEINGVEYQQGTLQGYEVREYLLEKFGRKCCYCGKENVPLEVEHIIPKSRGGTDRVDNLCLACHDCNQRKGSKTAEEFGYPHIQKQVKETLKDASAINSTRWKAYEVLKQTGLDVECGTGARTKMNRICLDLPKTHYFDACCVGESTPNHLYFKTKEVLFIKAKGRGSRSRTNLDRYGFPRGYLARQKFFFGFQTGDMVKAVVPRGKYQGVWFGEVACRKTGSFDIKGKDGKRIAQGINYRYVQVIQRFDGYAYGKGVAELA

SEQ ID NO: 4587 - protein, 417 aa, unidentified
  REGION 1..417: note = Human gut metagenome
MPCSPAKARLLLKEKKAIVKRRTPFTIQLTIATGEAKQPVSLGVDSGYKHIGLSATTEKAELYASQVELRQDITDLLSARLALRRSRRSRKTRYRAPRFNNRVANKREGWLAPSVENRIAAHVSRVETVIRLLPVTAITVETAAFDTQLLKNLDIAGVAYQQGDQIGFWNVREYVLFRDGHVCQHCRGKSKDPILNVHHIESRRTGGDAPNNLITLCETCHRAFHRGEIELKVKRGKSFKAETFMGIMRRTLLERLKKAHPELNVRNTYGYLTKHKRISHGIAKSHCADAYCIADNLGAKRLEGFFFQKQTRKHNRQIHKLSILKGGLRKKNQAPYEVKGFRLFDKVICKGEEAFIFGRRTSGSFDVRRLDGTRISAGISCKKLRLLEPRTTYLTEFRKEAALPPLHECSGFRAEFL

SEQ ID NO: 4588 - protein, 420 aa, unidentified
  REGION 1..420: note = Human gut metagenome
MQYVYVLNKHGEPLIPCSPGKARLLLKQQKACVVKRTPFTIKLLFGSAGYKQPITLGVDAGSKHVGLSASTEKRELYSEEFTPRSDVVELLSTRRQNRRSRRNRKTRYRVPRFDNRVHSKHKGWLAPSVEVKIQEHITVIKHICKILPISLVRVETAEFDTQRLKAMLAGKPLPVGTDYQLGEMYDEYNVRQYVLKRDHYTCQCCGTHNTAKKVVKLHVHHLESRKTGGNAPSNLVTLCTTCHKNLHKGRVTLDGKERGKPLRDAAFMGIMRKTLMVRLKEELPIPVQGTYGYITKMRREQNDIKKSHTNDARCISKHPLAEPCSVCYRTKAIRHHNRQTHKANFSKKGIRKRSQMPYLVEGFRLWDKVLYKGQECFVSGRRSSGSFALKKLDGTSISKGVTFKKLRLLEPATNYLIERM

SEQ ID NO: 4589 - protein, 413 aa, unidentified; identical to SEQ ID NO: 3290
  REGION 1..413: note = Human gut metagenome

SEQ ID NO: 4590 - protein, 452 aa, Ktedonobacter sp.
VLYVKPFANIDEANITLQDRRLNLSNVFVIDSDYKPLNPVHPARARLLLTQGNAAVYRRYPFTIVLKRVVDQPEVQPLRLKLDPGSKTTGIALVNDTNGKVVFAAELEHRGHAIKDSLDSRRGVRRRRRNRKTRYRKPRFQNRRRKKGWLPPSLESRLANILTWVARLCRSAPITALSQELVKFDLQLMENPDITGVEYQQGTLQGYEVREYVLEKWKRTCAYCGKQDVPLQIEHIHPRANGGTHRISNLTLACEPCNIAKGTQDIAVFLAKKPDVLKRILAQVKKPLKDASAVNATRFALLERLKAFGLPVECGSGGLTKYNRTTRGLAKTHWLDATCVGKSTPSAISHKGVVPLLITANGHGRRQMCVPDKYGFPEKHKQRRKTFLGYRTGDMVKAITSKGTFEGRIAIRHRPSFRLGKVDIHPKYMHCIHRADGYEYTQKGVRNAPPHV

SEQ ID NO: 4591 - protein, 428 aa, unidentified
  REGION 1..428: note = Human gut metagenome
LKVFVLNMRGQPLMPCSPAKARHLLKAGKAAVRRRTPFTIQLRIATGETKQSVTLGVDAGAKHVGLSAATEKEEVFASEVELRQDITGLLAARLSLRRDRRHRKTRYRAPRFLNRVRSKHKGWLAPSVENRIQAHMSRIDAVCRLLPVTKIVIETASFDIQKIRNPEVEGTGYQQGDQLGFWNVREYALFRDGHVCQHCHGHSKDKILNVHHLESRQTGGDAPNNLITLCETCHKACHAGKIKLKVKRGQSFRAEAFMGIMRWTLLDRVRKAHPGLPVENTYGYLTKHTRITHGLPKTHCVDAYCIAGNLKAVRRGVYLHQRQMRKHNRQIHKFTVLSKRLEDGTKIGYRKLNQSPYLVHGFRLFDKVRCLGQIGFIFGRRSSGYFDVRRLDGVKLSPSISWRKLTLLEKRSTYLTELRKQDGASSPV

SEQ ID NO: 4592 - protein, 413 aa, unidentified; identical to SEQ ID NO: 2636
  REGION 1..413: note = Human gut metagenome

SEQ ID NO: 4593 - protein, 425 aa, Moorena sp.
MSTNYVLVLDTNRKPLNPCKPGMARSLLKAGKAAVFKRYPFTIILNKAVDDAPKPVQLKIDPGSKVTGLALVQDDKVIWGTELYHRGQQIKADLEDRRKLRRGRRNRKTRYRQPRFLNRTRPEGWLAPSILHRVLTTMTWVRRLTKFVPVTGISLERVRFDTQKMINPEVSGVDYHQGELQGYEVREYLLEKWNRQCAYCQATDTRLEVDHIHPKSKGGSDRVSNLTLACHDCNQAKGNQDIRDFLCGKSDLLNRILSQVKQPLLDAAAVNSTRNKIAEELIATGLPIEFGTGGQTKYNRCRLDLPKTHWLDAACVGVVVHLTLETKQCLTITASGHGNRQMAGVDKYGFPYRHRTRQQVHFGFRSGDIVRAVVPKGKKAGTHVGRVLCRKSGSFDIQTKSGRVTGINHKYCSTIHGRDGYAYVF

SEQ ID NO: 4594 - protein, 470 aa, unidentified; identical to SEQ ID NO: 2925
  REGION 1..470: note = Human gut metagenome

SEQ ID NO: 4595 - protein, 375 aa, unidentified
  REGION 1..375: note = Human gut metagenome
MPNKVYVINKHGRPLMPCSPAKARHLLDAGKAKVKKRTPFTIQLVYGSSGYTQEVILGVDAGSKTIGVSALTKKEELFAANVIPRNDVVDLLSTRREFRRVRRNRKTRYRKPRFDNRVRSKHKEWLAPSVEVKIQEHITSIKRVCRILPVSKVVIETAEFDLQLLKAIADGKSVPQGEDYQKGEMYGHYNVRQYVLWRDNYTCQCCGAHATKKKEVRLHVHHLESRKVGGDAPSNLITLCDSCHEKFHKGIITAANLKKRKRRSMRDATFMGIMRKTLIQRLRAELTIPVAETRGYITKTTREKLLVLPKSHTNDALAIALGKHGFNVGYLPEIAQIDKIYTIRPVRHHNRQLHKVTILKGGIRKSNQAEKYVFG

SEQ ID NO: 4596 - protein, 430 aa, unidentified
  REGION 1..430: note = metagenome
MPKVYVLNRHGRPLMPCTPAKARHLLDAGKAKVRHRTPFTIQLLYGSTGYAQEVILGVDAGSKTIGLSASTETEELFSAEVKPRNDVVELMSVRRQFRRARRNRTTRYRKPRFDNRVRSKHKGWLAPSVEVKIQEHITAIKTVCRILPVSKVVVETAEFDLQLLKAIADGKPVPQGEDYQKGEMYGHYNVRQYILWRDGYTCQCCGAHATQKKEVRLHVHHLESRRVGGDAPDNLVTLCTACHDKLHKCIIMAADIKKRKRRSTRDATFMGIMRMTLLRRLREQLPVPVVETRGYITKATRENLLVLPKSHTNDALAIAHGPQGFRAEYLPNIRQADRLYTIRPVRHHNRQLHKATILKGGVRKANQAEKYICGFRLYDKVLYNGIECFVWGRRTSGSFLLRQLNGEKVKDGVSYKHLKLLERSQSYLVA

SEQ ID NO: 4597 - protein, 376 aa, Bacillus sp.
IQLQYATGEAVQPVTIGVDSGAKHIGIAITTADKVLAKGTIQLRQDVKENLILRATLRRSRRQRKTRYREARFLNRKKKEGWLPPSIQSRVDNQIHWIETFRSLLPSPKVIVEVGKFDAQKLKKPDIQGIEYQQGNAFGFWNTRYYVFVRDNYTCQICKKKGGILHTHHIIERCNGGSDMADNLVTVHEECHEKFHQGKIKHRFQKPKQYKETAFMNILRLQIMNRLDCEITYGSYTTPKRKELGLSKTHVNDAIAITNPTQIQEYDQSGEFRIKQFRKKKRSLHESTARKGRKTKNTNAKRNQKKTPYVDGVYLGDKVKVFGQVGFVTGFTGKMVYVQDIHGQYIQNPAKSYKQVKMSDMEHIHHSNNWQFLQIS

SEQ ID NO: 4598 - protein, 428 aa, Moorena sp.
MSNYVFLIDGNQTPLNPVHPAQARKLLDCGKAAVFRRYPFTLVLKRVIENPNVYPLTLKIDPGSKFTGIALVTNQGDVIWAMELQHRGQQIKDALLHRLAVRRGRRNRNTRYRQARFLNRKRPDGWLAPSLRHRVLTTETWVKRLKKFAPIGSIAQELVRFDTQAMQNPEISGTEYQQGTLHGYECREYLLEKWNRQCAYCGVKDVPLEIEHIHPKSKGGSERISNLCLACHKCNQRKGNKDVKDFLKGKPEVLNRVQKLAKAPLKDAASVNSTRWMLFNTLKSFGLPVTTGTGGQTKFNRTRFELPKAHWIDAACVGVVEIIKLVTNKILKVRATGFGGRQRCQTDKFGYPQKHRPLRPIHGFSTGDIVRADVPKGKYAGTFTARVCPMSHGYGEFVIDKKRRSIKLEYLTPVHMKDGYDYVYTCTK

SEQ ID NO: 4599 - protein, 412 aa, Moorena sp.; identical to SEQ ID NO: 2668

SEQ ID NO: 4600 - protein, 411 aa, Blautia sp.; identical to SEQ ID NO: 4578

SEQ ID NO: 4601 - protein, 434 aa, unidentified
  REGION 1..434: note = Wastewater metagenome
MVFVKSINNTSLMPCSARKARLLLSSNKAIIIDYKNFTIKLNYNTTNFCQTTTIAVDTGAKFLGIILRNGNNILLARQVKLRTDISSLLTTRRILRRARRNKLRYRQPRFLNRTKSKQSGWLPPSIQSRVNNTINMIDNLISKLPVYKLIIEVGNFDVQKMKNPAINGKEYQQGEMAGFNEIKEFVLTRDNYTCKHKQCDHTDKKLQVHHIQFRSNGGSDKPDNLITLCKTCHSNLHSGLIDDKFKKVANYKEPPFMNSLKTRLQKHYINATFCFGYQTKTTRQEMQLPKSHINDAIAISCYQNKISNLKYLEVNEYVIQVRIKKRSLHEQTARKGYKTKNTTQKRNNKNVNQVNEYKIGSTVRFGCKFGYISGFTGKSAYIKDINDNYITEDNKSYKQISLKKLNLICYNNGWVKFNHNSSLHLAKPDVGDFL

SEQ ID NO: 4602 - protein, 423 aa, Microcoleus sp.; identical to SEQ ID NO: 3885

SEQ ID NO: 4603 - protein, 418 aa, unidentified; identical to SEQ ID NO: 2425
  REGION 1..418: note = Human gut metagenome

SEQ ID NO: 4604 - protein, 430 aa, unidentified; identical to SEQ ID NO: 3252
  REGION 1..430: note = Human gut metagenome

SEQ ID NO: 4605 - protein, 456 aa, Halomonas sp.
MAVFVLDKHKRPLMPCSEKRARLLLARGRAVVHKRYPFTIRLKDRVSGETQPLRLGIDPGSKTTGLALMREPDSQQRHMLCLFELVHRGLQIKKALQQRAAFRRRRRSANLRYRAPRFNNRTKPKGWLAPSLQHRVDTVTAWVKRLSRLAPVTAISQELVRFDTQKLENPEISGVEYQQGTLLGYEVREYLLEKWERECAYCGTGDTPLEIEHVVPRSRGGSNRVSNLTLSCHPCNAEKDSQTLTDFFATNKGLKKRLKANGHAADARLDRVQRQLKQPMRDASAVNATRWALFSALKTTDLPVAVSSGGHTKYNRQRLNIPKTHALDAACVGAFEKLHDWTVPTLTIKAMGRGSYQRTRLTKHGFPRGYLMRQKQVHGFQTGDMVRAIVPTGKKAGTYTGRVAVRKRGSFNIQRSAGTVSDISYKYCTLIQRSDGYGYYVTPFTNLTGGAGQAVA

SEQ ID NO: 4606 - protein, 428 aa, unidentified
  REGION 1..428: note = Human gut metagenome
LKVFVLNMRGRPLMPCSPAKARHLLKAGKAVVRRRTPFTIQLRIATGETKQSVTLGVDAGAKHVGLSAATEKEEVFASEVELRQDITGLLAARLSLRRERRQRKTRYRAPRFLNRVRSKHNGWLPPSVENRIQAHLSRIDAICGLLPVTKIVIETASFDIQKIKHPDVEGTDYQQGDQLGFWNVREYVLFRDGHVCQHCHGHAKDKILNVHHLESRQTGGDAPNNLITLCERCHKACHAGKIKLKVKRGQSFREEAFMGIMRWTLLDRVRKAHPGLPVENTYGYLTKNTRITQGLPKAHCVDAYCIAGNLKAVRRGVHLYQRQVRKHNRQIHKCTVLSKTLKDGTKIGYRKLNQTPHLVKNFRLFDKVRCLGQTGFIFGRRSSGYFDVRRLDGVKISSCINYRKLTLLEKRGTCLTELRKEDGASSPV

SEQ ID NO: 4607 - protein, 430 aa, Eubacterium sp.; identical to SEQ ID NO: 2393

SEQ ID NO: 4608 - protein, 456 aa, unidentified
  REGION 1..456: note = Human gut metagenome
MSTCVCVLTNNGERLMPTFRLGKVRHLLKDGKAKIVKHHPFTIQLLYDSKTNTQPIETCEDVGYNYIGISVKSESHEYVSAQYDTLQDEKEHHDDCRKYRRTRRNRLRYRKSRFDNRKRDKGWLAPSLEHKKHLNISLIERYVSVIPITHVTVEVGSFDTMLLQSIQKGEAKPEGADYQKGPRYNLATLREAVFYRDNYTCQVCKRKIADGAILHMHHMFYWKGRHGYQLDELVTVCEKCHTPANHQKGGKLYGFGKDKKFANLSGAAFMNAVRWQIVNALYATYGKEFVTITYGAMTKEKRIALQLEKTHNNDAYAMGDYHPARRCKFRHYQKRRRNNRVLEKFYDANYVDTRTGNKAKGKELFNGRISRNHKKDCKNLHKYRSKKVSKGRRSIRRQHYAIQPYDTVRLEGKTYITSGCHNKGTRLLIPVNGKSKSVAISKVQVVCHAGAWIQII

SEQ ID NO: 4609 - protein, 456 aa, unidentified
  REGION 1..456: note = Human gut metagenome
MSTCVCVLSNSGERLMPTFRLGKVRHLLKDGKAKIVKHHPFTIQLLYDSKTNTQPIEICEDVGYNYIGISVKSESHEYVSAQYDTLQDEKEHHDDCRKYRRTRRNRLRYRKPRFDNRKRSEGWLAPSLEHKKQLNIRLIERYVSVIPITRATVEVGSFDTMLLQAIQKGESKPEGVDYQKGPRYNLATLREAVFYRDNYTCQVCGRKVADGAILHMHHMFYWKGRHGYQLDELVTACEKCHTPANHQKGGKLFGFGEDKEFANLSGAAFMNAVRWQIVDALHATYGKEFVTITYGAMTKEKRIILGIEKTHNNDAYAMGDYHPAHRCVFRHYQKRRRNNRVLEKFYDATYIDARTGNKAKGKELFNGRISRNHKKDSENFHKYRNKKVSKGRRSIRRQRYAIQPYDTVRLEGKTYITSGCHNKGTRLLIPANGKSKSVAISKVQVVCHAGAWIQII

SEQ ID NO: 4610 - protein, 429 aa, Parasutterella sp.; identical to SEQ ID NO: 3656

SEQ ID NO: 4611 - protein, 413 aa, unidentified; identical to SEQ ID NO: 2636
  REGION 1..413: note = Human gut metagenome

SEQ ID NO: 4612 - protein, 460 aa, unidentified
  REGION 1..460: note = Human gut metagenome
MVAVVDLFGKPLMPTNEYRARKLLKRKKAKIFGYRPFTIQLTERKSTEIQPIELCMDTGYIHIGISAKSERHEYLGMQIDTLTDEKLKRDDKRQYRRQRRNRKRYRAPRFDNRRRKEGWIAPSLEHKKEIHIDAIQRICKVMPITDLTLEMGNFDTQVLKAVEEGKTLPQGSDYQHGERYGIATLREAVFLRDGYKCQCCEKTVKDGAILHVHHIKYRSQGGTNRMSNLITVCDKCHTPQNHKPGGKLWNWKTKLAEFKGASYMTSIRWMLYNEVTALLPNSSVHITYGAKTKESRRELDIEKSHVNDAYVMGLFHPKHRTQPVYFKKKRRNNRVLEKFYDAKYIDGRDGKKRSGQELFNGRISRNHRKDSENLHLYRKQKVTKGKRSIRNRHYPIQPHDILLYQKKKYETAGCHNNGSRAILLPEKKSVALKQLTMYQYAGGYYRVPYESNKKEERTGS

SEQ ID NO: 4613 - protein, 423 aa, unidentified; identical to SEQ ID NO: 4062
  REGION 1..423: note = Human gut metagenome

SEQ ID NO: 4614 - protein, 408 aa, unidentified
  REGION 1..408: note = Human gut metagenome
MVYVQDIDGKPMMPTTRHGKVRRLLKANKATVVNLCPFTIRLTYAISGYKQEIVLGVDAGTKHVGLSATTKSKELYSSEVILRSDIVELLSTRRELRRTRRNRLRYRKPRFGNRVKSKHHGWVAPSVRHKVDAHIRVIDNICSTLPISRIIVEIAQFDTQKIKNPDISGNEYQEGDQLGFWNVREYVLARDGHKCQHCKGKSKDPILNVHHIESRKTGGDSPSNLITLCETCHKEYHKGNIDLKVKRGKSLRDAAVMGIMKWKLYEELKSRYPNVSMTFGYITKYNRIKYGIEKYHISDAFVISKNFNALRLEYHYKVRLVRRHNRQIHKQKVLKGGAKKPNQSPFEVFGFRLFDRVMFEGNYYFIFGRRKSGSFNIRDINGGNQRNVTYKKLKLSIGKRFMIQKEMN

SEQ ID NO: 4615 - protein, 403 aa, unidentified
  REGION 1..403: note = Human gut metagenome
MDKKAVVKRRTPFTLQLTIATGETKQDVTLGVDAGAKHIGLSASTEKEEVFASEVELRQDITGLLAARLAFRRARRHRKTRYRAPRFLNRVHSKHMGWLAPSVENRIQAHMSRIDAICGLLPVTKIVIETASFDIQKIKNPDVEGTDYQQGDQLGFWNVREYVLFRDGHVCQHCRGRSKDKVLNVHHLESRQTGGDAPNNLITLCETCHKAYHAGKIKLKVKRGQSFRAEAFMGIMRWTMLDRVRKAHPDLPVENTYGYLTKNTRITLGLPKTHCIDAYCIAGNLNARRRGVYLYERQMRKHNRQIHKCKVLSKTLKDGTKVGYRKLNQTPYLVKNFRLFDKVRCFGQTGFIFGRRTSGHFDVRTLNRTRLSDCVNSKKLTLLEKRRTFLTELRKEDGASSPV

SEQ ID NO: 4616 - protein, 451 aa, Moorena sp.; identical to SEQ ID NO: 3380

SEQ ID NO: 4617 - protein, 456 aa, Halomonas sp.; identical to SEQ ID NO: 4333

SEQ ID NO: 4618 - protein, 425 aa, Nodularia sp.; identical to SEQ ID NO: 3113

SEQ ID NO: 4619 - protein, 449 aa, Desulfobacter sp.
MKVSVKSQSGKWLMPTNPANARILLKQGKATVIQRTPFAIHLLYETTEHIQPITVGLDDGGINIGIAAVSNGKVLFQQEVVLRSDVKSKLDTRRQYRKSRRNRKTRYRKSRFLNRKSSIPTCKVCGGNAPASQVICRSCLNRADGVHQKYAKIKKSVFRIPPSIKAKKDAIIRVVKQIPLPISRIVLEDLYFDFQAMENPDISGEQYQHGDLLYHKNFKQACLVRDKFRCRVCGAQTKLQCHHIRQRAKGGTDKLSNLMTLCDLCHDRHHKEGLKLPKQKSSFYMSAAHVQQGKHYLQAKLSRIAPLRTTFGYITSHFRNNAGIEKSHVNDAVIIADKQATPLDRQIQTKHVQSRKRSLHEAIARKGRKTPNRTQKRNNKNVFTLRGFNRWDTVQYKGRVGFISGFTGSSSCYIVDIKGNYIKNPMKTYKQVDLREISLICKNQTIISQ

SEQ ID NO: 4620 - protein, 435 aa, Sutterella sp.
MSTTVFVLDKKHRPLMPCRPARARRLLRAGRARVVKRFPFVIRLVDRTVEQSEVQPVLIKLDPGSRETGAAVVRDDGKKRHHALAFFVIEHRGGAIRDALKARSAFRRRRRSQNLRCRSPRFLNRVKPKGWLPPSLRHRVETTLSFVRRMCRYLPVSGIATELVKFDSQKLQNPEVSGVEYQQGTLFEYEVREYLLEKFGRKCVYCGAEGVPLNIDHVVPRAKGGSNRVSNLVLACMSCNQKKGARSLEDFLKGKPKVLARVRRELKTLLRDAAAVNATRWVLFNELKATGLPVETGSGALTKLNRHAFGVEKEHWLDALCVGRLNGVVTRKGLNVLEIRCMGRGSRQRTRLTKYGFPRGYLMRQKCVHGFATGDMVEANVPKGKKAGLWRGRVAVRVSGSFNIQTPKGVIQGVGWKHCRLISHNDGYGYAWLGH

SEQ ID NO: 4621 - protein, 425 aa, Synechococcus sp.
MSNFIFVLDTQKRPLDPVHPGKARHLLNQGKAAVYRRFPFTLILKEAHPDVPVQDLELKLDPGSKVTGIAIKQGNKIIFGAELQHRGQQIKDALLSRRQLRRGRRNRKTRYRQPRFLNRNRPDGWLAPSLKHRVDTVLTWVNRLRNLAPLGSIAQELVRFDLQKLQNPEISGIEYQQGELQGYEVREYLLEKWGRKCTYCGTKDVPLEVEHIHPRSRGGTDRVSNLTMACHACNQSKGNQDIRDFLFGKPELLQRILRKAKAPLKDAAAVNSTRWALFNALKATGLPLTTGTGGQTKFNRTRLDLPKAHWLDAACVGQVDALKVLTSKPLLITAKGHGTRQMCGTDKFGFSTRHKSRVQIHKGFQTGDIVRATVTAGKKIGFYVGRVLCRASGSFDIATATGRVAGISHKYCKAMHKKDGYAYVF

SEQ ID NO: 4622 - protein, 429 aa, unidentified
  REGION 1..429: note = Human gut metagenome
QNKQRKARKDHTEIQNGNADICRTTISCKSVQISYPAAEKSVTHKIIRGKEGKFANRHRDEGWITPSARQLVQMHMNDLKSMCKILPISHVTLERVAFDFQKLENENIKVWEYGKGKLYGYDSPEEYIHDVQNGKCLVCGKPHIDYLHHIIPRSKGGSDKVSNIAGLCYDCHYGPMGVHNCQNTQDRLPELKSEANKQYKVSLLNSVMPVLIEEMDKFCKANSIMFSICEGHDTAKVRDMYDLQKDHCIDGFAISLVDRNVKSVDVMPDRIYQKQRYKKKSKNIIQKRNCREYYDDKKLVAVNRHKGTDQKADSLEEYMNTYAETHTTDECKKHFDSLVVKPARRTYTFHKEWRICPFHIGDKVRYEKKNKIKGNTKVDTFICEGIRFVKDENKAEVKHNKTKSKKMKFCRVLESGCTPYVDYRKLALM

SEQ ID NO: 4623 - protein, 425 aa, Moorena sp.; identical to SEQ ID NO: 3008

SEQ ID NO: 4624 - protein, 426 aa, Sulfobacillus sp.
MVFVLDRQKNPLMPCTEKRARQLLERGRAMVHKIAPFTIRLKDRTAAESVLQPLRVKFDPGSKTTGMAIVLKGAKGSKVVFFGEIVHKAGIKAKLDARRALRRGRRYRKTRYRQARFQNRKRKEGWLPPSLEARVDQTLHAMAKIRQGAPVTDLSVEHVRFDTQKLDNPEISGVAYQQGTLLGYEVREYLLEKWGRACVYCGATDVPLEVEHIVPKSRGGTDRVSNLALACHACNQTKGSRTADEFGFPDIQMQARKPLRDAAMMNATRWRLYEQLQATGLPVEGGSGGRTKKQRLHQGLPKAHYYDALCVGASTPDRFTSLPAYVQIWTAKGRGTRQLCGANAYGFPIRHRSRQKVHFGFQTGDWVRAERKTGKFAGTWVGRVTVRARGSFVVTTVDGNRAEIFHTVCRILQRGNGWQITQKLAS

SEQ ID NO: 4625 - protein, 234 aa, Microcoleus sp.
MCKVFVLDTEKRPLDPIHSALARQLLRNQKAAIYRRFPFIIILKESHPDSSVTTLRLKLDPGAKTTGIALVNDATGEVVFAAELKHRGFAIREALTSRRQLRRSRRTRKTRYRQPRFLNRKRPEGWLAPSLQSRVHNIKTWVEKLCKFAPIGAISQELVRFDMQLMRNPDIQGKEYQQGLLAGYETREYLLEKWGRQCAYCGVKDVPFQVEHIHPRAKGGTNSVTNLTLSCEKC

SEQ ID NO: 4626 - protein, 509 aa, unidentified
  REGION 1..509: note = Human gut metagenome
VYVLNKDGKPLMPTTRCGHVRYLLKEKKARVVKTKPFTIQLLYETNDVVQPLYLGIDPGRTNIGVAVVKADGTAVFTAHLETRNKEIPKLMKKRKDSRCARRTNGRRCRRQRRAKANGTISKKCVKQATAQNGSASKRAKEIGVIKRHLPGCEKEVLCIGIKNKEAKFNNRTRPAGWLTPTANQLLQTHINLIKKIQKLLPISDVVLEINKFAFMQLDNPNIQKWQYQQGPLYQKANLEEAVSEMQEHHCLFCKKKIDHYHHVVPQHKNGSNTIDNIVGLCTKHHDLVHKDTAWHEKLTKKKTGLNKKYGALSVLNQIIPALTKELSSIFPKHFFVTTGKSTYDYRAAHSVSKDHWLDAYCIACSVLPNDVCDSSINNRVPYELKQFRRHDRRALHKENMSRVYTLNGKKVATNRHKTTEQTADSLEEFRQNHPDDVCKLKVKENHSEYRNPKRNFPGCVFLVGKRTHVMQGTSGSHNGKADGYYDTNGNSYSSGKCKFVAKNEGIIFA

SEQ ID NO: 4627 - protein, 470 aa, unidentified
  REGION 1..470: note = Ga0315273_10031089
MKNIQQQFGMRSTPIDASQVCGSVVLSLNREETLSEQGVKTIPNNLDVNQHQRGGLNAVFVLNIDGKPLMPCKSAKARHLLRDSKANVVSRKPFTIRLLFDCENQTQPVTLGIDSAYKWVGFSARTEKKELISGELKLRTDIKKKLEERAMYRRGRRNKLWYREPRFDNRIKSKKDGWFAPSIIHKLDTHIRLVEKIKRLLPISKIVVEIASFDTQKMMNPEISGIEYQQGTLQGYEIREYLLEKFKRTCVYCGKTNIPLEVEHMNPKARGGSNRVCHLTISCHKCNQKKGTRTASEFGHPEVEKTGMVSLKETPFMNLVRSRIVDILGCDYTYGYITKHDRIKLGLEKSHINDAFVISKGTSEERCKSFNLKQTGRNNRCLQINRKGYKPSIRRVRYPLQPNDRIIYEGKVGIVKGVHSYGKRILLNIKNNNPKNIDIKKVHLLQYGKGLYFDIPPTVEVCGFPCEAIK

SEQ ID NO: 4628 - protein, 443 aa, Anoxybacillus sp.
MVEENMTCFMQRKGENPMVFVLDTNKRPLAPCHEAVARKLLKQGKAAIYRRFPFTIILKKSVDESEIKATYRLKIDYGSRHTGLAILRGQEVVWLGQLDHRTDIKERMDKRRVFRRARRNRKTRYRKPRFLNRRRKDGWLPPSLESRVQNIQTWVERLRKICPIEHISYENAKFDTQLMRNPEINGVEYQQGTLQGYEVREYLLEKFGRKCCYCGKENVPLEVEHIIPKSRGGTDRVDNLCLACHDCNQRKGSKTAEEFGYPHIQKQVKESLKDTSAINSTRWKVYEVLKQTGLDVECGTGARTKMNRIRLDLPKTHYFDACCVGESTTNHLYFKTKEVLFIKAKGRGSRSRTNLDRYGFPRGYLARQKFFFGFQTGDMVKAVVPRGKYQGVWFGEVACRKTGSFDIKGKDGKRIAQGINYRYVQVIQRFDGYAYGKGVAELA

SEQ ID NO: 4629 - protein, 430 aa, unidentified
  REGION 1..430: note = metagenome
MPNKVYVINKHGRPLMPCSPAKARHLLDAGKAKVKKRTPFTIQLVYGSSGYTQEVILGVDAGSKTIGLSASAETEELLSAEVKPRNDVVDLLSTRREFRRARRNRKTRYRKPRFDNRVRSKHKGWLAPSVEVKIQEYITSIKRVCRILPVSKVVIETAEFDLQLLKAIADGKPVPQGEDYQKGEMYGHYNVRQYVLWRDGYTCQCCGAHTTKKKEVRLHVHHLESRKVGGDAPDNQVTLCESCHEKLHKGLIAEKDFKKRKRKSTRDATFMGIMRKTLMQMLCSELPIPVVKTRGYITKATREKLLVLPKSHTNDALAIAQGKQGFNVGYLPGIVQINKIYTIRPVRHHNRQLHKAAILTGGIRKSNQTEKYVFGYRLFDKVQFNGQDCFIWGRTTGIFTIKTINGKMIKDGISFKKLKPVEKSTSYLIA

SEQ ID NO: 4630 - protein, 456 aa, Halomonas sp.; identical to SEQ ID NO: 4333

SEQ ID NO: 4631 - protein, 400 aa, unidentified
  REGION 1..400: note = metagenome
AKVKKRTPFTIQLVYGSSGYTQEVILGVDAGSKSIEISASTKKEEVFAADVTPRNDVVDLLSTRREFRRARRNRKTRYRKPRFNNRVRSKHKGWLAPSVEVKIQEHITSIKMVCRILPVSKVVVETAEFDLQLLKAIEEGKPVPQGEDYQQGEMYGHYNVRQYVLWRDNYTCQCCGAHPTKKKEVRLHVHHLESRKVGGNAPGNLVTLCDRCHEKLHKGLITEKDLKKRKHRSTRDATFMGIMRKTLMQRLCSELPIPVVETRGYITKATREKLLVLPKSHTNDALAIAQGKHGFNASYLPGIVQSDKIYTIRPVRHHNRQLHKAAILKGGIRKSNQAEKYVFGYRLFDKVQFNEQDCFIWGRRTTGIFTIKTINGKMIKDGISFKKLKLLEKSTSYLIA

SEQ ID NO: 4632 - protein, 456 aa, Halomonas sp.; identical to SEQ ID NO: 3676

SEQ ID NO: 4633 - protein, 413 aa, unidentified; identical to SEQ ID NO: 3220
  REGION 1..413: note = Human gut metagenome

SEQ ID NO: 4634 - protein, 443 aa, Bacillus sp.
MVEENMTCFMQRKGENPMVFVLDTNKRPLAPCHEAVARKLLKQGKAAIYRRFPFTIILKKSVDESEIKATYRLKIDYGSRHTGLAILRGQEVVWLGQLDHRTDIKERIDKRRAFRRARRNRKTRYRKPRFLNRKRKEGWLPSSLESHVQNIQTWVNRLKKLCPIGYISYENAKFDTQLMRNPEINGVEYQQGTLQGYEVREYLLEKFGRKCCYCGKENVPLEVEHIIPKSRGGTDRVDNLCLACHDCNQRKGSKTAEEFGYLHIQKQVKESLKDASAINSTRWKAYEVLKQTGLDVECGTGARTKMNRIRLDLPKTHYFDACCVGESTPNHLYFKTKEVLFIKAKGRGSRSRTNLDRYGFPRGYLARQKFFFGFQTGDMVKAVVPRGKYQGVWFGEVACRKTGSFDIKGKDGKRIAQGINYRYVQVIQRFDGYAYGKGVAELA

SEQ ID NO: 4635 - protein, 443 aa, Ectothiorhodospira sp.
MAVLVLDRRKKPLMPCSEKRARLLLERGRAVVHKMRPFTIRLKDRTAEASTLQPVRIKIDPGSKTTGVTVIREDDSDPEQQQVLMLMEVEHRGHQIKDALTQRRAFRRRRRGQLRHRAPRFDNRTRPRGWLAPSLQHRVDTTLAWVARLRRLAPVTAIDQELVRFDTQAMEAPEISGVEYQQGTLHGYEVREYLLEKWQRRCAYCGARDLPLEVDHIHPRSRGGSDRVSNLTLACHDCNQAKGNQPVEAFLAADPKRLQRIKDQARAPLKDAAAVNATRWALFQGLKAMGLPVITGSGGRTKYNRQRLGLPKTHALDAACVGQVAAVTGWNVPTLTTRATGRGSYQRTRLNRFGFPRGYLMRKKQVKGFQTGDLVQAQVPTGKKAGTYQGRVAIRATGSFNIQTAQGVVQGISHRHCRLLQRADGYGYTFQPKPLQEDASRAA

SEQ ID NO: 4636 - protein, 535 aa, Streptomyces sp.
MRHVRSLNSNVTHTTPLSPKSLRAPASGATCPRRPHVRVISPDPCSLGNPRCVASGASREGRSLAPSYRVTSPGHHDLRISRGASMTTFFTGEQTHQAVLPQQPALESAGAYTPGSRDETAHGLPDPKPGTGVGHGRGETGAVRTRTRRRHARRLDPGSKATGIAVTDERDEVGAKGRTALVRRGLVSIELRHRGRQIHSGMVRRAGHRRRRRSANLRYRAPRHDNRTRPDGWLPPSLRHRIDSTMSLVARLCRYAPVLEIHVEQVAFDTALIAAAVSSREQDFSERTHAGSEIREFLLAKWERSCAYCGATGVLLNIEHVRPRSRGGSDRVANLVIACVPCNQAKGTARIDEFLADRPARLERVIARLRRPLHDVAAMNTTRLLLVKTLATHGVAVHTWSGGRTSWNRLAMGLPKSHTLDALATGVIDLERGDAVVRIPAQILVVRSTGRGSYARTTPDRYGFPRLQRPGGQHRITTLTSHFDVSHRNLRLLQRADGYTYGFADEIRLSEEHGPAYSGRTLKGGDPGNVRTPDA

SEQ ID NO: 4637 - protein, 426 aa, unidentified
  REGION 1..426: note = Human oral metagenome
MLVYVLKQNGQPFMPTARFGKIRRLLKTKKAKVVRREPFTIKLFYEPETDVVQECYCGVDTGSRHIGVAVVGNDKVLYQSQTELRNDIKRKMDARRMYRCNRRQRKTRYRKPRFLNRSNSTKSDRLPPSVNHKVQAHIDEIEFCKKILPISDSNLIIEVSQFDTALMKDPSLISEKVKHWGYQQGFNYGYSSRREAVLHRDNYTCQCCGKKNCRLEVHHIKFKRDGGTDDEENLITLCEDCHRGVHAGTVVLNKKPKKSRNLKYATHMSIIRSYLLKKYPNAIETFGFVTSENRNHLNLEKDHYIDACVVASGGLEFKELDVIFYKQRVSKGDYQLTKGIRGEQKLPTGKICGFRKFDKVEYLGEKYFIKGRMSSGFAILMNIFGEKVDFSSMPKGLKTPKLSKCKRISTRRSRLCIREKITLNIV

SEQ ID NO: 4638 - protein, 424 aa, unidentified
  REGION 1..424: note = Human gut metagenome
MRVFVFNMRGRPLMPCSQRKARLLLRENKAMIYKYHPFTIQLTYTTGETKQDCHIGIDTGSKYIGAAVRSEDKVFWKGEIELRQDIRSNLDTKRIYRRSRRNRKTRYRKPRFLNRKRRDEWLPPSLQSRINHTFHWIDTLSSLVPNPILHIEVGKFDVAKMINPEIHGVDYQHGQTYGFFDERYFVFARDNYTCQCCGKSKNKILNTHHIIYRSNGGTNRVDNLITVCTDCHTSQNHRKGGIFYQWQGQHKKGKQYKEPPFMNTLRKRIFVAYPDAEITYGSETTPKRKAMKLDKTHYNDAIVISGINEIKENPEEWLLIKQFRKKKRSLHEATARKGRKKPNRNQTRNSKNTPYYKGFYLNDKVSVFGKSGYITGFTSNAAYIKDENNDYITLPNKTYKQVSINKMKLECHNNNWQYIIKNAV

SEQ ID NO: 4639 - protein, 419 aa, Paenibacillus sp.; identical to SEQ ID NO: 3664

SEQ ID NO: 4640 - protein, 447 aa, unidentified
  REGION 1..447: note = Human gut metagenome
VPAYRFKHITKKEVPYMVYVLDIDGQPLMPTSRHGKVRRLLNSHLAKVVKRCPFTIQLLYQSTKETQPVSLGVDAGSRHIGLSATTEQEVVYQEELVPRNDIVKLLSARRALRRSRRNRKTRYRKVRFNNCVHSKHKGWLAPSVEVKIQEHITAIKRICQILPISDIHVETAEFDLQRLKAMEEGRPLPVGTDYQLGEQYDFYNTRQYVLHRDEYTCQCCGTHDNNVKLHVHHVESRQTGGEAPNNLITLCEHCHKSIHAGKMMLPKGKKRGKSYRDAAFMGIMRNTLLERLKKEVNVPVTMTYGYITKYWREKAGLEKSHINDAICISKHPYARPLETYYLTKAVRHHNRQIHKTKFSKGGIRKRNQAPYLVKGFRLFDKVLYQGESYFIFGRRITGYFDIRTLDGTKVNKGSTSYKKLRIQDTAEAYLTEVRAIPHMNEFTCVLA

SEQ ID NO: 4641 - protein, 465 aa, unidentified
  REGION 1..465: note = Human gut metagenome
MSTCVCVLSKNGERLMPTIRLGKVRHLLKDGKAKIVKHHPFTIQLLYDSKTNTQPIEICEDVGYNYIGISVKSESHEYVSAQYDTLQDEKDCHDDCRRMRRTRRNRLRYRKPRFDNRKRGEGWLAPSLRHKKELNVNVVKMYCEVMPVTHAIVEVGSFDTMLVKAIEEGKTTPEGAGYQKGPRYKLATLREAVFYRDNYTCQVCGRKANEGAILHVHHMFYWKGRHGNSLSELVTVCEKCHTPANHQKGGKLYGFGEDIKFANLSGAAFMNTVRWQIVNELYAAFGKPFVTFTYGAMTKEKRIALHLEKSHNNDAYAMGSFHPVDRCAFEHYEKMKRNNRILEKFYDSRYINIRTGEVASGKELFNGRINRNHKKDSENLHKYRGKRIRKGYRALRRKKVALNPGDLVSLNGEILTVHGTHTKKNGSVNVKFKTPSKSGKKSVSLKKLKIIKTISPMRSAWDKVS

SEQ ID NO: 4642 - protein, 449 aa, Allochromatium sp.
MAVFVLDKQKHPLMPCTEKRARLLLERGRAVVVRLAPFTIRLKDRIGGAVQPLRLKLDPGSRVTGLAIVRESETGDADTGAVERLEHGLWLGELAHRGQAIREALTLRRHYRRARRSRKTRYRAPRFLNRPRREGWLPPSLQHRLDTTLNWVARLRRLAPITALSQELVRFDTQALQNPEISGVEYQQGELAGYEVREYLLETWHRTCAYCGATHVPLEIEHIVPRARGGSDRVSNLTLACRACNQRKANQSIEDFLKRQPALLHRIQAQAQAPLQDAAAVNATRWALLNALQTTGLAVETGSGGRTKFNRTRLDIPKTHALDAACVGAVDQVRDWNRPVLAIRATGRGAYRRTRTFNNGFPRGYLMRHKRVHGFQTGDWVRAEVPKGKKAGVHVGRVAVRQTGSFNIQAQGGTVQGVSYRHCRVLQRADGYGYAFQPKPDAEKARRAA

SEQ ID NO: 4643 - protein, 378 aa, Moorena sp.; identical to SEQ ID NO: 2642

SEQ ID NO: 4644 - protein, 466 aa, unidentified
  REGION 1..466: note = Human gut metagenome
MKILVIGRNGLGLAPTTPRKARILLKEKRAEVAYRQPFTIRLKYKTGCAHPKMCLGEDTGSQHIGFAILTEKGQVLDKTEYELRSTMEKRSLLETRKEYRRGRRYRKVRYRHSKFHPTTKRLYVEKPIKYNKHTTHWKKQTNSFDSSRPEGWLPPSIQSKLDHHIRLTSRYKEALPPDTMIRIEVGRFDVAHMKDPTINGKMYQQGPMYESENVKAYVFARDSYTCKCCKAKAGSIRKDGTQVKLKAHHIDFRSKGATDNPERMVSVCDRCHTTAAHQLGGILYQWMIEGKKFSRGYRDPAFMNILRRRMWKAFPEAAFTYGNITAADRKGLLIEKSHANDAVAIAAHGMELIRNSTETTFYKQLRKQKRSLHEATPRKGRREPNRTAKRNRKNTCVVKGWYLNDKVTVFGKTGWISGFSGKSSVYIRDCENEYITVPGKNYKLVPISQIKMITHCNNWAVYTKIA

SEQ ID NO: 4645 - protein, 456 aa, Halomonas sp.; identical to SEQ ID NO: 4333

SEQ ID NO: 4646 - protein, 438 aa, Lactobacillus sp.
MKGEKMQNRVFVINKHGEALMPCKPRTARKLLQSGKAKPIKKEPFTIQLLYGASGYKQPVKLGVDSGQRHIGLAVTSQDKVFFQSEVELRQDVKKLLDTRRIYRRSRRNRKTRYRQARFLNRTKTKKNNWLPPSVQSKVNNNINWIKHLLSVLPNPELHIEIGKFDMQKMKDPAIKGEGYRKGDLYGYQTVKQYVLARDQYKCQVCKKKGGKLKIHHIIYRSLGGTNVPSNLLTVCADCHTAKNHAEGGKLYELCKKKKKVTKPLKGATFMNILRRRLWTAFPQAHFQYGAFTTLQRADLSLSKSHYNDAIAISGIKKINSRPTSVVMFKQFRKKKRSLHEATARKGRKAKNITSKRNAKNTKFAKGFWLNDYVRIKNSKFKGYISGFTGSSCYVKDCLGNYLTLNTYKQTNLSNVEFINHRNNWCNTSISEQRYVME

SEQ ID NO: 4647 - protein, 426 aa, unidentified; identical to SEQ ID NO: 3614
  REGION 1..426: note = metagenome

SEQ ID NO: 4648 - protein, 458 aa, Lactobacillus sp.; identical to SEQ ID NO: 4474

SEQ ID NO: 4649 - protein, 413 aa, unidentified; identical to SEQ ID NO: 2636
  REGION 1..413: note = Human gut metagenome

SEQ ID NO: 4650 - protein, 432 aa, Ktedonobacter sp.; identical to SEQ ID NO: 2059

SEQ ID NO: 4651 - protein, 413 aa, unidentified
  REGION 1..413: note = Human gut metagenome
MTSYSFVLDVNGKPLAPTKEQKAWFLIRKKRAALVSKYPMVIQLKKEIPEKEICQDEIRCGIDDGGLHVGIALVQKCKTKNKVVFKGTMEQRNDVKHLMEVRRGYRRYHRYHKRYRQARFDNRKSSKREGRIAPSILQKRQATIRVIHWLNKWINITNYWLEDVSVDIRALTDGYQSYRWQYQRSNRLDENIRKAAILRDGGKCMECGKSNCRLEVHHIKPRRRNGSNTLDNLITLCESCHQKTEGQEELYMDRYFSLLKSSDNKNLNYAQHVMIGKMWLRKQLSGLGVLYLTSGGDTANKRIDWNIEKSHANDAVCITDLQPDTCDMKEWTMKPMRRQSKAKTDHVLGIHHRDLVEYTFKNGETHRGYVTALYPEQKAINFQSPTKHCKKVNARKCKLLWNYSKIYWFENAS

SEQ ID NO: 4652 - protein, 443 aa, Geobacillus sp.
MVEENMTCFMQRKGENPMVFVLDTNKRPLAPCHEAVARKLLKQGKAAIYRRFPFTIILKKSVDESEIKATYRLKIDYGSRHTGLAILRGQEVVWLGQLDHRTDIKERIDKRRAFRRARRNRKTRYRKPRFLNRKRKEGWLPSSLESRVQNIQTWVNRLKKLCPIGYISYENAKFDTQLMRNPEINGVEYQQGTLQGYEVREYLLEKFGRKCCYCGKENVPLEVEHIIPKSRGGTDRVDNLCLACHDCNQRKGSKTAEEFGYPHIQKQVKETLKDTSAINSTRWKAYEVLKQTGLDVECGTGARTKMNRIRLDLPKTHYFDACCVGESTTNHLYFKTKEVLFIKAKGRGSRSRTNLDRYGFPRGYLARQKFFFGFQTGDMVKAVVPRGKYQGVWFGEVACRKTGSFDIKGKDGKRIAQGINYRYVQVIQRFDGYAYGKGVAELA

SEQ ID NO: 4653 - protein, 442 aa, unidentified
  REGION 1..442: note = Human gut metagenome
MSTSVFVLDKKHRPLMPCRPARARRLLRAGRARVVKRFPFVIRLVDRTVEQSEVQPVLIKLDPGSRETGAAVVRDDGKKRHHALAFFVIEHRGGAIRDALKARSAFRRRRRSQNLRCRSPRFLNRVKPKGWLPPSLRHRVETTLSFVRRMCRYLPVSGIATELVKFDSQKLQNPEVSGVKYQQGTLFEYEVREYLLEKFGRKCVYCGAEGVPLNIDHVVPRAKGGSNRVSNLVLACVSCNQKKGARSLEDFLKGKPEVLARVRRELKTPLRDAAAVNATRWVLFNELKATGLPVETGSGALTKLNRHAFGVEKEHWLDALCVGRLNGAVTRKGLNVLEIRCMGRGSRQRTRLTKYGFPRGYLMRQKCVHGFATGDMVEANVPKGKKAGLWRGRVAVRVSGSFNIQTPKGVIQGVGWKHCRLISHNDGYGYAWLGHAPHSSPA

SEQ ID NO: 4654 - protein, 431 aa, unidentified
  REGION 1..431: note = Human gut metagenome
MDAWDIIVVLNKRGKPLMPCSPAKARLLLKEKKAIVKRRTPFTIQLTIATGESKQPVTLGVDAGYKHVGLSASTEKAELYASEVELRQDVSDLLSARRALRQSRRSRNTRYRAPRFDNRIRTKRKGWLAPTVENRINVHLSRIETVLRLLPVTKITVETASFDTQLLKNPDIAGKEYQEGEQLGFWNVREYVLFRDGHVCQHCHGRSKDPVLNVHHLESRRTGGDSPGNLITLCETCHKALHRGEIKLKAKRGRSFRAETFMGIMRWGVLNRLKASHPKLEVHNTYGYRTKHARIANGIAKSHCADAFCIAGNFGAKRLGEFFFQKQTRRNNRQIHKLSILKGGIRKRNQAPFEVNGFRLFDKVACQGEEGFIFGRRSTGYFDVRKLDGTCISAGISYKKLHLLEKRRTYLTEIRKEEALPPPPEGRGLRA

SEQ ID NO: 4655 - protein, 477 aa, Acidithiobacillus sp.
MFVFVMNQYGRPGHPTRRMDWVRKQLKRKRGKIVGGGISGKPAVLVLRERSFDRNRTVKRRFYVTLDTGFRNVGYAVTELLEDGTLRVLLKGTLTARTPDIRGLMDERAMYRNSRRYHRRANVKKKGQTAKHRPPRYESRGKQNSVTLKHSIETHRNLYARLARLAPLPVYQVTQGFESVSFDLRALAHGKPRTGSGYQVSPVGKAAGEKTHAFVVRRDGGCVVCGRKEHLHGHHLRKRSKAGSNRAGNRVTLCEDCHADVHAGLIDLPITDGAQWRDASTVNTVCGKLRKQATEFGIVPIPVEQSVAARRRLGLEKTHALDAVSVAAAMTEACYVNQRDTVDMDMTQYRRHRRAHIHAQRDRRYYLPGVMAPVAHNRRKRCDQGDVDSLAEFRKAHPKDVGCLKVKKAVRLYTPNRAKAPAVGGDVWKIGGQRVVVRGVHSKTNLYVPDLKPVTGKVYAAPKDGIRLLWNTGMVVV

SEQ ID NO: 4656 - protein, 456 aa, Halomonas sp.
MAIFVLDKKKQPLMPCSEKRARLLLARGRAVVHKRYPFTIRLKDRVGGETQPLRLGIDPGSKTTGLALMREPDSQQRHMLCLFELVHRGLQIKKALQQRAAFRRRRRSANLRYRAPRFNNRTKPKGWLAPSLQHRVDTVTAWVKRLSRLAPVTAISQELVRFDTQKLENPEISGVEYQQGTLLGYEVREYLLEKWERECAYCGTGDTPLEIEHVVPRSRGGSNRVSNLTLSCHPCNAEKDSQTLTDFFATNKGLKKRLKANGHAADARLDRVQRQLKQPMRDASAVNATRWALFSALKTTDLPVAVSSGGHTKYNRQRLNIPKTHALDAACVGAFEKLHDWTVPTLTIKAMGRGSYQRTRLTKHGFPRGYLMRQKQVHGFQTGDMVRAIVPTGKKAGTYTGRVAVRKRGSFNIQRSAGTVSDISYKYCTLIQRSDGYGYYVTPFTNLTGGAGQAVA

SEQ ID NO: 4657 - protein, 456 aa, Halomonas sp.; identical to SEQ ID NO: 3676

SEQ ID NO: 4658 - protein, 476 aa, unidentified
  REGION 1..476: note = Human gut metagenome
LYIKMTSCTCTVFPAYNYAKTSSSQGKHNLLLRQERFIVKEVANMSTVYVLNKDGKPLMPTTRGGHVRHLLKEQKARVVRAKPFTIQLLYETNDVVQPLYLGIDPGRTNIGVAVVKANGTAVFTAHLETRNKEVPKLMQDRKKARRARRTNGRRCRRQRRAKANGTISKKCVKQDTAQSKNPSKRAKEIGVIKRHLPGCEKDVLCIGIKNKEAKFSNRTRPEGWLTPTANQLLQTHINLVKKIQKFLPISDVVLEVNKFAFMRLDNPDIQKWQYQQGPLYQKGSLENAVSEMQEHHCLFCDKPIDHYHHVVPQSENGSNTIANIVGLCAEHHNLVHKDAAWQKKLAEEKVGLNKKYGALSVLNQIIPALTNKLSVLFPKHFFVTAGKSTHDYRAAHGVSKDHWLDAYCIACSVLPSNVCDSNINNHMPYELKQFRRHDRRVLNNENMNRVYTLDNKAVAINRHKATEQEAASLEEF

SEQ ID NO: 4659 - protein, 462 aa, Moorena sp.
VAVFVLDRRGKPLMPCNEKRARLLLARGRARVHRVMPLVIRLVDRQTGACSFQPLRLKIDPGSRVTGMALVRETDDGIAVLNLFELVHRGRKISEALTARRGFRRRRRGANLRYRPPRFLNRTRPSGWLAPSLMHRVHITIACVNRVRRWAPVTALSSELVRFDMQALANPEISGIMYQQGTLAGYEVREYLLGKWSHTCIYCDATGRPLQIEHLTAKARNGSNRIGNLGLACGQCNQDKGALDVREYVKDPKRLARILATASRPLNDAAAVNATRRALASALQITGLPLELASGGQTKFNRVTRNIPKTHALDAVCVGQVNVVRGWQRPSLTIRATGRGSYQRTRLTRYGFPRGYLMRQKQVQCFQTGDHVRADVPCGRKAGIHIGRVAVRATGSFNIQTATTVVQGISYRYCTLVQRGDGYAYSLKPRNSFRQEDAGDGHPSHVALSLPSKNAGVAGRLS

SEQ ID NO: 4660 - protein, 443 aa, Geobacillus sp.; identical to SEQ ID NO: 4652

SEQ ID NO: 4661 - protein, 418 aa, Moorena sp.
LNVYVVNQREEPLMPTRPQKARKLLKQEKAKVYKRTPFTIQLQYPTGENKQDISLGVDAGTKSIGLSATTDKEVLLESEVKLRTDIQDILSTRRSARRARRSRKTRYRQPRFRNRKKEKGWLAPSIQNKVDMHVKVINLLHEILPIKNVVIEAAQFDTQKIKNPSITGDLYQKGDQLGFWNVREYVLFRDNHTCQHCKGKSKDVILNVHHIESRNTGGNSPANLICLCETCHKLIHQEGKEHLFKRQTSSLKDASQMTVMRWCIYNHVKRTYPHVKLTYGFVTKHTRIHHGLEKTHLMDARCISGNPLAVRKERTFLFKQVRRNNRQLHKFTTPKGGKRKNNKAEKLVKDFQLFDKVQFNGKDCFIFGRRKTGYFDLRLLDGTRIHKSANYKKLRAVEKANTLLIQIQRKGSAGCLLS

SEQ ID NO: 4662 - protein, 336 aa, unidentified
  REGION 1..336: note = Human gut metagenome
ARRALRRARRNRKTRYRAPRFDNRIRTKRKGWLAPSVENRINAHLSRIEAVLRLLPITKITVETASFDMQRLKNPDISGKEYQEGEQLGFWNVREYVLFRDGHVCRHCHGRSKDPVLNVHHLESRRTGSDSPDNLITLCETCHKALHRGEITLKAKRGQSFRAQAFMGIMRREVLNRLKASYPELKVHETYGYLTKHARIANGIVKSHGADAFCIAGNLGAERLGEFFFQKQTRRNNRQIHKLSILKGGIRKRNQAPFEAKGFRLFDKVACQGEEGFIFGRRSSGSFDVRKLDGTRISAGISCKKLRLLEKRRTYLTEIRKEEALPPLPEGRGLRA

SEQ ID NO: 4663 - protein, 417 aa, unidentified
  REGION 1..417: note = Human gut metagenome
MPCSPAKARLLLKEKKAIVKRRTPFTIQLTIATGEAKQPVALGVDSGYKHIGLSATTEKAELYASEVELRQDITDLLSARLALRRSRRSRKTRYRAPRFDNRVASKRKGWLAPSVENRIAAHMSRVEAVMRVLPVTAITVETAAFDTQLLKNPDIAGEAYQQGEQLGFWNVREYVLFRDGHVCQHCRGKYNDPILNVHHIESRRTGGDVPNNLITLCETCHKAFHRGEIELKVRRGKSFKAETFMGIMRWTLFERLKKAHPELRVRNTYGYLTKHKRISHGIAKSHCADAYCIADNLGAKRLEGFFFQKQTRKHNRQIHKLSILKGGLRKKNQAPYEVKGFRLFDKVICKGEEAFIFGRRTSGSFDVRRLDGTRIPAGINYKKLRLLEPRTTYLTEFRMEAALPPLHECRGFRAEFL

SEQ ID NO: 4664 - protein, 453 aa, Anaerotruncus sp.
MSVAVLSSTGQKLMPTSNYRARKLLKSGRAAIECYRPIFTIRLTDREEGKTQPIEYACDTGYQHVGVSIKSEKHELVHAQYDMLSNETERHNDRRKYRRTRRNRKRYRKPRFDNRSRKNQEMAPSLRHRKENQINLFESFCKVMPITSATFEMGKFDTQLLQAIADGKPLPEGKDYQQGLKYLFQTEREAVFSRDHYTCQVCGKSVKDGVILHTHHIGFWKGYRPNRISNLLTVCEHCHTAKNHKPGGALWGLEPKSTNLAAATYMSTVRWAIYRELVLKHPEIDIHIQYGAKTSVTRKSLHLAKTHANDAYCVGSLHPRHRTAELVYQKKRRNNRILAKFYDAKYIDIRDGAKKSGAVLSCGRTNRRESRRSDKNQRIYRGNKCSSGRTSVRENRYAYQPGDTIVFHSQRFVVNGSHCKGARVILDTGKSVKATDLTCIKKEGGWRFLPAQA

SEQ ID NO: 4665 - protein, 442 aa, unidentified; identical to SEQ ID NO: 2939
  REGION 1..442: note = Human gut metagenome

SEQ ID NO: 4666 - protein, 443 aa, Anoxybacillus sp.
MVEENMTCFMQRKGENPMVFVLDTNKRPLAPCHEAVARKLLKQGKAAIYRRFPFTIILKKSVDESEIKATYRLKIDYGSRHTGLAILRGQEVVWLGQLDHRTDIKERIDKRRAFRRARRNRKTRYRKPRFLNRKRKEGWLPPSLESRMQNIKTWVERLRKICPIEHISYENAKFDTQLMRNPEINGVEYQQGTLQRYEVREYLLEKFGRKCCYCGKEGVPLEVEHIIPKSRGGTDRIDNLCLACRDCNQRKGSQTAEEFGYPHIQEMVKKTLKDASVVNATRWKVYEVLKQSGCEVECGTGARTKMNRIRLGLPKIHYFDACCVGKSTPLQLHFKTKEVLFIKAKGRGSRSRTNLDRYGFPRGYLARQKYFFGFQTGDMVKANVPKGKYQGVWFGEVACRKTGSFDIKGKDGKRIAQGINYRYVQVIQRFDGYAYGKGVAELA

SEQ ID NO: 4667 - protein, 442 aa, unidentified; identical to SEQ ID NO: 3218
  REGION 1..442: note = Human gut metagenome

SEQ ID NO: 4668 - protein, 428 aa, unidentified
  REGION 1..428: note = metagenome
LKVFVLNMRGRPLMPCSPAKARHLLKAGKAVVRRRTPFTIQLRIATGETKQSVTLGVDAGAKHVGLSAATEKEEVFASEVELRQDITGLLAARLSLRRERRQRKTRYRAPRFLNRVRSKHKGWLAPSVENRIQAHMSRIDAICELLPVTKIVIETASFDIQKIKHPDVEGTDYQQGDQLGFWNVREYVLFRDGHVCQHCHGHAKDKILNVHHLESRQTGGDAPNNLITLCETCHKAYHAGKIKLKVKRGQSFRAEAFMGIMRWTLLDRVRKAHPDLPVENTYGYLTKNTRITLGLPKTHCVDAYCIAGNLKAVRRGVCLHQRQVRKHNRQIHKCTVLSKTLKDGTKIGYRKLNQTPHLVKNFRLFDKVRCLGQTGFIFGRRSSGYFDVRRLDGVKISSCISYRKLTLLEKRGTCLTELRKEDGASSTV

SEQ ID NO: 4669 - protein, 424 aa, unidentified
  REGION 1..424: note = Human gut metagenome
MVYVISQDGKPLMPCSNPIARLLLKQGKAKVKKREPFTIKLTYEAPNYTQDLTLGVDTGSGTIGTAVSKDNGDIVYMSEVVVRNDITDKMTQRAKYRRNRRNRKTRYRKARWLNRASSIKKDRFSPTMQSKLHSHVREIEYIQSILPITEMVFETGQFDMHLMKNPSLANPKVRPWGYQKGTNYGFENTKAMVLNRDNYTCQCCKGKHKDSKLEVHHIVFRSQGGSDEESNLLTLCHTCHKDLHSGKINLKLSGKVKGNLKYATQMNSIRKQLFRLYPNAIETFGYVTKANRLHLGVDKEHYYDACTIATQGNAFNVKSNLYKKKCVSDGDFQKTKGIHSEQPIVTDKICGFRKFDKVRYFGNDYFIKGRMSTGYAILMDIDGDKVDFSAMPKGYKTPKMVNLKRLEARSTWMITTVEVTPNIA

SEQ ID NO: 4670 - protein, 469 aa, Streptomyces sp.
VEHVRGEITDESPGIGGVTPGHEVGEKAREGHPVVFVLDKHHEPLQPTSPARARRLLASGRAVVARHTPFVIRLKDRTVGFSEVDGVEVGIDPGSKHTGIAVFTERSGTRRGLYTIELAHRGALIRDRLTARAACRRGRRTRNLRYRAPRFHNRTKPEGWLAPSLRHRVDTTVSWAGRLARWAPVRAVHVERIAFDTHVLSAQRPLDGVEYQHGTLRGTEAREYLLAKWGRTCAYCGTTGVPLNIDHIHPKSRGGSDRIGNLTIACIPCNQAKNNTPVTEFLSKDPRRLASVLAQAAVPLQDTAAVNATRSALCEALTKGFPTVHLASGGRTKWNRTRAGLPKSHTLDALCVGDLQTIGRVPSVVLVITATGRGSYSRTRADRYGFPRLRLPRQKQFFGFQTGDLARAVVPTGKNVGTHSGRIAVRASGSFNVRTLHGVVQGIRHNHFRLIQRADGYAYNTRPEGRDEA

SEQ ID NO: 4671 - protein, 420 aa, unidentified
  REGION 1..420: note = Human gut metagenome
MQYVYVLSKHGEPMMPCSPGKARLLLKQQKACVVRRTPFTIKLLYGSAGYKQPITLGVDAGSKHVGLSASTEKRELYREEFTPRNDVVELLSTRRQNRRSRRNRKTRYRAPRFDNRVHSKHKGWLAPSVEVKIQEHITVIKHICKILPISLVRVETAEFDTQRLKAMLAGKPLPVGTDYQLGEMYDEYNVRQYVLKRDNYTCQCCGAHTTAKKLVKLHVHHLESRKTGGNAPSNLVTLCTTCHKNLHKGKVTLDGKERGKPLRDAAFMGIMRKTLMARLKKELPIPVQGTYGYITKMRREQNDIKKSHTNDARCISKHPLAEPCSVCYRTKAIRHHNRQTHKANFSKKGIRKRSQMPYLVEGYRLWDKVLYKEQECFVSGRRSSGSFTLKKLDGTSVSKGVTFKKLRLLEPATNYLIERM

SEQ ID NO: 4672 - protein, 444 aa, unidentified
  REGION 1..444: note = Human gut metagenome
VLLLLKRTAVFTAHLETRNKEIPKLMQGRKKARRARRTNGRRCRRQRRAKANGTISKKCVKQTTAQNGSVSKRAKKIGVIKRHLPGCEKKVLCIGIKNKEAKFSNRTRPEGWLTPTANQLLQTHINLIKKIRKFLPVNDVVLEINKFAFMQLDNPNIQKWQYQQGPLYQKASLEEAVSEMQEHHCLFCKQSIVHYHHVVPQSENGSDTIGNIVGLCTKHHDLVHKDTAWQKKLAKKKTGLNKKYGALSILNQIIPALTKELSSLFPKHFFATNGKSTHDYRAAHDVSKDHWLDAYCIACSILPNDTCDKNINGRVPYKLKQFRRHDRRALHKENMSRVYTLDGKKVATNRHKAIKQTTDSLEEFRQRQPNDVCKLKVKEHHPEYRNPERNFPGCVFLVGKHTHVMQGTSGSHNGKADGYYDTNGNSYPSGKCKFVAKNKGIVFA

SEQ ID NO: 4673 - protein, 428 aa, Vibrio sp.
MRLKHSDTHNSKEKHAMFVFVLNKNGVPLMPCKPQKARVLLKRGDAKVVKRTPFTIKLIGGSSGYKQKLVAGMDTGSKTVGCAVVGLGKVVYQSQVALRQDVSKKMEQRAMYRRNRRGRKCRYRPARWANRASMRATGRLAPSLKSKLESHLRERNFVESIMPISEWKVETASFDIHKITNPEVKGKGYQNGAQKDFYNVKAFVLHRDGYKCKSGRKGKHSNKLHVHHIQFRTDGGTDTPTNLITLCETCHADLHAGKFELKAKKSRTKHATEIGIIKSRLKKEWQFTETFGYETKFKREQILGLPKEHFYDAVAICLEDGELAKQNDFIFFKRHVSKGDYQLTKGSRSEKRMPVGKLFGFKKHDFISTPQGNGFVKGKRSSGYFALETITGERVHASANVKKNAVRVSARTTTLIQKMERASNSSSR

SEQ ID NO: 4674 - protein, 471 aa, Caldicellulosiruptor sp.; identical to SEQ ID NO: 3375

SEQ ID NO: 4675 - protein, 289 aa, unidentified
  REGION 1..289: note = Human gut metagenome
KIQEHITIIKRICKILPISLVRVETAEFDTQRLKAMLAGKPLPVGTDYQLGEMYDEYNVRQYVLKRDHYTCQCCGAHNTAKKVVKLHVHHLESRKTGGNAPSNLITLCTTCHKNLHKGKVTLDGKERGKPLRDAAFMGIMRKTLMARLKEELPIPVQGTYGYITKMRREQNDIKKSHTNDARCISKHPLAEPCSVCYRTKAIRHHNRQTHKANFSKKGIRKRSQMPYLVEGFRLWDKVLYKGQECFVSGRRSSGSFALKKLDGTSISKGVTFKKLRLLEPATNYLIERM

SEQ ID NO: 4676 - protein, 424 aa, unidentified
  REGION 1..424: note = Human gut metagenome
MRVFVFNMRGRPLMPCSQRKARLLLRENKAMIYKYHPFTIQLTYTTGETKQDCHIGIDTGSKYIGAAVRSEDKVFWKGEIELRQDIRSNLDTKRIYRRSRRNRKTRYRKPRFLNRKRRDEWLPPSLQSRINHTFHWIDTLSSLVPNPILHIEVGKFDVAKMINPEIHGVDYQHGQTYGFFDERYFVFARDNYTCQCCGKSKNKILNTHHIIYRSNGGTNRVDNLITVCTDCHTLQNHRKGGIFYQWQEQHKKVKQYKEPPFMNTLRKRIFVAYPDAEITYGSETTPKRKAMKLDKTHYNDAIVISGINEIKENPEEWLLIKQFRKKKRSLHEATARKGRKKPNRNQTRNSKNTPYYKGFYLNDKVSVFGKSGYITGFTSNAAYIKDENNDYITLPNKTYKQVSINKMKLECHNNNWQYIIKNAV

SEQ ID NO: 4677 - protein, 423 aa, Microcoleus sp.; identical to SEQ ID NO: 2653

SEQ ID NO: 4678 - protein, 468 aa, Moorena sp.
LAVFVLDRSGKPLMPCSEKRARLLLARGRARVHRFMPFAIRLVDRELHSSVAQPLRIKLDPGSKATGLALVRDTEQDGASTGEIHRGAVVLNLFELVHRGRQISEALTARRAMRRRRRGTLRYRAPRFLNRTRPAGWLAPSLQHRVDTTLAWVKRLQHWAPITAASTELVRFDMQALDNPEVTGIEYQQGTLFGYELREYLLEKWTRKCCYCDVQNVPLNIEHLVPRARGGSNRVSNLAIACVPCNIRKAAQPFDVFVKDKARLARITAQVRRPLKDASAVNATRWALVNALRATGLPVETASGGRTKYNRSQLGIPKTHALDAVCVGEVSAVVAWRKPTLQVKCTGRGSYQRTRRDRYGFPRGYLMRSKRVHGFGTGDHVQAEVPSGRKAGTHRGRVAVRATGSFNIQTYGQVVQGVAHRYCRVLQRADGYGYSRMATHKGEAGVGAATQPGLSLPGPKAEVSRAEG

SEQ ID NO: 4679 - protein, 443 aa, Oligella sp.; identical to SEQ ID NO: 3678

SEQ ID NO: 4680 - protein, 325 aa, unidentified
  REGION 1..325: note = Human gut metagenome
RKTRYRAPRFDNRIRTKRKGWLAPSVENRINAHLSRIETVIRLLPVTKITVETTSFDMQLLKNSDIAGKKYQEGEQLGFWNVREYVLFRDGHVCQHCHGRSKDPVLNVHHLESRRTGGDSPGNLITLCETCHKALHRGEIKLSAKRGQSLRAEAFMGIMRWEVLNRLKLSHPELEVNNTYGYRTKHARIANGIAKSHCADAFCIAGNLGAKRLGEFFFQKQTRRNNRQIHKLSILKGGLRKRNQAPFEIKGFRLFDKVACKGEEGFIFGRRSSGYFDVRKLNGTHISAGISCKKLRLLEKRQTYLTEIRKEKALPPLPEGRGLRA

SEQ ID NO: 4681 - protein, 613 aa, Parasutterella sp.
  SITE 124: note = misc_feature - Xaa can be any naturally occurring amino acid
  REGION 398..449: note = misc_feature - Xaa can be any naturally occurring amino acid
  SITE 590: note = misc_feature - Xaa can be any naturally occurring amino acid
MPCSPAKARLLLKEKKAIVKRRTPFTIQLTIATGETKQPVSLGVDTGYKHVGLSASTEKAELYASEVELRQDITDLLSARRALRQSRRNRKTRYRAPRFDNRIRTKRKGWLAPSVENRINAHLXTPFTIQLTIATGETKQPVSLGVDAGYKHVGLSASTEKAELYASEVELRQDITDLLSARRALRQSRRNCKTRYRAPRFDNRIRTKRKGWLAPSVENRIDAHLSRIEAVLRLLPVTKITVETASFDMQLLKNPDISGKEYQEGEQLGFWNIREYVLCRDGHVCQHCYGRSKDPVLNVQHLKSRRMGGDSPGNLITLCETCHKALHRGEITLKAKRGQSFRAEAFMGIMRWEVQNRLKASHPELEVNNTYGYRTKHARIANDIAKSHCADAFCIAGXXXXXXXXXXXXXXXXXXXXXXXXXXXXXXXXXXXXXXXXXXXXXXXXXXXXWEVQNRLKASHPELEVNNTYGYRTKHARIANDIAKSHCADAFCIAGNLGAERLGEFFFQKQTRRNNRQSHKLSILKGGIRKRNQAPFEVNGFRLFDKVACKGEEGFIFGRRSSGFFDVRKLDGTRISAGISYKKLHLLEKXKRFFDCCRSQRSPWKRRLSTCSC

SEQ ID NO: 4682 - protein, 443 aa, Caldicellulosiruptor sp.; identical to SEQ ID NO: 2385

SEQ ID NO: 4683 - protein, 415 aa, unidentified
  REGION 1..415: note = Human gut metagenome
LMPCSPAKARLLLKEKKAIVKRRTPFTIQLTIATGESKQPVTLGVDAGYKHVGLSASTEKAELYASEVELRQDVSDLLSARRALRQSRRSRNTRYRAPRFDNRIRTKRKGWLAPTVENRINVHLSRIETVLRLLPVTKITVETASFDTQLLKNPDIAGKEYQEGEQLSFWNVREYVLFRDGHVCQHCHGRSKDPVLNVHHLESRRTGGDSPGNLITLCETCHKALHRGEIKLKAKRGRSFRAETFMGIMRWGVLNRLKASHPKLEVHNTYGYRTKHARIANGIAKSHCADAFCIAGNFGAKRLGEFFFQKQTRRNNRQIHKLSILKGGIRKRNQAPFEVKGFRLFDKVACQGEEGFIFGRRSTGYFDVRKLDGTCISAGISYKKLHLLEKRRTYLTEIRKEEALPPPPEGRGLRA

SEQ ID NO: 4684 - protein, 275 aa, unidentified
  REGION 1..275: note = Human gut metagenome
LTHQFKKGVPVMVYVLDKNGQPLMPTDRHRKVRLMLQSGQAKVIKRCPFTIQLNYDSGHQTQEISLGIDAGSKHIGVSATTKIKVLYEADVELRNDIVDLLSSRRELRRGRRNRKTRYRQAKFNNRRRGNGWLAPSIRQKIGTHLTVVENICKILPISRIMVETASFDIQKIKNPDIQGAEYQQGDQLEFWNVREYVLFRDGHICQCCKGKSKDKILNVHHIESRKTGGNAPNNLITLCETCHTGYHKGTVQLPKAIKRGMRFKDAAFMGIMRWA

SEQ ID NO: 4685 - protein, 457 aa, unidentified; identical to SEQ ID NO: 3236
  REGION 1..457: note = Human gut metagenome

SEQ ID NO: 4686 - protein, 504 aa, unidentified
  REGION 1..504: note = Human gut metagenome
MAWEAIQTRRIKHHDIGEGTLRRHAAGTVSFPVLCKNRKETLMSVLVIGRNGRALMPTNPRKARLLLKKKTASVVCRHPFTIQLLYKTGCATQEGCIGIDTGSQHIGVGITCGDRVILKDEHALRSSMEKRSLLATRTVMRRGRRYRKVRYRKPKWRHHTKRMYFEKANRRGQHWRKVKTTTQSPRLKGWLPPSLQSKCDHHFRIIDRYLKYLPDPITRNLVIEAGRFDMARMNDPTIHGEMYQRGPMYDAENLRAYIFARDNYQCACCKAKAGTTRKADGTTVKLVAHHILFRSRGATDNPKYIISVCDHCHTTKAHQPGGILYSWMENNKKVARGLRDATFMNILRKRLFARYPQAAFTYGNITAADRKQLRLPKSHANDAVAISLFGKEASTVKNICQTMHYKQIRKSKRSLHEAIPRKGRKNPNTKAVRNKKNTTQANGFKLWDSVLADGKKLFICSFTGTSAYLIDKNGCYISQPGKTYKQWPLSKLKRLHPNGNWLMA

SEQ ID NO: 4687 - protein, 429 aa, Ktedonobacter sp.; identical to SEQ ID NO: 3689

SEQ ID NO: 4688 - protein, 419 aa, unidentified
  REGION 1..419: note = Human gut metagenome
MVYVISQDSKPLMPCSNVIARLLLKQGKAKVKRREPFTIKLTCETTNYTQDLTLGVDTGSGTIGTAVSKNNGDIVYMAKVVVRNDITDKMAQRAKYRRNRRNRKTRYRKARWLNRANSIRNDRFSPTMQSKLHSHIKEIEYIKSILPVTEMVFETGQFDTHLMKNPSLINPKVKHWGYQKGTNYGFENTKAFVLNRDNYTCQYCKGKHKDSKLEVHHIVFRSQGGSDEESNLITLCHTCHKDLHSGKINTKLSGKIKGNLKYATQMNSIRKQLFRLYPNAIETFGYVTKANRLHLGVDKEHCYDACTIATQGNAFNVKSNLYKKKCVSDGDFQQTKGIRSEQPIVTDKICGFRKYDKVKYFGREYFIKGRMSTGYAILMNINGEKADFSYLPRGFKTPKLSNCKRITARTSQMVQAVAI

SEQ ID NO: 4689 - protein, 546 aa, Moorena sp.
MQKHIPTKAKAPTKAGGCARALKGSLSGCDQTQPAVPQGTDRATWGTTSKNTPADNLSSPPLCNPNATPAPGKGERIGKPVPKAGRRIPHLVEDNLTPKGASPMGATPRKGSFNRVLVLNQDRTPAMPCTPARARRLLSAGKAAVLRFQPFMVILKYNTQGKQPLQLKTDPGAKTAGLALTLQTKTGGKVIWAAELAHRTDIKHALLQRKAQRRGRRQRKTRYRAARFQNRTRPKGWLAPSVKNRVLRGTTWTQRLIRWTPITHLVIEPVKFDTQLMADAEISGIEYQPGTLQGYEVRQYLLEKWDRQCADCGRDNRPLTSDHIIPRSRNGSNRILNLTLACQPCNQDKGSRTAAEYGFPDLQPSTLGLQAAAITNTIRWQLVDALKTTKLPIEYGSGGRTKYNRTQQNYPKAHWIDAACAGPSGEAVQLNPHQQVLRISALPRNNRRMVRPDTFGFTKGQPKGPSNVKGFRTGDLVKAVVPTGTKRGSWYGRVAVRASGNFKVGQRDGIPVRYLAKLQHNDGYNYEPITSTFLPGLKARGASAIC

SEQ ID NO: 4690 - protein, 512 aa, unidentified
  REGION 1..512: note = Human gut metagenome
MSTVYVLNKDGKPLMPTTRCGHVRRLLKEQKAQVVTSKPFTIQLLYETDDVVQPLYLGIDPGRTNIGVAVVKIDGTAVFTAHLETRNKEIPKLMQGRKKARRARRTNGRRCRRQRRAKANGTISKKCVKQTTAQNGSVSKRAKKICVIKRHLPGCEKEVLCIGIKNKEAKFSNRTRPEGWLTPTANQLLQTHINLVKKIQKFLPISDVVLEINKFAFMRLDNPNVQKWQYQQGPLYQKASLEEAVSEMQEHHCLFCKNTIDHYHHVVPQHKNGSNTIGNIVGLCAKHHDLVHKDTSWQEKLAKKKTGLNKRYGALSVLNQIIPALTKELSSLFPKHFFATNGKSTYDYRAAHGVSKDHWLDAYCIAGSVLPNDACDNNINSHVPYELKQFRRHDRRALHKENMSRVYTLNGKSVATNRHKAIKQTTDSLEEFRQRQPNDVCKLKVKEHHPEYRNPKRSFPGCVFLVGKQTHVMQGTSGSHNGKADGYYDTNGNSYSSGKCKFVAKNEGIVFA

SEQ ID NO: 4691 - protein, 432 aa, unidentified
  REGION 1..432: note = Human oral metagenome
MSKVYVLDKNGQPLMPTTRSGWVYRALRDGKAKVVSKCPFTIKLLYESTGFTQPLTLGVDTGSKYVGSAVINDITSEIVYESQTELRDDIKSKMDRRRQFRRIRRNKLCYRPMRFNNRNASKRKERYSPTLISKFQGHKREIEFIKSILPISDVILEVGEFDLQLLQDPILAYHKWDYAKGELYQQENFKQATKARDGYQCQCCGKKNCRLEVHHLLPRSRGGSDKLANLITLCTDCHHLAHSSEEQLLAFQKKFGNRVKGTLNYATQMNVLRSMLQKEYPDAELTYGFITKEMRRVFGLEKSHTIDACCIASRGSEFYNENSNKYKKKCVPKGSYPRTGVKGGKFVVLPKGKISGLKRYDKVLYNGKEYFVVGRRTTGYIYLIDVDNNRVQTERTKRTTGEKYMSKAIIKVALVRKVASAKSCVCVRECED

SEQ ID NO: 4692 - protein, 515 aa, unidentified; identical to SEQ ID NO: 2918
  REGION 1..515: note = Human gut metagenome

SEQ ID NO: 4693 - protein, 397 aa, Moorena sp.
MTPKVFVIDNSGKPLLPTHPARARKLLRAGKAKVIRVVPFCIKLERIIENPVGSFTIGIDDGAKEVGIAVVNEVKKEVVFRGTIKLRQDVSRKIKQRAQLRRTRRCRKVRHRKARFSNRKQKTPQPSIRQRKESIVRVVCDLKKVLNITKAVIEQGQFDVSSFAASRKLVSTEFQQSEYEGKNFRAKVLWRDEYTCQRCGRKEKLNAHHILGKGKGGTNTPKNGITLCKKCHDELHQGKWNLDKKPKTFKYPMHLMQGKWYISQLLKKEGLSVKRCVGWMTAYWRKKIKIEKSHPNDSIAMVTKNYMPTIASMEYTILPKRAKVWEDNPTKKSEEKMGFRHYDLVKAKHRTKGWIVGSVRALKAKVMTLRTNFHSNFPVSYSKSTLLTRFSRIIYFY

SEQ ID NO: 4694 - protein, 406 aa, unidentified; identical to SEQ ID NO: 2874
  REGION 1..406: note = Human gut metagenome

SEQ ID NO: 4695 - protein, 435 aa, unidentified
  REGION 1..435: note = Human gut metagenome
MRMVYVLNQNGQPLMPTKNHAKVRVLLKTDRAKIISRCPFTIQLLYETGSYTQEITLGVDTGSKHIGLSATTEKDVMYEAEVELRNDIVKLLSTRREQRRSRRNRKTRYRKPRFDNRRRKDNWLAPSVQNKVDTHLTTVSKVTKMLPISKIIVEVASFDLQKLKADMEGIKRPEGVDYQNGEQSGFWNVREYVLSRDNHTCQCCKGKSKDKILNVHHIESRKTGGDAPNNLITLCEYCHSQYHKGNIKLPEKIKRGMSFKDAAFMGIMRWTFYNKLKEMYIPSGIEVKLTYGYITKNIRIKNQLPKEHCIDARCISGNPKAQSDGTVYKLKKVRCHNRQIHKCTINKGGARKLNQAPHTVFGFRLFDKVLYKNQECFIFGRRIDGRFAIRMLDGTKINEQLNYKKLKLVECAKHYITERRQVLCSAASYGVPAPD

SEQ ID NO: 4696 - protein, 382 aa, unidentified
  REGION 1..382: note = Human gut metagenome
LYQSTKEIQPVSLGVDAGSKHIGLAATTEQKVVYQEELIPRNDVVKLLSARRASRRSRRNRKTRYRKPRFNNRVHSKHKGWLAPSVEVKIQEHITAIKNVCKILPVSEIHVETAEFDLQRLKAMEEGKPLPVGTDYQLGEQYDFYNTRQYVLHRDGYTCQCCGTHDNDVKLHVHHIESRQTGGNAPHNLITLCEHCHKALHEGKIELPKGRKRGKSYRDAAFMGIMRNTLLKRLKKEADVPVTMTYGYITKYWREKVGLEKSHINDAICISKHPYAKPLNAYYLTKAVRRHNRRIHNVNFSKGGIRKRKRASHLVKGFRLFDKVLYQGKSYFIFGRRATGFFDIRTLDGVKVNKGSISYKKLKIQDTAKAYLKEVRIIPHIG

SEQ ID NO: 4697 - protein, 414 aa, unidentified
  REGION 1..414: note = Human gut metagenome
MPCSPAKARLLLKEKKAIVKRRTPFTIQLTIATGETKQPVSLGVDAGYKHVGLSASTEKAELYASEVELRQDITDLLSARRALRQSRRNRKTRYRAPRFDNRIRTKRKGWLAPSVENRINAHLSRIEAVLRLLPVTKITVETASFDMQLLKNPDISGKEYQEGEQLGFWNIREYVLCRDGHVCQHCYGRSKDPVLNVHHLESRRTGGDSPGNLVTLCETCHKALHRGEITLKAKRGQSFRAEAFMGIMRWEVQNRLKASHPELEVNNTYGYRTKHARIANDIAKSHCADAFCIAGNLGAERLGEFFFQKQTRRNNRQSHKLSILKGGIRKRNQAPFEVNGFRLFDKVACKGEEGFIFGRRSSGFFDVRKLDGTRISAGISYKKLHLLEKRRTYLTEIRKEEVLPPLPEGRGLRA

SEQ ID NO: 4698 - protein, 483 aa, unidentified
  REGION 1..483: note = Human gut metagenome
MKVYVIGLNGIGLAPTTPRKARLLLKNGRAKIAFRQPFTIQLTYKTGCTHPKEMVIGIDTGSQHIGAGIISKETEQVVSKEEYELRSSMEKRSLLETRKAYRRGRRYRKVRYRHPKFKPATRRVYVEKPITQNKHQTHWKKQTNTFDSARPEGWLPPSIQSKLDHHIRIISRYQNALPKDTQLRIEVGRFDVQHMENPQIRGNMYQKGAMYEYENKKAFIFSRDGYTCKCCKCKAGSKRKDGTTVKLVVHHVDFRSQGASDNPNRLVTVCDRCHTTAAHKPGGILYDWMLKEKKFTRGYRDTSIMNILRRRLWQAFPDAAFTYGNITAADRKILHIDKTHGNDAVAIAAHGMDRITDIPNTTYYRQMRKQKRSLHEATPRKGRKEPNRTAKRNAKNTCVVKGIYLNDKVKAFGQTGWVTGFSGTSSVYIKNREGEYITVPGKNHKMVPLAELSVRTHCNNWAVSDIKTISNRRQENCDAEMCM

SEQ ID NO: 4699 - protein, 414 aa, unidentified
  REGION 1..414: note = Ga0307928_10015881
MLAFVLNSEGHPLMPCKPQKARKLLKLNKARVVIKFPFTIKLKFGSSGYKQNLIAGMDTGSKVIGTAVVTEQGKAIYQAETTLRGEQIKKKMDTRRMYRRTRRGRKTRYRKPRFLNRAASTRIGRLPPSVRHKIESHLNEKKFIESILPISKWRVELASFDIHALSNPNVSKSAWWTYQKGDMYGYQNLKHYVLNRDKYVCQICKKKTKNNTKLHVHHIKFKSNGGTNTKNNLITLCELCHDTLHKKKNAQDISFKLKPKATNTKHATEVSVVSARLRKSNWAFEETFGFITKVDRMEQDLPKRHFIDAAIIASSGHPVTISKEIILRRKVSKGDYQQTKGVRSERRIPTGKLFGLRKFDLVKTAKGHIGFVKGKRSTGYFSIGDIHGKPIKETSIKKNCKRITARTTTLSCYE

SEQ ID NO: 4700 - protein, 346 aa, Arthrospira sp.; identical to SEQ ID NO: 2872

SEQ ID NO: 4701 - protein, 420 aa, unidentified
  REGION 1..420: note = Human gut metagenome
MQYVYVLNKHGEPLMPCSPGKARLLLKQQKAHVVKRTPFTIKLLYGSTGYKQPITLGVDAGSKHVGLSASTEKRELYSEEFTPRNDVVELLSTRRQNRRSRRNRKTRYRAPRFNNRVHSKHKGWLAPSVEVKIQEHITVIKRICRILPITLVRVETAEFDMQRLKAMLAGKPLPVGTDYQLGEMYDEYNVRQYVLKRDNYTCQCCGAHTTAKKTVKLHVHHLESRKVGGNAPSNLITLCTTCHNNLHKGKITLDGKKRGKTLRDAAFMGIMRNTLLTRLRNELNIPVQNTYGYITKLLREQNDIKKSHVNDARCISKHPLAKPCSVCYRTKAIRHHNRQIHKAKILKGGIRKANQAPYIVKGFRLWDKVLYNGQECFISGRRTSGYFALRKLDGTTITNSISFKKLRLLEPATNYLIERK

SEQ ID NO: 4702 - protein, 442 aa, unidentified
  REGION 1..442: note = Human gut metagenome
MSTTVFVLDKKHRPLMPCRPARARRLLRAGRARVVKRFPFVIRLVDRTVEQSEVQPVHIKLDPGSRETGAAVVRDDGKKRHHALAFFVIEHRGGAIRDALKARSAFRRRRRSQNLRCRSPRFLNRVKPKGWLPPSLRHRVETTLSFVRRMCRYLPVSGIATELVKFDSQKLQNPEVSGVEYQQGTLFKYEVREYLLEKFGRKCVYCGAEGVLLNIDHVVPRAKGGSNRVSNLVLACMSCNQKKGARSLEDFLKGKPKVLARVRRELKTLLRDAAAVNATRWVLFNELKATGLPVETGSGALTKLNRHAFGVEKEHWLDALCVGRLNGVVTRKGLNVLEIRCMGRGSRQRTRLTKYGFPRGYLMRQKCVHGFATGDMVEANVPKGKKAGLWRGRVAVRVSGSFNIQTPKGVIQGVGWKHCRLISHNDGYGYAWLGHAPHSSPA

SEQ ID NO: 4703 - protein, 386 aa, unidentified
  REGION 1..386: note = Human gut metagenome
LTIATGESKQPVSLGVDAGYKHVGLSASTEKAELYASEVELRQDITDLLSARRALRQSRRNRKTRYRAPRFDNRIRTKRKGWLAPSVENRINAHLSRIETVIRLLPVTKISVETTSFDMQLLKNSDIAGKEYQEGEQLGFWNVREYVLFRDGHVCQHCHGRSKDPVLNVHHLESRRTGGDSPGNLITLCETCHKALHRGEITLKAKRGQSFRAETFMGIMRWEVLDRLKASHPKLEVQNTYGYRTKHARISNGIAKSHCADAFCIAGNLGAERLGEFLFQKQTRRNNRQIHKLSIPKGGIRKRNQVPFEVKGFRLFDKVAYKGEEGFIFGRRSSGYFDVRKLDGTRISAGISYKKLHLLEKRQTYLTEIRKEEALPPLPEGRGLRA

SEQ ID NO: 4704 - protein, 413 aa, unidentified
  REGION 1..413: note = Human gut metagenome
MTSYAFVLDANGKQLAPTKEQKAWFFIRKKRASLVSKYPIVIQLMKEIPEKEICQDEIRCGIDDGGLHVGIALVQKCKTKNKVVFKGTMEQRNDVKHLMEVRRGYRRYHRYHKRYRQARFDNRKSSKREGRIAPSILQKRQATIRVIHWLNKWINITNYWLEDVSVDIRALTDGYQSYRWQYQKSNRLDENIRKAAILRDGGKCMECGKSNCRLEVHHIKPKRRNGSNTLDNLITLCESCHQKTEGQEELYMDRYFSLLKSSDNKNLNYAQHVMIGKMWLRKQLSGLGVLYLTSGGDTANKRIDWNIEKSHTNDAVCITDLQPDTCDIKEWAIKPMRRQSKAKTDHVLGIHHRDLVEYTFKNGETHRGYVTALYPDQKAINFQSQTKHCKKVNARKCKLLWNYSKIYWFENAS

SEQ ID NO: 4705 - protein, 455 aa, Moorena sp.
LSVFVLDRRGMPLMPCSEKRARLLLARGRARVHKVVPFVIRLTDRSTEDSEFQLLRLKLDPGSKTTGLALVLDKAGTSVGVLNLFELVHRGRQISEALMQRRRFRHRRRGANLRYRAPRFYNRARQRGWLAPSLRHRVETTMSWVRRVLRWAVVSAISMELVRFDMQALQSQNIAGVEYQQGALFGYEVREYLLEKWGRRCAYCDARDVPLQIEHVLAKARGGSNRVSNLTLGCGPCNLKKGERDVRGFVKDKARLARILAKAKTPLRDAAAVNATRWVLLNALRSTDLNVEIGSGGRTKWNRTRLGLPKTHALDAACVGTVHAIFGWQRPTLELKCSGRGSYQRTRLTGYGFPRGYLTRQKRIHGFQTGDRVRATVPTGKKAGTHVGRVAVRANGNFNIQTPQGVVQGIAHRHCTMMQRADGYAYAIVPLKRGKDQGPAQQQGAYRASCYPSPA

SEQ ID NO: 4706 - protein, 427 aa, Nostoc sp.
MSKVFLIDSEKRPLNPIHPAQARQLLRNKKAAIYRQFPFTLILRKSSAEVSVSSLRLKLDPGARVTGLALVNDATGEVVFAAELKHRGFAIRDALTSRRQLRRSRRARKTRYRKPRFLNRTRPQGWLAPSLQSRVENIKTWVDRLRRFAPITAISQELVRFDMQLMRDPNIQGKEYQQGTLQGFETREYLLEKWNRECAYCGVKDVPFQVEHIQPKSNGGSNSITNLTLSCGRCNIKKGTKDIKDFLKKDPARLEKILKQAKRPLADAAAVNTTRFALLEVLKGTGLSVETGSGGLTKFNRSQQNLEKSHWIDAAAVGVSTPILNIKGVKPLFITSNGHGSRQSCRTDKYGFPSRYVPRFKFVKGFQTGDIIKAIVTTGKKVGEYIGRVAVRSTGSFNISTKNGLIQGISHKYCLAIHKKDGYSYAF

SEQ ID NO: 4707 - protein, 442 aa, Sutterella sp.; identical to SEQ ID NO: 3234

SEQ ID NO: 4708 - protein, 427 aa, Scytonema sp.
LSKVLVIDSEKRQLNPIHPAQARQLLRNKKAAVYRRFPFTLILKESRSDSPVSPLRLKIEPGAKTTGLALVNDITGVVIFAAELKHRGFTIRDALTSRRQLRRSRRNRKTRYRKPRFLNRTRPQGWLAPSLQSRVDNIKIWVEKLRKFAPIEAISQELVRFDMQLMRNPDIQAKEYQQGTLAGYETREYLLEKWDRQCAYCGVKDVPLQIEHIHPRAKGGSNSITNLTLSCEKCNTKKGTKDIKEFLKKDPSRLEKIQSLAKRPLADAAAVNTTRFALLSVLKATGLPVETDSGGLTKFNRNQQNLKKSHWLDAACVGKSTPLLNIKGVKPLLITANGHGTRQSCRTDKFGFPNRHCSRTKFHFGFQTGDIVKAVVTSGKKVGEYVGRIATRATGSFNISTKNGLVQGISYKHCKHIHKKDGYSYAF

SEQ ID NO: 4709 - protein, 408 aa, unidentified
  REGION 1..408: note = Human gut metagenome
MVYVQDIDGKPMMPTTRHGKVRRLLKDSKAVVVNTCPFTIKLMYKTSDYKQEIVLGVDAGTKHVGLSATTKSKELYSSEVILRSDIVELLSTRRESRRTRRNRLRYRKPRFNNRIKSKRTGWVAPSVRHRIDAHIRVIDNICSILPISRIIVEVAQFDTQKIKNPNISGNEYQEGDQLGFWNVREYVLTRDGHKCQHCKGKSKDPILNVHHIESRKTGGDSPSNLITLCETCHKEYHKGKIDLRVKRGKSLRDAAVMGIMKWKLYEELRSRYDNVSMTFGYITKYNRIKYGIEKSHISDAFVISKNFNALRLGYHYKVRLVRRHNRQIHKQKVLKGGVKKPNQSSFEVFGFRLFDRVMFEGNCYFIFGRRKSGSFNIRDIDGGNQRDITYKKLKLLRCKRFMIQKETN

SEQ ID NO: 4710 - protein, 423 aa, Moorena sp.; identical to SEQ ID NO: 3576

SEQ ID NO: 4711 - protein, 451 aa, unidentified
  REGION 1..451: note = Human gut metagenome
VLSAWNPFQHWRRITTGRKTEETNLRVLVWNKRGKPLMPCSPAKARLLLKEKKAIVVRRTPFTIQLTIATGETKQPVSLGVDAGYEHVGLSASTEKAELYASEVELRQDITDLLSARRALRQSRRNRKTRYRAPRFDNRIRTKRKGWLAPSVENRINAHLSRIEAVLRLLPVTKITVETASFDLQLLKNPDISGKEYQEGEQLGFWNIREYVLCRDGHVCQHCYGRSKDPVLNVHHLESRRTGGDSPGNLITLCETCHKALHRGEITLKAKRGQSFRAEAFMGIMRWEVLNRLKASHPELEVNNTYGYRTKHARISNGIAKSHCADAFCIAGNLGAKRLGEFFFQKQTRRNNRQIHKLSILKHGLRKRNQAPFEIKGFRLFDKVACKGEEGFIFGRRSSGYFDVRKLDGTRISAGISYKKLHLLEKRQTYITEIRKEKALPPLPEGRGLRA

SEQ ID NO: 4712 - protein, 448 aa, unidentified
  REGION 1..448: note = Human gut metagenome
MSTGLRAVQAEPAGIRKGDALKVFVLNMRGRPLMPCSPARARHLLKAGKAVVRRRTPFTIQLRIATGETKQSVTLGVDAGAKHVGLSAATEKEEAFASEVELRQDITGLLAARLLLRRERRQRKTRYRAPRFLNRVRSKHKGWLAPSVENRIQAHMSCIDAVCRLLPVTRIVIETASFDVQKIRNLEVEGTGYQQGDQLGFWNVREYVLFRDGHVCQHCHGHAKDKILNVHHLESRQTGGDAPNNLITLCETCHKACHAGKIKLKVKRGQSFRAEAFMGIMRWTLLDRMRKAHSGLPVENTYGYLTKNTRITLGLPKTHCVDAYCIAGNLKAVRRGVCLHQRQVRKHNRQIHKCTVLSKTLKDGTKIGYRKLNQTPHLVKSFRLFDKVRCLGQTGFIFGRRSSGYFDVRRLDGVKISSCISYRKLTLLEKRSTYLTELRKEDGASSPV

SEQ ID NO: 4713 - protein, 431 aa, unidentified
  REGION 1..431: note = metagenome
MPNKVYVINKHGRPLMPCSPAKARHLLDAGKAKVKKRTPFTIQLVYGSSGYTQEVILGVDAGSKTIGMSASTTKEELLSAEVKPRNDVVDLLSTRREFRRARRNRKTRYRKPRFDNRVRSKHKGWLAPSVEVKIQEHITSIKRACRILPVSKVVIETAEFDLQLLKAIEEGKPVPQGEDYQKGEMYGHYNVRQYVLWRDNYTCQCCGAHATKKKEVRLHVHHLESRKVGGDAPDNQVTLCESCHEKLHKGLIAEKDFKKRKRRSTRDATFMGIMRKTLMQRLCSELPIPVIETRGYITKATREKLLVLPKSHTNDALAIAQGKQGFNVGYLPGIVQIDKICTIRPVRHHNRQLHKATILKGGIRKSNQTKKYVFGYRLFDKVQFNGQDCFIWGRRTTGIFTIKMINGKMIKDGISFKKLKLVEKSTNYLIV

SEQ ID NO: 4714 - protein, 456 aa, Halomonas sp.; identical to SEQ ID NO: 4333

SEQ ID NO: 4715 - protein, 428 aa, Moorena sp.; identical to SEQ ID NO: 4598

SEQ ID NO: 4716 - protein, 436 aa, unidentified
  REGION 1..436: note = Candidatus Thiomargarita nelsonii
MQKVFVLDAKKTPLMPCHPARARELLNKGRAAVYKRYPFTIILKDRVGGDVQAVELKFDPGSKTTGIALVGQFERGLEIVFGANLNHRGAKIKQDLESRRANRRARRNRQTRDPSYRRDPARFNNRRRTEGWLPPSLMSRVFNVETWAKRLQRLVPIISIAVETVRFDTQKMQNSEVSGVEYQQGVLAGYEVREYLLEKWGRQCAYCGAENVPLEIEHIKPKSKGGTNRVSNLTIACMRCNQKKSDRSIEDFLKRKPTALKKIKAQTKKSLKDTAVVNATRYAIGNTLKSFGLHVTFWSGGRTKFNRTQQKYPKDHWIDAACVGETGAKVYIPNTLKPLTITAVGHGSRQMCRVDQYGFPRTTAKKQKVVKGFQTGDIVKAVVTKGKKIGTYIGRVAVRASGSFNISTTNGTTQGISWKYCQRIQAVDGYNYSVHT

SEQ ID NO: 4717 - protein, 432 aa, Ktedonobacter sp.; identical to SEQ ID NO: 4450

SEQ ID NO: 4718 - protein, 462 aa, unidentified
  REGION 1..462: note = Human gut metagenome
VVQPLYLGIDPGRTNIGVAVVKANGTAVFTAHLETRNKEIPKLMQDRKKARRARRTNGRRCRRQRRAKANGTISKKCVKQTTAQNGSVSKRAKDIGVIKRRLPGCEKDVLCIGIKNKETKFTNRTRPEGWLTPTANQLLQTHINLVKKIQKFLPISDVVLEVNKFAFMRLNNPNIQKWQYQQGPLYKKESLESAVSEIQEHHCLFCKKPIDHYHHVVPQHKNGSNTIGNIVGLCAKHHDLVHKDSAWEKKLAKKSTGLYKKYGALGVLNQIIPTLTNELSSLFPKHSFVTNGKSTYDYRAAHGVSKDHWLDAYCIACSVLPSNVCDSNINNHMPYVLKQFRRHDRRVLNNENMNRVYTLNNKAVAINRHKAKDQKTVSLEEFRKEHPDDVCKLKVKEHHPTYRNMNRNFPGSVFLVGKQIHVMQGIASSKDGKATKYNDTSATAIAAGKCKFVAKNTGILFV

SEQ ID NO: 4719 - protein, 471 aa, Caldicellulosiruptor sp.; identical to SEQ ID NO: 3268

SEQ ID NO: 4720 - protein, 431 aa, unidentified; identical to SEQ ID NO: 3801
  REGION 1..431: note = Human gut metagenome

SEQ ID NO: 4721 - protein, 512 aa, unidentified
  REGION 1..512: note = Human gut metagenome
MPTVYVLNKDGKPLMPTTRCMHVRHLLKNGKARVVKSKPFTIQLLYETDDVVQPLYLGIDPGRTNIGVAVVKADGAAVFTAHLETRNKEVPKLMKKRKESRCARRTNGRRCRRQRRAKTNGTISKKCVKQTTAQNGSVSKRAKEIGVIKRHLPGCEKDVLCIGIKNKEAKFTNRARPEGWLTPTANQLLQTHINLVKKIQKFLPISDVVLEVNKFAFMQLDNPNIQKWQYQQGPLYQKGSLENAVSEMQEHHCLFCEKPIEHYHHVVPKSENGSNTIANIVGLCTEHHNLVHKDATWQKKLAKEKVGLVKKYGALSVLNQIIPALTKEMNSLFPKHFFATNGKSTYDYRTAHGVSKDHWLDAYCIACSVLPNDVCDSNINSHVPYELKQFRRHDRRVLHKANMSRVYTLNGKTVATNRHKAIKQTTDSLEEFRQSHPGDVCKLKVKEHHPAYRNLNRNYPGSVFLVDGQVHVMQGVSGSHNDKADGYYNTNGNAYPYYKCKFVVKNEGIVFA

SEQ ID NO: 4722 - protein, 439 aa, Moorena sp.
MKVCVVNHHGRPLMPTTPRKARLLLKAGKAQIIQRIPFTIQLLYGTRGHTQPITLGIDAGYATVGYSAVTEKEELAGGELKLLAGISERLSERAMYRSGRRHRTRHRQPRFDNRRRTEGWLAPSIQHKLDSHLRLIERLCAALPITHLLIEVASFDIQRLKDPDIAGVGYQQGEQAGFWNLREYILHRDGHTCQNPACTNRAKEKVLQVHHLGYWRGDGSDRPANLITLCTRCHTPENHLLGGFLWGWEPRLNAFRPETFMSTVRWRLVEAVGAKATYGYLTKSRRIELALPKSHATDAFVIAGGSTQIRAEPLLLEQVRRNRRALQTFYDAKYIDTRTDEVVKAQLLNNGRRTRNRNLNGENLRRYRGLKLSKGRVSIRRQRYPYQPGDLVRYEGQVYRVQGMGGYGRNLKLAGRPKEVKAALVTPVRWRKGICKQVS

SEQ ID NO: 4723 - protein, 338 aa, Moorena sp.
MSNFVLILDPNKQPLTPIHPAKARLLLNQEKAAVFRCYPFTIILKEVVKETPKPITLKIDPGSKVTGLALVQGNQVIWGAELTHRGQQIKDALTSRRQLRRTRRGRKTRYRQPRFLNRTRQKGWLAPSLQHRVETTLTWVKRLIKFAPIDSIAVELVKFDLQKQENPEINGLEYQHGTLFGWEVREYLLTKFNRTCQYCRGTNQPLEVDHIYPRSKGGSDRVSNLTISCHSCNQKKGNQDIKDFLSGKSDLVNRILKQAKSPLKDAAAVNSTRWKLFNSLKELGLTVITGSGGLTKFNRKRLNVPKTHWQDASCVGQTPDNFIFKTNQPLLIKATGHG

SEQ ID NO: 4724 - protein, 472 aa, unidentified
  REGION 1..472: note = Human gut metagenome
VVDNRLLSIKPLINIGEGVIYSSICTGLSLQTYQKRKEVPCMVYVLDINGQPLMPTTRHGKVRRLLNSHLAKVVKRCPFTIQLLYQSTKEIQPVSLGVDAGSKHIGMAATTEKKVVYQEELSPRNDVVKLLSARRTLRRTRRNRKTRYRKPRFNNRVHSKHKGWLAPSVEVKIQEHITAIKRICQILPISEIHVEISEFDLQRLKAMEEGRTLPVGTDYQLGEQYDFYNTRQYVLHRDGYTFQCCGTHDNNIKLHVHHIESRQTGGDAPSNLITLCEHCHKALHKGKLELPKGKKRGKTYRDATFMGIMRKTLLERLRKEVDVPASGTYGYITKYWRERAGLEKSHINDAICISKYPYAKPLDTYYLTKAVRNHNRQIHKSNFSKGGIRKRNQAPYLVKGFRLFDKVLYQGKEYFIFGRRATGYFDIRTLDGTKVNKGSISYKKLRIQDTAKAYLKEARAIPHMNKFTCVLA

SEQ ID NO: 4725 - protein, 320 aa, Parasutterella sp.
RAPRFDNRIRTKRKGWLAPSVENRINAHLSRIESVLRLLPVTKITVETASFDTQLLKNPDISGKEYQEGEQLGFWNIREYVLCRDGHVCQHCYGRSKDPVLNVHHLESRRTGGDSPGNLITLCETCHKALHRGEITLKAKRGQSFRAEAFVGIMRWEVHNRLRALHPGIEVSNTYGYRTKHARIANGIAKSHCADAFCIAGNLGAERLCEFFFQKQTRRNNRQIHKLSILKGGIRKRNQAPFEVKGFRLFDKVACQGEEGFIFGRRSSGFFDVRKLDGTRISAGISCKKLHLLEKRRTYLTEIRKEEALPPLPEGRGLRA

SEQ ID NO: 4726 - protein, 388 aa, Desulfotomaculum sp.
MAPAFAGHSKVFVVDAEGKPLLPCHPARARKLLKVGKVEVLRGSPFTIRLKYPVENPVGSLRAKVDDGSKWVGIALVNEHTGEVVFRGTLIQRGDVVRLLTLRREYRRNRRYRLVRHRECRNHNRKQLAPFPSIRQKKEAVCRVLTDLAKIAPISGVDVELVAAGVKNPALPGEGAREKVLNRDGACVLCGSEEKLQRHHLVPRSKGGSDTPMNQVVLCEKCHRKIHAGEVSLDREGWTFAWVAHAVLGKAYLLALLSRFGKVRMCEGWRTKEWREGLGLAKSHANDAACLFPPGGPLKIFGPEYLIYPLRRRKWEGNPTKTCEERSGFQHWDIVRAERAGRRVFGCVRSLKARAMTLRTAGDGNFEVSYSKAKLLHRPRGLAYVPVW

SEQ ID NO: 4727 - protein, 440 aa, Ktedonobacter sp.; identical to SEQ ID NO: 3667

SEQ ID NO: 4728 - protein, 544 aa, Blautia sp.; identical to SEQ ID NO: 4004

SEQ ID NO: 4729 - protein, 449 aa, unidentified
  REGION 1..449: note = Synthetic metagenome
VVDIPEGREASASVTRPVRAFIERKTMSVFVLDRRKQPLMPCSEKRSRLLLGRGRALVVRAYPFTIRLKDRAGGITQPVRIKIDPGSKTSGIAVVRESGQKQHVLVLMELAHRGRQISKSLEQRRAFRRRRRNQLRYRAPRFLNRLRSLVPVVSISQELVRFDTQKMENPEVSGVEYQQGTLLGYEVREYLLEKWGRECAYCTDKDTPLQIEHIDPKANGGSSRISNLTLACRPCNQEKGRQPLADFFASSKRLKNHQARLDRILKQCKKPLRDASAVNSARWTLYQTLKQTGLPVEVGTGGRTKFNRCRLRIPKTHALDAACVGEVEIVEGWDVPTLAIKATGRGSYKRTRLTKHGFPRGYLMRQKKVQGFQTGDRVRAIVPTGTKAGTWLGRVAVRKTGSFNIQTSGGAIQGVSYRHCTLTQRADGYGYHIQPNQPKEEGDRENESR

SEQ ID NO: 4730 - protein, 471 aa, Caldicellulosiruptor sp.; identical to SEQ ID NO: 3268

SEQ ID NO: 4731 - protein, 473 aa, Calothrix sp.; identical to SEQ ID NO: 3997

SEQ ID NO: 4732 - protein, 452 aa, unidentified
  REGION 1..452: note = Sediment metagenome
MSKQTLQREFKNVPTGTPLACSSTSTSLNRLETVSVVSKVLSCNNPEVGLRKQTSGPKAIVFVLSVTGSPLMPCTPAKARHLLEGGKSKVVNLNPFTIKLTFECENRVQEVSLGIDSGYKHIGFSAITKTKEVVSGEVSLDNKTSEKLTKRKMYRKHRRYRLRYKEPRFSNRKTPKGWLSPSIQRRFDTHINVIKRLKELIPVKSMIVEIGEFDIQKLMNPEISGKEYQQGDLYGYNNLKAFLFHREHGRCQLCGKKIVKGEKAHLHHIKHRSETGTNRPSNMALLHEDCHDKLHKKGLYKKLRASKQYKAETFMSIVADKFKEILNCDVTYGYKTATKRSVLGVEKSHVNDAFVISGGTSQKRCLPYKIWQKRINNRVLQTNRKGFAPSIRKKRHKLQNRDFIWIGARKCLCGGVTSRGAQIYYSDGIENKIVYYKKVIKLYSTGSMTWIN

SEQ ID NO: 4733 - protein, 427 aa, Parasutterella sp.
LRVFVRNKRGKPLMPCSPAKARLLLKEKKAIVVRRTPFTIQLTIATGETKQPVSLGVDAGYKHVGLSASTENAELYASEVELRQDVSDLLSARRTLRQSRRNRNTRYRAPRFDNRIRTKRKGWLAPSVENRINAHLSRIETVIRLLPVTKITVETTSFDMQLLKNSDIAGKKYQEGEQLGFWNVREYVLFRDGHVCQHCHGRSKDPVLNVHHLESRRTGGDSPGNLITLCETCHKALHRGEITLKAKRGQSFRAETFMGIMRWEVLDRLKASHSKLEVQNTYGYRTKHARISNGIAKSHCADAFCIAGNLGAERLGEFFFQKQTRRNNRQIHKLSILKGGIRKRNQAPYEIKGFRLFDKVACQGEEGFIFGRRSSGYFDVRKLNGTHISAGISCKKLRLLEKRQTYLTEIRKEKALPPLPEGRGLRA

SEQ ID NO: 4734 - protein, 432 aa, Ktedonobacter sp.
MNVVYVLSSERTPLMPCQPAIARLLLKQGKAKVRHRTPFTIQLLAQPEHVYTQLLTHGVDTGSSIIGSAVANEHGHVVYLSEVEIRNDIANTMKERARARRNRRQRKTRYRPARWLNRKKSIKTGRFSPTMRSKIDTHLREIRFIRSLLPITSTILETGSFDPHALRNPEVLQKKWLYQRGINYGFANTKAYVLTRDGYLCQQCKGKSKDRRLEVHHIIFRSRNGSDEEANLLTLCKTCHDGLHAGTITLKLTGKKKGTLQHATQMNSIRTQLLKRVEAEETWGFVTKEHRLLVGLPKEHIFDAAVIATRGVKPTFYTTSVLSKRCVSDGDYKQTKGKHGQQRVNTGKIMGFRKFDKVYYLGKEYFIKGRMSTGYAILMDIDGNKIEFKPLPKFDKMKRVSARSSWMMKQRTTPNSSFSITSSLSASAGKNV

SEQ ID NO: 4735 - protein, 480 aa, unidentified
  REGION 1..480: note = Human gut metagenome
MKGENMVIALDRNKRLLGFMGERRCRILLERKRAVLYRYFPTIVILKDVDARKLSGLSSYRIKIDPGAKYTGIAIVRDDTNEFMYAMQIEHRGEQIKKNLDTRRNARGDRRSRETGYRRPKWGNQCTAKEQRQSYDSRRDENWLPPSVKSTADNIISWVRRLSRWINITNCSFESVRFDTQLMENPEIEGVEYQQGTLYGYEVKEYLLEKYGHTCQYCGGKSSDPILEWEHMIPRSRGGSDRLKNATLACHNCNQDKGNHTLEEWQTILQDRLPKERGKQKELDQMRQKYVQQVMEGKAPLKGLRYAAWVNSSRRYSQRHLYLRFPELECSSGGRTKYNRNALGYPKEHHYDALCVGKIPEDGFVDWTHGYYLYAKATGRGTRLRGQLNGCGVIISKWKNRSKTAFGFQTGDLVVANVPKDTKYKYKGRFVGRVMIRKSGSFDIRTLSGELVTVNAKFCRLLQNNSGYQMMIKRAIPLGD

SEQ ID NO: 4736 - protein, 451 aa, unidentified; identical to SEQ ID NO: 3061
  REGION 1..451: note = Human gut metagenome

SEQ ID NO: 4737 - protein, 415 aa, unidentified
  REGION 1..415: note = Human gut metagenome
MVYVVANDGQPLMPTERHGKVCRMLKSGIAKVVKKCPFTIQLQYESERNVQPVSLGVDAGSKHIGISATTKTKVLYESDVELRDDIVKLLATRRQLRRRRRSRKTRYRPARFDNRRRKEGWLAPSIRQKIESHLTVVANVCKILPVSQIIVETASFDIQKIKNPDIQGIEYQQGEQMDFWNVREYVFFRDGHTCQCCKGRSKDKILNVHHIESRKTGGNAPNNLITLCETCHKGYHNGTVTLPKNIKRGMKFKDAAFMGIMRWTFYNTLKEQYEPDIPVHYTYGYITKNTRINHNLPKGHCIDARCISGNPDAVSDGTYYYQKKVRCHNRQIHIQTILKGGIRKSNQAEYLVRGFRLFDKVRYQGREYFIFGRRKSGFFDIRTLSGEKVNKGSISVKKLTFADTRKNYLIERRTV

SEQ ID NO: 4738 - protein, 432 aa, unidentified
  REGION 1..432: note = Human gut metagenome
MLTGLLAEQVDPAGIRKGDTLKVFVLNMRGKPLMPCSPAKARHMLKAGKAVVARRTPFTIKLTIATGETKQDVTLGVDAGAKHVGISATTEKEEVFASEVELRQDITGLLADRLAFRRSRRNRKTRYRAPRFNNRVRSKHKGWLAPSVENRIQAHISRIEAICRVLPITKIVIETASFDIQKIKNPEVEGTDYQQGDQLGFWNVREYVLFRDGHVCQHCRGRSKDPILNVHHLESRKTGGDAPNNLITLCETCHKAYHAGKIKLKTRRGTSFRAEAFMGIMRRTLLDRVRKAHPELSVENTYGYLTKHKRIALGLPKTHCADAFCIAGNLNALRRGDFLYQRQTRKHNRQIHKCSILKGGVRKLHQAPFLVKGFRLFDKVKCTGRIGIIFGRRSTGSFDVRTLDGTRLSAGISSKKLTLLEKRTTFLTQLRK

SEQ ID NO: 4739 - protein, 423 aa, unidentified; identical to SEQ ID NO: 3951
  REGION 1..423: note = Human gut metagenome

SEQ ID NO: 4740 - protein, 462 aa, Moorena sp.; identical to SEQ ID NO: 4659

SEQ ID NO: 4741 - protein, 445 aa, Burkholderia sp.; identical to SEQ ID NO: 4102

SEQ ID NO: 4742 - protein, 443 aa, Caldicellulosiruptor sp.; identical to SEQ ID NO: 2385

SEQ ID NO: 4743 - protein, 414 aa, unidentified
  REGION 1..414: note = Human gut metagenome
MPCSPAKARLLLKEKKAIVVRRTPFTIQLTIATGETKQPVSLGVDAGYKHVGLSASTEKAELYASEVELRQDITDLLSARRALRQSRRNRKTRYRAPRFDNRIRTKRKGWLAPSVENRINAHLSRIETVIRLLPVTKISVETTSFDMQLLKNSDIAGKEYQESEQLGFWNVREYVLFRDGHVCQHCHGRSKDPVLNVHHLESRRTGGDSPGNLITLCETCHKELHRGEITLKAKRGQSFRAETFMGIMRWEVLDRLKASHPKLEVQNTYGYRTKHARIVNGIAKSHCADAFCIAGNLGAERLGEFFFQKQTRRNNRQIHKLSILKGGIRKRNQAPFEVKGFRLFDKVACQGEEGFIFGRRSSGYFDVRKLNGTHISAGISCKKLRLLEKRQTYLTEIRKEKALPPLPEGRGLRA

SEQ ID NO: 4744 - protein, 476 aa, unidentified
  REGION 1..476: note = Human gut metagenome
LAAAGTEGVSHPGLPGKYKNKGGQLMSVAVISKTGERLMPTSEYRARKLLKSGKAIKHSYRPFTIQLTERKTGDVQPIELCMDTGYIHIGISVKSEKHEYLAEQIDTLTDERARHDACRMYRTQRRGRKRYRQPRFNNRKRDKGWIAPSLEHKKDIHIQAISRICKVMPVTDITLEMGNFDTQVLKAREEGKPLPQGADYQHGERYGIATLREAVFARDGYTCQCCGRTIKNDAILHVHHIVYRSQGGTNRMSNLITVCDKCHTPANHKKGGKLYNWKPKIASFKGAAYMTAIRWKLYNEVKTLFPDIDIHITYGAETKERRRAFDINKSHVNDAFVMGQFHPKHRSKPICYKKKRRNNRCLEKFYDAKYIDSRNGKKRSGQELFNGRISRNHKKDSENLHQYRLQKVTPGRRAIRKQHYPIQPHDIIVYNGNKIEVSGCQHKGTRVVFSKTKKSVQISKIKLFKYAGGYSKSVFN

SEQ ID NO: 4745 - protein, 410 aa, Geobacillus sp.; identical to SEQ ID NO: 4122

SEQ ID NO: 4746 - protein, 430 aa, Ktedonobacter sp.
MMSNVFVIDTDYTPLDPVHPGYARRLLKQGKAAVYRRYPFTIVLKRAVEEPQVQPLRLKLDPGSRTTGIAVVDDANGKIVFAAELAHRGHAIKDSLDDRRVVRRNRRNRKTRYRKPRWQNRRRKKGWLPPSLESRIANILTWVARLCRLAPMTALSMELVKFDLQQMENPNITSVEYQQGTLQGYEVREYLLEKWERTCAYCGKQKVPLQVEHIHPRAKSGTNRISNLTLACEPCNTAKGTQHIRVFLAKKPDVLKRILAQVKRPLKDASAVNTTRRTLLERLKVLGLPVECGSGGLTKYNRSTRGLPKTHWLDAACVGKSTPVGLTHTGIVPLQIKAMGHGSRQICVVDKYGFPKQHKQRKKTFLGYQTGDMVKALTPKGTFEGRIAIRHRPQFRLGEREIHPKYLRCVHRDDGYEYIQKGVRHAPPHD

SEQ ID NO: 4747 - protein, 444 aa, Moorena sp.
MAVLVLNKQGKPLMPCSEKRARLLLERGRAVVHRQMPFTIRLKHRIDGAVQPLRLKLDPGSRITGLALVREVETVDVETGEVRREAHPLLLAELQQRGASIRDALTQRAAFRRRRRSQLRYRAARFLNRTRPKGWLAPSLRHRVATAQAWVTRLRRLAPVTALSMESVRFDMQQLLNPEISGVEYQQGALLGYEVREYLLEKWGRQCAYCGTGNVPLQVEHIQPKAKGGSNRVSNLTLACRQCNEKKGKRDVRDFLAHAPQRLARILVQATAPLRDAAAVNSTRRALYRVLAATGLPVEASSGGRTKYNRHLHHIPKTHCLDALCVGQVDAVGRWQRPVLAIKACGRGSYQRTLLDKYGFPRGYLTRQKRHFGFQTGDRVRAIVPSGKNVGTHVGRVAVRSRGSFNIQTPAGVVQDISHRHCSLIQRADGYGYCHQPAVRERNA

SEQ ID NO: 4748 - protein, 423 aa, Moorena sp.; identical to SEQ ID NO: 3576

SEQ ID NO: 4749 - protein, 416 aa, unidentified
  REGION 1..416: note = Human gut metagenome
MVYVLDKNGQPLMPTDRHRKVRLMLQSGQAKVIKRCPFTIQLNYDSGHQTQEISLGIDAGSKHIGVSATTKIKVLYEADVELRNDIVDLLSSRRELRRGRRNRKTRYRQAKFNNRRRGNGWLAPSIRQKIGTHLTVVENICKILPISRIMVETASFDIQKIKNPDIQGAEYQQGDQLEFWNVREYVLFRDGHTCQCCKGKSKDKILNVHHIESRKTGGNAPNNLITLCETCHTGYHKGTVQLPKAIKRGMRFKDAAFMGIMRWAFYEALKQQYEPVGTPVHNTYGYITKHTRIEHNLPKEHYVDARCISGNPDAFPNGEYYYQKKVRCHNRQMHKLTILKGGIRKQNQATYLVKGYRLFDKVSYQGKGYFVFGRRQSGFFDIRTLSGEKVNKGSLSCKKLKFIATRTYYLTERRAV

SEQ ID NO: 4750 - protein, 518 aa, unidentified; identical to SEQ ID NO: 3878
  REGION 1..518: note = Human gut metagenome

SEQ ID NO: 4751 - protein, 493 aa, unidentified; identical to SEQ ID NO: 2644
  REGION 1..493: note = Human gut metagenome

SEQ ID NO: 4752 - protein, 413 aa, unidentified
  REGION 1..413: note = Human gut metagenome
MTSYSFVLDANGKQLAPTKEPKAWFLIRKKRAALVSKYPMVIQLKKKNQENEICKDEIRCGIDDGGLHVGIALVQKCKSKNKVVFKGTIEQRNDVKHLMEVRRNYRRYHRYHKRYRQARFDNRKSSKRKGRIAPSILQKRQATIRVINRLNKWINITNYWLEDVSIDIRVLTDGYKSYSWQYQKSNRLDENIRKATILRDGGKCMECGKSNCRLEVHHIKPRRRNGSNTLDNLITLCESCHQKTEGQEELYMDRYFSLLKSSDNKNLNYAQHVMIGKMWLRKQLSGLGVLYLTSGGDTANKRIDWNIEKSHTNDAVCITDLQPDTCDIKEWAIKPMRRQSKAKTDHVLGIHHRDLVEYTFKNGETHRGYVTALYPDQKAINFQSQTKHCKKVNARKCKLLWNYSKIYWFENAS

SEQ ID NO: 4753 - protein, 417 aa, unidentified
  REGION 1..417: note = Human gut metagenome
MPCSPAKARLLLKEKKAIVKRRTPFTIQLTIATGEAKQPVALGVDSGYKHIGLSATTEKAELYASEVELRQDITDLLSARLALRCSRRSRKTRYRAPRFDNRVASKREGWLAPSVENRIAAHMSRVEAVMRVLPVTAITVETAAFDTQLLKNPDIAEAAYQQGEQLGFWNVREYVLFRDGHVCQHCRGKYKDPILNVHHIESRRTGGDAPNNLITLCETCHKAFHRGEIKLKVRRGKSFKAETFMGIMRWTLFERLKKAHPELRVRNTYGYLTKHKRISHGIAKSHCADAYCIADNLGAKRLEGFFFQKQTRKHNRQIHKLSILKGGLRKKNQAPYEVKGFRLFDKVICKGEEAFIFGRRTSGSFDVRRLDGTRISAGISCKKLRLLEPRTTYLTEFRKEAALPPLHECSGSRAEFR

SEQ ID NO: 4754 - protein, 412 aa, unidentified
  REGION 1..412: note = Human gut metagenome
MADRQKSRQASRRGERKARQRLAKRYGSMVKSGMVMRKLPMYAADKFVICKFIRNTQARFCNRKRCPDWITPTVQHLVQTHLNIIRKISRYLPVTDIAFEVNRFAFMHMENPEAMGVDFQNGPLKGYGDVKEAIRTQQHGKCLMCKKPITHFHHIVPRSRGGSDTIQNLAGLCTECHTKVHTDTAFRKDFDEKKSGQLKKYGALSALNQAVPFICKKLLEEYGEEHVHFCRGLDTSLIRTAFGFEKTKKNQMHEVDAYCIGLAALEVNEVETPAFDHTFQIRQFRRQDRSIIHHQTGRSYYQGKEKVAQNRKPGFEQKTTALSQWYKEQIRIHGEKEAEKLRSQLRVEKSCRHYNDMDRFLPGAVFLYEGKRYVLSGRITNGKYLRACGQGMKNFPAAECTFIRHNAGLVFI

SEQ ID NO: 4755 - protein, 412 aa, Eubacterium sp.
MVYVLNKNGHPLMPTENHAKVRVLLSKGMARVINRCPFTIQLAYGSTNHTQKITLGIDSGSRHIGISATTKDKALFEADVELRNDIVDLLSARREQRRSRRNRKTRYRKARFDNRRRGDGWLAPSVRQKADSHLTMTAKVHKILPISDIVIETASFDIQKIKNPDISGTDYQNGEQTDFWNVREYVMFRDGHVCQCCKGKSKDRILNVHHIESRRTGGDAPNNLITLCETCHKGYHKGTVTLPQKIHRGMSFRDAAFMGIMRWAVYEKLKDLYPNVRLTYGYITKTTRIEHGLPKAHHVDARCISGNTDAVGDGTVYFYKKVRCHNRQIHKCTVMKGGIRKRNQAPYEVKGFRLYDKVSWRNQECFIFGRRSTGRMDLRLLDGTHINASVGYKNLRLLKMRTNYLVESRHTG

SEQ ID NO: 4756 - protein, 363 aa, Pseudoalteromonas sp.
MLAYVLNKHGKPLMPCKAAKARKLLKAGEAKVVKRTPFTIKLLHGSSGHTQHVVAGMDTGSKHVGCAAIANGKVIYQSEVALRTDVSKLPISHWKVETASFDIHKITNPIVTSAGYQQGALLGYYNVKAYVLQRDNYKCQSGRKTKHSAKLHVHHKVFRSQGGTDAPSNLITLCETCHNDLHAGKFELKMKRSKTKHATEIGILKAQLKQCWDFEETFGYVTKFKREQVLGLPKTHYYDAVSICCGDSELVQQGKHVLRKRHVASGDYQQTKGIRSEKRIPVGKLFGLKKHDFVQTPQGTGFVKGKRSSGYFALETILGDKVHASANIKKNTVRISARTTTLTQLMEAAIPLGTKVPSILAVN

SEQ ID NO: 4757 - protein, 421 aa, unidentified
  REGION 1..421: note = Human gut metagenome
MQYVYVLNMHGEPLMPCSPQKARLLLKEGKARVVKRTPFVIKLLHGSTGYKQPVVLGVDAGSRHIGLSACTESRELYKEELAPRNDVVELLSARRQYRLSRRNRKTRYRAPRFDNRVHSKHKGWLAPSVEVKIQEHITAIKRLCRILPIVLARVETAEFDTQRLKAMIEGRPLPVGIDYQRGEIYNEYNVRQYVLKRDRYVCQHCGAHPTPGKPVRLHVHHLESRHTGGNAPNNLIVMCEHCHKALHEGKITLDKGKKRGKSLRDAAFMGIMRNTLLARLETELSVPVQQTYGYITKLLREENHIEKSHTDDARCIAGFPKAVPCDTLYRTRAIRHHNRQIHKAKILKGGIHKKSQAPYMVKGFRLWDKVRYNGEECFITGRRSSGYFVLKKYDGTVISNSASYKKLTLLEAATNYITERS

SEQ ID NO: 4758 - protein, 428 aa, unidentified
  REGION 1..428: note = Ga0315277_10001137
MVVFVINKHGEALMPCSTRKARLLLKEEKAKIVDYKPFTIQLLYGSSGYKQETRLGIDVGSKHVGVAITSGNNVLAKGQIDLRQDISKLLETRKILRRSRRNRTTRYRQARFLNRTASKKEGWLPPSIQSRIDNTVMWINKFYNLLPKCKLSIEAAKFDIQKIENPSIEGKDYQQGTMYEYRNRIAYLIAREKGKCQYCDKEYQKNNGWRLHHIFGKEKDRPSDWALLHEKCHDEIHVKHEEDILRKQKSKSYKDSTFMNIIRRRLLTIFPNADFTYGNITFQNRCDLNLDKSHVNDAIAITGIKQIKENPDSIFFINQFRKKKRSLHEATARKRKKGNTLSVRNSKNTKSLNGFTLNDQVNVYKKIGFISGFTTNACYIKDIFGKYITLPEKSYKQVSFSNIKKVSYNNNWQFIPHLKEGDFLPEIG

SEQ ID NO: 4759 - protein, 462 aa, Moorena sp.
MSAFVLDRSGRPLMPCSEKRARLLLARGRARVHRVMPFVIRLADRMADSSALQQLRIRFDPGSKVTGVALVREAGSGIAVINLFELIHRGRQISEALSARKSFRRRRRGANLRYRSPRFLNRRRPEGWLPPSLRHRVDTTMAWVQRIRRWAPITALSSELVRFDLQQLENPEISGVGYQRGTLAGYAIREYLLEKWKRTCIYCDAKGRPLQIEHLTSRARCGSNRVGNLGLACSDCNQEKGALDVRAYVKDPKRLARILATASQPLRDAAAVNATRWALIDALRATGLPLELASGGRTKFNRISHGLPKTHALDAVCVGQVEAIAGWERPSLSVEASGRGSYQRTRLTRHGFPRGYLMRHKRVQGFQTGDRVRADVPNGKKAGIHVGRVAVRATGSFNIQTASAVVQGISHRHCRLIQRGDGYAYSLQSVDSYRQGDAGVWRAAHAALSLPGLEPGVSRAFG

SEQ ID NO: 4760 - protein, 396 aa, unidentified
  REGION 1..396: note = Human gut metagenome
VVRRTPFTIQLTIATGESKQPVSLGVDAGYKHVGLSASTEKAELYASEVELRQDITDLLSARRALRQSRRNRKTRYRAPRFDNRIRTKRKGWLAPSVENRINAHLSRIEAVLRLLPITKITVETASFDMQRLKNPDISGKEYQEGEQLGFWNVREYVLFRDGHVCRHCHGKSKDPVLNVHHLESRRTGSDSPDNLITLCETCHKALHRGEITLKTKRGHSFRAEAFMGIMRREVLNRLKASYPELKVHETYGYLTKHARIANGIVKSHGADAFCIAGNLGAERLGEFFFQKQTRRNNRQIHKLSILKGGIRKRNQAPFEAKGFRLFDKVACQGEEGFIFGRRSSGYFDVRKLDGTRISAGISYKKLHLLEKRRTYLTEIRKEEALPPLPEGRGLRA

SEQ ID NO: 4761 - protein, 392 aa, unidentified
  REGION 1..392: note = Marine metagenome
MAVFVLDKKKQPLMPCSEKRARLLLARGRAVVHKRYPFTIRLKNRVGGEAQPLRLGIDPGSKTTGLALMHEPDSQQRHVLCLFELIHRGFQIKKALQQRAAFRRRRRSANLRYRAPRFNNRIKPKGWLAPSLQHRVDTVMAWVNRLSKSAPITGISQELVRFDTQKLESPEISGVEYQQGTLLGYEVREYLLEKWGRECAYCGTADTPLEIEHVVPRSRGGSNRVSNLTLSCHPCNQSKDALSLVDFFATDKGLKKRLKANGHTANARLERVQRQLKQPLRDASAVNATRWALFSALNATGLPVTVASGGRTKYNRQRLNIPKSHALDAACVGAFEKLHDWTVPTLTIKAMGRGSYQRTRLTKYGFPRGFLMRQKQVHGFQTGHGACDSTHR

SEQ ID NO: 4762 - protein, 447 aa, unidentified
  REGION 1..447: note = Human gut metagenome
MYWLTVLNISKKEVSCMVYVLDIDGQPLMPTTRHGKVRRLLNSHLAKVVKRCSFTIQLLYQSTKETQPVSLGVDAGSKHIGLAATTDKKVVYQEELVSRNDVVKLISARRILRRSRRNRKTRYRKARFNNRVHSKHKGWLAPSVEVKIQEHITTIKRICQILPISEIQVETAEFDLQRLKAMKEGKPLPVGTDYQLGEQYDFYNTRQYVLHRDGYTCQCCGTHDNNIKLHVHHIESRQTGGDAPNNLIILCEHCHKALHEGKLELPKGKKRGKSYRDATFMGVMRKTLLERLKKEIDVPVEGTYGYITKCWREKTGLEKSHINDAICISKHPYAKPLDTYYLTKAVRHHNRQIHKSNFSKGGIRKRNQAPYLVKGFRLFDKVLYQGKEYFIFGRRATGYFDIRTLDGTKVNKGSIKYKKLRIQDTAKAYLKEARAIPHVNKFTCVLA

SEQ ID NO: 4763 - protein, 424 aa, unidentified
  REGION 1..424: note = Freshwater metagenome
MSNFSLVVDTNRQPLDPIHPAKARILLSSGKAAILRRFPFTIILKEAVNLPTQAIELKLDPGSKTTGIALVSNQKVFWAGELTHRGQAIKDALLSRHHLRRSRRNRKTRYRAPRFLNRARPDGWLTPSLQHRVDTTLTWVKRLIKFAPITTITQELVKFDFQKLENPEISGVEYQQGELQGYEVREFLLEKWERQCTYCGIKNVPLQIEHIIAKSRGGSNKISNLCLACEPCNLKKGTQPVEQFLSDKPELLKQILVQAKRSLKDAAAVNSTRWKLFNSLKELGLSVTTGSGGLTKFNRRRLNLPKTHWIDAACVGKIKGLKLLTNQPLVIKANGHGTRQMCRTDKFGFPIRYVPRWKFVNGFQTGDIVKAVVTKGKKVGTYFGRIAVRSSGSFNLSTKTGLVQGISHKYCTTIHRKDGFNYSF

SEQ ID NO: 4764 - protein, 415 aa, Homo sapiens
MIYVKSKDGKAIMPSERGGRIGYLLRHGKAHVVSRVLFVVQLDYDSTTYTQNVSLGIDAGSKHIGVSASSEKKELFAAQVELRSDIVKLLSTRRELRRNRRNRKTRYRKARFDNRKKKDGWLAPSVEQKVDSHLKVIRLVHKLLPITKTTIEVAQFDAQKIKNPDINGEDYQQGEQMGFWNVREYVLARDGHKCVHCKGKSKDPILNVHHLESRKTGGNSPSNLVTLCETCHKAYHRGEFDLKIKRGNSLRDAAVMNIMRWAIYERANAEFKNVHLTYGYITKHTRIENGVTKTHAADAFCIAKNVNAMRLSSFFMCRCVPRHTRALHVANPKKGGIRRSSIASHKIGKSRFQRYDMVRWMGNECFIFGSTHGRPVLRDIEGVKMHDKQAVNIKTIKFLRRLRNNILMEEKTSEI

SEQ ID NO: 4765 - protein, 469 aa, Moorena sp.
MRRKTRVTGPVRGFLEMSVVFVLDKRKRPLMPCTEKRARLILERGRAVVHKVYPFTIRLRDRIGGGMQPVLAKINPGSKTTGVALVREAQTQTERGVEQTHHVLVKAELSHRGRQISEKLTARAGYRRRRRNANLRHRQARFDNRTKPKGWLAPSLQHRVNTTMAWVARFQKLAPVSGVVTMLHRFDTQALQNPEIDGVEYQQGTLYGYEVREYLLEKWQRRCAYCSAQNVPLQIDHIHPKSKSGSNRISNLTLACSACNQAKGAMPVAEFLAKKPERLKRIQAQAKAPLKDAGAVNATRWALFNALKATGLPVSVTTGGRTKYNRTRTGAPKTHALDAACSGAVSHIKRWQAPTLAIKCTGRGSYQRTRVNASGFPRGYLMRQKSVKGFQTGDIVRADVPTGKKVGVYKGRVAVRKSGSFNIQIPSGGAVQGVSHRHCTLIQRSDGYGYSIQPTLIAQPQKEEARLAA

SEQ ID NO: 4766 - protein, 279 aa, unidentified
  REGION 1..279: note = Human gut metagenome
VVVETAEFDLQLLKAIADGKPVPQGEDYQKGEMYGHYNVRQYVLWRDNYTCQCCGTHPSKKKEVRLHVHHLESRKVGGDAPDNQVTLCESCHEKLHKGLIAEKDFKKRKRKSTRDATFMGIMRKTLMQRLCSELPIPVVKTRGYITKATREKLLVLPKSHTNDALAIAQGKQGFNVGYLPGIVQIDKICTIRPVRHHNRQLHKATILKGGIRKSNQTEKYVFGYCLFDKVQFNGQDCFIWGRRTTGIFTIKTINGKMIKDGISFKKLKLVEKSTSYLIA

SEQ ID NO: 4767 - protein, 470 aa, unidentified; identical to SEQ ID NO: 2825
  REGION 1..470: note = Human gut metagenome

SEQ ID NO: 4768 - protein, 471 aa, Caldicellulosiruptor sp.; identical to SEQ ID NO: 3268

SEQ ID NO: 4769 - protein, 443 aa, Anoxybacillus sp.
MVEENMTCFMQRKGENPMVFVLDTNKRPLAPCHEAVARKLLKQGKAAIYRRFPFTIILKKSVDESEIKATYRLKIDYGSRHTGLAILRGQEVVWLGQLDHRTDIKERIDKRRAFRRARRNRKTRYRKPRFLNRKRKEGWLPPSLESRMQNIKTWVERLRKICPIEHISYENAKFDTQLMRNPEINGVEYQQGTLQGYEVREYLLEKFGRKCCYCGKEGVPLEVEHIIPKSRGGTDRIDNLCLACRDCNQRKGSQTAEEFGYPHIQEMVKKTLKDASVVNATRWKVYEVLKQSGCEVECGTGARTKMNRIRLGLPKIHYFDACCVGKSTPLQLHFKTKEVLFIKAKGRGSRSRTNLDRYGFPRGYLARQKYFFGFQTGDMVKANVPKGKYQGVWFGEVACRKTGSFDIKGKDGKRIAQGINYRYVQVIQRFDGYAYGKGVAELA

SEQ ID NO: 4770 - protein, 421 aa, unidentified; identical to SEQ ID NO: 2846
  REGION 1..421: note = Human gut metagenome

SEQ ID NO: 4771 - protein, 428 aa, Moorena sp.
MQNYVFVIDTNKQPLNPIPPKKARRLLDKGKAAVFRMYPFTIILKTAILQSRRCANENPVVTNCQLKIDPGSQVTGFALVQNNQVIWGMELEHRGGLIKKKLESRRAVRHRRRNRNTRYRKPRFLNRKRSEGWLPPSLEHRILTIETWVKRLIKFCPVNEIWIERVKFDAQKMQNPEISGVEYQQGERRGYEVREYLLEKWGRECTYCGKQSVPLQIEHIHPKSKGGSNRVSNLCLACEKCNQRKGNKPIEEFLNKKPSLLQKIKTKAKQPLKDAAAVNATRQKLVKVLRAIKSVVTGTGAQTKYNRTKLGFPKEHWIDAACVGDIEPLWLRTNQPLLVTCKGQGGRQKAALNKYGYPIRHNPLKPIKGWCSGDIAKNVLTGEFGRVNPRSKSNSFNYTVPGKKAVSLHVKNLTKVHKKDGYVYNFCK

SEQ ID NO: 4772 - protein, 544 aa, unidentified
  REGION 1..544: note = Human gut metagenome
MKQKKQKVMVYILNKKGKPLMPTTRCGHVRKLLDSKKAVVVSSNPFTIRLKYDTPNGVQDVFAGIDSGRENIGSGASNEDGDCLYLGELKTSNKSIKMKITERAGFRKERRRRDRQNKQRKARKDHTEIQNGNADICRTTISCKSVQISYPAAEKSVTHKIIRGKEGKFANRHRDEGWITPSARQLVQMHMNDLKSMCKILPISHVTLERVAFDFQKLENENIKAWEYGKGKLYGYDSPEEYIHDVQGGKCLICGKPHIDYLHHIIPRSKGGSNKVSNLAGLCYDCHYGPMGVHNCQDTQDRLPELKNEANKQYKVSLLNSVMPVLIEEMDKFCKANSIIFSICEGHDTAKVRDIYDLQKDHCVDGFAISLVGRNIKSVDVMPDRIHQKQRYKKKSKNIIKKRNCREYYDGKKLVAVNRHKGTDQKADSLEEYMNTYAETHTADECKKHFESLTVKPARRTYTFHKEGRICPFHIGDKVRYEKKNKIKGNTKVETFICEGIRFPKDENKAKVEHNKTKSKKMKFCRVLEPGCTPYIDYRKLVLI

SEQ ID NO: 4773 - protein, 415 aa, Bacillus sp.; identical to SEQ ID NO: 2431

SEQ ID NO: 4774 - protein, 448 aa, unidentified
  REGION 1..448: note = Human gut metagenome
MYWLIALNILKKKGSALMVYVLDINGQPLMPTTRHGKVRRLLNGHLAKVVKRCPFTIQLLYQSTKETQSTSLGVDAGSKHIGLAATTEKKVVYQEEFTPRNDVVKLLSARRILRHSRRNRKTRYRKPRFNNRVHSKHKGWLAPSVEIKIQEHITAIKRICQILPISEIHVETAEFDLQRLKALEDGNPLPVGTDYQLGEQYDFYNTRQYVLHRDGYTCQCCGTHDNNVKLHVHHIESRQTGGNAPNNLITLCEHCHSALHEGKLKLPKGKKRGKSYRDTAFMGIMRKTLLERLRKEIDIPVTETYGYITKYWREKVGLEKGHINDAVCISKHSYAEPLDIYYLTKAVRHHNRQIHKTKFSKGGIRKRNQAPYLVKGFRLFDKVLYQNREYFIFGRRATGYFDIRTLDGTKVNKGSISYKKLRIQDTANAYLKEVKAIPHMNKFTCVLA

SEQ ID NO: 4775 - protein, 441 aa, Ktedonobacter sp.; identical to SEQ ID NO: 4223

SEQ ID NO: 4776 - protein, 442 aa, Selenomonas sp.
MSWTDNTETHILPLTLARRKILPQGKVTEMSKEYSFVLDANGKRLDPTIVQNAWRLVRQKKAALVSKYPMTIRFKKVVEDENCDEVRMGIDDGATHVGIALVQKCQKRNKVLLKATMEHRSDVGKLMTTRRAYRRYWKRHRPTRFDNRGNSRKTGRLAPSIHQKRQAVLRVADQLSKRIRIDSFWLEDVVIDIRTLVDGYKLYHWQYQKPNRLDENLRKAAILRDGCKCQECGRTNCRLEVHHITPRRANGRDTISNLITLCPSCHDKTKGNEEQFAERYYAMIRSRGNNAELKYASHVMVGKAWLRAKLSSRLPLILTTGGDTANKRIDWGIAKSHSNDAICITGLKPEGIDVQEWMLHPIRHQSKAGIKDVIGFRHHDIVAYTFKNGERHEGYVTAMYPANGKRCASLNFRSPTKHCKRVNARKCKLICRPNKIYWLRYA

SEQ ID NO: 4777 - protein, 496 aa, Streptomyces sp.
VLPQQLALEFESADIPRIGDETGLGDHHVVVPGVEHVRGETTGSAPAAGGVTPDREVRESGREADPVVFVLDRHGVPLQPTNPARARKLLASGRAVVDRHTPFVIRLKDRTTAGSQVDGVELGIDPGSKHTGIAVFTDVAGERRGRYSIQLDHRGAQIRKKLKQRSAYRRGRRSRNLRYRAPRFSNRTRPAGWLPPSLRHRVDTTTAWVDRLTRWAPVRAAHVERVAFDIHAISAGRPLEGAEYQHGTLHGTEVREYLLAKFGRACSYCGAMDTPLNIDHIHPRSRGGSDRVSNLTLACVPCNQAKGSQPVEDFAPKRAADILKRAKVPLRDTAAVNATRSALWRALDQRMPTYTASGGRTKWNRTRTGLPKTHTLDALSVGELDTVTAWPRTVLIVGATGRGTYARTRTDKHGFARLRLPRVKQFFGFATGDLVRAFVPAGKNAGTHTGRVAVRSSGSFAVRTASGLYTARHKYFRLLQRADGYAYTTRPEGAMP

SEQ ID NO: 4778 - protein, 303 aa, Halomonas sp.
MAIFVLDKKKQPLMPCSEKRARLLLQRGRAVVHKRYPFTIRLKDRVGGETQPLRLGIDPGSKTTGLALMRETEGEQRHVLCLFELIHRGFQIKKALQQRAAFRRRRRSANLRYRAPRFNNRTKPKGWLAPSLQHRVDTVMAWANRLSRLAPVTAISQELVRFDTQKLENPEISGVEYQQGTLLGYEVREYLLEKWGRECAYCGTGDTPLEIEHVVPRSRGGSNRVSNLTLSCHPCNQSKDALPLAGFFAHDEGLRKRLKANGLSADAQLERVQRQLKQPMRDASAVNATRCSPRSKPRIYRSP

SEQ ID NO: 4779 - protein, 414 aa, unidentified
  REGION 1..414: note = Human gut metagenome
MPCSPAKARLLLKEKKAIVVRRTPFTIQLTIATGESKQPVSLGVDAGYKHVGLSASTEKAELYASEVELRQDITDLLSARRALRQSRRNRKTRYRAPRFDNRIRTKRKGWLAPSVENRINAHLSRIETVIRLLPVTKISVETTSFDMQLLKNSDIAGKEYQESEQLGFWNVREYVLFRDGHVCQHCHGRSKDPVLNVHHLESRRTGGDSPGNLITLCETCHKELHRGEITLKAKRGQSFRAETFMGIMRWEVLDRLKASHPKLEVQNTYGYRTKHARIVNGIAKSHCADAFCIAGNLGAERLGEFLFQKQTRRNNRQIHKLSILKGGIRKRNQVPFEVKGFRLFDKVACKGEEGFVFGRRSSGYFDVRKLDGTRISTGISYKKLRLLEKRQTYLTEIRKEEALPPLPEGRGLRA

SEQ ID NO: 4780 - protein, 456 aa, Halomonas sp.; identical to SEQ ID NO: 2773

SEQ ID NO: 4781 - protein, 426 aa, Moorena sp.
MVFVLSRNKKPLALAPTSNARARVLLKNGKAIVVSLYPFVIRLKELKETIQCFEIKLDPGASTTGVAIVDKEKALFFFGLVHRGKAIKKALDSRRAIRRGRRARNTRYRAPRFNNRVRSLNWLAPSVKSRADNVINFVKKYQRFIPLNKATIERVSFDNSSMANGEKLYGTQYQQGSLYQNKLRDFIFAKNNGQCAYCGNKGEEIEHIVPRSKGGTDSIHNLALSCRECNIKKGTLSLKEFGKIINKDLSHIEPRKLPKEAAIIQSARNYTIKEIAKIMEVETGEGWETSFNRKERNLPKEHYYDALCVGGKSDYVITTKEVLEIKAQGRGSRQMTRVDKFGFPRTSPKPTAKSVNGFTTGDIVKANVTSGLKQGNYLGRVAVRSSGYFNISTSDGVIQGISNKYCKTIQKGDGYEYQLKNTKQTA

SEQ ID NO: 4782 - protein, 435 aa, Streptosporangium sp.; identical to SEQ ID NO: 3796

SEQ ID NO: 4783 - protein, 465 aa, unidentified
  REGION 1..465: note = Human gut metagenome
MSTCACVLSKNGERLMPTIRLGKVRHLLKDGKAKIIKHHPFTIQLLYDNETNIQPIEICEDVGYNYIGISVKSQSHEYVSVQYDTLQDEKDCHDSCRKMRRIRRNRLRYRKPRFDNRKRNKGWLAPSLEHKKELNVNVIKMYCKVVPITHVTVEVGSFDTMLVKAIQEGKAIPEGADYQKGPRYNLATLREAVFYRDKYTCQVCGRKANEGAILHVHHMFYWKGRHGNSLSELLTVCEKCHTPANHQQGGKLYKFGENIKFANLSGAAFMNTVRWQIVNELYTAFGKLFVTFTYGAMTKEKRIAFHLEKCHNNDAYAMGNFHPVDRCAFEHYKKVKRNNRILEKFHDSQYIDIRTGKVANGRSLFNGRINRSHKKNSENLHKYRGKRTRKGYRALRRKKVALNPGDLVSLNGEILVVHSTHAGKNGYVGVEFKAPSKSGKKSASLKKLKIVKTSNSMRSAWTKVS

SEQ ID NO: 4784 - protein, 419 aa, Moorella sp.
MLACKQKVYVYVLNKHGKPLMPCSPKKARVLLKEGKAKVVRVVPFTIQLLYGSSGYKQKIYAGRDRGLTQGIAAVRKDGETLFLGEVTGRRDISELMYERSSLRRSRRSRKTPYRPCRIDNRKRKEGWLPPSVNHLWYEHQKTRSLVESILPVTEWAEEINKFDTHKMVNPEVKGKGYQEGPLKGKKNYREYVLERDSYRCVLCGEPEGLEVHHIVWRFRGGSDRPKNLVTLCKDCHDKVTKGEIEIKKVIESYRWPARLNALNPQFNALEGVKVPAYKVKEARLELGLDKAHYCDALALIHAAFGIIPRVTLPKVIKGRFVRSKNRQLHRANPIKGGVRPKANANRYLVNKNGVRFQKYDLVSYRTKKGEAITGYVNTLFSRGTVRIADFFGKELYNGASVNRLRKWQNNDTLIWEVA

SEQ ID NO: 4785 - protein, 431 aa, unidentified
  REGION 1..431: note = Human gut metagenome
MPNKVYVINKHGRPLMPCSPAKARHLLDAGKAKVKKRTPFTIQLVYGSSGYTQEVILGVDAGSKTIGMSASTTKEELLSAEVKPRNDVVDLLSTRREFRRAQRNRKTRYRKPRFDNRVRSKHKGWLAPSVEVKIQEHITAIRRVCGILPVSKVVIETAEFDLQLLKAIADGKPVPQGEDYQQGEMYGHYNVRQYVLWRDGYTCQCCGAHTTKKKEVRLHVHHLESRKVGGDAPDNQVTLCESCHEKLHKGLIAEKDFKKRKRRSTRDATFMGIMRKTLMQRLCSELPIPVIETRGYITKATREKLLVLPKSHTNDALAIAQGKQGFNVGYLPEIAQIDKIYTIRPVRHHNRQLHKATILKGGIRKSNQTEKYVFGYRLFDKVQFNGQDCFIWGRRTTGIFTIKTINGKMIKDGISFKKLKPVEKSTSYLIA

SEQ ID NO: 4786 - protein, 442 aa, Anaerostipes sp.; identical to SEQ ID NO: 2903

SEQ ID NO: 4787 - protein, 502 aa, unidentified
  REGION 1..502: note = Human gut metagenome
MSIIYVQDRHGKPLAPTTRGGHVRRLLDSKQARVVCGNPFTIRLMYGVDPCTQGFILGIDPGRTNIGVTVAAADGTCVFSAKAETNNKGVPKRRKERKAPRQASRQGERKRRQRRARKNGTCFGERKRILPGCKEPITNHYITNTEARFMNRARTKGWLTPTANQLLQSTISLVRKVCKFLPVTDVVLELNEFAFMAMDDPGIQRWEYQKGPLYGYGSVEAAVYTQQDGHCIFCEQAIAHCHHVIPASKGGSDTLENRAGLCGGHHDLVHKEQSWTDKLAELKAGMNKRYAALSVVNQIIPRLADELGKMFPGHAFATNGWSTKQFRDAHGIPKDHNTDADCIACSILENPTIKLPEKVYELRKFRRHDRAQISRMEDRNYYLPGADPKTGKPKKVLAAKNRHKRTEQKTDSLEEFRAAHPNDVGRLMVARGGPKHKDPNRVLPGAIFQVETRSGNVEQLVLQGSHGRDKNGQPLYLEFVGQGNFRPNRCKYVARGRGWQFV

SEQ ID NO: 4788 - protein, 414 aa, unidentified
  REGION 1..414: note = Human gut metagenome
MPCSPAKARLLLKEKKAIVVRRTPFTIQLTIATGETKQPVSLGVDAGYKHVGLSASTEKAELYASEIELRQDITDLLSARRELRRARRNRKTRYRAPRFDNRIRTKRKGWLAPSVENRINAHLSRIEAVFRLLPVTKITVETASFDMQLLKNPEISGKEYQEGEQLGFWNVREYVLFRDGHVCQHCHGRSKDPVLNVHHLESRRTGGDSPGNLITLCETCHKALHRGEITLKAKRGQSFRAEAFMGIMRWEVLNRLKASHPELEVNNTYGYRTKHARISNGIAKSHCADAFCIAGNLGAKRLGEFFFQKQTRRNNRQIHKLSILKHGLRKRNQAPFEIKGFRLFDKVACKGEEGFIFGRRSSGYFDVRKLDGTRISAGISYKKLHLLEKRQTYITEIRKEKALPPLPEGRGLRA

SEQ ID NO: 4789 - protein, 419 aa, Geobacillus sp.; identical to SEQ ID NO: 2623

SEQ ID NO: 4790 - protein, 413 aa, unidentified
  REGION 1..413: note = Human gut metagenome
MTSYSFVLDANGKQLAPTKEQKAWFLIRKKRAALVSKYPMVIQLMKEIPEKEICQDEIRCGIDDGGLHVGIALVQKCKTKNKVVFKGTMEQRNDVKHLMEVRRGYRRYHRYHKRYRQARFDNRKSSKREGRIAPSILQKRQATIRVIHWLNKWINITNYWLEDVSVDIRVLTDGYQSYRWQYQKSNRLDENIRKAAILRDGGKCMECGKSNCRLEVHHIKPRRRNGSNTLDNLITLCESCHQKTEGQEELYMDRYFSLLKSSDNKNLNYAQHVMIGKMWLRKQLSGLGVLYLTSGGDTANKRIDWNIEKSHANDAVCITDLQPDTCDVKEWTMKPMRRQSKAKTDHVLGIHHRDLVEYTFKNGETHRGYVTALYPEQKAINFQSPTKHCKKVNARKCKLLWKYSKIYWFENAS

SEQ ID NO: 4791 - protein, 420 aa, unidentified
  REGION 1..420: note = Clostridia bacterium
MQYVYVLNKHGEPLMPCSPGKARILLKQQKACVVKRTPFTIKLLYGSAGYKQPITLGVDAGSKHVGLSASTEKRELYSEEFTPRNDVVELLSTRRQNRRSRRNRKTRYRAPRFNNRIHSKHKGWLAPSVEVKIQEHITVIKRICRILPITLVRVETAEFDTQRLKAMLSGKPLPVGTDYQLGEMYDEYNARQYVLRRDNYTCQRCGAHTTKKKTVKLHVHHLESRKTGGNAPSNLITLCVDCHKAFHAGKVKLDGKKRGKSLKDAAFMGAMRNTLLTRLRNELNIPVQNTYGYITKLLREQNDIKKSHVNDARCISKHPLAEPCSVCYRTKAIRHHNRQTHKANFSKGGIRKRSQMPYVVEGYRLWDKVLYKGQECFVSGRRSSGSFALKKLDGTSISKGVTFKKLRLLEPATNYLIERM

SEQ ID NO: 4792 - protein, 439 aa, Moorena sp.; identical to SEQ ID NO: 4465

SEQ ID NO: 4793 - protein, 427 aa, Enterococcus sp.
MVYVLSIHNEPLMPCSNVIARLLLKQGKAKVKYREPFTIKLTYETTTYTQPLTLGVDTGSQTFATAVANDKGNILYTSEVTLREDKNNSIKKKMDQRRMYRRTRRNRKTRYRKARFNNRKNSKRKNRFSPTMTSKLHSHQKEIEFIKSILPIAKLIFETGTFDPHLMKNPSLANPKVKPWGYQQGPNYGFENTKARVLVRDNHTCQICNKKPKNERLEVHHIVFRSQGGSDEENNLVTLCHSCHVELHKGLIHPNFEGSLKSALKYATQMNSIRIQLLKLYPDAIETFGYVTKANRLNLGLPKEHYVDAAVIATAGNQVKFACNLMIKRCIPKGDFQRTKGVRSEKTIPKGKIDGFKKYDKVRYFGNEYFIKGRRTSGYFTLMDIYGQTISFNHMSKGQKTPKAKNCHRISARKSWIVTTKKLENIA

SEQ ID NO: 4794 - protein, 416 aa, Moorena sp.
MVYVLDQSGQPLMPTERHGKVRHLLKSGKAKVIKRCPFTIQLLYNSTHYTQDITLGVDAGSKQIGLSATTKQKELYAAEIELRNDIVKLLAARRELRRSRRSRKTRYRKPRFQNRTHSRKPGWLAPSIRQRIQCHLTVIANVHKLLPTKTILIETASFDIQKIKHPDIHGVQYQKGEQLDFWNVREYVLFRDNHTCQCCKGRSKDNILNVHHIESRQTGGNAPNNLITLCETCHTGYHNGKVILPKTIKRGMSFKDAAFMGIMRWSCYDMLKNIYPDVHMTYGYITKNTRIGNNLPKEHYVDARCISKNPKAEPLPYYYYQKKVRCHNRQIHKTKPTKHGIRKRNQAEYVVHRYRLFDKVQYQNNEYFIFGRRKTGYFDIRTLTGVKVNNGSISYKKLKLLEKSKKYLTETRLQTT

SEQ ID NO: 4795 - protein, 442 aa, Ectothiorhodospira sp.
MAVLVLDRRKKPLMPCSEKRARLLLERGRAVVHKMRPFTIRLKDRTAEASTLQPVRIKIDPGSKTTGVTVIREDDSDPEQQQVLMLMEVEHRGQYIKDALTQRRAFRRRRGQLRHRAPRFDNRTRPRGWLAPSLQHRVDTTLAWVARLRRLAPVTAIDQELVRFDTQAMEAPEISGVEYQQGTLHGYEVREYLLEKWQRRCAYCGARDLPLEVDHINPRSRGGSDRVSNLTLACHDCNQAKGNQPVEAFLADDPKRLQRIKDQARAPLKDAAAVNATRWALFQGLKAMGLPVITGSGGRTKYNHQRLGLPKTHALDAACVGQVAAVTGWNVPTLTTRATGRGSYQRTRLNRFGFPRGYLMRQKQVKGFQTGDLVQAQVPSGKKAGTYQGRVAIRATGSFNIQTAQGVVQGISHRHCRLLQRADGYGYTFQPKPLQEDASRAA

SEQ ID NO: 4796 - protein, 422 aa, Ktedonobacter sp.
MRSDSLHGHSAGIRITRRLPEYFSERNRLNMVYVVSADRTPLMPCSAAIARLLLKEGKAKVVRRTPFTIKLSAQPERTYTQPLTLGVDTGSAVIGSAVASEQGSILYLSEVEVRNDIATTMKERATHRRDRRNRKTRYRPARWLHRRNSIKTGRFSPTMRSKIDAHLREIHFAHSLLPISSIVLETGTFDPHALKNPEVLRKKWLYQKGINYGFANTKAYVLTRDGYTCQHCQGKSKDQRLEVHHIIFRSQHGSDEESNLLTLCKTCHDALHAGMITLKHTGKKKGDLLHATQMNSIRVQLLKQVEAEETWGFVTKEHRLLAGLPKEHCFDAAMIATRGNRPVFQIQTVFVKKCIPDGEYQQTKGKRSEQRIPTGKIQGCAQMRQSALSRSGILYQRAYVYWLCYFDDDRREKGRFETHSQV

SEQ ID NO: 4797 - protein, 415 aa, Bacillus sp.
MRVFVKNLRGEPLMPCSPRKARLLLKQGKAKIVQYTPFIIQLQYATGETVQPVTIGVDSGAKYVGIAITTEEKVLVKGTVELRQDIKENLALRATLRRGRRQRKTRYRKARFLNRKKKEGWLPPSIQSRVDNQIQWIETFRSLLPSPKVIVEVGKFDAQKLKNPDIQGIEYQQGDAFGFWNIRYYVFARDQYTCQICKKKGGILHTHHIIERCNGGSDMADNLVTVHEECHQRFHQGIIKHVFKKPKQYKETAFMNILRLQIMKRLECEITYGSYTTPKRKELGLAKTHANDALAITNPTKLQEYDQSGEFRIKQFRKKKRSLHEATARKGRKTKNASAKRNKKNTPHVDGIYLGDKVKVFGQVGFVTGFTGKMVYVQDIHGQYIQSPSKSYKQVKMSDMERIHHTNNWQFLQIS

SEQ ID NO: 4798 - protein, 427 aa, Enterococcus sp.; identical to SEQ ID NO: 2410

SEQ ID NO: 4799 - protein, 315 aa, unidentified
  REGION 1..315: note = Human gut metagenome
LRVFVLNKRGKPLMPCSPAKARLLLKEKKAIVVRRTPFTIQLTIATGETKQPVSLGVDAGYKHVGLSASTEKAELYASEVELRQDITDLLSARRALRQSRRNRKTRYRAPRFDNRIRTKRKGWLAPSVENRINAHLSRIEAVLRLLPVTKITVETASFDLQLLKNPDISGKEYQEGEQLGFWNIREYVLCRDGHVCQHCYGRSKDPVLNVHHLESRRTGGDSPGNLITLCETCHKALHRGEITLKAKRGQSFRAEAFMGIMRWEVLNRLKASHPELEVNNTYGYRTKHARISNGIAKSHCADAFCIAGNLGAKRL

SEQ ID NO: 4800 - protein, 449 aa, Allochromatium sp.
MAVFVLDKQKTPLMPCTEKRARLLLERGRAVVVRLAPFTIRLKDRIGGAVQPLRLKLDPGSRTTGLALVRESETCDPETGAVERLEHGLWFGELAHRGQAIREALEQRRHYRRARRARKTRHRAARFLNRTRRAGCLPPSLQHRLDTTVNWVERLRRLAPISALSQELVRFDTQALQNPEISGVEYQQGELAGYEVRVYLLEKWNRTCAYCGATHVPLEIEHIQPKSRGGSDRVSNLTLACRPCNQRKGSRSIEDFLKRQPARLHKIQAQAKAPLQDAAAVNATRWALFAALKATGFAVETGSGGRTKFNRTRLDIPKTHALDAACVGAVDQVRGWNRPVLAIKATGRGAYSRTRTFNNGFPRGYLMRPKRVHGFQTGDWVRAEVPKGKKAGVHVGRVAIRRTGSFNVQTPGGTVAGISHRYCRLLQRADGYGYTVQPKPVTEDARRAA

SEQ ID NO: 4801 - protein, 421 aa, unidentified
  REGION 1..421: note = Human gut metagenome
MQYVYVLNKHGEPLMPCSPGKARLLLKQQKACVVKRTPFTIKLLYGSAGYKQPITLGVDAGSKHVGLSASTEKRELYREEFTPRNDVVDLLSTRRQNRRSRRNRKTRYRAPRFDNRVHSKHKGWLAPSVEVKIQEHITVIKRICRILPISLVRVETAEFDTQRLKAMLEGKSLPVGTDYQLGEMYDEYNVRQYVLKRDNYTCQCCGAHPTEKKPVRLHVHHLESRHVGGNAPNNLITLCVACHKALHEGKITLDKGKKRGKPLRDAAFMGIMRNTLLARLKDELNIPVKQTYGYITKLLREKNKIPKSHVNDARCIAKAPNAKPCDTMLYTRALRHHNRQIHKAKILNGGIRKKNQAPYLVKGFRLWDKVRYNGEECFITGRRSSGYFALKKYDGTVISNSASYKKLMLLEAATNYITERS

SEQ ID NO: 4802 - protein, 425 aa, unidentified
  REGION 1..425: note = Human metagenome
MVYVINKEGQALMPTERFGKVRRLLKNGLAHVICRIPFTIQLDYETTHFVQPISLGVDAGSKHIGISATTSEKELYAADVELRNDIVEKLSTRREQRRTRRNRLRYRKARFNNRVSSKHKGWLAPSVENKIQTHLTVVEKIHKFLPITKIIVETASFDIQKINNPSISSEEYQQGEQLGFFNVREYVLFRDNHTCQHCKGKSKDHILNVHHIESRKIGGNSPSNLITLCESCHKAYHNGKIDIKVKRGASFRDAAFMGIARWTTYERLKNIYSNVSMTFGYITKNTRITNGLPKEHHVDARCISGNPKSKPLGYYFYQKKVRCQNRQIHKANFLKGGRKKLNQSPFLVKGYRLFDLVEYQKKLYYIFGRRDSGFFDIRRLDGIKVNKGSISCKHIRLVDIRKGIIIERRNSCSIPPHKLKFCGFP

SEQ ID NO: 4803 - protein, 429 aa, Moorena sp.
MSNTNYVFVIDTNKKPLQPCKPTVARRLLNSGKAAVWRRFPFTLILKKAVEIVVKTTLTLKIDPGSKFTGMALLEGNKVIWMLLIQHRGSLISEKLQKRSQRRRARRTKNLRYRKPGLPNKKKPEGWLAPSLVHRVETIMTWVKRLIKFCPVESISMELVSFDTQLIQNPEINGTEYQQGELAGYELREYLLEKWGRQCAYCRKTNTPLEIEHIHPKSKGGSDRVSNLTVACTKCNQIKSNQDVKDFLSGKPELLKRILTQARSPLKDAAAVNSTRWKLFNSLKTTGLEVTIGSGGQTKFNRRKQQLPKAHCIDAACVGEVNQLNFQTTQALVAICKGQGGRQKAAVNKYGYPIRYNPLKPIKGWNSGDLALNIETGEVGRVNPRSKSNSFNFTVPGQKAKSVHVSKLKVVHKKDGYTYTFCPQLSINV

SEQ ID NO: 4804 - protein, 431 aa, unidentified
  REGION 1..431: note = Human gut metagenome
MPDKVYVISRLGHPLMPCSPAKARHLLDDGKAKVVKRTPFTIKLLYGSTEYTQPVILGVDAGSKTIGLSASTTKEELFAAEVMPRNDVVKNLSTRREFRRARRNRTTRYRKPRFNNRVHSKNNGWLAPSVEVKIQEHITSIKRVCAILPISKIVVETAEFDLQLLKAVQDGKPVPEGEDYQKGEMYGSYDVRQYVLWRDNYTCTCCGVKGTDKKPVKLHVHHFESRKHGGNAPDNYGTLCEDCHKKLHLGIITDISLKTRKRPSTRDAAFMGIMRKTLMQRLITGLSIPVAETKGYITKAAREEILKLPKTHTNDALAIAQGRHGFGIREQAYVKPTNRIYTVRPVRHHNRQLHKATMLKGGIRKLNQASKYIFGFRLYDKVLYQGGECFVWGRRRSGSFLLRTIDGTKVKDGVGYRNLTLLERSTNYLIA

SEQ ID NO: 4805 - protein, 496 aa, unidentified
  REGION 1..496: note = Human gut metagenome
LSKGDHSHPGEQDFCVPAITIQGGPAMSVFVVGLNGCRLMPTSERKARLLLKHGKASVYRKVPFTIKLNYKTGSTTQSGYLGIDTGSQHIGVSVVREDGAVLHKEEIGLRDSMSKRKLMQSRASSRRGRRHRKTRYRHPKWRPKAKRVYCEIPDRKRRHWKKKEITFTSKRPKGWLPPSLQSKTDHHIRWIKKLQDLLPEGYRLSIELGRFDPARLKDPEIHGELYQKGPQYDYENVRAYVLNRDRYTCQVCGKKGGKLHVHHILYRSYGATDDPQYMATVCSDCHNTENHHQGGILYQWMQKQKKFTRGLRDATFMNILRKRLIEAFPGATFTYGNITKADRERLRLPKSHGNDATAIAIVKTGIMTVKDKEPVIYIQQVRRKKRSLHEETPRKGRKEPNRKASRYDKNTKAVTVTKRKNKKKISITGCLFDRVELNGKKGWISGFTDKSCYVKDENDQYIRTSPKYKQVSLSKLKILHHCGNWAIGARRSLGKG

SEQ ID NO: 4806 - protein, 443 aa, Caldicellulosiruptor sp.; identical to SEQ ID NO: 2385

SEQ ID NO: 4807 - protein, 411 aa, unidentified; identical to SEQ ID NO: 3917
  REGION 1..411: note = Human gut metagenome

SEQ ID NO: 4808 - protein, 442 aa, unidentified; identical to SEQ ID NO: 2903
  REGION 1..442: note = Human gut metagenome

SEQ ID NO: 4809 - protein, 442 aa, unidentified; identical to SEQ ID NO: 3161
  REGION 1..442: note = metagenome

SEQ ID NO: 4810 - protein, 408 aa, unidentified
  REGION 1..408: note = Human gut metagenome
MVYVQDINGKPMMPTTRHGKVRRLLKDKKAVVVNLCPFTIRLTYVTSDYKQEIVLGVDAGTKHVGLSATTKSKELYSSEVILRSDIVDLLSTRRELRKTRRNRLRYRKPRFDNRVKSKRSGWIAPSVKYKIDAHIRIVDNVCSILPISRIVIEVAQFDTQKIKNPNISGKEYQEGDQLGFWNVREYVLARDGHKCQYCKGKSKDKILNVHHIESRKTGGDSPYNLITLCETCHKEYHKGNIDLKIRRGKSLRDAAVMGIMKWRLYEELKSKYDNISMTFGYVTKYNRIKHGIEKSHVSDAFVISKNFNAIRLGYYYKVRLVRRHNRQIHKQKIPKGGVKRLNQSPFEVFGFRLFDRVMFENSYYFIFGRRKTGRFNIRDIDGKNQRDITYKKLKLSRCKCFMVQNEMN

SEQ ID NO: 4811 - protein, 413 aa, unidentified; identical to SEQ ID NO: 3295
  REGION 1..413: note = Human gut metagenome

SEQ ID NO: 4812 - protein, 443 aa, Anoxybacillus sp.
MVEENMTCFMQRKGENPMVFVLDTNKRPLAPCHEAVARKLLKQGKAAIYKRYPFTIILKEIVDNFRPKTPYRLKIDHGSKHTGLAILRGQEVVWLGQLDHRTDIKERMDKRRAFRRARRNRKTRYRKPRFLNRKRKEGWLPPSLEGRVQNIQTWVNRLKKLCPIGYISYENAKFDTQLMRNPEINGVEYQQGTLQGYEVREYLLEKFGRKCCYCGKEGVPLEIEHIIPKSRGGTDRVDNLCLACHDCNQRKGSKTAEEFGYPHIQEMVKKTLKDASVVNATRWKVYEVLKQSGCEVECGTGARTKMNRIRLGLPKIHYFDACCVGESTPLQLHFKTKEALFIKAKGRGSRSRTNLDKYGFPRGFLARQKFFFGFQTGDMVKAVIPRGKYQGVWFGEVACRKTGSFDIKGKDGKRIAQGINYRYVQVIQRFDGYTYRREGMNIA

SEQ ID NO: 4813 - protein, 461 aa, Ktedonobacter sp.
MRSDSLHGHSAGIRITRRLPEFFPKGFSSMNIAYVLSPDKAPLMPCQPVIARLLLKEGKAKVRHRTPFTIQLLAQPEQIYTQPFTHGVDTGSVVIGSAVADERGFVVYLSEVQIRNDIAETMKERARARRNRRNRKTRYRPMRWLNRKNSIKQGRFSPTMKSKIDTHLREIRFVQSLLPITSIVLETGTFDPHALKNPEVLHNKWLYQKGINYGYANTKAYVLTRDGYLCQHCKGKSKETRLEVHHIIFRSQNGSDEEANLLTLCKTCHDGLHAGTITLKRTGKKKGTLRHATQMNSIRIQLLKRVEAEETWGFVTKEHRILAGLPKEHVFDATMIATRGVKPTFCTTSVLSKRCVSDGDYQQTKGVRSEQRITTGKISGFRKFDKVRYLGQEYFIKGRISTGYAILMDISGNKVALKPIPKFDKMKRVNARSSWIMLQRTMLNSSCSITSSLSVSTAKAF

SEQ ID NO: 4814 - protein, 435 aa, unidentified
  REGION 1..435: note = Bioreactor metagenome
MLVFVLNKHGKPLMPCKPSKARKLLKQGKAKIVQYEPFTIQLLYSSSGYKQKCVMGIDAGNKNIGIAVTTEDGRVLYKAQVALRQDIRENIETRRRLRRARRYRKTRYRKPKTFTSKWRNGWLPPSIRARIDAHYNIVKKICSIMPIKEIVVEVGQFDVQAIINPDIQGEEYQNGELKGFDSVKEYVKIRDNFQCHYANLRPDIPCSGKLTVDHIIPRSRGGTDNPTNLVCCCEMHNMAKGNMSYKEFTGHEPPSIRDFRPTVFMNALMEHLVPRLQELAPTKYTFGYVTRRRRKEWGLEKSHINDAIAIAGIKPRWQDNVWYCIRQMRKKKRSLHEEIPRKGRNKPNREAKRNNKNVKEIVTKSGKWCLWDKVKITTTGEIGFISGFTGKWVYVQDIDGNYLQLSDKYKQINPSELVLICRNNNYITQQFISTL

SEQ ID NO: 4815 - protein, 427 aa, Eubacterium sp.; identical to SEQ ID NO: 3021

SEQ ID NO: 4816 - protein, 438 aa, Fervidobacterium sp.
VADMTSPSNIGDELLTPQGGLHHMVYAISQQGKPLVPTKRHGKVRRLLKQGLAKVVKREPFTIQLLYDTTTYVQPVTVGIDIGSKTVGVSAITDKKEVFSSEIELRTDIKDLLCERREYRQLRRYRKTRYRKARFLNRRKPEGWLAPSLRWKVDAHIRIVNMLSKILPISKVIVEVAPFDTQKILNPDIQGEEYQNGVQKGFWDVREYCLWRAGYKSEVSGKKGVLEVHHIVPRSGGGTDNPSNLIVLTAQEHKAIHEGRLKIPKSKIEKVRILKDASHVSTIGWHIVNELKELYEDVRVTYGSITKAKRSEFGLEKTHRNDAYVIGGGTVQKRAKEWYFGKFFRRQNRSLHKVNPIKGGIRPVNTIKQSYGFRRFDKIEYEGKIGIIAGTRSSGYFVIRSLSGERIHDSVKYSKLKHFEKSKTIMLERREAAISSHD

SEQ ID NO: 4817 - protein, 430 aa, unidentified
  REGION 1..430: note = Human gut metagenome
MPKVYVLNRHGRPLMPCTPAKARHLLDAGKAKVRHRTPFTIQLLYGSTGYTQEVILGVDAGSKTIGLSAATETEELFSAEVKPRNDVVELMSARRQFRRARRNRTTRYRKPRFDNRVRSKHKGWLAPSVEVKIQEHMTAIRRACAILPVSKVVVETAEFDLQLLKAVAEGKPVPQGEDYQKGEMYGHYNVRQYVLWRDSYTCCICGVHGSVRKGVPLHVHHLESRRVGGDAPDNLVTLCTACHDKLHKGIIMAADIKKRKRRSTRDATFMGIMRMTLLRRLREQLPVPVVETRGYITKATRENLLVLPKSHTNDALAIAHGPQGFRAEYLPNIRQADRLYTIRPVRHHNRQLHKATILKGGVRKANQAEKYICGFRLYDKVLYNGIECFVWGRRTSGSFLLRQLNGEKVKDGVSYKHLKLLERSQSYLVA

SEQ ID NO: 4818 - protein, 415 aa, Bacillus pseudomycoides; identical to SEQ ID NO: 2431

SEQ ID NO: 4819 - protein, 441 aa, unidentified
  REGION 1..441: note = metagenome
MSTSVFVLDKRHRPLMPCRPARARRLLRAGRARVVKRFPFVIRLVDRTVEQSEVQPVLIKLDPGSRETGAAVVRDDEKKRHHALAFFVIKHRGGAIRDALKARSAFRRRRRSQNFRCRSPRFLNRVKPKGWLPPSLRHRVETTLSFVRRMCRYLPVSGIATELVKFDSQKLQNPEVSGVKYQQGTLFEYEVREYLLEKFGRKCVYCAEGVPLNIDHVVPRAKGGSNRVSNLVLACVSCNQKKGARSLEDFLKGKPEVLARVRRELKTPLRDAAAVNATRWVLFNELKATGLPVETGSGALTKLNRHAFGVEKEHWLDALCVGRLNGVVTRKGLNVLEIRCMGRGSRQRTRLTKYGFPRGYLMRQKCVHGFATGDMVEANVPKGKKAGLWRGRVAVRVSGSFNIQTPKGVIQGVGWKHCRLISHNDGYGYAWLGHAPHSSPA

SEQ ID NO: 4820 - protein, 471 aa, Caldicellulosiruptor sp.; identical to SEQ ID NO: 3375

SEQ ID NO: 4821 - protein, 416 aa, unidentified
  REGION 1..416: note = Human gut metagenome
VLEITNYVFVLDANGKQLAPTKEQKAWFLIRKKRATLVSKYPMVIQLKKEIPDEQIYKDEICCGIDDGGLHVGISLVQKCKTKNKVVFKGTIEQRKDVKHLMEVRKGYRRYHRFHKRYRQARFNNRKSSKRKERIAPSILQKRQATIRVINQLNKWINITNYWLEDVAIDIRALTDDYKAYRWQYQQSNRLDENIRKAVILRDGCKCMECGKSNCKLEVHHIKPRRSNGSNTLGNLISLCKKCHQKTEGQEELYMNRYFSMLNSSDNKTLNYAQHVMIGKKWLREQLSKLGTLTLTTGGDTANKRIDWNIEKSHSNDAICITGLQPDTCNIKEWTIKPMRRQSKAKADNVLGINHRDLVEYTFRNGETHRGYVTALYPGQNAINFQSSTKHCKKVNAKKCKLIWKYSKIYWLANVQ

SEQ ID NO: 4822 - protein, 414 aa, Sutterella sp.
MPCSPAKARKLLKAGHAKIKRVNPFQIQLTRATGESVQPVTLGVDAGSKTIGLSASSAKTELYVSEVALRTDVSDLLSTRREFRRARRNRKTRYRAARFDNRVRSKNKGWLAPSVENKIQAHISRVQNVCRLIPVNKIRVETAAFDIQKIKNPDIAGIDYQKGDQLGFWNVREYVLNRDGHVCQHCKGKSKDRILNVHHLESRKTGGDSPGNLITLCETCHKAYHRGEIQLKVKRSPSFRDAAFMGIMRWTFFNRLKALFSHLTVENTYGYFTKYARIRFGIAKTHCADAYCIAGFLHAKRMGEFLFQKQVRKHNRQLHKATILKGGVRKAQQAPYIVKGFILFDRVRINGEVGFVFGRRSSGYFDVRRLDGTKISAGVSFKKLKRIESRQSFLTELRKETALLPRMNAGVSAP

SEQ ID NO: 4823 - protein, 380 aa, Arthrospira sp.; identical to SEQ ID NO: 3156

SEQ ID NO: 4824 - protein, 378 aa, unidentified
  REGION 1..378: note = Human gut metagenome
MAASANAQKDIGVIKRRLPGCEKDVLCIGIKNKETKFTNRTRPEGWLTPTANQLLQTHINLVKKIQKFLPISDVVLEVNKFAFMRLDNPNIQKWQYQQGPLYKKESLESAVSEIQEHHCLFCKKPIDHYHHVVPQHKNGSNTIGNIVGLCAKHHDLVHKDSAWEKKLAKKSTGLYKKYGALGVLNQIIPTLTNELSSLFPKHSFVTNGKSTYDYRAAHGVSKDHWLDAYCIACSVLPSNVCDSNINNHMPYVLKQFRRHDRRVLNNENMNRVYTLNNKAVAINRHKAKDQKTVSLEEFRKEHPDDVCKLKVKEHHPTYRNMNRNFPGSVFLVGKQIHVMQGIASSKDGKATKYNDTSATAIAAGKCKFVAKNTGILFV

SEQ ID NO: 4825 - protein, 408 aa, Lysinibacillus sp.
MFVYVLNQYGKPLMPCKPIKARKLLTQGKAKVVQRTPFTIQLKYGSSGYVQPVSLGIDAGTKEIGISATTKDDVVFEGEVKLRTDIQELLATRKSLRGARRSRKTRYRKPRFLNRKKEKGWLAPSVQNKVDMHVKIIRKVHKILPIQNLTIEVAQFDIQKIKNPSISGDLYQKGDQLDFWNVREYVFFRDKHVCQYCKGKSKDYILNVHHIESRKTGGDSPDNLITLCENCHKKIHREGKEYLFKRKNCSFRDATQMTVMRWFIYDKVKELYPHARLTYGFQTKNNRIRHGLDKGHAVDARCISGNPLTIPSENSYSFKQVRKNNRQLHKMTISKGGYRRANKAERFVKGFQLFDKVIFEGVECFIFGRRKTGYFDLRTLDGTHIHKSASFKKLRVIEKANTLLASQI

SEQ ID NO: 4826 - protein, 408 aa, unidentified
  REGION 1..408: note = Human gut metagenome
MVYVQDIDGKPMMPTTRHGKVRRLLKANKATVVNLCPFTIRLTYATSGYKQEIVLGVDAGTKHVGLSATTKSKELYSSEVILRSDIVELLSTRRELRRTRRNRLRYRKPRFGNRVKSKHHGWVAPSVRHKVDAHIRVIDNICSTLPISRIIVEIAQFDTQKIKNPDISGNEYQEGDQLGFWNVREYVLARDGHKCQHCKGKSKDPILDVHHIESRKTGGDSPSNLITLCETCHKEYHKGNIDLKVKRGKSLRDAAVMGIMKWKLYEELKSRYPNVSMTFGYITKYNRIKYGIEKYHISDAFVISKNFNALRLEYHYKVRLVRRHNRQIHKQKVLKGGAKKPNQSPFEVFGFRLFDRVMFEGNYYFIFGRRKSGSFNIRDINGGNQRNVTYKKLKLSIGKRFMIQKEMN

SEQ ID NO: 4827 - protein, 450 aa, Moorena sp.; identical to SEQ ID NO: 2935

SEQ ID NO: 4828 - protein, 412 aa, Clostridium sp.
MSKQKEYAFVLDFTNNKLAPTNTNKAWILIRKKKAKLLQKYPMVIQLNYEVKIDKETEIICGIDDGSSHVGISLIQKCKTYNKPIFKGTIELRQDIKGLMDVRRGYRRYKRSHKRYRQARFSNRSMSTRKGRVAPSILQKKQSIIRVINQLLRFINIKKFHLEDVTIDIRALTDGKKLYRWQYQKSNRLDENIRKAIILRDGCKCMECGKSNCVLEVHHIVPKRLKGKNNQDNLITLCSNCHDKTKGQEEKFIKYYQLMINGKNIRLDYAQHVMQGKNWLRNELSKLGKLVLTTGGDTANKRIDWNIDKTHSNDALVASDLIINNELCNIKDYIIKPMRRKSKAKTYECLGFKHRDLIKYTKKNGESYIGYITALYSEKKQCNITTLENKILKRYGIKPCKLLWRFNKIYWF

SEQ ID NO: 4829 - protein, 443 aa, Caldicellulosiruptor sp.; identical to SEQ ID NO: 2385

SEQ ID NO: 4830 - protein, 431 aa, unidentified
  REGION 1..431: note = Human gut metagenome
MPDKVYVISRLGHPLMPCSPAKARHLLDDKKAKVVKRMPFTIRLLYGSTKYIQPIILGVDAGSKTIGLSASTAKEEVFAAEVMPRNDVVENLSTRREFRRARRNRTTRYRKPRSDNRVRSNHERWLVPSVKVKIQEHITSIKRVCTILPISKVVIETAEFDLQLLKAIQEGKPIPEGEDYQKGEMYGSYNVCQYVLWRDNYTCICCGVRGMPKNPVRLHVHHFESRKYGGNAPDNHGTLCDDCHKKFHLGIITDVKLKTRRRQSTRDAAFMGIMRKTLMWRLRTELFIPVAETKGYITKATREKLLVLPKSHTRDALAIAQGRHGFGIKEYAYVEPANHIYTVRPVRHYNRQLHKASILKGGIRKRNQASKYVFGFRLYDKVLYQGKACFVWGRRTSGTFLLRTIDGIKVKDGVSYRNLTLLERSSNYLIA

SEQ ID NO: 4831 - protein, 369 aa, Moorena sp.
QLKIDPGSKVTGLALVQDDKVLWGAELYHRGQQIKADLEDRRKLRRGRRNRKTRYRQPRFLNRTRPEGWLAPSMLHRVLTTMTWVRRLTKFVPVTGISLERVRFDMQKMINPEVSGVDYQQGELQGYEVREYLLEKWNRQCAYCKATDTRLEVDHIHPKSKGGSDRVSNLTVACHDCNQAKGNRNITDFLSGKSDLLNRILSQVKQPLLDAAAVNSTRNKIAEELIATGLPIEFGTGGQTKYNRCRLDLPKTHWLDAACVGVVVHLTLETKQCLTITASGHGNRQMAGVDKYGFPYRHRTRQQVHFGFRSGDIVRAVVPKGKKAGTHLGRVLCRKSGSFDIQTKSGRVTGINHKYCSTIHGRDGYAYVF

SEQ ID NO: 4832 - protein, 431 aa, unidentified
  REGION 1..431: note = Human gut metagenome
MDAWDIIVILNKRGKPLMPCSPAKARLLLKEKKAIVARRTPFTIQLTIATGEAKQPVSLGVDAGYKHVGLSASTEKAELYASEVELRPDVSDLLSARRTLRQSRRNRKTRYRAPRFDNRIRTKRKGWLAPSVENRINAHLSRIGAILRLLPVTKITVETASFDTQLLKNPDISGKEYQEGEQLGFWNVREYVLFRDGHACQHCHGRSKDPVLNVHHLESRRTGGDSPGNLLTLCETCHKALHRREIKLKTKRGQSFRAEAFMGIMRWEVLNRLKASHPELEVHNTYGYRTKHTRIVNGIDKSHCADAFCIAGNLGAKRLGEFFFQKQTRRNNRQIHKLSILKGGIRKRNQAPFEVKGFRLFDKVACQGEEGFIFGRRSTGYFDVRKLDGTCISAGISYKKLHLLEKRRTYLTEIRKEEALPPPPEGRGLRA

SEQ ID NO: 4833 - protein, 568 aa, Branchiibius sp.
MSTLHTGARTHRRVLPQPAALESVPADNPGVGTKRGTDIPRTAQAGRRDTGVQHGRGETTGGAPVPGGVAAVPAGRKPSSTKQHSATQQNRTTRITSSPKQSRFTADNAVVFVLDRHKRPLMPTDCKRAKKLLARGRAVVHRKVPFTIRLKDRTVDQSMLEPLGLGIDPGSQHTGLSLDKTVEAVDESTGEVTTTRTGLWLGQLDHRGQHIHLRLVARAQRRRGRRGRNLRHRAARNRNRSVRVGWLPPSVQHRVDSTMTCVTRLQSLAPIASLRLERVSFDTHAMTAPGISGLEYQQGTLAGTEIREYLLAKFCHRCVYCDATGVGTGSVPLNIDHLLPRARGGTNRVSNLVLACVRCNQAKGARSVDAFVTDGVRRARIKAEAKTPLRDAAAMNACRNRLAAELDATGLPVEWASGGRTKWNRVRNGVPKDHSLDALCVGAVDVIVRWVPTVLHIQCVGRGRYQRVTTDRFGFPRSHRPRRKQHYGFITGDLVKAVIPTGPKAGVYRGRVIVRSTRTFRLVTPTHRYDGINCRYMTTMQRGDGYSYKARPSLQRRLAPHGDQTKAA

SEQ ID NO: 4834 - protein, 509 aa, unidentified
  REGION 1..509: note = Human gut metagenome
VYVLNKDGKPLMPTTRCGHVRYLLKEKKARVVKTKPFTIQLLYKTNDVVQPLYLGIDPGRTNIGVAVVKADGTAVFTAHLETRNKKIPKLMKKRKDSRRARRTNGRRCRRQRRAKANGTISKKCVKQATAQNGSASKRAKKIGVIKRHLPGCEKEVLCIGIKNKEAKFNNRTRPAGWLTPTANQLLQTHINLIKKIQKLLPISDVVLEINKFAFMQLDNPDIQKWQYQQGPLYQKANLEEAVSEMQEHHCLFCKKKIDHYHHVVPQHKNGSNTIDNIVGLCTKHHDLVHKDTAWHEKLTKKKTGLNKKYGALSVLNQIIPALTKELSSIFPKHFFVTTGKSTYDYRAAHGVSKDHWLDAYCIACSVLPNDVCDSSINNRVPYELKQFRRHDRRALHKENMSRVYTLNGKKVATNRHKATEQTADSLEEFRQNHPDDVCKLKVKEHHSEYRNPKRNFPGYVFLVGKRTHVMQGTSGSHNGKADGYYDTNGNSYSSGKCKFVAKNEGIIFA

SEQ ID NO: 4835 - protein, 442 aa, unidentified; identical to SEQ ID NO: 3037
  REGION 1..442: note = Human gut metagenome

SEQ ID NO: 4836 - protein, 422 aa, unidentified
  REGION 1..422: note = Human oral metagenome
MLVYVISKDGQPLMPISRCGKVRRLLKSKRAKVIKRCPFTIKLLFEPENDFVGECYCGVDTGSKHIGIAVVSNNRVLYQSQIELRDDIKRKMEQRRMFRRNRRSRKTRYRKTRFLNRANSTKKDRLQPSVKHKIQAHIDEIEFCKRILPISNLILEVSQFDTTLMKNSALISEKVKHWGYQKGFNYNYSSRREAILHRDKYTCQCCGKKNCRLEVHHIKFRRDGGTDDEENLITLCEDCHKGVHAGTVVLNKKPKKSKNLKHATHMSIIRSRLLKEYPDAIETFGFVTSENRNHLNLPKDHYIDACVIASGGLPFELSDVLYQKRRVSKQDRQLCQGMRGERKIPTWKILGFKKFDLVEYMGELCFVKGRRSSGSFVLMDINSRLIDFRDKGGKQNPSYKSLKRVSARRSILCISKKNREIR

SEQ ID NO: 4837 - protein, 504 aa, unidentified; identical to SEQ ID NO: 3854
  REGION 1..504: note = Human gut metagenome

SEQ ID NO: 4838 - protein, 243 aa, unidentified
  REGION 1..243: note = Human gut metagenome
LTHQFKKGVPVMVYVLDKNGQPLMPTDRHRKVRLMLQSGQAKVIKRCPFTIQLNYDSGHQTQEISLGIDAGSKHIGVSTTTKIKVLYEADVELRNDIVDLLSSRRELRRGRRNRKTRYRQAKFNNRRRGNGWLAPSIRQKIGTHLTVVENICKMLPISRIMVETASFDIQKIKNTDIQGAEYQQGDQLGFWNVREYVLFRDGHTCQCCKGKSKDKILNVHHIESRKTGGNAPNNLITLCETCH

SEQ ID NO: 4839 - protein, 493 aa, unidentified
  REGION 1..493: note = Human gut metagenome
MAAVYVISASGKPLMPTTRCGHVRGLLNEGKARVVEREPFTIQLKYETPDVTQPLYLGIDPGRTNVGAAVVREDGECVFTAQLTTRNKDVPKLMKARKQFRMAHRRLKRRCKRQRRAKAAGTLSQKGEFQRLLPGYEKPILCKGIRNKEARFNNRQRPVGWLTPTANHLLLTHLNMVKKLQKLLPITDVVLEVNRFAFMAMENPSIRRWQYQQGPLYGKGSVEDAVYAQQDGHCLFCGKPIAHYHHVVPQHKNGSETLENRVGLCNEHHDLVHKDRAWDAKMKETKAGLNKKYHALSVLNQIIPALTEQLTAMFPQHAFVTTGKDTADFREDYGIAKEHHLDAYCIACSVLAEPTKVAAPTGKPHRLMQFRRHDRQVCHKENIKRVYLSEGKAVATNRHKAIEQKDDSLEEFRKTHTQQEVSALTVKDHQPVYKDMRRFMPGGVFLFNGKVHTLQRSHGRYKGMPFYYIDTDGSKNHAKGCIFLQQNCGLRWV

SEQ ID NO: 4840 - protein, 443 aa, Anoxybacillus sp.
  REGION 196..229: note = misc_feature - Xaa can be any naturally occurring amino acid
MVEENMTCFMQRKGENPMVFVLDTNKRPLAPCHEAVARKLLKQGKAAIYKRYPFTIILKEIVDNFRPKTPYRLKIDHGSKHTGLAILRGQEVVWLGQLDHRTDIKERMDKRRAFRRARRNRKTRYRKPRFLNRRRKDGWLPPSLESRVQNIQTWVNHLKKLCPIGYISYENTKFDTQLMRNPEINGVEYQQGTLQXXXXXXXXXXXXXXXXXXXXXXXXXXXXXXXXXXSRGGTDRVDNLCLACHDCNQRKGSKTAEEFGYPHIQKQVKESLKDASAVNSTRWKVYEVLKQSGCEVECGTGARTKMNRIRLDLPKTHYFDACCVGESTPNHLYFKTKEVLFIRAKGRGSRSRTNLDRYGFPRGYLARQKFFFGFQTGDMVKAVIPRGKYQGVWFGEVSCRKTGSFDIKGKDGKRIAQGINYRYVQVIQRFDGYTYRREGMNIA

SEQ ID NO: 4841 - protein, 420 aa, unidentified
  REGION 1..420: note = Human gut metagenome
MQYVYVLNKHDEPLMPCSPRKARLLLKQKKAHVVKRTPFTIKLLYGSAGYKQPITLGVDAGSKHVGLSASTEKRELYCEEFTPRNDVVDLLSTRKQNRRSRRNRKTRYRAPRFDNRVHSKRKGWLAPSVEVKIQEHITVIKRIRRILPITLVRVETAEFDTQRLKAMLEGKPLPVGTDYQLGEMYDGYNVRQYVLKRDHYTCQCCGAHTTTKKTVKLHVHHLESRKVGGNAPSNLITLCTTCHDALHKGKVSLDGKERGKPLRDAAFMGIMRKTLMARLRDELSIPVQGTYGYITKMRREQNDIKKSHVNDARCISKHPLAEPCSVCYRTKAIRHHNRQTHKANFSKGGTRQRSQMPYVVEGYRLWDKVLYKGQECFVSGRRASGSFTLKKLDGTRISKGVTFKKLRLLEPATNYLIERM

SEQ ID NO: 4842 - protein, 424 aa, unidentified
  REGION 1..424: note = Human gut metagenome
MRVFVFNMRGRPLMPCSQRKARLLLRENKAKIYKYHPFTIQLTYTTGETKQDCHIGIDTGSKYIGAAVRSEDKVFWKGEIELRQDIRSNLDTKRIYRRSRRNRKTRYRKPRFLNRKRRDEWLPPSLQSRINHTFHWIDTLSSLVPNPILHIEVGKFDVAKMINPEIHGVDYQHGQTYGFFDERYFVFARDNYTCQCCGKSKNKILNTHHIIYRSNGGTNRVDNLITVCTDCHTSQNHRKGGIFYQWQEQHKKVKQYKEPPFMNTLRKRIFVAYPDAEITYGSETTPKRKAMKLDKTHYNDAIVISGINEIKENPEEWLLIKQFRKKKRSLHEATARKGRKKPNRNQTRNSKNTPYYKGFYLNDKVSVFGKSGYITGFTSNAAYIKDENNDYITLPNKTYKQVSINKMKLECHNNNWQYIITNAV

SEQ ID NO: 4843 - protein, 442 aa, unidentified
  REGION 1..442: note = Human gut metagenome
MVTVQQSTHHLPFGRVFIRRNLFMVYVISQDSKPLMPCSNPIARLLLKQGKAKVKRREPFTIKLIYETTDYTQDLTLGVDTGSGTIGAAVSKDNGDIVYMSEVVVRNDITDKMTQRAKYRRNRRNRKTRYRKARWLNRSNSIKKDRFSPTMQSKLHSHVKEIEYIQSILPITEMVFETGQFDMHLMKNPSLANPKVRPWGYQKGTNYGFENTKAMVLNRDNYTCQCCKGKHKDSKLEVHHIVFRSQGGSDEESNLITLCHTCHKDLHSGKINLKLSGKVKGNLKYATQMNSIRKQLFRLYPNAIETFGYVTKANRLHLGVDKEHYYDACTIATQGNAFNVKSDLYKKKCVSDGDFQKTKGIRSEQPIVTDKICGFRKFDKVRYFGKDYFIKGRMSTGYAILMDIDGNKIDFSTMPRGYKTPKLSNCKRITARSTVMTQVKVV

SEQ ID NO: 4844 - protein, 424 aa, Enterococcus sp.
MRVFVRNMRGKPLMPCSNRKARLLLKEGKAKIYQYNPFTIQLCYATGEYMQECHIGIDTGSEHIGIAVTSEEKVLFKGEVELRQDVKSNLDTRRSYRRDRRNRKTRYRKARFLNRKKKESWLPPSIENRVNHTFKWINKLIALLPNPKLHIEVGKFDVAKMINPDIQGVDYQHGQTYGFYDMRYFVFARDNYTCQCCGKSKGKILQTHHIIYRSNGGSNRADNLITVCTDCHTYENHQKGGILYQWQEKHKKTKQYKEPSFMNVLRKRIFKKYPNAVITYGSETTPKRKELGLEKMHYNDAIIISGISTIKENPNEWLLIKQFRKKKRSLHEATARKGRKEPNRLQKRNAKNKPYYKGFYLNDKVEVFGRIGYITGFTSGGAYIKNAENEYIILPNKSYKQVGISNIKLLHHNNNWQYVNKRIS

SEQ ID NO: 4845 - protein, 452 aa, Ktedonobacter sp.
VLYVKPFANIDEAHITLQDRRLNLSNVFVIDSDYKPLNPVHPARARLLLTQGNAAVYRRYPFTIVLKRVVDQPEVQPLRLKLDPGSKTTGIALVNDTNGKVVFAAELEHRGHAIKDSLDSRRGVRRRRRNRKTRYRKPRFQNRRRKKGWLPPSLESRLANILTWVARLCRSAPITALSQELVKFDLQLMENPDITGVEYQQGTLQGYEVREYVLEKWKRTCAYCGKQDVPLQIEHIHPRANGGTHRISNLTLACEPCNIAKGTQDIAVFLAKKPDVLKRILAQVKKPLKDASAVNATRFALLERLKAFGLPVECGSGGLTKYNRTTRGLAKTHWLDATCVGKSTPSAISHKGVVPLLLTANGHGRRQMCVPDKYGFPEKHKQRRKTFLGYRTGDMVKAITSKGTFEGRIAIRHRPSFRLGKVDIHPKYMHCIHRADGYEYTQKGVRNAPPHV

SEQ ID NO: 4846 - protein, 533 aa, unidentified
  REGION 1..533: note = Human gut metagenome
MSTVYVLNKDGKPLMPTTRGGHVRHLLKEQKARVVQSNPFTIQLLYETNDAVQPLYLGIDPGRTNIGVAVVKADGTAVFTAHLKSRNKEIPKLMQDRKRARRARRTNGRRHRRQRRAKANGTISKKCVKQTTTQNGSVSKRAKEIGIIKRHLPGCEKDVLCIGIKNKETKYTNRERPEGWLTPTANQLLQTHVNLVKKVQKLLPISDVVLEVNKFAFMRLDNPDIQKWQYQQGPLYKKESLESAVSEMQEHHCLFCKKPIDHYHHVVPKSENGSNTIANIVGLCAEHHNLVHKDVAWQEKLAEEKTGLNKKYGALSVLNQISPALTNKLSVLFPKHFFVTAGKSTHDYRAAHGVSKDHWLDAYCIACSVLPSNVCDSNINNHVPYELKQFRRHDRRVLHKANMSRVYTLNGKAVATNRHKAIKQTTDSLEEFRQNYPDDVYKLKVKEHHPAYRNLNRNYPGSVFLVGKQAHVMQGIASSKDGKTTKYNDTNATTITAGKCKFVAKNSGILFVQCKFRKALSDGTTKKLQYPVR

SEQ ID NO: 4847 - protein, 442 aa, unidentified; identical to SEQ ID NO: 2903
  REGION 1..442: note = Human gut metagenome

SEQ ID NO: 4848 - protein, 438 aa, unidentified
  REGION 1..438: note = metagenome
LTTGKYITSAQPWQEEKFSERKVSEMTSYAFVLDADGKQLAPTKEQKAWFLIRKKRAALVSKYPMVIQLNKEIPDEEICKDEIRCGIDDGGLHVGIALVQKCQTQNKVVFKGTIEQRNDVKHLMDIRRGYRRYHRYHKRYRQARFNNRSSSKQKGRIAPSILQKRQATVRVINQLNKWINITDYWLEDVAIDIRAMTDGYKSYKWEYQKSNRLDENIRKAVILRDGCKCMECGKSNCKLEVHHIKPRRLKGSNTLGNLITLCTKCHQKTKGVEELYMDRYFALLNSSDDKNLNYAQHVMIGKKWLREQLSSLGILHLTNGGDTANKRIDWDITKSHSNDAICITNLRPNKCEIKEWTIKPMRRQSKAKTDNVLGIKHRDFVEYTFRNSETHRGYVTALYPEQNALNFQSPTKHCKKVNARKCKVIWKYSKIYWLDNVS

SEQ ID NO: 4849 - protein, 431 aa, unidentified
  REGION 1..431: note = Human gut metagenome
MPNKVYVINKHGRPLMPCSPAKARHLLDAGKAKVKKRTPFTIQLVYGSSGYTQEVILGVDAGSKTIGMSASTTKEELLSAEVKPRNDVVDLLSTRREFRRARRNRKIRYRKPRFDNRVRSKHKGWLAPSVEVKIQEHITSIKRVCRILPVSKVVIETAEFDLQLLKAIEEGKPVPQGEDYQQGEMYGHYNVRQYVLWRDDYTCQCCGAHATKKKEVRLHVHHLESRKVGGDAPDNQVTLCESCHKKLHKGLIEAKNFKKRKRRPTRDATFMGIMRATLLQRLRSELPIPVIETRGYITKATREKLLVLPKSHTNDALAITQGKHGFNVGYLPGIVQSDKTYTIRPVRHHNRQLHKATILTGGIRKANQAEKYVCGFRLYDKVLYNGIECFVWGRRTSGSFLLRALDGTKVKDGAGHRILTLLERSSNYLIA

SEQ ID NO: 4850 - protein, 471 aa, Caldicellulosiruptor sp.; identical to SEQ ID NO: 3268

SEQ ID NO: 4851 - protein, 419 aa, unidentified; identical to SEQ ID NO: 2286
  REGION 1..419: note = Rock porewater metagenome

SEQ ID NO: 4852 - protein, 443 aa, Oligella sp.
MAVFVLGKNKRPLMPCSEKRARLLLERGRARVHRLVPFTIRLVDRTVADCVLQPLELKIDPGSKTSGLALVRTRQSVNAQSGEITATAHVLNLFELIHRGFQISQALTARSQMRRRRRSANLRYRAPRSLNRTRPTGWLAPSLQHRVDTIQSWVQRIRRYAPVTHLAQELVRFDMQQLENPEITGVEYQQGELAGYEVREYLLEKWQRQCAYCDATDVSLQIEHIHPKARGGSNRISNLTLACAPCNVKKAAQHITEFLAKDPKRLAKIQAQAKRPLRHAAAVNATRWALLNTLNATGLPVNTGSGGLTKFNRTRLQIPKTHALDAVCVGSVDHVKQWQKPTLVIKATGRGSYQRTRLNRFGFPRGYLTRQKQIHGFQTGDRVKAVVTQGKKIGTYVGRVAVRASGSFNIQTAQRLIQGISHRYCTLIQRGDGYGYSLRTDSN

SEQ ID NO: 4853 - protein, 477 aa, unidentified
  REGION 1..477: note = Human gut metagenome
MIIALDKYKRPLGFLTERRCRILMERKRAVLYRVFPTVVILMDVDARTIPGLPSFRIKIDPGSKYTGIAIIRNDTDEFVYAMQIEHRGDAVRAALNKRKNARRNRRSRETGYRRAKWGNRCLSEKDKRSYDSSREDGWLPPSIRSAADNVISWVRRLGRWINLTECSFEAVRFDTQLMEDPDIEGEEYQHGTLFGLEIKEYLMEKFGHTCQYCGGKSGDPVLEWEHMRPKSRGGSDRVKNALLSCSSCNKDKGNRTPEEWLELIKARLPREKGKRKELDEERVELIQKVIDGKPQGGALRYAAWVSSSRRYLEKALFGIFGDVECSSGGRTKYNRTELGYPKEHHYDALCVGTVPEKGYHDRTNGYYLYAKAAGRGTRLRGHLNKCGVIATKWTDRKKGFFGFQTGDIVVAEVPHKTPKPYKYEGRFVGRVMVRATGSFDIKTTDGKLVTVKEQYCRLLQANSGYHYTMKRAIPLGH

SEQ ID NO: 4854 - protein, 461 aa, Moorena sp.; identical to SEQ ID NO: 2860

SEQ ID NO: 4855 - protein, 420 aa, unidentified
  REGION 1..420: note = Human gut metagenome
MQYVYVLNKHGEPLMPCSPRKARLLLKQKKACVVKRTPFTIKLLYGSTGYKQPITLGVDAGSKHIGISAATEKNELYCEEATPRNDVVDLLSARRAFRRSRRNRKTRYRAPRFNNRVHSKHKGWLAPSVEVKIQEHITLIKRVCRILPVTFVRVETAEFDTQRLKAMLEGKPLPVGTDYQLGEMYDEYNVRQYVLKRDNYTCQCCGAHPTKTKAVKLHVHHIETRRTGGNAPNNLITLCTACHKALHAGKVTLDGKKRGRSLKDAAFMGVMRKTLMERLLKELKIPVQRTYGYITKYLREKHSIPKSHTNDARCISKNPLAIPCDTCYYTKAIRHHNRQLHKATILKGGIRKANQAPYTVKGYRLWDKVSYNGSECLITGRRTSGYFALKKLDGTVVSNSASYKKMRLLEVATNYITERR

SEQ ID NO: 4856 - protein, 511 aa, Acrocarpospora sp.
MATFRAGRKTDRAVLPQQLALEFESVDNPGIGDETGLGRRVTASGAGHGRGETIGGSPATGGVTPEPARAGERPRERHPFVFVLDKRGIPLQPTTPARARRLLKVGRAVVARHTPFVIRLKDRMIADSQVDGVELGVDPGSKHTGIAVFTVQAGERRGRYAVQLDHRGAQIRKKLEQRAAYRRGRRTRNLRYRAPRFLNRTRPKGWLAPSLRHRVDTTVSWVDRLTRWAPVTAVHVERVAFDTHAITAGRPMEGAEYQHGTLHGVEVREYLLAKFGRACLYCGITGVPLNIDHVHPRSKGGSDRVSNLVLACIPCNQAKGNRPVEEFAPKRAVEILRRAKTPLRDAAAVNATRWVLWRALDASWPTHSASGGRTKWNRIRCGLSKTHTLDALAVGKLGTVTELVAVVLVAGCAGRGAYTRTRTDRHGFPRLRMPRAKRLFGYATGDLVRAVVPGGKKAGTYTGRVAVRRTGSFNITTARGVVQGIHHRHLRLLQRADGYAYTTRGESDASR

SEQ ID NO: 4857 - protein, 414 aa, unidentified
  REGION 1..414: note = Human gut metagenome
MPCSPAKARLLLKEKKAIVKRRTPFTIQLTIATGEAKQPVSLGIDAGYKHVGLSASTEKAELYASEVELRQDITDLLSARRALRQSRRNRKTRYRAPRFDNRIRTKRKGWLAPSVENRINAHLSRIEAVLRLLPVTKITVETASFDMQLLKNPDISGKEYQEGEQLGFWNIREYVLCRDGHVCQHCYGRSKDPVLNVHHLESRRTGGDSPGNLITLCETCHKALHRGEITLKAKRGQSFRAEAFMGIMRWEVLDRLKASHPKLEVQNTYGYRTKHARIANGIAKSHCADAFCIAGNLGAERLGEFFFQKQTRRNNRQIHKLSILKGGIRKRNQAPFEVKGFRLFDKVACQGEEGFIFGRRSSGFFDVRKVDGSRISAGISYKKLHLLEKRRTYLTEIRKEEALPPLPEGRGLRA

SEQ ID NO: 4858 - protein, 413 aa, unidentified
  REGION 1..413: note = Human gut metagenome
MTSYAFVLDANGKQLAPTKEQKAWFFIRKKRASLVSKYPIVIQLMKEIPEKEICQDEIRCGIDDGGLHVGIALVQKCKTKNKVVFKGTMEQRNDVKHLMEVRRGYRRYHRYHKRYRQARFDNRKSSKREGRIAPSILQKRQATIRVIHWLNKWINITNYWLEDVSVDIRALTDGYQSYRWQYQKSNRLDENIRKAAILRDGGKCMECGKSNCRLEVHHIKPKRRNGSDTLDNLITLCESCHQKTEGQEELYMDRYFSLLKSSDNKNLNYAQHVMIGKMWLRKQLSGLGVLYLTSGGDTANKRIDWNIEKSHANDAVCITDLRPDTCDVKEWTMKPMRRQSKAKTDHVLGIHHRDLVEYTFKNGETHRGYVTALYPEQKAINFQSPTKHCKKVNARKCKLLWNYSKIYWFENAS

SEQ ID NO: 4859 - protein, 337 aa, unidentified
  REGION 1..337: note = Human gut metagenome
RNDVVKLLSKRKQYRRSRRNRKTRYRAPRFNNRVHSKHKGWLAPSVEVKIQEHITVIKRICRILPISLVRVETAEFDTQRLKAMLEGKSLPVGTDYQLGEMYDEYNVRQYVLKRDNYTCQCCGAHTTKKKTVKLHVHHLEGRQVGGNAPNNLITLCVDCHKALHAGKVKLDGKKRGKSFKDAAFMGIMRKTLMARLRDELPIPVQGTYGYITKMRREQNDIKKSHVNDARCISKHPLAEPCSVCYRTKAIRHHNRQTHKANFSKGGTRQRSQMPYVVEGYRLWDKVLYKGQECFVSGRRASGSFTLKKLDGTRISKGVTFKKLRLLEPATNYLIERM

SEQ ID NO: 4860 - protein, 451 aa, unidentified
  REGION 1..451: note = Human gut metagenome
MSVAVISKTGERLMPTSEYRARKLLKSGKAVKHSYHPFTIQLTERKTGDVQPIELCMDTGYIHIGISVKSEKHEYLAEQIDTLTDERIRHDACRMYRRQRRGRKRYRKPRFNNRKRDKGWIAPSLKHKKDIHVQAISRINKVMPLTDITMEMGNFDTQVLKAKEAGKPLPQGACYQHGERYGTATLREAVFSRDGYKCQCCGRTIRDGAMLHVHHVKYRSQGGTNSMANLATVCDKCHTPKNHKPGGKLYNWKPKLPDFKGATFMTTIRWQLYNEVKSLFPDINVHITYGAATKEQRRELNIDKSHVNDAFAMGKFHPKHRANAVLYKKKRRNNRCLEKFYDAKYIDSRDGSKKTGQELFNGRINRNHKKDSENLHQYRLQKIKAGKRTIRKQHYSIQPHDIIMYKNRKRETSGCHCNGTRVVLLPDKKTAAIQKVKIYKYAGGYFKSAFN

SEQ ID NO: 4861 - protein, 424 aa, unidentified
  REGION 1..424: note = Human gut metagenome
MRVFVFNMRGRPLMPCSQRKARLLLRENKAMIYKYHPFTIQLTYTTGETKQDCHIGIDTGSKYIGAAVRSEDKVFWKGEIELRQDIRSNLDTKRIYRRSRRNRKTRYRKPRFLNRKRRDEWLPPSLQSRINHTFHWIDTLSSLVPNPILHIEVGKFDVAKMINPEIHGVDYQHGQTYGFFDERYFVFARDNYTCQCCGKSKNKILNTHHIIYRSNDGTNRVDNLITVCTACHTSQNHRKGGIFYQWQEQHKKVKQYKEPPFMNTLRKRIFVAYPDAEITYGSETTPKRKAMKLDKTHYNDAIVISGINEIKENPEEWLLIKQFRKKKRSLHEATARKGRKKPNRNQTRNSKNTPYYKGFYLNDKVSVFGKSGYITGFTSNAAYIKDENNDYITLPNKTYKQVSINKMKLECHNNNWQYIIKNAV

SEQ ID NO: 4862 - protein, 456 aa, Halomonas sp.; identical to SEQ ID NO: 4333

SEQ ID NO: 4863 - protein, 413 aa, unidentified
  REGION 1..413: note = Human gut metagenome
MVYVLNVNGQPLMPTENHAKVRVLLKQGKAKVVNNCPFTIQLLYSSTSYIQPVTLGVDAGSKHIGLSATTEDKELYAADVELRNDIVKLLAARRASRCSRRNRKTRYRKPRFNNRKRDKGWLAPSIREKIGTHLKVVDDTCKLLPVSKIIVETASFDIQKIKNPDVKGTDYQQGEQLGFWNVREYVLFRDGHKCQCCKGKSKDKILNVHHIESRQTGGNAPNNLITLCETCHTGYHKGTVKLPAKIKRGMKFKDAAFMGIMRWAFYGELKKRYPDVSLTYGYITKNTRIKNGLPKEHYVDARCISGHPSARPLGTVFYIKKVRCHNRQIHKFKILKKGVRKRNQAEHEVYGFRLYDKVSWKGQICFIFGRRSTGRMDLRLLDGTHINASVGYKNIKLLRMRNNYLIEVRNAIG

SEQ ID NO: 4864 - protein, 456 aa, Halomonas sp.; identical to SEQ ID NO: 3676

SEQ ID NO: 4865 - protein, 411 aa, unidentified
  REGION 1..411: note = Human gut metagenome
MVYVQDIDGKPMMPTTRHGKVRRLLKENKAVVVNTCPFTIKLTYKTSDYKQEIVLGVDSGTKHVGLSATTKSKELYASEVILRSDVVDLLSTRRGLRRTRRSRLRYRKQRFNNRVKSKKDGWIAPSVRHKIDSHVRIISFVYSILPVSKLIVEVAQFDTQKIKNPEISGKEYQEGEQLGFWNVREYVLARDGHKCQHCKGKSKDPILNIHHIESRKIGGDSPSNLITLCETCHKEFHKGNIKLKVSRGKSLRDAAVMGIMKWKLYEELKSRYDNVSMTFGYITKYNRINHGIEKSHVSDAFVISRNFNSCRLGYYYKRKLVRRHNRQIHKMKILKGGIRKRNQAPFKVFGFRLFDKVMFQGEEHFIYARRLSGQFNIRDINGENKKDVSCKKLKYVSHGLVSVKTNLFLSQ

SEQ ID NO: 4866 - protein, 406 aa, unidentified
  REGION 1..406: note = Human gut metagenome
MVYIKDIDGRPLMPTKRHGKVRWLLKENKAVVINLCPFTIQLTYKSTDHKQPVTLGIDAGAKHIGFSATAEKEELFACETTLRTDIVDLLSTRLQNRRTRRSRLRYRKPRFNNRGSSKKKGWVAPSVKQRIDSNLNEVNEIHKILPITKIVIEVAQFDTQKMKNHDISGSDYQNGEQLGFWNVREYVLFRDGHKCSHCKGKSKDPVLNVHHLESRKTGGDSPSNLVTLCESCHKAFHKGEIELKKKRGKSLRDAAVMGIMKWKLYEELKSRYDNVSMTFGYITKYNRIKYGIEKSHTSDAFVISRNFNAKRIERQYLKRLVRRHNRQIHKMKILKGGKKKNNQAPFGVFRFRLFDKVLYNNEICFIYGRRKSGNFNIRDFNGENPKDVSYKKLKLIRGKMHPIILK

SEQ ID NO: 4867 - protein, 429 aa, Ktedonobacter sp.; identical to SEQ ID NO: 4063

SEQ ID NO: 4868 - protein, 414 aa, unidentified
  REGION 1..414: note = Human gut metagenome
MPCSPAKARLLLKEKKAIVKRRTPFTIQLTIATGETKQPVSLGVDAGYKHVGLSASTEKAELYASEVELRQDITDLLSARRALRQSRRNRKTRYRAPRFDNRIRTKRKGWLAPSVENRINAHLSRIEAVLRLLPVTKITVETASFDLQLLKNPDISGKEYQEGEQLGFWNIREYVLCRDGHVCQHCYGRSKDPVLNVHHLESRRTGGDSPGNLITLCETCHKALHRGEITLKAKRGQSFRAEAFMGIMRWEVHNRLRALHPGIEVSNTYGYRTKHARIANGIAKSHCADAFCIAGNLGAERLCEFFFQKQTRRNNRQIHKLSILKGGIRKRNQAPFEVKGFRLFDKVACQGEEGFIFGRRSSGFFDVRKLDGTRISAGISCKKLHLLEKRRTYLTEIRKEEALPPLPEGRGLRA

SEQ ID NO: 4869 - protein, 413 aa, unidentified; identical to SEQ ID NO: 2605
  REGION 1..413: note = Human gut metagenome

SEQ ID NO: 4870 - protein, 406 aa, Geobacillus sp.; identical to SEQ ID NO: 3747

SEQ ID NO: 4871 - protein, 424 aa, unidentified
  REGION 1..424: note = Human gut metagenome
MRVFVFNMRGRPLMPCSQRKARLLLRENKAMIYKYHPFTIQLTYTTGETKQDCHIGIDTGSKYIGAAVRSEDKVFWKGEIELRQDIRSNLDTKRIYRRSRRNRKTRYRKPRFLNRKRRDEWLPPSLQSRINHTFHWIDTLSSLVPNPILHIEVGKFDVAKMINPEIHGVDYQHGQTYGFFDERYFVFARDNYTCQCCGKSKNKILNTHHIIYRSNGGTNRVDNLITVCTDCHTSQNHRKGGIFYQWQEQHKKVKQYKEPPFMNTLRKRIFVAYPDAEITYESETTPKRKAMKLDKTHYNDAIVISGINEIKENPEEWLLIKQFRKKKRSLHEATARKGRKKPNRNQTRNSKNTPYYKGFYLNDKVSVFGKSGYITGFTSNAAYIKDENNDYITLPNKTYKQVSINKMKLECHNNNWQYIIKNAV

SEQ ID NO: 4872 - protein, 471 aa, Acidithiobacillus sp.
MAVFVLDKRKKPLMPCSEKRARILLERGRARVHRMVPFTIRLVDRLQDDSVLQPVRVAAAPGSKTTGLALVRDAETVDAITGKVTRTVVVLMLLELQHRGHAIRDALTQRRAFRRRRRGKLRYRPARFDNRTKPAGWLAPSLRHRVDAAIAWIARLRRLAPVSALSTMLHRFDTQLLQNPEISGIEYQQGELQGYEVREYLLEKWGRKCVYCDAEHTPLTIDHIHPKSAGGSDRVSNLTLACFPCNQRKSNQDVRAFLAHDQKRLARIESQRKAPLRDAAAVNSSRWALLQRLEETGLDVEVGSGGGTKWNRKRFSVPKAHCLDAACTGHVDAIQDRQQPVLSIKATGRGRYKRTQLTKYGFPRGYVTRQKRHFGFQTGDMVRAVVTRGKKAGTYVGRVVIRASGSFSINAASGLVSGIHHRFFSLIQRADGYGYSLTKIASTQGDAGRGRSVAAALSLPGMNARVSRANG

SEQ ID NO: 4873 - protein, 492 aa, unidentified
  REGION 1..492: note = Human gut metagenome
GHVRILLKQKKARVVSLKPFTIQLLYDCEEGTQPIVLGIDPGRTNIGLSAVRKDTGEAVFTAQMETRNKEIPKLMKDRRAFRRKHRSYGRRKVRQRRASAHDTNSPKCAKQKTAQNGGVSKQAQKVGVIKRHLPGCEEPVICIGIKNKEARFNNRLRPKGWLTPTANHLLQTHITVVNKVRRFLPITDVVLEVNKFAFMALDNPHVQKWMYQHGPLKGYGSVEEAVSVQQDGHCIFCKNEIANFHHIVPQSKRGSNTIGNVVGLCSEHHELVHKDSTWEQKLKTKKQGMNKKYGALSVLNQIIPRLCDTLTNMYVEHFYVTDGQSTKAFRNEHDIRKDHYLDAYCIACSVLSSSCRSNVPDEKDVFHIMQFRRHDRRACHQERVDRKYYLEGKLVATNRHKAIEQKNDSLEEYVAAGGCVDKLFAPKHPPLYRRKGRIMPGTVFLVGNKTKMMIASQGTHNGVPNYYRFTDGSRATPKNCKPIYQNTGIVFV

SEQ ID NO: 4874 - protein, 414 aa, unidentified; identical to SEQ ID NO: 2856
  REGION 1..414: note = Human gut metagenome

SEQ ID NO: 4875 - protein, 429 aa, Ktedonobacter sp.
VSNVFVIDSDYKPLNPVHPGHARRLLRQGKAAVFRRYPFTIVLKRVVEQPEIQPLHLKLDPGSKTTGIALVNDTNGKIVFAAELSHRGHAIKDSLDSRRASRQGRRQRKTRYRKPRFDNRRRKKGWLPPSLESRLANILTWVARLCRYAPIATLSQELVKFDMQLMENPDIAGVEYQQGTLQGYEVREYLLEKWERTCAYCGKQDVPLQVEHIHPRARSGTNRMSNLTLACEACNTAKGTQEIEVFLKKKPDVLKRLLAQVKKPLKDASAVNSTRCALLERLKAIGLPVECGSGGLTKFNRATRGLPKTHWLDAACVGKSTPDVLLQKGVIPLRIKATGHGRRQMCVPDKYGFPKQHKERKKTFLGYQTGDLVKAITPKGTFEGRIAIRHRPSFRLEKVDIHPKYMRCVQRSDGYEYTQKGVRHAPPHG

SEQ ID NO: 4876 - protein, 442 aa, unidentified; identical to SEQ ID NO: 2834
  REGION 1..442: note = Human gut metagenome

SEQ ID NO: 4877 - protein, 419 aa, unidentified
  REGION 1..419: note = Human gut metagenome
MVYVISQDGKPLMPCSDPIARLLLKQGKAKVKKREPFTIKLTYETTNHTQGLTLGVDTGSGTIGTAVSKDNGDIVYMSEVVVRNDITDKMTQRAKYRRNRRNRKTRYRKARWLNRASSIKKDRFSPTMQSKLHSHVREIEYIQSILPVTEMVFETGQFDMQLMKNPSLANPKVRPWGYQKGANYGFENTKAMVLNRDNYTCQCCKGKHKDSKLEVHHIVFRSQGGSDEESNLLTLCHTCHKDLHSGKINPKLSGKVKGNLKYATQMNSIRKQLFRFYPNAIETFGYVTKANRLHLGVDKEHYYDACTIATQGNAFNVKSNLYKKKCVSDGDFQKTKGIRSEQPIVTDKICGFRKFDKVRYFGNDYFIKGRMSTGYAILMDIDGNKIDFSTMPRGYKTPKLSNCKRITARSTVMTQVKVV

SEQ ID NO: 4878 - protein, 478 aa, Burkholderia sp.
VAVFVLDRYRRPLMPCSEKRARLLLARGRARVHRVMPFVIRLTDRERAACEFQPLRLKLDPGSKATGLALVLDRETLDSTTGELRRGAAVLNLFELVHRGRQISDALTARSAMRRSRRGKLRYRAPRFLNRTRTPGWLPPSLQHRVDTTMAWVRRVRRWAPIAALSCELVRFDMQLLDNPEVNGVGYQHGTLASYELREYLLEKWGRRCAYCDAKSTPLQLDHIVARSRGGSNRASNLTLACEPCNRAKSALPVDEFLAKRPKRLAGIVAQSKRPLKDAAAVNATRWALTSALKATGMSLELGSGGRTKFNRTALGVPKTHALDAACVGALSFLTGWKRRTLSISCTGRGSYQRTRLDRYGFRRGYMTRTKRVHGFQTGDLVRADVPAGRKAGTHIGRVAVRVTGSFNIQKFDTVVQGIAHRYCRLIQRSDGYGYATKQLSKEKMPAGPLAHSPGYLRNLDNESFSALGRGSNNGVAD

SEQ ID NO: 4879 - protein, 442 aa, unidentified; identical to SEQ ID NO: 3218
  REGION 1..442: note = Human gut metagenome

SEQ ID NO: 4880 - protein, 446 aa, Thermanaeromonas sp.
MIRKLKKRKRVRIIGGGKSGKPPVVIFLDREFDYSRTVGRKLVIVLDPGYRYIGFAVCEPRGGKLVVYCRGVLRTRIPEIKGLMSDRRSFRRFRRYLSRYKKKRLSARQCRVLTKFKVPRNVRSKDRSNATLRHGVETHLNLYRKLLRFFPFPAHQVEFVMEDNVFDVRAMTWGKVYGADYQRSPRAPEGERKCILCGSQEDLHRHHLVPRKSGGTEVRENKVYLCVGCHEEVHAGRVFLPVRGIKQWRELGTMNAVMGVLREVPSISFVPAPEVVLKRRELGLEKDHADDGLAAAAAFCGCTGFDASVERRLMLVKFRRHARARVHAQRDRLYKVDGVIIARNRRKRGDQKDPSFADVFPLSPEQQRGLKVYPGTKILNPFRNDVLTIGGDVWVHIPTGRRFVATGVISEKYLYSPMLEEITGKSYIHPDQCRRVIRNEGIVVWS

SEQ ID NO: 4881 - protein, 511 aa, unidentified
  REGION 1..511: note = Human gut metagenome
MSTVYVLNKDGKPLMPTTRGGHVRHLLKEQKARVVRAKPFTIQLLYETNDVVQPLYLGIDPGRTNIGVAVVKANGTAVFTAHLETRNKEIPKLMQDRKKARRARRTNGRRCRQRRAKANGTISKKCVKQTTAQNGSVSKRAKDIGVIKRRLPGCEKDVLCIGIKNKETKFTNRTRPEGWLTPTANQLLQTHINLVKKIQKFLPISDVVLEVNKFAFMRLDNPNIQKWQYQQGPLYKKESLESAVSEIQEHHCLFCKKPIDHYHHVVPQHKNGSNTIGNIVGLCAKHHDLVHKDSAWEKKLAKKSTGLYKKYGALGVLNQIIPTLTNELSSLFPKHSFVTNGKSTYDYRAAHGVSKDHWLDAYCIACSVLPSNVCDSNINNHMPYVLKQFRRHDRRVLNNENMNRVYTLNNKAVAINRHKAKDQKTVSLEEFRKEHPDDVCKLKVKEHHPTYRNMNRNFPGSVFLVGKQIHVMQGIASSKDGKATKYNDTSATAIAAGKCKFVAKNTGILFV

SEQ ID NO: 4882 - protein, 428 aa, Microcoleus sp.
  SITE 428: note = misc_feature - Xaa can be any naturally occurring amino acid
MCKVLLIDTEKRPLSPIYPAQARQLLRNKKAAVFRRFPFTLILKESRPDSPISPLRLKIDPGAKFTGIALVNDSTGEVVFAAELKHRGLAIRDSLTSRRQLRRSRRNRKTRYRPPRFLNRTRPLGWLAPSLQSRIGNIKAWVEKLRKFAPIAAISQELVRFDLQLMRNPDLQGKEYQQGTLAGYETREYLLEKWNRQCAYCGVKDVPLQIEHIYPRAKGGSNSITNLTLSCEKCNKKKGTKALKEFLKKDQSRLEKILKQAKRPLADAAAVNATRFALLYVLKETGLPVEIGSGGLTKFNRSQQNLEKSHWLDAACVGISTPILNIKGVKPLLICANGHGTRQSCRTDKFGFPIRHCSRTKFHFGFQTGDLVKAVVTRGKKVGEYVGRIVTRASGSFNISAKDGLVQGISHRYCSIIHKGWLFLCVIX

SEQ ID NO: 4883 - protein, 471 aa, Caldicellulosiruptor sp.; identical to SEQ ID NO: 3268

SEQ ID NO: 4884 - protein, 449 aa, unidentified
  REGION 1..449: note = Human gut metagenome
PTFRLGKVRRLLKDGKAKIVKHHPFTIQLLYDSKTNTQPIEICEDVGYNYIGISVKSQSHEYVSAQYDTLQDEKACHDSCRKLRRTRRNRLRYRKPRFDNRKRGEGWLVPSLKHKKELNVNVVKMYCAVMPITHATVEVGSFDTMLVKAIQEGKAIPEGADYQKGPRYNLATLREAVFYRDNYVCKVCGRKATEGAILHMHHMFYWKGRHGNSLDELLTVCEKCHTPANHQKSGKLYGFGENVKFADLSGAAFMNTVRWQIVNELYAAFGKDFVTVTYGAMTKEKRIALHLEKSHNNDAYAMGEFHPNCRCTFEHYEKVRRNNRILEKFYDSRYIDIRTGEIATGKELFNGRINRNHKKDSENLHKYRGKRLYKGHRALVRKKVNFNPGDLVSLNGEVLVVHGTHTNKKGAVNVEFKTPAKNGRKSANLKKLKIVKAAGSIHPAWEKVS

SEQ ID NO: 4885 - protein, 545 aa, Actinomadura sp.
VLLQRAALESGLADTPRIGNETGLRPPARLGGGTGAGHVRGETTGTSPGPGGVTPDLRGGERRREAHHVFVLDKDGAPLQPCHPARARRLLASGRAVVARHTPFVIRLKDRTAAASEVEGVEVGIDPGSRHTGIAVFTARKGERRGRYAIQLDHRGARIRKKLGQRAAYRRRRRSANLRYRAPRFLNRVRPDGWLAPSLKHRVDTTTSWVERLARWAPVEAVHVELAAFDTHALSAGRSLEGVEYQHGTLYGYQVREYLLEKWGRACAYCGAVNVPLTVDHIHPRSKGGADRVCNLALACVPCNQSKSDRPIELFLAHRPATVVRVLAQAKAPLRDAAAINSTRLGLRHALDRRFPGRVVVGSGGRTRWNRTRSGLPKSHTLDALCVGETGAVTAYPATVLVVACTGRGGHSRTRTDRYGFPRLRLPRSKTVRGFQTGDLVKAVVPGGKRAGTHLGRVAVRATGSFNITTRHGTVNGVGHRYARLLQRADGYGYTTRPEIAARVHGPDAGRQVPALKAGTSSLQCLAGDPIPPTPHGGGFLEGSP

SEQ ID NO: 4886 - protein, 442 aa, unidentified
  REGION 1..442: note = Human gut metagenome
MSTSVFVLDKRHRPLMPCRPARARRLLRAGRARVVKRFPFVIRLVDRTVEQSEVQPVLIKLDPGSRETGAAVVRDDEKKRHHALAFFVIKHRGGAIRDALKARSAFRRRRRSQNFRCRSPRFLNRVKPKGWFPPSLRHRVETTLSFVRRMCRYLPVSGIATELVKFDSQKLQNPEVSGVKYQQGTLFEYEVREYLLEKFGRKCVYCGAEGVPLNIDHVVPRAKGGSNRVSNLVLACVSCNQKKGARSLEDFLKGKPEVLARVRRELKTPLRDAAAVNATRWVLFNELKATGLPVETGSGALTKLNRHAFGVEKEHWLDALCVGRLNGVVTRKGLNVLEIRCMGRGSRQRTRLTKYGFPRGYLMRQKCVHGFATGDMVEANVPKGKKAGLWRGRVAVRVSGSFNIQTPKGVIQGVGWKHCRLISHNDGYGYAWLGHAPHSSPA

SEQ ID NO: 4887 - protein, 414 aa, unidentified
  REGION 1..414: note = Human gut metagenome
MVYVINKQGQALMPTERFGKVRRLLKNSLAHVVCRIPFTIQLDYDTTDYTQPVSLGIDAGSKHIGISATTSEKELYAADVELRNDIVDKLSTRRELRRTRRSRLRYRKARFNNRVSSKRKGWLAPSVENKIQTHLTVVEKIHKFLPITNIVVETASFDIQKINNPSISGSEYQQGEQLDFFNVREYVLFRDNHTCQHCKGKSKDKVLNVHHIESRKTGGDSPKNLITLCETCHKAYHRGEFKLNVKRGKSFRDAAFMGIMRWSFYDRLKNIYPNVSMTFGYITKNTRTTNNLPKEHYVDARCISGNPVAKPLGYYFYQKKVRCQNRQIHKANFLKGGRKKLNQAPFLVKGFRLFDLVEYQKELYYIFGRRSNGSFDIRKLDGTKVNKGSINCKHLRLISTRKSILIEKRTQVNL

SEQ ID NO: 4888 - protein, 471 aa, Caldicellulosiruptor sp.; identical to SEQ ID NO: 3375

SEQ ID NO: 4889 - protein, 465 aa, unidentified; identical to SEQ ID NO: 3909
  REGION 1..465: note = Human gut metagenome

SEQ ID NO: 4890 - protein, 415 aa, Bacillus pseudomycoides; identical to SEQ ID NO: 2431

SEQ ID NO: 4891 - protein, 471 aa, Caldicellulosiruptor sp.; identical to SEQ ID NO: 3375

SEQ ID NO: 4892 - protein, 424 aa, Clostridium sp.
MTYVYVLNNKGKPLMPCSPTKARKLLNQNKAKVKKRTPFTIQLLYNSKNYTQPIMLGIDAGSKTVGISASTNKQELFAAEMKPRNDIVDKLSTRRELRSSRRNRKTRYRPARFNNRKKSKPTGWIAPSIQVKIQEHVTAIKHVCSILPITKVIVETAEFDTQRLKALDNNTPLPIGTDYQLDEMYDWYNVRQYVLHRDGYKCRKCGKHKDIKFHVHHLESRKTGSNRPANLITLCEDCHEKLHKGLITLDKLKKPKSYRDAAFMCIMRKSLLARLQTELDAPVIETKGYITKFTRENILRLPKTHTNDALSISQGLLGFDRSVNPYTTRTDRTYTIKPVRHHNRQLHKANFKKGGKRPTNQAPKYVFGFQLFDKVKYNGQECFITGRRSRGYFMLKDIDNKTIATDSKYTKLKLLEKSTNYIIQ

SEQ ID NO: 4893 - protein, 419 aa, Geobacillus sp.; identical to SEQ ID NO: 2623

SEQ ID NO: 4894 - protein, 442 aa, unidentified; identical to SEQ ID NO: 3218
  REGION 1..442: note = Human gut metagenome

SEQ ID NO: 4895 - protein, 478 aa, Moorena sp.; identical to SEQ ID NO: 2316

SEQ ID NO: 4896 - protein, 452 aa, Moorena sp.; identical to SEQ ID NO: 3322

SEQ ID NO: 4897 - protein, 309 aa, unidentified
  REGION 1..309: note = Human gut metagenome
MVYVVANDGQPLMPTNRYGKVYRMLRSGMAVVVKKCPFTIQLQYESERNVQPVALGIDAGSKHVGVSATTKAKVLYESDVELRGDIVKLLATRRQLRRSRRSRKTRYRPARFDNRKRKNGWLAPSIRQKIESHLTVVANVCKILPVSRIIVETASFDIQKIKNPDIQGTEYQQGEQMDFWNVREYVFFRDGHTCQCCKGRSKDKILNVHHIESRKTGGNAPNNLITLCETCHKGYHNGIVTLPKNIKRGMKFKDAAFMGIMRWTFYNTLKEQYEPDIPVSMTYGYLTKNTRICHDLPKGHCIDARCISG

SEQ ID NO: 4898 - protein, 459 aa, Ammonifex sp.
MVFVLDRKGRPLMPCTEKRARKLLEQGRAVVVRLEPFVIRLKDRMAEEAFLQPLRLKIDPGYEVTGISAVRVAEEKEVVVFFAEVHHRTDIPEKLLSRRQVRRDRRSRNTRYRVPRFSNRRRPEGWLPPSAEARVNQVLSVVGKLLRWLPVTEIVVESARFDTQKLQNPEISGIEYQQGELQGYEVRKYLLEKFGRRCAYCGKEGVPLEVDHVVPKSRGGTDRVSNLALACRECNQAKGNKLLQEWLEELKKSGRAIDRKRAENIPRVLAQLKKSLKAAACMNVTRYVLVEKLKVLGLPVFTATAARTKYNRARFGLPKTHYFDACCVGEVPGRLEVTAEYVQVFRAVGRGTRQMANPDRHGFPRGHRSGRKLYFGFMTGDLVMAEVPAGKYAGRYIGYVAVRQSGYFDLKDLSGRRVCQGVSWRCFRLVQRFDGWRYEKFKIAALSSPGLKAGASSAA

SEQ ID NO: 4899 - protein, 471 aa, Caldicellulosiruptor sp.; identical to SEQ ID NO: 3268

SEQ ID NO: 4900 - protein, 315 aa, Methanosarcina sp.
MLVFVINKEGKPLMPCKPSRARKLLKEGKVKVIRREPFTIKLLYGSSNYVQTIIAGMDTGSKVIGVCAMSQGKVLYQSEVYLREDVSGKMQQRAMYRRTRRSRKTRYRPARWNNRANSRREGRLAPSLRSKLESHFREKKFVESILPVTKWRVELASFDIHKITNPNVFSFWYQKGEQEGFYNVKAYVLSRDNYTCQHCKGKSKDKHLHCHHIVFRSNRGTDTPENLITLCNTCHDALHEGKIKLSGRKSITKHATEIGIIKSQIKKSGWDFIETFGYETKFKREQILKLPKTHYFDAVSICYTNLKVKFDIYFI

SEQ ID NO: 4901 - protein, 531 aa, unidentified
  REGION 1..531: note = Human gut metagenome
MPMLWKLNRSRQDRISAGPELAVPGLQQKKRTMRYVYVLDMNGKPLMPTCRHGKVRRMLKSGQAKAVDTLPFTIQLLKPTKTRILQPVIAGQDPGRTNIGMAAVRSDGTELYRAHIETRNKEIVSLMNDRRSFRQASRRGERLARKRLAKKLHTTAKHLNGRILPGCKEPLAVKDIINTEARFNNRLRPEGWLTPTATQLLRTHLETFRKLSGILPVTEVVLEVNRFAFMQLDDPDMKKRDIDFCRGPLYGTGGVKAAVSLQQDGLCLLCREREIEHYHHIVPRSRRGSNTISNIAGLCGKCHERIHKDQAAAEKLQSKKDGLSKKYGGTSVLNQIIPSLTEELGIRYPGHAHVTNGWSTKEFREKHELEKDHDVDAYCIAASILEDAQPVMQTEPYEIKQFRRHSRALINHQTERTYRYDGKIIAKNRKKRMDQKTDSLEDWVADMTKQYGQGTASRMLSKVTVQKSTRHYNTKGRMMPGAVFIYRGKRFVMTGQLTGGAYYRAYRQDKKNFPAKAVQVVQKNKGLVYVA

SEQ ID NO: 4902 - protein, 406 aa, unidentified
  REGION 1..406: note = Human gut metagenome
MVYVQDIDGRPLMPTTRHGKVRRLLKSKKATVVNLCPFTIRLLYDTTGYKQEITLGVDTGTKHVGLSATTKSKELYASEVILRSDVVDLLSTRRELRKIRRYRLRYRKPRFMNRIKSKKRGWIAPSIRQKIDSHIRIIGFVYSILPVSKLIIEVAQFDTQKIKNPEISGKEYQEGEQLGFWNVREYVLARDEHKCQHCKGKSKDPILNIHHIESRKIGGDSPSNLITLCETCHKEFHKGNIKLKVNRGESLRDAAVMSIMKWELYDELKSLYPNVKMTFGYITKYNRINHGIEKSHVSDAFVISRNFDSERLGYYYKRKLVRRHNRQIHKMKAPKGGNKRMNQSPFKVFGFRLFDKVMFQGKERFIYARRLRGIFNIRDINGENKKDISYKKLEYVSHGLISIVAG

SEQ ID NO: 4903 - protein, 407 aa, unidentified
  REGION 1..407: note = Human gut metagenome
QPLMPTDRHRKVRLMLQSGQAKVIKRCPFTIQLTYNTGHQAQEISLGIDAGSKHIGVSATTKTRVLYEADVELRNDIVDLLSSRRELRRGRRNRKTRYRPARFDNRRREDGWLAPSIRQKIGTHLTVVENICKILPISRITVETASFDIQKIKNPDIQGAEYQQGDQLGFWNNREYVLFRDNHTCQCCKGKSKDKILNVHHIESRKTGGNAPNNLITLCEICHTGYHKGAVQLPKTVKRGMRFKDAAFMGIMRWAFYEALKQQYEPVGTPVHNTYGYITKHTRIEHNLPKEHYVDARCISGNPDAFPSGEYYYQKKVRCHNRQMHKLTILKGGIRKQNQATYLVKGYRLFDKVSYQRKEYFVFGRRKSGFFDIRTLSGKQVNKGSLSCKKLKFIATRMYYLIERRAV

SEQ ID NO: 4904 - protein, 406 aa, unidentified
  REGION 1..406: note = Human gut metagenome
MVYVQDINGKPMMSTTRHGKVRRLLKDKKAVVVNLCPFTIKLMYVTSDYKQEIVLGVDAGTKHVGLSATTKSKELYSSEVILRNDIVDLLSTRRELRRTRRNRLRYRKPRFDNRIKSRRPGWVAPSVKYKVDAHIRVVENVCSILPISRIVIEVAQFDTQKIKNPNISGKEYQEGDQLGFWNVREYVLARDGHKCQYCKGKSKDHVLNVHHIESRKTGGNSPSNLITLCETCHKEYHKGNIDLKIKRGSSLRDAAVMGIMKWRLYEELRSKYDRVSMTFGYVTKYNRINHDIEKSHVSDAFVISKNFNAIRLGYYYKVRLVRRHNRQIHKQKIPKGGIKRLNQSPFEVFGFRLFDRVMFENNCYFIFARRKTGSFNIRDINGKNKRDITYKKLKLSRCKRFMIEKS

SEQ ID NO: 4905 - protein, 434 aa, unidentified
  REGION 1..434: note = Human gut metagenome
VVLMDAWDIIVILNKRGKPLMPCSPAKARLLLKEKKAIVARRTPFTIQLTIATGEAKQPVSLGVDAGYKHVGLSASTEKAELYASEVELRPDVSDLLSARRTLRQSRRNRKTRYRAPRFDNRIRTKRKGWLAPSVENRINAHLSRIGAILRLLPVTKITVETASFDTQLLKNPDISGKEYQEGEQLGFWNVREYVLFRDGHACQHCHGRSKDPVLNVHHLESRRTGGDSPGNLLTLCETCHKALHRREIKLKTKRGQSFRAEAFMGIMRWEVLNRLKASHPELEVHNTYGYRTKHTRIVNGIDKSHCADAFCIAGNLGAKRLGEFFFQKQTRRNNRQIHKLSILKHGLRKRNQAPFEVKGFRLFDKVVCQGEEGFIFGRRSSGSFDVRKLDGTRISAGISYKKLRLLEKRRTYLKEIRKEETLPPLPEGRSLRA

SEQ ID NO: 4906 - protein, 396 aa, unidentified; identical to SEQ ID NO: 4508
  REGION 1..396: note = Human gut metagenome

SEQ ID NO: 4907 - protein, 441 aa, Moorena sp.
MSVSVFVLDRKHRPLMPCRPARARRLLKSGRARVVKRFPFTIRLVDRLIENSDVQPVLVKFDPGSRETGIAVVRADTKRRHHALFFIDLVHRGSVIRECLSARRAFGRRRRSNLRYRAPRFLNRTKPQGWPAPSLRHRVDAVAAWAAKLIRLVPATGLMEELVKFDAQKLQNPEISGAEYQQGTLFEYEVREYLLEKFGRKCVYCSAENVPLNIEHVVPKARGGSNRLSNLALARAACNQKKGAQPVEVFLKDRPEVLERLKQQCRRSLSDAAAVNATRWSLLNALKTFGLPVQTGSGALTKFNRSSLGIAKEHWLDALCAGRINAAHYPKSMGVLEVRCTGRGSYQRTRLTKHGFPRGFLMRQKRVHGFATGDMVKAIVPSGKKAGVYRGRVAVRASGSFNIQTPGGVIQGISWRHCQLLSYNDGYGYAWLRRAPHSSPV

SEQ ID NO: 4908 - protein, 292 aa, unidentified
  REGION 1..292: note = Human gut metagenome
LSRIEAVLRLLPVTKITVETASFDLQLLKNPDISGKEYQEGEQLDFWNIREYVLCRDGHVCQHCYGRSKDPVLNVHHLESRRTGGDSPGNLITLCETCHKALHRGEITLKAKRGQSFRAEAFMGIMRWEVLNRLKASHPELEVNNTYGYRTKHARIANDIAKSHCADAFCIAGNLGAERLGEFFFQKQTRRNNRQIHKLSILKSGIRKRNQAPFEVNGFRLFDKVACKGEEGFIFGRRSSGFFDVRKLDGTRISAGISYKKLHLLEKRRTYLTEIRKEEALPSLREGRGLRA

SEQ ID NO: 4909 - protein, 466 aa, Thermanaeromonas sp.
MVIFTVDRNGNPGHPTRRFDMIRKLRKRKRVRIIGGGKSGKPPVAVFLDREFDYSRTVGRKLVIVLDPGYRYIGFAVCEPRGGKLIVYCRGVLRTRIPEIKGLMSDRRSFRRFRRYLSRYKKKRLSARQCRVLTKFKAPRDVRSKDRSNATLRHGVETHLNLYRKLRRFFPFPAHQVEFVMEDNVFDVRAMTWGKVYGADYQVSPRAPEGERKCILCGSQEDLHRHHLVPRKSGGTEVRENKVYLCAGCHEEVHAGRVFLPVRGIKQWRELGTMNAVMGVLREVPYISFVPAPEVVLKRRELGLGKDHADDALAAAAAFCGCTGFDASVERRLMLVKFRRHARARVHAQKDRLYKVDGVIIARNRRKRGDQNDPSFADVFPLSPEQQRGLKVYPGTKILNPFRNDVLTIGGDVWVHIPTGRRFVATGVISEKYLYSPMLEEITGKPYIHPDQCRRVIRSEGIVVWS

SEQ ID NO: 4910 - protein, 461 aa, unidentified
  REGION 1..461: note = Human gut metagenome
MVYVINKQGQALMPTERFGKVRRLLKNGLAHVVCRIPFTIQLDYDTTNFVQPISLGVDAGSKHIGISATTSEKELYAADVELRNDIVEKLSTRKEQRRTRRNRLRYRKVRFNNRVSSKRKGRLAPSIENKIQTHLTVVEKIHKFLPITNIIVETASFDIQKIKNPSISNEEYQQGEQLHFFNVREYVLHRDGYQCQHCKGKSKDPILNVHHIESRKVGGNSSQNLITLCKSCHKAYHKCKIELKVKRGASFRDSAFMSTMRWSFYDKLKNIYPNVSMTFGYITKNTRITNGLPKDHYVDAKCISGNPTTKPLGYYFYQKKVRCQNRQIHKVNFLKGGRKKLNQAPFLVKGYRLFDLVEYQKDLYYIFGRRDSGFFDIRKLDGTKVNKGSISCKQMRLIDIRKTIIIEKRIASKFMKKGDKVREIGDTLTGTIVYIANGYADVKYPNMKGVCSLPVQFLEKV

SEQ ID NO: 4911 - protein, 407 aa, unidentified
  REGION 1..407: note = Human gut metagenome
MVYVQDINGNPLMPTTRHGKVRRLLKNNKAVVVNLCPFTIRLTYETTNYKQEITLGVDTGTKHVGLSATTKSKELYSSEVILRSDIVDLLSTRREQRRTRRNRLRYRKPRFYNRVGANKSNWIAPSIQQRIDSHIKIVSDVYKILPVSKLIIEVAQFDTQKIKNPDITNIEYQQGDQLGFWNVREYVLTRDNHKCQHCKGKSKDKILNVHHIESRKTGGDSPSNLITLCETCHNEFNKGNIDLKVKREKSLRDAAVMGIMKWRLYEILKSTLPNVSMTFGYITKYNRIHNDIEKSHVSDAFVISKNFNAKRLNFSYKIKLVRRHNRQIHKMKIPKGGTKRPNQSPFEIFGFRLFDRVRFDSKFYFIYGRRKTGSFNIRDINGENKKDVIYKKLKLSRCKRFMIQIEM

SEQ ID NO: 4912 - protein, 465 aa, unidentified; identical to SEQ ID NO: 3603
  REGION 1..465: note = Human gut metagenome

SEQ ID NO: 4913 - protein, 459 aa, unidentified
  REGION 1..459: note = Bioreactor metagenome
MAKWTNSIKEDKTMKVFVKSNTNEPLMPTNPRKARILLKERKAEVVQRNPFTIRLLYPTGKNKQDITLGIDSGYLNIGFSAITQKEELITGEVQLLNRIIERNKERAAYRRTRRNRLWHRKPGFDVNTNKEGWFAPSIRHKIDSHSRFIKKLHEILPITKIIVEIANFDIQKIKNPDIEGVEYQQGEQKGYKNVIAYVLHRDGYTCQNPTCNNKDKQPLLQVHHIQFRKNGGSDRPDNLITLCNKCHTPENHKGFLLGWKPTLKGFKPETFMSIVRWKLVDILKESYSNVEHTYGYITKNKRFLLGIEKTHAYDAFCIADGTIQVRQEPFVIKQIRRNNRNLSKFYDAKFIDVRDGTKKSGSELNCGRTCRNKEKNGENLRKYRLKKISKGRLSIRNTRHQIQPMDLIEFDGQRYYVAGSQNKGQYIKLKNSKKVINATKVKVIKFGKGFCWIDNKIPC

SEQ ID NO: 4914 - protein, 418 aa, Exiguobacterium sp.; identical to SEQ ID NO: 4153

SEQ ID NO: 4915 - protein, 518 aa, Anaerostipes sp.
MTPKKRKEASRMSEYIYVLGIDGNPQMPTKRKRHVEQLLQTGRARIFRQVPFTIQLTYKNEPVLQPVTIAEDPGRSNIGMAVVSLSGELLSAAVVQTRNKEIVKLMEKRKQHRRASRNGERKARQRLAKKCHTMIKTGFLMRKLPMYGKDKRVRCNVIKNTEAKFCNRKREDGWLTPSAEHLVRTHINLIHKMQKFLPITDVAIEINRFAFLSLEDPSISGVDFQNGPLKGYDDLNAAIEDLQDGHCLMCNSPIEHRHHIVPRNMQGSNTIGNIAGLCCKCHERVHKDARFEDRLKKKKAGLNKRYAAVSVLNQAIPFICKRLEQEFGKEHVHYCSGRDTSMVRRSLGYHKTKEKQLHEVDAWCIAVLALQHVPEKAPEFDHVHEILQFRRQDRSRIKAQTSRAYYHEGKKIAKNRKKAEGQREDSLQEWRKRQVERYGKEQTRKMISQLEVKESIRRYNRLDRLMPGAVFYYQGVRYVMRGQHSNGQYLQAVGMRDKDFPAKKCKIVVHNQGLVFVS

SEQ ID NO: 4916 - protein, 415 aa, unidentified
  REGION 1..415: note = Human gut metagenome
MENRIEYCFVVDKNNRPLTPTKVNKGWYLVRKSRAKLKSKYPMVIQLEKEVKSDEDDESHIVCGIDDGSAHVGLAIVQKCPTKNKVVFKGTIEQRQDVKHLMDVRRGHRHYHRYHKRYRQARFNNRSSSKRTCRLAPSIKQKKDAILRVLYQLNKWVNIQEYHLEDVCIDIRALTDDYKPYRWQYQKSNRLDENLRKATILRDECRCQECGKSNCVLEVHHIRARKYGGADTIGNLITLCSGCHQKTEGRERDFEDRYFNMIKSKPKRFDYAMHVMQGKTYLREKISELGSLHLTNGGETANKRIEWNVEKSHGNDAICVTDCIPDNCDVKEWIIKPMRRKSKAKTNNLLGIRHRDLVSYTYKNGETHTGYVTALYPEQLVLNFQSKTKHCKKVNARKCRLLWKFNKIYWLEQCV

SEQ ID NO: 4917 - protein, 436 aa, unidentified
  REGION 1..436: note = metagenome
VTTILKTCFAASNLAKIVVLMDAWDIIVVLNKRGKPLMPCSPAKARLLLKEKKAIVKRRTPFTIQLTIATGETKQPVSLGVDAGYKHVGLSASTEKAELYASEVELRQDITDLLSARRALRQSRRNRKTRYRAPRFDNRIRTKRKGWLAPSVENRINAHLSRIEAVLRLLPVTKITVETASFDMQLLKNPDISGKEYQEGEQLGFWNVREYVLFRDGHVCQHCHGRSKDPVLNVHHLESRRTGGDSPGNLITLCETCHKALHRGDITLKAKRGKSFRAEAFMGIMRWEVHNRLRALHPGIEVSNTYGYRTKHARIANGIAKSHCADAFCIAGNLGAERLCEFFFQKQTRRNNRQIHKLSILKGGIRKRNQAPFEVKGFRLFDKVACQGEEGFIFGRRSSGFFDVRKLDGTRISAGISCKKLHLLEKRRTYLTEIRK

SEQ ID NO: 4918 - protein, 471 aa, Caldicellulosiruptor sp.; identical to SEQ ID NO: 3268

SEQ ID NO: 4919 - protein, 470 aa, unidentified; identical to SEQ ID NO: 2825
  REGION 1..470: note = Human gut metagenome

SEQ ID NO: 4920 - protein, 430 aa, Ktedonobacter sp.; identical to SEQ ID NO: 4746

SEQ ID NO: 4921 - protein, 442 aa, unidentified; identical to SEQ ID NO: 2637
  REGION 1..442: note = Human gut metagenome

SEQ ID NO: 4922 - protein, 456 aa, unidentified
  REGION 1..456: note = Human gut metagenome
MSTCVCVLSNSGERLMPTFRLGKVRRLLKDGKAKIVKHHPFTIQLLYDSKTNTQPIEICEDVGYNYIGISVKSESHEYVSAQYDTLQDEKACHDSCRKLRRTRRNRLRYRKPRFDNRKRSEGWLAPSLRHKKELNVNVVKMYCAVMPITHATVEVGSFDTMLVKAIQEGKAIPEGADYQKGPRYNLATLREAVFYRDNYTCQVCGRKVADGAILHMHHMFYWKGRHGYQLDELVTACEKCHTPANHQKGGKLFGFGENKEFANLSGAAFMNAVRWQIVNALYATYGKEFVTITYGAMTKEKRIILGIEKTHNNDAYAMGDYHPAHRCAFRHYQKRRRNNRVLEKFYDATYIDARTGNKAKGKELFNGRINRNHKKDSENFHKYRSKKVSKGRRSIRRQRYAIQPYDTVRLEGKTYITSGCHNKGTRLLISANGKSKSVAISKVQVVCHAGAWIQII

SEQ ID NO: 4923 - protein, 463 aa, Mahella sp.
MVFVLDKHKKPLMPCSEKRARLLLERSRAVVHKKEPFTIRLKDRTEEESQLQSLRLKLDPGSKATGVAVLADDTKAIWLGEIHHKSNIKKKLKDRRALRSSRRNRKTRYRQARFNNRHPAKCVACGKNAKHGSRYCRPCQKARNYVDNGYREKRLPPSLQARVNQTINCVTKLCKLLPITAISTEHVKFDTQLMQNPDINDVEYQHGELFGYEVKEYLLEKWGRKCTYCGKENVPLEVEHIIPKSRGGTDRISNLTIACHKCNQKKGNMTAEEFGYPEIQKQAKQPLKDAAMMNATRWALYNNLKKFGLPVECGTGAMTKKQRLAHKLPKTHYYDACFVGASTSDEITISTEYVSIWSAIGRGNRQMCRTDKYGFPKGYRKNRKQYFGFQTGDIVKANIPNGKYQGNFTGRVAVRSSGYFDIKDSTGNCLCQGVSWKYMQVLQRNSGWQYDKERRNPLLSQLK

SEQ ID NO: 4924 - protein, 414 aa, unidentified
  REGION 1..414: note = Human gut metagenome
MVYVINKQGQALMPTERFGKVRRLLKNSLAHVVCRIPFAIQLDYDTTDYTQPVSLGVDAGSKHIGISATTSEKELYAADVELRNDIVDKLSTRREQRRTRRGRLRYRKARFNNRVSSKRKGWIAPSIENKIQTHLTIVEKIHKFLPITNIVVETASFDIQKINNPSISGSEYQQGEQLDFFNVREYVLFRDNHICQHCKGKSKDKVLNVHHIESRKTGGDSPKNLITLCETCHKAYHRGEFELNVKRGKSFRDAAFMGIMRWSFYDRLKNIYPNVSMTFGYITKNTRITNNLPKDHYVDARCISGNPVAKPLGYYFYQKKVRCQNRQIHKANFLKGGRKKLNQAPFLVKGFRLFDLVEYQKDLYYIFGRRDRGFFDIRKLDGIKVNKGSINYKHLRLIDKRKSILTEKRTQVNL

SEQ ID NO: 4925 - protein, 443 aa, Anoxybacillus sp.; identical to SEQ ID NO: 4769

SEQ ID NO: 4926 - protein, 431 aa, unidentified
  REGION 1..431: note = metagenome
MPNKVYVINKHGRPLMPCSPAKARHLLDAGKAKVKKRTPFTIQLVYGSSGYTQEVILGVDAGSKTIGMSASTTKEELLSAEVKPRNDVVDLLSTRREFRRVRRNRKTRYRKPHFDNRVHSKHKGWLAPSVEVKIQEHITAIRRVCGILPVSKVVVETAEFDLQLLKAIEEGKPVPQGEDYQQGEMYGHYNVRQYVLWRDDYTCQCCGTHATKKKEVRLHVHHLESRKVGGDAPDNQVTLCESCHEKLHKGLITEKDFKKRKRRSTRDATFMGIMRKTLMQRLCSELPIPVVETRGYITKATREKLLVLPKSHTNDALAIAQGKQGFNVGYLPEILQIDKIYTIRPVRHHNRQLHKAAILKGGIRKSNQAGKYVFGYRLFDKVQFNGQDCFVWRRRTTGIFTIKTINGKMIKDGISFKKLKLVEKSTGYLIA

SEQ ID NO: 4927 - protein, 471 aa, Caldicellulosiruptor sp.; identical to SEQ ID NO: 3375

SEQ ID NO: 4928 - protein, 442 aa, unidentified
  REGION 1..442: note = Human gut metagenome
MVTVQQSTHHLPFGRVFIRRNLFMVYVISQDGKPLMPCSDPIARLLLKQGKAKVKKREPFTIKLTYETTNYTQGLTLGVDTGSGTIGTAVSKDNGDIVYMSEVVVRNDITDKMTQRAKYRRNRRNRKTRYRKARWLNRASSIKKDRFSPTMQSKLHSHVREIEYIQSILPITEMVFETGQFDMQLMKNPSLANPKVRPWGYQKGANYGFENTKAMVLNRDNYTCQCCKGKHKDSKLEVHHIVFRSQGGSDEESNLLTLCHTCHKDLHSGKINPKLSGKVKGNLKYATQMNSIRKQLFRFYPNAIETFGYVTKANRLHLGVDKEHYYDACTIATQGNAFNVKSNLYKKKCVSDGDFQKTKGIRSEQPIVTDKICGFRKFDKVRYFGNDYFIKGRMSTGYAILMDIDGNKIDFSTMPRGYKTPKLSNCKRITARSTVMTQVKVV

SEQ ID NO: 4929 - protein, 357 aa, Calothrix sp.
LFGQWKSEHRGLSISESLTARSNTRHARRSRNTRYRKERPNHKKPSGWLPPSLQHRVDTTMTWVKRIIKLAPIKSIAFERVKFDIQKLENPSIEGIEYQQGTLQGYTLREALLEHWGRKCAYCDAVNVPLEIEHIRPKSQGGSDRFNNLTLSCQRCNQNKSNQSIDEFLKNDPVRLDNIKRHQKQSLRDAAAVNSTRNKLFDSLKSFNIPAYCGSGAYTKMMRIKSNLPKTHFIDAGCVNALQEVTLKTIQPLRVKCNGHGNRQFVTMDKHGFPRSCYAPKHVRKDWKAGDIIKVKKKDGTSVLGRVKKAAKTLIFIPFRGKETSFSPKNTKPIHRSDGYRYSFTTIDSELLQKIAT

SEQ ID NO: 4930 - protein, 462 aa, unidentified
  REGION 1..462: note = Ga0307928_10013597
MVKQQQQLRTRNTYTPLDASQVHCSVVMSLNKEETLSEHSLKTVLNNLYVNQQSGKTGQDLRVPVLNMQGNPLMPTKPRKARILLKQGKAKIVKRAPFIIQLTTATGESKQNITLGIDAGYSKVGFSAVTDCQELMSGELKLRKDVSKKIEKRRMYRGGKRNKLWHRQPRFLNRSKKSSWLAPSIQHKLDTHARLIKNIQNWLPVTKTIVEVATFDTQRMQNPEISGIEYQQGELQGYEIREYLLDKWERQCVYCKKKNLPLEIEHIIPKSRGGSSRVSNLTISCRKCNLKKGSQTAEEFGFPEIQKQAKKSLKSTAFMNIVRKRLAKQINAEETFGYITKYNRIKQNIDKSHINDAFVIAKGTNQERCKPFVVTQIRRSNRCLQTNRKGYKPSIRRQRYKLQPNDLVKYNKREQRVKGMFNYGKWVKLSDGTNTNIKNVELMCYGKGLCFNYGGLSNSSIA

SEQ ID NO: 4931 - protein, 460 aa, unidentified
  REGION 1..460: note = Human gut metagenome
MVAVVDLSGRPLMPTNEYRARKLLKQKKAKIFGYRPFTIQLTERKSTEIQPIELCMDTGYIHIGISAKSERHEYLGMQIDTLTDEKLKHDDKRQYRRQRRNRKRYRAPRFDNRRRKEGWIAPSLEHKKEIHIDAIQRICKVMPITDLTLEMGNFDTQVLKAVEEGKTLPQGSDYQHGERYGIATLREAVFLRDGYKCQCCEKTVKDGAILHVHHIKYRSQGGTNRMSNLITVCDKCHTPQNHKPGGKLWNWKTKLAEFKGASYMTSIRWMLYNEVTALLPNSSVHITYGAKTKESRRELDIEKSHVNDAYVMGLFHPKHRTQPVYFKKKRRNNRVLEKFYDAKYIDGRDGKKRSGQELFNGRISRNHKKDSENLHLYRKQKVTKGRRSIRSRHYPIQPHDILLYQKKKYETAGCHNNGSRAILLPEKKSVALKQLTMYQYAGGYYRVPYESNKKEERTGS

SEQ ID NO: 4932 - protein, 412 aa, unidentified
  REGION 1..412: note = Human gut metagenome
MVYVISQNGQPLMPTENHAKVRILLKNKKAKVIKKCPFTIQLAYDSTNYTQDITLGVDSGSKHIGLSATTEDKVLFESDVELRNDIVNLISTRRQNRRTRRNRKTRYRKPRFNNRKRNDGWLAPSIQNKVNSHLTVVRKVHEILPITKIIVEVASFDIQKIKNTAISGEEYQKGEQLDFWNVREYVLFRDGHTCQCCKGKSKDKVLNVHHIESRKTGGNAPNNLITLCETCHTGYHKGIVKLPKTIHRGMSFKDATFMGIMRWAFYNKLKEIYPNVNLTYGYITKNTRIKNNLPKEHYIDARCISKHPNAVSDGTVYYQKKVRCHNRQIHKSTILKGGYRKRNQAPYTVMEFRLYDKVMWKGQKCFIFGRRSTGRMDIRLLNGTKINTSVGHKNLRLIEMRKNYLIEQRKVG

SEQ ID NO: 4933 - protein, 438 aa, Clostridium sp.
MSVFVKNLRNEALMPCSERKARLLLKNNKAKIVDYKPFTIQLLYVTGETKQSISLGIDSGAKYIGIAITSENKVISKGTIELRTDVKELLASRKILRRSRRSRKTRYRKCKFKYKTTRKFSIKEGNFVKKKISFCSSRKSRWLPPSIQSRVDNQIFWINKFSSLLPSPKITVEVGKFDTHKLIKPDIKGTEYQEGDAYGFYAVRYAVFARDNYTCQICKKKGGILHTHHITQRKDGGSDRIENLVTVHEECHEKFHRGDIKHKFTKPKQYKETAFMNILRNQVFHMLNCNITYGNITTVDRKALDLEKAHYNDAVAISGIKTIKKDTNSIFYIKQFRKKKRSLHEATPRKGRKEPNKTQKRNSKNTKTSNGFYLNDKVRAFNKIGFISGFTTGGAYIKDIQGSYITIPGKSYKQVGFKNLELISHNNNWQFISTLRYA

SEQ ID NO: 4934 - protein, 418 aa, unidentified
  REGION 1..418: note = Human gut metagenome
MVYVLGQDGHPLMPTCRHGKVKRMLKSRMAKVVKKCPFTIQLQYESTTHTQKINLGIDAGSKTIGVSATTESKVLYESEVVLRNDIVELLSGRRALRRSRRNRKTRYRKPRLDNRRRPDGWLAPSIRQKIKTHVTVVENVMKILPVTKIIVETASFDIQKIKNPEIEGAEYQYGEQLDFWNVREYVLFRDGHTCQCCKGKSKDNILNVHHIESRKTGGNAPNNLITLCETCHKAYHKGVITLPKEIHRGMRFRDAAFMGIMRWAFYDRLKELYTPFGVEVINTYGYITKNTRIEHGLPKEHYVDARCISGNPAAKPLGHYYFQKKVRCHNRQIHKNTILKGGIRKRNQAAYLVNGYRLFDKVKYQNQEYFIFGRRSSGFFDIRTLDGTKVNKGSISCKKLQLVEKSKHYLTEQRKVAA

SEQ ID NO: 4935 - protein, 429 aa, Arthrospira sp.
MPNYQNYVFVVDTLGQPLSPTHPARARKLLKQGLAAVFRTYPFTIILKKTVENPGNEPLRLKLDPGASVTGIALVSQKTGTVIWGAELTHRGDRIRAKLTARRMVRRHRRCRKTRYRQARFNNRKRADGWLAPSLKHRVETTLTWVNRLISSCPITDISMELVRFDTQKLPNPEISGVEYQQGVLFGYELREYLLTKWQHQCAYCGAKNIPLEIEHIQPKSQGGSDRVSNLAIACHKCNQKKGSQPVEQFLDTKPEILKRLLVQAKAPLKNAAAVNSTRWALFNDLKLTGLPIEIGTGGLTKYNRTVQGLPKTHWLDAACVGKSTPTRLKIKTHQPLLITCFGRGGRQKAALNKYGYPIRHNPLKPIKGWLTGDIAKHKTHGIGRITPRSRGSFVLTKPDQTQFSVKPIDLKPVFRRDGYLYKFSSVVR

SEQ ID NO: 4936 - protein, 461 aa, Ktedonobacter sp.; identical to SEQ ID NO: 4813

SEQ ID NO: 4937 - protein, 413 aa, unidentified; identical to SEQ ID NO: 2605
  REGION 1..413: note = Human gut metagenome

SEQ ID NO: 4938 - protein, 451 aa, Moorena sp.
MTTFVFVLDRKGRRLMPCHPARARKLLKKGRARVHKVFPFTIRLTDRELENSSVQPMLIKIDPGSKETGIALVREEKNKEHHALYFINLQHRGQQIRNALHKRRCLRRSRRSRNLRYRSPRFLNRRRAEGWLAPSLQHRPDSILSWVSRLRKITPVERISQELVKFDTQLTQNSKIEGIEYQQGELTGYELREYLLEKFGRKCIYCGADNVPLNIDHVIPKSKGGSNRVSNLVLACVQCNQKKGSRSIEEFLKDKPEVLRQIKNQLKQPLKDAASVNATRWKLFNKLKSTGFPFEVGSGALTKFNRKKFGIPKAHWLDALCVGNVPSVTNWRNLNVLNIKCCGRGAYQRTRTDKYGFPRGICMRQKKVYGFSTGDMVKAIIPKGKKKGVCVGKVAVRKTGSFNLQTSGQTIQGISYRYCRLITHSDGYSYSWKSCPIPPRVETRGILGEVR

SEQ ID NO: 4939 - protein, 425 aa, unidentified
  REGION 1..425: note = Human gut metagenome
MQYVYVLNKHDEPLMPCSPCKARLLLKQKKACVVKRTPFTIKLLYGSTGYKQPITLGVDAGSKHIGISATTEKYELYREEATPRNDVVDLLSARRAFRRSRRNRKTRYRAPRFNNRVHSKHKGWLAPSVEVKIQEHITLIKRVCRILPVTLVRVETAEFDTQRLKAMLEGKPLPVGTDYQLGEMYDEYNVRQYVLKRDKYTCQCCGAHPTKTKAVKLHVHHIETRRTGGNAPNNLITLCTACHKALHAGKVTLDGKKRGKPLKDAAFMGIMRKTLMERLLKELKIPVQEIYGYITKYLREKHSIPKSHTNDARCISKNPLAIPCDTCYYTKAIRHHNRQLHKATILKGGIRKANQAPYTVKGYRLWDKVSYNGSECFITGRRTSGYFALKKLDGTVVSNSASYKKLRLLEVATNYITKSSYVKSL

SEQ ID NO: 4940 - protein, 428 aa, Enterococcus sp.; identical to SEQ ID NO: 4335

SEQ ID NO: 4941 - protein, 458 aa, Lactobacillus sp.; identical to SEQ ID NO: 4474

SEQ ID NO: 4942 - protein, 471 aa, Caldicellulosiruptor sp.; identical to SEQ ID NO: 3268

SEQ ID NO: 4943 - protein, 419 aa, unidentified
  REGION 1..419: note = Human gut metagenome
MIYIRSKDGKALMPSERGGRIGYLLRHAKAHVVSRVPFTVQLDYESTTYTQEVSLGVDAGSKHIGVSASSEKKELLVAQVELRNDVVNLLSTRRELRRTRRNRKTRYRKARFDNRKKKDDWLAPSVEQKVDSHLKVIRLVHGLLPITNTTIEVAQFDAQKIKRPDIKGEEYQQGEQMCFWNVREYVFARDGHRCVHCKGKSKDPILNVHHLESRKTGGNSPSNLVTLCETCHKAYHRGEFELKIKRGNSLRDAAVMNIMRWAVYKRANEEFGNVHLTYGYVTKHTRIENGIAKTHAADAFCIAKNINAMRLRTFYLCRCVPRHSRALHVANPKKGGIRRSTIASHKIGKSRFQRFDMVRWKGKESFIFGSTNGRPVLRDIEGYKMHENASVNIKTIKFLKRLRNNILVEEKDFRKLNML

SEQ ID NO: 4944 - protein, 427 aa, Parasutterella sp.; identical to SEQ ID NO: 4733

SEQ ID NO: 4945 - protein, 440 aa, Moorena sp.
MQRVLVLDCNKNPLMPCHPARARQMLKDGKAAIYRRYPFIIILKERSGGETQPVALKLDPGSKITGIALVADFQKGKRVIWAAELQHRSERIRELLLVRRAVRRSRRNRKTRYRKPRFLNRRRPEGWLPPSLKSRVDNILTWVMRLREFSPVSSLSQELVRFDAQKLENPEISGIEYQRGTLFGYEVKEYLLEKFGRQCAYCRGKSGDPILEVEHVVPKNPKHGPKGTDRVSNLVIACETCNKAKDNNQPEEWLARLEASADPLDKERAENFPTVIEQLKQPLKDTAAVNATRWAIFQSLKSFGLPVEIGTGGRTKYNRVIQHYRKAHWIDAACVGKSGESVFLSSVHVPLYIKAVGRGSRQFCRMDRHGFPRTSPKRIKRVHGFQTGDIVRATIPLGKYAGIHIGRIAVRASGSFRVGSTDGVSWRCCKILHCSDGYEY

SEQ ID NO: 4946 - protein, 427 aa, unidentified
  REGION 1..427: note = Human gut metagenome
LRVFVLNKRGKPLMPCSPAKARLLLKEKKAIVKRRTPFTIQLTIATGETKQPVGLGVDAGYKHVGLSASTDKAELYASQVELRQDITDLLSARRALRRARRNRKTRYRAPRFNNRIRTKRKGWLAPSVENRINAHLSRIEAVLRLLPVTKITVETASFDMLLLKNPDIAGKEYQEGEQLGFWNVREYVLFRDGHVCQHCYGRSKDPVLNVHHLESRRTGGDSPGNLITLCETCHEALHRGEIALKTKRGHSFRAEAFMGMMRWEVLNRLKASHSELEVNNTYGYRTKHARIVNGIDKSHCADAFCIAGNLGAERLCEFFFQKQTRRNNRQIHKLSILKGGIRKRNQAPFEIKGFRLFDKVACKGEESFIFGRRSSGYFDVRKLDGTRISAGISYKKLRLLEKRRTYLTEIRKEEALPPLPEGRGLRA

SEQ ID NO: 4947 - protein, 452 aa, unidentified; identical to SEQ ID NO: 4518
  REGION 1..452: note = Human gut metagenome

SEQ ID NO: 4948 - protein, 406 aa, unidentified
  REGION 1..406: note = Human gut metagenome
MPTKRFGKVRRMLRDGQAKVVSREPFIIRLLYEPKTHEVQECVLGIDTGSKYIGAAVVSNGKVLYASEVKIKDDIKSKMDRRRSYRRDRRNRKTRYRKARFLNRGNSIKKDRYNPTLKSKFDSHVREIEFIKRILPISKLILEVGQFDTHKLKNPNVRGWGYQKGTNYGFANSREHALCRDKYTCQICKAKNTRLEVHHIKYRSQGGTYDLDNLITLCADCHKKVHAGELSINKKPKRLPNFNDATVMSILRNMLLKQYPEAIETFGFITKENRLSLNLPKEHFIDACVIASGGEEFILPKDVFIKRHVTRGDYQSTKGVRSEKHIPHSKILGFRKWDKVLYMGQKYFIKGRRTSGTCDLEDIYGSKIDFSYMPRGFKTPKLSNCKRISARNTTLCQRIDYIPNAG

SEQ ID NO: 4949 - protein, 424 aa, Enterococcus sp.
MRVFVRNMQGKPLMPCSNRKARLLLKEGKAKIYQYNPFTIQLCYASREYVQECHIGIDTGAKHIGMAVTSEDKVLFKGEIELRQDVKSNLDTRRSYRRDRRNRKTRYRKARFLNRKKKESWLPPSIENRINHTFKWINKLVALLPNPKLHIEVGKFDVAKMINPNVQGVDYQHGQTYGFYNVRYFVFARDNYTCQCCKKSKNKILQTHHIIYRSNGGSNRADNLITVCTDCHTYENHQKGGILYQWQENHKKTKQYKEPPFMNVLRKRIFTQYPNSIITYGSETTPKRKELGLEKTHYNDAIVISGITKIKENPNEWLLIKQFRKKKRSLHEATARKGRKEPNRLQKRNAKNTPYYKGFYLNDKVRVFNQVGHITGFTSSGAYIKNSENEYITLPNKSYKQIGISNIRLLHHNNNWQYIHKHIA

SEQ ID NO: 4950 - protein, 418 aa, unidentified
  REGION 1..418: note = Human gut metagenome
MVYVINKQGQALMPTERFGKVRRLLKNGLAHVMYRIPFTIQLDYDTTNFIQPISLGIDAGSKHIGISATTSEKELYAADVELRNDIVEKLSTRREQRRTRRNRLRYRRARFNNRVSSKRKGWLAPSIENKIQTHLTVVEKIHKFLPITNIIVETAAFDIQKIKNPSISGKEYQQGEQLNFFNVREYVLHRDGHQCQHCKGKSKDPILNVHHIESRKVGGNSSQNLITLCESCHKAYHKGEIELEVKRGTSFRDSAFMSTMRWSFYKKLKNIYPNVSMTFGYITKHTRITNGLPKNHYVDARCISGNPTAKHLEYYFYQKKVRCQNRQIHKVNFLKGGRKKLNQAPYLVKGYRLFDLVEYQKDLYYIFGRRESGFFDIRKLDGTKVNKGSISCKQMRLIDIRKTIIIEKRMQGAIHPIN

SEQ ID NO: 4951 - protein, 429 aa, Ktedonobacter sp.
LSNVFVIDSDYKPLNPVHPGHARRLLRQGKAAVFRRYPFTIVLKRVVEQPEVQPLHLKLDPGSKTTGIALVNGTNGKIVFAAELSHRGHAIKDSLDSRRASRQGRRQRKTRYRKPRFDNRRRKKGWLPPSLESRLANILTWVARLCRYAPIATLSQELVKFDMQLMENPDIAGVEYQQGTLQGYEVREYLLEKWERTCAYCGKQDVPLQVEHIHPRARSGTNRMSNLTLACEACNTAKGTQEIEVFLQKKPDVLKRLLAQVKKPLKDASAVNSTRCALLERLKALGLPVECGSGGLTKFNRTTRGLPKTHWLDAACVGKSTPDVLLQKGVIPLRIKATGHGRRQMCVPDKYGFPKQHKERKKTFLGYQTGDLVKAITPKGTFEGRIAIRHRPSFRLEKVDIHPKYMRCVQRSDGYEYTQKGVRHAPPHG

SEQ ID NO: 4952 - protein, 384 aa, Moorena sp.
  SITE 384: note = misc_feature - Xaa can be any naturally occurring amino acid
MVYVLDQSGQPLMPTERHGKVRHLLKSGKAKVIKRCPFTIQLLYNSTHYTQDITLGVDAGSKQIGLSATTKQKELYAAEIELRNDIVKLLAARRELRRSRRSRKTRYRKPRFQNRTHSRKPGWLAPSIRQRIQCHLTVIANVHKLLPTKTILIETASFDIQKIKHPDIHGVQYQKGEQLDFWNVREYVLFRDNHTCQCCKGRSKDNILNVHHIESRQTGGNAPNNLITLCETCHTGYHNGKVILPKTIKRGMSFKDAAFMGIMRWSCYDMLKNIYPDVHMTYGYITKNTRIGNNLAKEHYVDARCISKNPKAKPLPYYYYQKKVRCHNRQIHKTKPTKHGIRKRNQAEYVVHRYRLFDKVQYQNNEYFIFGRRKTGYFDIRTLX

SEQ ID NO: 4953 - protein, 413 aa, Sharpea sp.
MTNYAFVLDADNKQLAPTKEQKAWFLIRKKRATLVSKYPMVIQLKKKIQDKEICKDEIRCGIDDGGLHVGVALVQKCQTRNKVIFKGTIEQRNDVKHLMDVRRGFRRYYRYHKRYRPARFNNRKFSKRKERVAPSILQKRQATVRVISQLNKWINITSYWLEDVAIDIRALTDGYKPYQWQYQKSNRLDENIRKAVILRDGCRCMECGKSNCRLEVHHIKPRRLKGSNTLGNLITLCTECHQKTEDAEELYMNRYFALLNSSDNKNFDYAQHVMIGKKWLREQLSNLGMLHLTNGGDTANKRIDWGIAKSHSNDAICITDLQPDTCEIKEWVIKPMRRQSKAKTDNVLGIKHRDLVEYTFRNGETHRGYVTALYPEQNALNFQSPTKHCKKVNARKCKLLWKYSKIYWLDDVD

SEQ ID NO: 4954 - protein, 413 aa, unidentified; identical to SEQ ID NO: 2636
  REGION 1..413: note = Human gut metagenome

SEQ ID NO: 4955 - protein, 424 aa, unidentified
  REGION 1..424: note = Human gut metagenome
MRVFVFNMRGRPLMPCSQRKARLLLMENKAMIYKYHPFTIQLTYTTGETKQDCHIGIDTGSKYIGAAVRSEDKVFWKGEIELRQDIRSNLDTKRIYRRSRRNRKTRYRKPKFLNRKRRDEWLPPSLQSRINHTFHWIDTLSSLVPNPILHIEVGKFDVAKMINPEIHGVDYQHGQTYGFFDERYFVFARDNYTCQCCGKSKNKILNTHHIIYRSNGGTNRVDNLITVCTDCHTSQNHRKGGIFYQWQEQHKKVKQYKEPPFMNTLRKRIFVAYPDAEITYGSETTPKRKAMKLDKTHYNDAIVISGINEIKENPEEWLLIKQFRKKKRSLHEATARKGRKKPNRNQTRNSKNTPYYKGFYLNDKVSVFGKSGYITGFTSNAAYIKDENNDYITLPNKTYKQVSINKMKLECHNNNWQYIIKNAV

SEQ ID NO: 4956 - protein, 279 aa, unidentified
  REGION 1..279: note = metagenome
VVIETAEFDLQMLKAIADGKPVPQGEDYQQGEMYGHYNVRQYVLWRDNYTCQCCGAHPTKKKEVRLHVHHLESRKVGGNAPGNLVTLCDRCHEKLHKGLITEKDLKKRKHRSTRDATFMGIMRKTLMQRLCSELPIPVVETRGYITKATREKLLVLPKSHTNDALAIAQGKHGFNASYLPGIVQSDKIYTIRPVRHHNRQLHKAAILKGGIRKSNQAEKYVFGYRLFDKVQFNEQDCFIWGRRTTGIFTIKTINGKMIKDGISFKKLKLVEKSTSYLIA

SEQ ID NO: 4957 - protein, 396 aa, unidentified; identical to SEQ ID NO: 4508
  REGION 1..396: note = Human gut metagenome

SEQ ID NO: 4958 - protein, 481 aa, unidentified
  REGION 1..481: note = Ga0373625_0024244
MQKLQGKLKNTPKDASQVLCSVNSQLNRVEKLSVENKVLTCNTPDGNLRQHKDGSDLRVLNIVYVLNQRGQALMPTTQSKSRHLIKGGKAKIIKRIPFTIKLLIASGENKQPVILGIDPGYENVGISARTEKKELIRMDIVLRKDISQKLTEKRMYRRGRRNKLWYREPRWLNRKATKKLGWIAPSVQYRLDSHIRLIGKICKLLPVSKIIVEVANFDIQKINNPEISGKEYQQGNLYGYENIKSYLIAREQGKCQLCGKESTKGISFRTHHIIQRKDGGTDRLDNLVLLHEKCHEEVHKKGLKFNKSKQFKAETFMSTIRWKLVEELKKILTTEVTYGYVTKIKRNELNLEKTHSNDAFVISEGTNQERCRIFNIQQKRKNNRCLQLNRKGFIPSIRRKRYFIQPCDLVKISCNWQSTKGSHCKGTRIIVGKKSININQVKNVFHIGSLIWRTAIPPTAKAVGFLAVNFHDRDNQPMLHL

SEQ ID NO: 4959 - protein, 470 aa, unidentified
  REGION 1..470: note = Human gut metagenome
MSVFVVGLNGCRLMPTSEREARLLLKHGKASVYRKVPFTIKLNYKTGSTTQPGYLGIDTGSQHIGVSVVREDGTVLHKEEIGLRDSMSKRKLMESRSSLRRGRRHRKTRYRHPKWRLKAKRVYYETPDRKGRHWKKQKITFASKRPQGWLPPSLQSKTDHHIQWIKKLQDLLPDGYRLSIELGRFDPARMKDTEIHGDLYQKGPQYDYENVRAYVLDRDRYTCQVCGKKGGKLHIHHILYRSHGATDNPQYMATICSDCHSTENHQPGGILYQWMQEQKKFTRGLRDATFMNILRKRLMKAFPKATFTYGNITKADREKLKIPKSHGNDATAIAIVKTGIMTVKDNEPVIYIQQVRRKKRSLHEKTPRKGRKEPNRKASRYNKNTKAVTVTKRKNKKRISITGCLFDRVELNGKKGWISGFTDKSCYIKDENDQYIRISPKYKQVSLSKLKILHHCGNWVIGARRSLGKG

SEQ ID NO: 4960 - protein, 505 aa, unidentified
  REGION 1..505: note = Human gut metagenome
MTALEEKLSKTEYIYVLGFDGKPQMPTRRKRHVLKLLKTGRARIAEDIPFTIRLTYRNAPVLQPVTLAEDPGRTNIGAAVLSPLGDLLFAAVIETRNKEIKKLMADRQKSRQASRRGERKARQRLAKRYGSMVKSGMVMRKLPMYAADKFVICKFIRNTQARFCNRKRCPDWITPTVQHLVQTHLNIIRKISRYLPVTDIAFEVNRFAFMHMENPEAMGVDFQNGPLKGYGDVKEAIRTQQHGKCLMCKKPITHFHHIVPRSRGGSDTIQNLAGLCTECHTKVHTDTAFRKDFDEKKSGQLKKYGALSALNQAVPFICKKLLEEYGEEHVHFCRGLDTSLIRTAFGFEKTKKNQMHEVDAYCIGLAALEVNEVETPAFDHTFQIRQFRRQDRSIIHHQTGRSYYQGKEKVAQNRKPGFEQKTTALSQWYKEQIRIHGEKEAEKLRSQLRVEKSCRHYNDMDRFLPGAVFLYEGKRYVLSGRITNGKYLRACGQGMKNFPAAECTF

SEQ ID NO: 4961 - protein, 426 aa, Sulfobacillus sp.; identical to SEQ ID NO: 4624

SEQ ID NO: 4962 - protein, 394 aa, unidentified
  REGION 1..394: note = Human gut metagenome
RQRLAKRYGSMVKSGMVMRKLPMYAADRFVTCKFIRNTQARFCNRKRCPDWITPTVQHLVQTHLNIIRKISRYLPVTDIAFEVNRFAFMHMENPKAMGVDFQNGPLKGYDDVKEAIRTQQHGKCLMCKKPIAHFHHIVPRSRGGSDTIQNLAGLCPECHTKVHTDTAFRKDFDRKKSGQLKKYGALSALNQAVPFICKKLLEEYGEEHVHFCGGLDTSLIRTALGFEKTKKNQMHEVDAYCIGLAALEVNEVETPAFDNTFQIRQFRRQDRSIIHHQTGRSYYQGKEKVAQNRKPGFEQKTTALSQWYEEQVRIHGEKEAEKLRSQLRVEKSCRHYNDMDRFLPGAVFLYEGKRYVLSGRITNGKYLRACGQGMKNFPAAECTFIRHNAGLVFI

SEQ ID NO: 4963 - protein, 443 aa, unidentified
  REGION 1..443: note = Human oral metagenome
MTKTLTKQTTQACVLDQNGKPLMPTKRLGKVYRLLKTKKAHIVSYEPFTIQLDYEPDTHVIQPMILGVDSGAIHSGYSVANEQREFYSSEVIARDNISYRISDRRMYRQNRRYRKTRYRKPRFDNRKNKKKGWLPPSLEQKVAVQLNEIDHLHRHFPIETIIVEVAEFDIQKIKNPDISGKDYQQGTLQGYNIRNYLLEKHGHKCFYCDKEVSTFEVEHMIPKAKGGSNRIDNLTLSCHSCNQKKGTLTAEEFIKQALPAEKVAKKLKQLSKEKRLFKYMAHMNATRWTLYNAINDKYPRVKMTYGYITKYNRIRAGLPKAHHIDAKCITGFAQVPSFDTTVVKIKMRRHNRQLHRATFSKGHVRKAASLPTVMFGFRLYDRVLFNNHHYYIKGRRSSGIFALVSLEGLKDENRIYKKLTLLAHTNAYLTNRYVNKETVSVNN

SEQ ID NO: 4964 - protein, 471 aa, Acidithiobacillus sp.
VAVFVLDRRKRPLMPCSEKRARLLLERGRARVHRMVPFTIRLVDRLQADSVLQPLRLKLDPGSKTTGLALVREKETVDVSTGEVLRAITILMLLELKHRGQAIRDALASRGAFRRRRRGQLRYRPARFDNRTKSEDWLAPSLQHRVDTVLAWVNRLMRLAPVTALSQELVRFDNQTMQNPEISGTEYQQGTLFGYEVREYLLEKWGRECAYCGAEHTPLEIDHIHPRSKGGSDRVSNLTIACHDCNQAKGNMPIEQFLAKFPERIRKILAQAKAPLRDAAAVNSTRWALFQRLKATNLPVEVASGGRTKWNRHRLQVPKEHCLDAACVGHVDTIEHWNQSVLSIKATGRGSYQRTRLTRHGFPRGYLTRSKSAFGFQTGDMVKAVVTKGKKVGTYLGRVAIRASGSFNIQTATGLVQGIHHRFCTRIQCADGYGYSWTKIASTQGEAGMRAAHAAALSLPGLNPGVSRANG

SEQ ID NO: 4965 - protein, 397 aa, Moorena sp.
RYPFTIIIKEREGGDTQPTALKFDPGAKTTGIAVVVDCKRGKRCVFAAELEHRGSQIKEGLEKRRAIRRSRRHRKTRYRKPRFKNRTKPKGWLPPSLQSRVDNIASWTKKLRSRIPVSSLSMERVRFDAQKLVNPEISGVEYQQGTLFGYEIREYLLEKWGRKCAYCSKKDVPLHIEHMTPKSRGGSNRIGNLTLSCEKCNQKKNTKTAEEFGFSGLREKSCKPLRAAAAMNATRNAIYSVLKATGLSLETGTGGRTKYNRSKQGYAKEHWLDAMCVGESGENVFVEKRHEVLEIKSMGRGSRQMCRVDGYGFPRTKAKSEKRVGGFQTGDIIRAVVPKGKKKGVYEGRVAVRKSGSFNIKQGKQKAVQGIGWKHCKLIQRTDGYNYKNRMGVSSPL

SEQ ID NO: 4966 - protein, 544 aa, unidentified
  REGION 1..544: note = Human gut metagenome
MKQKKQKVMVYILNKKGKPLMPTTRCGHVRKLLNSKKAVVVNSNPFTIRLKYDTPNGVQDVFAGIDSGRENIGSGASNEDGDCLYLGELKTSNKSIKLKMTERAGFRKERRRHDRQNKQRKARKDHTEIQNGNADICRTTISCKSVQISYPAAEKSVTHKIIRGKEGKFANRHRDEGWITPAARQLVQMHMNDLKSMCKILPISHVTLERVAFDFQKLENENIKVWEYGKGKLYGYDSPEEYIHDVQNGKCLVCGKPHIDYLHHIIPRSKGGSDKVSNIAGLCYDCHYGPMGVHNCQNTQDRLPELKSEANKQYKVSLLNSVMPVLIEEMDKFCKANSIMFSICEGHDTAKVRDMYDLQKDHCIDGFAISLVDRNVKSVDVMPDRIYQKQRYKKKSKNIIQKRNCREYYDDKKLVAVNRHKGTDQKADSLEEYMNTYAETHTTDECKKHFDSLVVKPARRTYTFHKEWRICPFHIGDKVRYEKKNKIKGNTKVDTFICEGIRFVKDENKAEVKHNKTKSKKMKFCRVLESGCTPYVDYRKLALM

SEQ ID NO: 4967 - protein, 557 aa, unidentified; identical to SEQ ID NO: 2654
  REGION 1..557: note = Human gut metagenome

SEQ ID NO: 4968 - protein, 420 aa, unidentified; identical to SEQ ID NO: 3685
  REGION 1..420: note = Human gut metagenome

SEQ ID NO: 4969 - protein, 427 aa, unidentified
  REGION 1..427: note = metagenome
VYVINKHGRPLMPCSPAKARHLLDEGKAKIKKRTPFTIQLLFGSTGYTQEVILGVDAGSKTIGLSASAETEELLSAEVKPRNDVVDLLSTRREFRRARRNRKTRYRKPRFDNRVRSKHKGWLAPSVEVKIQEHITSIRRVCRILPVSKVVIETAEFDLQLLKAIEEGKPVPQGEDYQQGEMYGHYNVRQYVLWRDGYTCQCCGAHATKKKEVRLHVHHLESRKVGGDAPDNQVTLCESCHEKLHKGLIAEKDFKKRKRRSTRDATFMGIMRKTLMQRLCSELPIPVVKTRGYITKATREKLLVLPKSHTNDALAIAQGKRGFNVGYLPEIAQIDKIYTIRPVRHHNRQLHKATILKGGIRKSNQTEKYVFGYRLFDKVQFNGQDCFIWGRRTTGIFTIKTINGKMIKDGISFKKLKLAEKSTSYLIA

SEQ ID NO: 4970 - protein, 456 aa, Halomonas sp.; identical to SEQ ID NO: 3676

SEQ ID NO: 4971 - protein, 414 aa, unidentified
  REGION 1..414: note = Human gut metagenome
MVYVINKQGQALMPTERFGKVRRLLKNSLAHVVCRIPFTIQLDYDTTDYTQPVSLGVDAGSKHIGISATTSEKELYAADVELRNDIVDKLSTRREQRRTRRSRLRYRKARFNNRVSSKRKGWLAPSVENKIQTHLTVVEKIHKFLPITNIVVETASFDIQKINNPSISGSEYQQGEQLDFFNVREYVLFRDNHICQHCKGKSKDKVLNVHHIESRKAGGDSPNNLITLCETCHKAYHRGEFKLNVKRGKSFRDAAFVGIMRWSFYDRLKNIYPNVSMTFGYITKNTRITNNLPKEHYVDARCISGNPVAKPLGYYFYQKKVRCQNRQIHKANFLKGGRKKLNQAPFLVKGFRLFDLVEYQKELYYIFGRRSSGSFDIRKLDGTKVNKGSINCKYLRLINKRKSILTEKRMQVNL

SEQ ID NO: 4972 - protein, 466 aa, unidentified
  REGION 1..466: note = Human gut metagenome
LSIKPLINIGEGVIYSSICTGLLLQTYQKRKEVPCMVYVLDINGQPLMPTTRHGKVRRLLNSHLAKVVKRCPFTIQLLYQSTKEIQPVSLGVDAGSKHIGMAATTEKKVVYQEELSPRNDVVKLLSLRRASRSSRRSRKTRYRKPKFNNRVHSKHKGWLAPSVEVKIQEHITAIKRICQILPISEIQVETAEFDFQRLKAMKEWKPLPVGTDYQLGEQYDFYNTRQYVLHRDGYTCQCCGTHDNNIKLHVHHIESRQTGGDAPSNLITLCEHCHKALHKGKLELPKGKKRGKTYRDATFMGIMRKTLLERLRKEVDVPVSGTYGYITKYLREKTDLEKSHINDAICISKYPYAKPLDTYYLTKVVRNHNRQIHKSNFSKGGIRKRNQAPYLIKGFRLFDKVLYQGKEYFIFGRRATGYFDIRTLDGTKVNKGSISYKKLRIQDTAKAYLKEARAIPHMNKFTCVLA

SEQ ID NO: 4973 - protein, 421 aa, unidentified
  REGION 1..421: note = Human gut metagenome
MRGQPLMPCSPAKARHLLKAGKAVVRRRTPFTIQLRIATGETKQSVTLGVDAGAKHVGLSATMEKEEVFASEVELRQDITGLLAARLSLRRERRHRKTRYRAPRFLNRVRSKHKGWLAPSVENRIQAHMSRIDAVCKLLPVTKIVIETASFDIQKIRNPTVEGTDYQQGDLLGFWNVREYVLFRDGHVCQHCHGHSRDKILNVHHLESRQTGGDAPNNLITLCETCHKAYHAGKIKLKVKRAQSFRAEAFMGIMRWTLLDRVRKAHPGLPVENTYGYLTKNTRITLGLPKTHCVDAYCIAGNLKAVRRGVYLYQRQVRKHNRQIHKCTVLSKTLKDGTKIGYRKLNQTPHLVKNFRLFDKVRCLGQTGFIFGRRSSGYFDVRRLDGVKLSSGISYRKLTLLEKRSTYLTELRNEDGASSPV

SEQ ID NO: 4974 - protein, 449 aa, unidentified
  REGION 1..449: note = Human gut metagenome
VAKAAVLRARNHPITLAMGALPPFEVRFINLINFEFMIYVKSKDGKILMPSERNGRIGYLLRHGKAHVISRVPFVVQLDYDNTTYTQEVSLGIDAGSKHVGVSASSEKKELFAAQVELRNDVTKLLSTRRELRRTRRNRKTRYRKARFDNRKKKDCWLAPSVEQKVESHLKVIRLVHGLLPITKTTIEVAQFDAQKINNPNIIGEEYQQGEQMGFWNVREYVLARDGHRCVHCKGKSKDAILNVHHMESRKTGGNSPSNLITLCETCHKAYHRGEFDLKIKRGTSLRDAVVMNIMRWAIYERAKAEFQNTYLTYGYITKHTRIGYGIAKTHAADAFCIAKNVHARRLKSYFLCRCIPRHTRALHVANPKKGGVRRSCIASHKIGKSRFQRYDMVQWEGKECFIFGSTNGRPVLRDIEGFKMHENANVNIKTIKFLKRLRNNILVEEKDF

SEQ ID NO: 4975 - protein, 429 aa, Ktedonobacter sp.; identical to SEQ ID NO: 4875

SEQ ID NO: 4976 - protein, 431 aa, unidentified
  REGION 1..431: note = Human gut metagenome
MPNKVYVINKHGRPLMPCSPAKARHLLDEGKAKVKKRTPFTIQLVYGSSGYTQEVILGVDAGSKTIGMSASTTKEELLSAEVKPRNDVVDLLSTRREFRRAQRNRKTRYRKPRFDNRVRSKHKGWLAPSVEVKIQEHITAIRRVCGILPVSKVVIETAEFDLQMLKAIADGKPVPQGEDYQQGEMYGHYNVRQYVLWRDGYTCQCCGAHTTKKKEVRLHVHHLESRKVGGDAPDNQVTLCESCHEKLHKGLIAEKDFKKRKRKSTRDATFMGIMRKTLMQRLCSELPIPVIETRGYITKATREKLLVLPKSHTNDALAIAQGKQGFNVGYLPEIAQIDKIYTIRPVRHHNRQLHKAAILKGGIRKSNQAEKYVFGYRLFDKVQFNEQDCFIWGRRTTGIFTIKTINGKMIKDGISFKKLKLLEKSTSYLIA

SEQ ID NO: 4977 - protein, 427 aa, unidentified
  REGION 1..427: note = Human gut metagenome
LRVFILNKRGKPLMPCSPAKARLLLKEKKAVVVRRTPFTIQLTIATGETKQPVSLGVDAGYEHVGLSASTEKAELYASEVELRQDVSDLLSARRALRQSRRNRKTRYRAPRFDNRIRTKRKGWLAPSVENRINAHLSRIETVLRLLPVTKITVETASFDMQLLKNPDIAEKEYQEGEQLGFWNVREYVLFRDGHVCQYCHGRSKDPVLNVHHLESRRTGGDSPGNLITLCETCHKALHRGEIKLRAKRGQSFRAETFMGIMRWEVLNRLKASHSKLEVNNTYGYLTKHARIKSGITKSHCSDAFCIAGNLGAKRLGEFLFQKQTRRNNRQIHKLSILKGGIRKRNQAPFEIKGFRLFDKVACKGEEGFIFGRRSSGSFDVRRLDGTRISAGISYKKLRLLQKRQTYLTEIRKEEALPPLPEGRDLRA

SEQ ID NO: 4978 - protein, 458 aa, unidentified
  REGION 1..458: note = Human gut metagenome
MLTYVLAKDDTRLMPTYSIRKVRRLLKSGRAVIVGHRPGLTIQLVYDLPDQQAAHVQPVEICEDTGYAHIGVSVKSEKHEFAHEQYDLLANEKQRRDDRRKYRHERRSRKRHRAPRFDNRTASKKPGWLAPSVMNKMFRHADLIDMYAKVLPLTSVALEMGSFDTQELEAIQTGAKLPEGTDYQRGKRYQISTLREAVFYRDGYTCQVCGKSIKDHTVLRVHHAGYWHGDHTDRMENLVTVCTKCHTAANHKPGGRLYEWRPKVKPMTGAAFMNSVRWKLYEEVEHRFPGVGIHVTYGSHTKVERRALCLPKTHANDAYVMGKFHPTHRAHEVKYQKRRRGTRVLQKFYDAKYIDSRDGTKKSGSQLSCGRTNRSESRHSGRDLRQYRQGKVFKGRVSVRRKRYPWQPGDTAYLDGQRYTVVGTISCGKSVLLDPHRTSVPKRLGLIRKAESWCISSG

SEQ ID NO: 4979 - protein, 456 aa, unidentified
  REGION 1..456: note = Human gut metagenome
MSTCVCVLSNSGERLMPTFRLGKVRRLLKDGKAKIVKHHPFTIQLLYDSKTNTQPIEICEDVGYNYIGISVKSESHEYVSAQYDTLQDEKEHHDDCRKYRRTRRNRLRYRKPRFDNRKRSEGWLAPSLRHKKELNVNVVKMYCAVMPITHATVEVGSFDTMLLQAIQKGESKPEGVDYQKGPRYNLATLREAVFYRDNYICQVCGRKIADGAILHMHHMFYWKGRHGYQLDELVTACEKCHTPANHQKGGKLFGFGEDKEFANLSGAAFMNAVRWQIVDALHATYGKEFVTITYGAMTKEKRIILGIEKTHNNDAYAMGDYHPVHRCVFRHYQKRRRNNRVLEKFYDATYIDTRTGNKAKGKELFNGRISRNHKKSSEDLHKYRSKKVSKGRRSIRRQRYAIQPYDTVRLESKTYITSGCHNKGTRLLIPANGKSKSVAISKVQVVCHAGAWIQII

SEQ ID NO: 4980 - protein, 471 aa, Caldicellulosiruptor sp.; identical to SEQ ID NO: 3375

SEQ ID NO: 4981 - protein, 441 aa, unidentified
  REGION 1..441: note = Fermentation metagenome
MELRITYCKVEYFQGVDTLVYVISIDGKPLMPCKPVIARLLLKQHKAKVIKKYPFTIKLLYKTKTEYTQPLTLGIDTGSSKIGSAVVDENNNVLYLSQVEVRNDITDKMKQRAKYRRNRRNRKTRYRKARWLNRKNSIKEDRFSPTIVSKINSHLKEINFVKSILPIQNVILETATFDPYALKNPAVLHNKWLYQKGVNYGFANTRAYVLGRDNYTCQYCNGKSKDSKLEIHHIIFRSQGGSDESKNLITLCKTCHGKLHNGKINLKKNGKVKGQLKHATQMNSIRQQLLRLLPEATETFGFITKEHRQLMKLPKEHYYDAVAIACLNNIENTDLIGVNFKTKNILFKRCIADGDFQQTKGVRSEQRIITGKIQGFRKLDKVEYQGKEYFIKGRMSTGYAILMDIEGNKINLKPIPKFEKMKRMQARKSWIISQETIRNIC

SEQ ID NO: 4982 - protein, 471 aa, Caldicellulosiruptor sp.; identical to SEQ ID NO: 3375

SEQ ID NO: 4983 - protein, 346 aa, unidentified
  REGION 1..346: note = Human gut metagenome
LYSQSKIAQSAQEYGVCRGGIENRRSRRNRKTRYRPPRFDNRVHSKHKGWLAPSVEVKIQEHITVIKRICRILPITLVRVETAEFDTQRLKAMLEGKPLPVGTDYQLGEMYDEYNVRQYVLKRDNYTCQCCGAHTTAKKAVKLHVHHLESRKMGGNAPGNLITLCITCHDALHKGKVSLDNKKRGKPMRDAAFMGIMRRTLMSRLREELPITVQGTYGYITKMQREQNDIKKSHVNDARCISKHPLAEPCSVCYRTKAIRHHNRQTHKANFSKGGIRKRSQMPYVVEGYRLWDKVLYKGQECFVSGRRTSGSFTLKKLDGTRISKGVTFKKLRLLEPATNYLIERM

SEQ ID NO: 4984 - protein, 420 aa, Geobacillus sp.
LFVYIINKHGKPLMPCSPRKARLLLKQKKAKVVRRRTPFTIQLLYGSSGYKQPVSLGVDMGTRHVGISATTKKDVLFEAEAQLRTDIVELLAIRRQFRRSRRNRKTRYREARFLNRRKPEGWLPPSIQHKINSHIKLIDLVHNILPVTSVTIEVAAFDTQKLKNLNIRGVEYQQGEQMGFWNVREYVLYRDNHTCQYCKGKKKDPVLQVHHIESRKTGGDSPDNLITLCKTCHHEIHEKGLEHIFQRKRPPMRDASQMTAMRWAMFSRIREKYSHANITYGYITKCIRIANGLSKSHMVDARCISGNPLAKPSGTVYLLKFVRKNNRQLHKATILKGGKRKSNKAPRFVKGFQLFDKVVYERKECFIFGRRSSGYFDLRLLDGTKVHASASWKKLKRVEHASTLLIERRKGDSSPTFALA

SEQ ID NO: 4985 - protein, 475 aa, unidentified
  REGION 1..475: note = Human gut metagenome
MVAVVTSTGKPLMPTSAYRARKLLKKGRAVIFKYRPYFTIQLVDRADGEVQEVEYKSDTGSVHVGISVCTEKKELLSEQRDLLENEPEHHNDRKKNRRTRRNRKRYRKPRFDNRKKKPQEGHEKWLPPTLLHKMEVQVRLFREFCRVVPVTSACFEMGKFDTQALKAVSKGEPVPEGEGYQKGERYGTDTLRAAVFLRDGHTCRFCGRSVKDGAILHVHHVGYWKGDRTNRPANLASACEQCHTPANHGKNGILYGKEPEFKTLKDASYMTSVRWIMLDEIKKAAPGVQVSVTYGVTTKRKRQELHLPKSHVNDAFSMASFHPKKRSDTEYWKKIPRHDRVLQKFYDAIYLDTRDGSEKKGSELSNGRISRNHKKDSENLHQYRGHKVSKGHNSIRRGASSLKPGSIVMYKGEKMTVHGTHTRYVKGKDGKTAKKVNVQFTCPASDGKKSASLEKCTPVSRVYNTGWKRYWPDKK

SEQ ID NO: 4986 - protein, 406 aa, Geobacillus sp.; identical to SEQ ID NO: 3747

SEQ ID NO: 4987 - protein, 551 aa, Moorena sp.; identical to SEQ ID NO: 3229

SEQ ID NO: 4988 - protein, 438 aa, Ktedonobacter sp.; identical to SEQ ID NO: 3545

SEQ ID NO: 4989 - protein, 279 aa, unidentified
  REGION 1..279: note = Human gut metagenome
VVVETAEFDLQLLKAIADGKPVPQGEDYQKGEMYGHYNVRQYVLWRDNYTCQCCGAHATKKKEVRLHVHHLESRKVGGDAPDNQVTLCESCHEKLHKGLITAKDFKKRKRRSTRDATFMGIMRKTLMQMLCSELPIPVVKTRGYITKATREKLLVLPKSHTNDALAIAQGKRGFNVGYLPEIAQIDKIYTIRPVRHHNRQLHKATILKGGIRKSNQTEKYVFGYRLFDKVQFNGQDCFIWGRRTTGIFTIKTINGKMIKDGISFKKLKPVEKSTSYLIA

SEQ ID NO: 4990 - protein, 419 aa, Geobacillus sp.; identical to SEQ ID NO: 2623

SEQ ID NO: 4991 - protein, 545 aa, unidentified
  REGION 1..545: note = Human gut metagenome
VQFAWWLCHPKPSDNIEDVNHETALMLLQIKAGTETFGTAPCGSGPKAEGVSPERKAMNTVAVVTNTNKPLMPTSPYRARKLLSSGKAKIVKHRPFTILLVNRSDGNVQEIEYKSDTGYLHVGISVCSEKREFVREQRDLLPDEREKHNDRRKYRRTRRNRKRYRKARFDNRIGKIRKKEKNEHVWLPPSLEHKVDAQVQLFLRLYQVMPVKRAVFEMGQFDPALMKALEKGEAAPQGIDYQMGERYQIATRRAAVFTRDRYACVFCGRSIKDHAILHVHHIGFWKQDRSNRLDNLATCCEQCHTSENHRPGGILYGVEPKLESLASATYMNVVRFELLRRLKEAAPDVEFHISYGAKTSVIRKQRSISKSHTNDAYCLGQYFPKLRAEEIGFQKIRRNDRILQKFYDAEYLDSRDGTTKKGKELTNGRISRNHKKDHKNLHQYRGKKLSKGRITIRRGRSSLKPGGLVRFDGELLTVHGTHRSRKKNKAGHIKVSVNVEFECPSKTGRKSAALSKCQIISRSYNTGWKQIQLRKEEQGRIAAVV

SEQ ID NO: 4992 - protein, 420 aa, unidentified
  REGION 1..420: note = Human gut metagenome
MQYVYVLNKHGEPLMPCSPGKARILLKQQKACVVKRTPFTIKLLYGSAGYKQPITLGVDAGSKHIGLSASTEKRELYSEEFTPRNDVVELLSTRRQNHRSRRNRKTRYRAPRFNNRIHSKHKGWLAPSVEVKIQEHITVIKRICRILLITLVRVETAEFDTQRLKAMLSGKPLPVGTDYQLGEMYDEYNARQYVLRRDNYTCQRCGAHTTKKKTVKLHVHHLESRKTGGNAPSNLITLCVDCHKAFHAGKVKLDGKKRGKSLKDAAFMGAMRNTLLTRLRNELNIPVQNTYGYITKLLREQNDIKKSHVNDARCISKHPLAEPCSVCYRTKAIRHHNRQTHKANFSKGGIRKRSQMPYVVEGYRLWDKVLYKGQECFVSGRRASGSFTLKKLDGTRISKGVTFKKLRLLEPATNYLIERM

SEQ ID NO: 4993 - protein, 250 aa, unidentified
  REGION 1..250: note = Human gut metagenome
MVYVQDINGKPMMPTTRHGKVRRLLKDKKAVVVNLCPFTIRLTYVTSDYKQEIVLGVDAGTKHVGLSATTKSKELYSSEVILRSDIVDLLSTRRELRKTRRNRLRYRKLRFDNRVKSKRSGWIAPSVKYKIDAHIRIVDNVCSILPISRIVIEVAQFDTQKIKNPNISGKEYQEGDQLGFWNVREYVLARDGHKCQYCKGKSKDKILNVHHIESRKTGGDSPSNLITLCETCHKEYHKGNIDLKIRRGKS

SEQ ID NO: 4994 - protein, 353 aa, Arthrospira sp.; identical to SEQ ID NO: 3451

SEQ ID NO: 4995 - protein, 426 aa, unidentified
  REGION 1..426: note = Human gut metagenome
MSTVYVLNKDGKPLMPTTRGGHVRYLLKEKKARVVTSKPFTIQLLYETDDVVQPLYLGIDPGRTNIGVAVVKTDGTAVFTAHLETRNKEIPKLMQGRKKARLLQTHINLIKKIRKFLPVNDVVLEINKFAFMQLDNPNIQKWQYQQGPLYQKASLEEAVSEMQEHHCLFCKQSIVHYHHVVPQSENGSDTIGNIVGLCTKHHDLVHKDTAWQKKLAKKKTGLNKKYGALSILNQIIPALTKELSSLFPKHFFATNGKSTHDYRAAHDVSKDHWLDAYCIACSILPNDTCDKNINGRVPYKLKQFRRHDRRALHKENMSRVYTLDGKKVATNRHKAIKQTTDSLEEFRQRQPNDVCKLKVKEHHPEYRNPERNFPGCVFLVGKHTHVMQGTSGSHNGKADGYYDTNGNSYPSGKCKFVAKNKGIVFA

SEQ ID NO: 4996 - protein, 472 aa, Acidithiobacillus sp.
MAVFVLDKRHKPLMPCSEKRARILLERGRARVHRMVPFTIRLVDRLQKDSVLQDVRIGLDPGSKVTGIAVTRERDAVDQATGEVVKIRVVLMLLELQHRGSVIRDRLTSRRAFRRRRRNQLRYRPARFDNRTKPRDWLAPSLQHRVDTTMAWVSRLMRWLPITALSQELVKFDMQGMQNPEISGAEYQQGTLAGYEVREYLLEKWCRKCAYCDAENIPLEIDHIHPRSKGGSDRVSNLTLACHDCNQAKGNKPLEQFMVKQPDRVRKMLAQAKAPLRDAAAVNTIRWALFQRLKATGLDVETGTGGRTKWNRMRLSVPKAHCLDAACVGHVDTIKKWQQQPVLSIKATGRGSYQRTRLTKYGFPRGYFTRSKSVFGFQTGDMVRAMVTTGKKAGAYLGRVAIRASGSFNIQSANGLVQGIHRRFCTLVQRADGYGYSWDKIALQQGDAGMGRSSTAALSLPGMNAGVPRATG

SEQ ID NO: 4997 - protein, 471 aa, Caldicellulosiruptor sp.; identical to SEQ ID NO: 4560

SEQ ID NO: 4998 - protein, 408 aa, Fervidobacterium sp.
MVFVISKDGKPLMPTKRLGKVRRLLKQGLAKVVNREPFTIQLLYETTNYTQPVTVGIDTGSKVVGVSAVTDKEEIFSAEVQLRQDIKKLLLERRQHRRFRRYRKTRYRKPRFLNRRKEDGWLPPSLQWKVDAHVRIVNKLSKIIPITKVVVEVAPFDIQKVQNPDIEAKDYQNGPQKGFSDVRDYCLWRAGYKSELSGKTGILEIHHIIPRSEGGTDAPNNLIVLTTQEHKMLHEGKIKIPKSRLEQIKVFKHVAHVSTIGWHIVNKLRQNYHVEITYGSITKEKRILYGLEKSHRDDALVIAGGNIQERASEWYFGKFFRRQNRSLHKANPIKGGKRPINTVKQVRGFRRFDKVECEGEKGIITGLRSSGYFSISSLSGEKISDSVKYTKLRLIERAKTLMFERRER

SEQ ID NO: 4999 - protein, 267 aa, unidentified
  REGION 1..267: note = gut metagenome
LKAVAEGKPVPQGEDYQKGEMYGHYNVRQYVLWRDSYTCCICGVHGSVRKGVPLHVHHLESRRVGGDAPDNLVTLCTACHDKLHKGIIMAADIKKRKRRSTRDATFMGIMRMTLLRRLREQLPVPVVETRGYITKATREKLLVLPKSHTNDALAIAHGPQGFRAGYLPNIRQADRLYTIRPVRHHNRQLHKATILKSGVRKANQAETYICGFRLYDKVLYNGIECFVWGRRTSGSFLLRQLNGEKVKDGVSHKHLKLLERSQSYLVA

SEQ ID NO: 5000 - protein, 417 aa, unidentified
  REGION 1..417: note = Human gut metagenome
MSTTVFVLDKKHRPLMPCRPARARRLLRAGRARVVKRFPFVIRLVDRTVEQSEVQPVLIKLDPGSRETGAAVVRDDEKKRHHALAFFVIKHRGGAIRDALKARSAFRRRRRSQNLRCRSPRFLNRVKPKGWLPPSLRHRVETTLSFVRRMCRYLPVSGIATELVKFDSQKLQNPEVSGVKYQQGTLFEYEVREYLLEKFGRKCVYCGAEGVPLNIDHVVPRAKGGSNRVSNLVLARVRRELKTPLRDAAAVNATRWVLFNELKATGLPVETGSGALTKLNRHAFGVEKEHWLDALCVGRLNGVVTRKGLNVLEIRCMGRGSRQRTRLTKYGFPRGYLMRQKCVHGFATGDMVEANVPKGKKAGLWRGRVAVRVSGSFNIQTPKGVIQGVGWKHCRLISHNDGYGYAWLGHAPHSSPA

SEQ ID NO: 5001 - protein, 465 aa, unidentified; identical to SEQ ID NO: 3856
  REGION 1..465: note = Human gut metagenome

SEQ ID NO: 5002 - protein, 431 aa, unidentified
  REGION 1..431: note = Human gut metagenome
MPNKVYVINKHGRPLMPCSPAKARHLLDDGKAKVKKRTPFTIQLIYGSSGYTEDVILGVDAGSKTIGLSASTEQEELFAANVTPRNDVVDLLSTRREFRRTRRSRKTRHRKARFNNRVHSKHKGWLAPSVEVKIQEHITCIKRVCNILPISKVVVETAEFDLQLLKAVEEGKPVPQGEDYQKGEMYGHYNVRQYVLWRDGYTCQCCGAHSTKKKDVKLHVHHLETRKTGGDAPSNQITLCEDCHQKLHKGLIPAADFKKRKRKSTRDAAFMGIMRNTLMQRLRSELPIPVAETRGYITKATREKLLVLSKSHTNDALAIAQGRHGFNVGYLQSIPQNNRIYTIRPVRHHNRQLHKATVLKGGIRRVNQAVKYVYGFRLYDKVRYNGVECFVWARRVMGYFRLRHLGGENVKCGANYKNLELLERSQNYLIA

SEQ ID NO: 5003 - protein, 477 aa, unidentified; identical to SEQ ID NO: 2707
  REGION 1..477: note = Human gut metagenome

SEQ ID NO: 5004 - protein, 451 aa, unidentified
  REGION 1..451: note = Human gut metagenome
VTTILKTCFAAFNLAKVVVLMDAWDIIVVLNKRGKPLMPCSPAKARLLLKEKKAIVKRRTPFTIQLTIATGETKQPVSLGVDAGYKHVGLSASTEKAELYASEVELRQDVSDLLSARRALRQCRRNRKTRYRAPRFDNRIRTKRKGRLAPSVENRINAHLSRIEAVLRLLPVTKITVETASFDTQLLKNPDISGKEYQEGEQLGFWNIREYVLCRDGHVCQHCYGRSKDPVLNVHHLESRRTGGNSPGNLITLCETCHKALHRGEITLKAKRGQSFRAEAFMGIMRWEVLDRLKASHPKLEVHNTYGYRTKHARIANGIAKSHCADAFCIAGNLGAERLCEFFFQKQTRRNNRQIHKLSILKGGIRKRNQAPFEVKGFRLFDKVACKGEEGFIFGRRSSGFFDVRKLDGTRISAGISCKKLHLLEKRRTYLTEIRKEEALPPLPEGRGLRA

SEQ ID NO: 5005 - protein, 460 aa, Lactobacillus sp.
LDEWQESLFPALRKRRKNMKHENANRVFLLNRDGNPLMPCRPRKARLLLKSGKAFVVKKYPFTIQLKYGSYGYKQKVSLGVDTGQRHIGFAVVSQEKVLCQSEVELRQDVHANLYTRKIYRRSKRNRKTRYRQARFLNRVHGKRDGLWLPPSIKGKVSHNIAWIKRYLAVLPNPDLHIEVGKFDMAKMLNPQISGKQYQEGSLKDWKNYEYYVLARDEYTCQLCHKHGEGVKLVVHHIVYRSQGGTNRVDNLITLCTDCHTTKNHQPGGKLYKWMKAKKKVTKQLKGATFMNILRKRIMTAFPEASFQYGSQTYVDRKNLLLPKGHFMDAIAISGVKSVGQMPETVTMISQFRKKKRSLHEATARKGRKQPNKAAKRNAKNTKYARGIWLNDYVRIIGNNAKGYVQGFKSNGYFVYLADGLGNYVLNNGKNYINRKQCRLIMHNGNWQKAEQKLSLYEFK

SEQ ID NO: 5006 - protein, 551 aa, Moorena sp.; identical to SEQ ID NO: 3229

SEQ ID NO: 5007 - protein, 414 aa, unidentified
  REGION 1..414: note = Human gut metagenome
MPCSPAKARLLLKEKKAIVKRRTPFTIQLTIATGETKQPVSLGVDAGYKHVGLSASTEKAELYASEVELRQDITDLLSARRALRQSRRNRKTRYRAPRFDNRIRTKRKGWLAPSVENRINAHLSRIEAVLRLLPVTKITVETASFDLQLLKNPDISGKEYQEGEQLGFWNIREYVLCRDGHVCQHCYGRSKDPVLNVHHLESRRTGGDSPGNLITLCETCHKALHRGEITLKAKRGQSFRAEAFMGIMRWEVLNRLKASHPELEVNNTYGYRTKHARIANDIAKSHCADAFCIAGNLGAERLGEFFFQKQTRRNNRQIHKLSILKGGIRKRNQAPFEVKGFRLFDKVACQGEEGFIFGRRSSGFFDVRKLDGTRISAGISYKKLHLLEKRRTYLTEIRKEEALPPLPEGRGLRA

SEQ ID NO: 5008 - protein, 454 aa, Acidithiobacillus sp.
MAVLVLDKRKKPLMPCSEKRARLLLERGRARVHRMVPFTIRLVDRLQEDSTLQPVRLKLDPGSKTTGMALVREQESVDEDTGEIQRKAIVLMLLELQHRGYAIRDALTQRRAFRRRRRGNLRYRPARFDNRAKPEGRLAPSLQHRVDTTMAWVQRLLRWAPVSALSTMLHRFDTQALQNPEISGIEYQRGELFGYEVREYLLEKWGRKCAYCDAQNTPLTIDHIHPRSAGGSDRVSNLTLACFPCNQRKSNRDVREFLAHDPKRLTRIEASRKAPLKDTAAVNSTRWALWRQLVATGLDVEVGTGGRTKWNRSRLQIPKEHCLDAACVGHVDGLEHWQQPVLGIKATGRGSYQRTRLTKHGFPRGYLTRSKSAFGFQTGDMVKAVVTKGKKVGTYLGRVAIRASGSFNIQTGNGLVQHIHYRFCKLVQRGDGYGYHWSLLHPALNHGIAEAGRN

SEQ ID NO: 5009 - protein, 423 aa, Moorena sp.
MSNFVFVLDTQKRPINPIQPGLARKLLTSGKAVVFRRYPFTIILNENAIATPEPITLKIDPGSKTTGIALLQGEKVIWGAELTHRGQAIKASLESRRSLCRGRRNRHTRYRQARFLNRKRPKGWLAPSLQHRVETTLTWVKRLIKLAPISSIVEELVRFDLQQLENPEISGVEYQQGELVGYEVREYLLNKWERKCAYCAVENVPLQVEHIHPKAKGGTNCISNLCLACEKCNTKKGTQSIEKFLAKKPDILKRILSQAKRPLKDAAAVNSTRWGLFNRLKETGLPVSTGSGGLTKFNRTRLNLPKTHWIEAACVGQIDSVNLLTNQPLLIKAMGHGTRQMCRTDKFGFPSRYVPRLKFIKGFQTGDIVKAVVTSGKKIGTYVGRVAIRTSGSFNISVPELVSGINYKYCKTVHKKDGYSYAF

SEQ ID NO: 5010 - protein, 429 aa, Moorena sp.; identical to SEQ ID NO: 3501

SEQ ID NO: 5011 - protein, 443 aa, Oligella sp.; identical to SEQ ID NO: 4852

SEQ ID NO: 5012 - protein, 414 aa, Parasutterella sp.
MPCSPAKARLLLKEKKAIVKRRTPFTIQLTIATGESKQPVSLGVDAGYKHVGLSASTEKAELYASEVELRQDITDLLSARRALRQSRRNRKMRYRAPRFDNRIRTKRKGWLAPSVENRINAHLSRIETVIRLLPVTKISVETTSFDMQLLKNSDIAGKECQESEQLGFWNVREYVLFRDGHVCQHCHGRSKDPVLNVHHLESRRTGGDSPGNLITLCETCHKALHRGEITLKAKRGQSFRAETFMGIMRWEVLDRLKASHPKLEVQNTYGYRTKHARIVNGIAKSHCADAFCIAGNLGAERLCEFLFQKQTRRNNRQIHKLSILKGGIRKRNQVPFEVKGFRLFDKVACKGEEGFIFGRRSSGYFDVRKLDGTHVSAGISYKKLRLLEKRQTYLTEIRKEEALPPLPEGRGLRA

SEQ ID NO: 5013 - protein, 437 aa, Ktedonobacter sp.
MVLVSVLNSDGRPLMPCLPPIARLLLKAGKAKVVRRTPFTIKLLVPLTHEHTQPLTLGMDTGSTVVGAAVADEQGKVVYLSEAELRNDITTTMKERAAKRRNRRQRKTRYRPARFNNRRNSTKQGRFSPTMGSKIEGHLREFRFVQAIFPITHIVLETGTFDPHALKHPEVLRKKWLYQQGINYGFANTKAFVLTRDDYTCQQCKGKSKDRRLEVHHIIFRSQNGSNEPENLLTLCKTCHDGLHAGTITLKQKGKKKGTLRHATQMNSIRVQLLKRLRAEETWGFVTKEHRMLAGLPKTHAHDAAIIATRGIAPIFCTTQVLQKKCISDGDYQQTKGVRSEQPITTGKIQGFRKFDTVRYRGQEYFIKGRMSTGYAILMGLDGKKVDLKPIPKFEKMKRVSARSTWMISQKPCQVVDPLPPHVRAEGSQKAAGFLWR

SEQ ID NO: 5014 - protein, 279 aa, unidentified
  REGION 1..279: note = Human gut metagenome
VVVETAEFDLQLLKAIADGKPVPQGEDYQKGEMYGHYNVRQYVLWRDNYTCQCCGTHPSKKKEVRLHVHHLESRKVGGDAPDNQVTLCESCHEKLHKGLIAEKDFKKRKRRSTRDATFMGIMRKTLMQRLCSELPIPVVKTRGYITKATREKLLVLPKSHTNDALAIAQGKQGFNVGYLPGIVQIDKICTIRPVRHHNRQLHKATILKGGIRKSNQTEKYVFGYCLFDKVQFNGQDCFIWGRRTTGIFTIKTINGKMIKDGISFKKLKLVEKSTSYLIA

SEQ ID NO: 5015 - protein, 452 aa, Ktedonobacter sp.; identical to SEQ ID NO: 4845

SEQ ID NO: 5016 - protein, 317 aa, Lamprocystis sp.
MAVFVLDRRGKPLMPCSEKRARLLLTRGRARVHRVVPLQNPQISGVAYQQGTLAGYEVREYLLEQWGRRCAYCTGDGVPLEIDHITPRSRGGSDRVTNLTLACHPCNQAKGNRSAAEFGHPEIEAKAKQSLGDAAAVNSTRWSLLNALTATGLAVETGTGGRTKWNRTRLGVPKTHALDAACVGVVEGVTGWVAPVLSIRCTGRGAYQRTRVTQDGFPRGYLMRHKQVRGFQTGDLVRATVPSGKKAGIHMGRVAVRATGRFNIQTPQGVVQGIGYRHCCVIQRGDGYGYAQLGATALPSPAIRSRPEGRGFSRRNG

SEQ ID NO: 5017 - protein, 515 aa, unidentified
  REGION 1..515: note = Human gut metagenome
VTDVSTIYVLNKDGKPLMPTTRCGHVRRLLKEQKARAVASKPFTIQLLYETDNIVQPLYLGIDPGRTNIGVAVVKADGTAVFTAHLETRNKEIPKLMKKRKDSRRARRTNGRRCRRQRRAKANGTISKKCVKQATAQNGSASKRAKKIGVIKRHLPDCEKEVLCIGIKNKEAKFNNRARPEGWLTPTANQLLQTHVNLVKKIQKFLPISDIVLEVNKFAFMQLDNPNIQKWQYQQGPLYQKANLEEAVSEMQEHHCLFCKKPIEHYHHVVPQHKNGSNTISNIVGLCTKHHDLVHKDTEWHEKLTKKKTGLNKKYGALSVLNQIIPALTKELSSIFPKHFFVATGKSTYDYRAAHGVSKDHWLDAYCIACSVLPNDVCDSSINNRVPYELKQFRRHDRRALHKENMSRVYTLNGKKVATNRHKAIEQTTDSLEEFRQNNLDNVCKLKVKEHHPEYRNPKRNFPGCVFLVGKQTHVMQGTSGSHNGKADGYYDTNGNSYSSGKCKFVAKNEGIIFT

SEQ ID NO: 5018 - protein, 424 aa, unidentified
  REGION 1..424: note = Human gut metagenome
MRVFVLNMRGEPLMPCSQRKARLLLKSNKAVIYKYNPFTIQLAYATGEAKQGCRIGVDTGSKHIGLAVTSEDKVMWKAEVELRQDVKSKIDKRRMYRENRRYRKTRYRKPRFLNRKREPKWLPPSLQNKVNHTFHWIDALISLVPNPNLHIEVGKFDTAKMINPEINGVDYQHGQTYGFYDERYFVFARDNYTCQCCGKSKDKILNTHHIIYRSNGGTNRVDNLITICTDCHTSQNHKKGGILYEWQEQHKKVTQYKEPPFMNTLRRRIFTAYPDAKITYGSETTPKRKDMGLNKTHYNDAIIISGINDINENDEEWLLIKQFRKKKRSLHEATARKGRKKPNSSQVRNSKNTPYYKGFYLNDKVVVFGKSGYITGFTSDGAYIKDGDDNYITLPNKNYKQVGISKMKFECHNNNWQYIVKNAV

SEQ ID NO: 5019 - protein, 444 aa, unidentified
  REGION 1..444: note = Candidatus Anoxychlamydiales bacterium
MLAFVLNKLKKPLMPCSSAKAKRLLKKGLAKVISKKPFTIKLLFGSSGHKQEVISGMDTGSKTIGIAAIANGKILYQAQTKLRGEEIKKKMDQRRMYRRSRRSRKLRYRKPRFLNRRASTAINRLAPSVKHKLLSHLREKKFIESILPVSMWIVETASFDIHKITNPKGVSKALGKGRTYQKGRMLDFYNVKQYVLNRDKYQCQVCKKKNNLKLHVHHIQFRSNGGSNSPDNLVILCETCHDKLHKLKKEEAEKSSKKLQKSAQKQTKHATESSILRSQLCKHFKKLESSQVFEETFGYITKFNRERALLPKSHYIDAICIASRGKIPEMHIQNNTSDLFLRRCVSKGDYKQRRGICSELKIPTGKLFGLKKFDLVKTSKGVGFVKGKRSSGFFAISDINGTLISDSVNIKKNIGRIQARKAVLTWRSQFLPDLKDRVSLREKR

SEQ ID NO: 5020 - protein, 431 aa, unidentified
  REGION 1..431: note = Human gut metagenome
MPNKVYVINKHGRPLMPCSPAKARHLLDDGKAKVKKRTPFTIQLVYGSSGYTQEVILGVDAGSKTIGMSASTTKEELLSAEVKPRNDVVDLLSTRREFRRARRNRKTRYRKPRFDNRVRSKHKGWLAPSVEVKIQEHITAIRRVCGILPVSKVVVETAEFDLQLLKAIADGKPVPQGEDYQKGEMYGHYNVRQYVLWRDNYTCQCCGTHPSKKKEVRLHVHHLESRKVGGDAPDNQVTLCESCHEKLHKGLIAEKDFKKRKRRSTRDATFMGIMRKTLMQRLCSELPIPVVKTRGYITKATREKLLVLPKSHTNDALAIAQGKRGFNVGYLPEIAQIDKIYTIRPVRHHNRQLHKATILKGGIRKSNQTEKYVFGYRLFDKVQFNGQDCFIWGRRTTGIFTIKTINGKMIKDGISFKKLKLVEKSTSYLIA

SEQ ID NO: 5021 - protein, 465 aa, unidentified
  REGION 1..465: note = Human gut metagenome
MSTCVCVLSNNGERLMPTFRLGRVRHLLKDGKAKIIKRHPFTIQLLYDSKTNTQPIEICEDVGYNYIGISVKSESHEYVSAQYDTLQDEKKHHDDCRKYRRTRRNRLRYRKPRFDNRKRSEGWLAPSLEHKKQLNIRLIERYVSVIPITRATVEVGSFDTMLLQAIQKGKSKPEGVDYQKGPRYNLATLREAVFYRDNYTCQVCGRKIADGAILHMHHMFYWKGRHGYQLDELVTACEKCHTPANHQKGGKLYGFGEDIKFANLSGAAFMNTVRWQIVNVLYAAFGKPFVTFTYGAMTKEKRIALHLEKSHNNDAYAMGSFHPVNRCAFEHYEKVKRNNRILEKFYDSQYIDTRTGELTNGKSLFNGRISRSHKKDSENLHKYRGKRICKGHRALRRKKLALNPGDLVSLNGEILVVHGTHTKKNGSVNVEFKTPSRGGKKSASLKKLKIVKTSNSMHSAWKKVS

SEQ ID NO: 5022 - protein, 420 aa, unidentified; identical to SEQ ID NO: 3153
  REGION 1..420: note = Human gut metagenome

SEQ ID NO: 5023 - protein, 413 aa, unidentified; identical to SEQ ID NO: 2605
  REGION 1..413: note = Human gut metagenome

SEQ ID NO: 5024 - protein, 494 aa, unidentified; identical to SEQ ID NO: 2450
  REGION 1..494: note = Human gut metagenome

SEQ ID NO: 5025 - protein, 471 aa, Caldicellulosiruptor sp.; identical to SEQ ID NO: 3268

SEQ ID NO: 5026 - protein, 436 aa, unidentified
  REGION 1..436: note = Human metagenome
MTKTLTTQTIQACVLDRQGKPLMPTTRLGKVYRLLKAKKAHIVSYEPFTIQLDYEPDTQVIQPMTLGVDSGAIHSGYSVANEHREYYSAEVIARNDISNRLSERHMYRQNRRSRKTRYRKPRFNNRKNKKKGWLPPSLEQKVAVQVNEINHIHRYFPIETIIVEVAEFDIQKIKNPGISGIEYQQGTLQGYNVRNYLLEKHGRKCFYCGKAVSDFEVEHMFPKSKGGSNRIDNLTLSCHDCNEKKGTLTAEEFIQQTLPVKKATAKLKQLPNEKRLFKYMAYMNTTRWALYDAIKERYPNVKMTYGYITKYNRIQAGLPKAHHIDAKCITGFATVPSMSQTVVKVKMRRHNRQLHRATFSKGHVRKAANLPTTVFGFQLYDLVCFNNHRYYIKSRRSSGYFVLVSVENLKNEERTYKKLTLLAHTNAYLTNHYVNA

SEQ ID NO: 5027 - protein, 518 aa, Nocardiopsis sp.; identical to SEQ ID NO: 3757

SEQ ID NO: 5028 - protein, 413 aa, unidentified; identical to SEQ ID NO: 3621
  REGION 1..413: note = Human gut metagenome

SEQ ID NO: 5029 - protein, 412 aa, unidentified
  REGION 1..412: note = Human gut metagenome
MIYVLNQNGQPLMPTKNHAKVRILLKSKKAKVIRRCPFTIQLMYSSTNYTQSINLGVDAGSKHIGISATTKNKVLFESDVELRNDIVNLLSTRRQNRRTRRNRKTRYRKPRFDNRKRKDGWLAPSVQNKVDTHLTVIRKVHEILPVSKIIVEVASFDIQKIKNPTIGGTEYQQGSQLDFWNVREYVLFRDNHTCQCCKGKSKDKILNVHHIESRKTGGDAPNNLITLCGTCHTGYHKGTVNLPKRIKRGMSFKDASFMGIMRWAFYNKLKEIYPNVSLTYGYITKNTRIENKLPKDHYIDARCISGNPKAVSDWGVYYQKKVRCHNRKIHKNTILKDGYRKRNQAPYEVMGFRLYDKVRWKQQNCFIFGRRSTGRMDLRLLDGTKVNASVGYKNLKMLEMCKNILIELRMEV

SEQ ID NO: 5030 - protein, 413 aa, unidentified; identical to SEQ ID NO: 3476
  REGION 1..413: note = Human gut metagenome

SEQ ID NO: 5031 - protein, 431 aa, unidentified
  REGION 1..431: note = Human gut metagenome
MDAWDIIVVLNKRGKPLMPCSPAKARLLLKEKKAIVKRRTPFTIQLTIATGESKQPVSLGVDAGYKHVGLSASTEKAELYASEVELRQDVSDLLSARRALRQSRRNRKTRYRAPRFDNRIRTKRKGWLAPSVENRINAHLSRIEAVLRLLPVTKITVETASFDMQLLKNPDIAGKEYQEGEQLGFWNVREYVLFRDGHVCQHCHGRSKDPVLNVHHLESRRTGGDSPGNLITLCETCHKALHRGDITLKAKRGKSFRAEAFMGIMRWEVHNRLRALHPGIEVSNTYGYRTKHARIANGIAKSHCADAFCIAGNLGAERLCEFFFQKQTRRNHRQIHKLSILKGGIRKRNQAPFEVKGFRLFDKVACQGEEGFIFGRRSSGYFDVRKLDGTCISAGISYKKLHLLEKRRTYLTEIRKEEALPPLPEGRGLRA

SEQ ID NO: 5032 - protein, 419 aa, unidentified
  REGION 1..419: note = Human gut metagenome
MYVYVINKHGEPLMPCSARKARLLLKNKKACVIKRTPFTVKLLYGSSGYKQDITLGVDAGSKNIGLSASTEKHEFYREELAPRNDVVDLLSTRREFRSARRNRKKRYRPARFDNRVHSKPKGWVAPSVKVKIQEHVTAIKHICRILPITLVRVETAEFDTQRLKAMLEGKPLPVGTDYQLGEMYDEYNVRQYVLKRDNYTCQCCGAHSTKTKSVKLHVHHIESRKTGGNAPNNLITVCPACHKAIHEGKKTLGTKKRGKPFRDAAFMGIMRNTLLAILRDELTVPVQQTYGYITKMLREKNHLPKSHTNDALCIAQHPQAAPCENSYRSKAVRHHNRQLHKAKILKGGVRKKSQAPYLVKGFRLWDKVLYNRQECFISGRRSSGYFALKKLDGTVVSNSASHKKLRLLEVAKNYLIERM

SEQ ID NO: 5033 - protein, 419 aa, unidentified
  REGION 1..419: note = Human gut metagenome
GQPLMPCSPAKARHLLKAGKAAVRRRTPFTIQLRIATGETKQSVTLGVDAGAKHVGLSAATEKEEVFASEVELRQDITGLLAARLSLRRERRQRKTRYRAPRFLNRVRSKHNGWLPPSVENRIQAHLSRIDAICGLLPVTKIVIETASFDIQKIKHPDVEGTDYQQGDQLGFWNVREYVLFRDGHVCQHCHGHAKDKILNVHHLESRQTGGDAPNNLITLCETCHKACHAGKIKLKVKRGQSFRAEAFMGIMRWTLLDRVRKAHPGLPVENTYGYLTKNTRITLGLPKAHCVDAYCIAGNLKAVRRGVYLHQRQVRKHNRQIHKCTVLSKTLKDGTKIGYRKLNQTPHLVKNFRLFDKVRCLGQTGFIFGRRSSGYFDVRRLDGVKISSCISYRKLTLLEKRSTCLTELRKEDGASSPV

SEQ ID NO: 5034 - protein, 482 aa, unidentified
  REGION 1..482: note = Human gut metagenome
LVWNVQAPWDVYPSPTLCGLCLKVLRGRNGDADKKPFPTLTKDENRPSGRTTGLRAEQAEPAGIRKGDALKVFVLNMRSKPLMPCSPAKARHMLKAGKAVVVRRTPFTIKLTIATGETKQDVTLGVDAGARHVGISATTEKEEVFASEVALRQDITGLLADRLAFRRARRNRKTRYRAPRFNNRVRSKHKGWLAPSVENRIQAHISRIEAVCRLLPVTKIVIETASFDIQKIRNPEVEGTGYQQGDQLGFWNVREYVLFRDGHVCQHCHGRSRDKILNVHHLESRKTGGDAPNNLITLCETCHKAYHAGKIKLKVKRGQSFRAEAFMGIMRWTLLDRVRKTHPKLPVENTYGYLTKHKRIALGLPKTHCADAFCIAGNLKALRRGDFLFQQQTRKHNRQIHRCSILKGGVRKLNQAPFLVKGFRLFDKVRIGGQIGFVFGRRVRGIFNIRRLDKTVIGTDINCKKLSLLETRKTFLTELRKE

SEQ ID NO: 5035 - protein, 442 aa, unidentified
  REGION 1..442: note = Human gut metagenome
MSTTVFVLDKKHRPLMPCRPARARRLLRAGRARVVKRFPFVIRLVDRTVEQSEVQPVLIKLDPGSRETGAAVVRDDGKKRHHALAFFVIEHRGGAIRDALKARSAFRRRRRSQNLRCRSPRFLNRVKPKGWLPPSLRHRVETTLSFVRRMCRYLPVSGIAAELVKFDSQKLQTPEVSGIEYQQGTLFEYEVREYLLEKFGRKCVYCGAEGVPLNIDHVVPRAKGGSNRVSNLVLACVSCNQKKGARSLEDFLKGKPEVLARVRRELKTPLRDAAAVNATRWVLFNELKATGLPVETGSGALTKFNRHAFGVEKEHWLDALCVGRLNGAVTRKGLNVLEIRCMGRGSRQRTRLTKYGFPRGYLMRQKCVHGFATGDMVEANVPKGKKAGLWRGRVAVRVSGSFNIQTPKGVIQGVGWKHCRLISHNDGYGYAWLGHAPHSSPA

SEQ ID NO: 5036 - protein, 428 aa, unidentified
  REGION 1..428: note = Human gut metagenome
VPVMVYIISQDGQPLMPTDRHGKVRRLLKSDKAKVIKRCPFTIQLLYNSTDYTQRISLGIDAGSKHIGISATTQNRVLYEADVELRNDIVNLLSTRRQNRKTRRSRKTRYRKPRFNNRVSCKKKGWLAPSVKQKVNTHLTVVAKVHQILPVTKIIIETASFDIQKIKNPTISGTDYQKGDQLGFWNVREYVLFRDGHICQCCKGNSKDKILNVHHIESRKTGGDSPDNLITLCETCHKGYHKGTIKLPKTIHRGMSFRDASFMGIMRWSFYDKLKTLYPNVNLTFGYITKSTRIKNNLLKEHYVDARCISGHPLAVSDGTYYYQKKVRCHNRQIHKNTILKGCVRKRNQAPYFVKDFRLFDKVMYEGQECFIFGRRSTGRMDLRLLDRTHINASVSYKKLKLIESRKNYITERRTAVHPTDKSMGFSA

SEQ ID NO: 5037 - protein, 458 aa, Moorena sp.
LKGVGMMSEIKKVDYIYVVDSNGTPLMPTSRLGMVRRWLKTGQAKWFGNSRNTIQFVRPVTTNTQELTLGVDAGFHLGLSVVGNNREYYVSESLRKSEKDRITSRRESRRTRRNCLRYRKARFDNRRRKDSWLAPSIQYRLDFTIKEIKRLYMFLPITNLVFEVTPFDNQKLLNPDIQDWQYQKGKMYGFKTIKDYLLARDNYRDALDGKQYPASQLRVHHLVQRKDGGSNQPDNLVLLSDINHNQANHNNGILAKLRENRQKTLDYRGAYFMNILATRLSNYFDNYTITQGYLTANLRQKYEIEKSHLNDAFVIAGGTDTTLRTNNVYSRQKLRNNNRVLQKFYDAKYIDSRDGKKKTGKELSSGRTRRSRELNYTNLRQFRKEKVKKGRVSIRRGHYQLRPHDVVLNTRTNRIETVKGVQNSGTVIKFQTGKTCSIKSVVSLYHVNGILEKKMENI

SEQ ID NO: 5038 - protein, 471 aa, Caldicellulosiruptor sp.; identical to SEQ ID NO: 3268

SEQ ID NO: 5039 - protein, 429 aa, Ktedonobacter sp.; identical to SEQ ID NO: 4203

SEQ ID NO: 5040 - protein, 452 aa, Ktedonobacter sp.; identical to SEQ ID NO: 4590

SEQ ID NO: 5041 - protein, 425 aa, Planktothrix sp.; identical to SEQ ID NO: 3728

SEQ ID NO: 5042 - protein, 416 aa, unidentified
  REGION 1..416: note = Human gut metagenome
MTNCENYAFVLDAEGKQLSPTKEKKAWYLIRKKRAILVSKYPMVIQLNKIVSNDNICKDEIRCGIDDGGLHVGIALVQKCQTKNKTLFKGTIEQRNDVKHLMKVRWDYRRYRRYHKRYRPKRINNRSSSKRTDRIAPSILQKRQATLRVITQLNKWINITSYWLEDVTIDVRVLTDGFSSYGWQYQKSNRLDENIRKAVILRDGCRCMECGQSNCRLEVHHIKPRRLNGSNTLGNLITLCESCHQKTEGKEEQYMQHYFNILESSDNKNLNYASYVMIGKTWLRKQLSQLGVLNLTTGGNTANKRIDWNIEKSHSNDAVCITDLQPDSCNVKDWIIKPMRRQSKAKTDNVLGIKHRDLVSYVYKNGELHTGYVTALYPELNALNFQSPTKHCKKVNVRKCRVLWKYNKIYWLDSVS

SEQ ID NO: 5043 - protein, 423 aa, Moorena sp.; identical to SEQ ID NO: 3865

SEQ ID NO: 5044 - protein, 625 aa, Streptomyces sp.
VPLGAPPPRVHLGLGSHEGAFPGPCSTFRTARTTNFDGIHETGGHPLPGRRPSGDQLQSSRSEGSGRCDPMTTFPVGEQTHQAVLPQQPALESVGADTPGSRDETAHGHSAAVRGTGREHGRGETGGRGTAARRRHAKRAVPAAQAAETGSGDVPALDRSGRPYTGGTGASRVFVLSRDGRPLMPCHPARARELLRKGRAVVVRQVPFVIRLKDRTHDESEVEGVQLRIDPGSKGTGLVLTDEKKESGDQGAVITVRRGLVSVELRHRGDQIRAGMRQRAGYRRRRRSANLRYRAGRSDNRARRAGWLPPSVRHRVDTTFSLADRLCRCAPVTEIHVEHVAFDTHSLSAGRLLKGTEHQRGPLAGTSVRDHLRVTWDGSCAYCGVSGVPLNVEHVRPRSRGGSDRISNLVLACSPCNKAKGSKPVEAFLADSADRLTAILTQVRAPLDDAASMNATRWQLTDALSALGKPVHTWSGSLTKANRVAMGLDKTHTLDALCVGPLDHAVGDRIVRFPQHVLTARATGRGSYARTTPDRYGFPRLLRTRAKRHFGYVTGDLVRAVVPGGKWAGTWTGRVSVRARGQHSLSTPRGRINVSHRNLRLLQRGDGYGWAMRPESPQSPSPKMG

SEQ ID NO: 5045 - protein, 442 aa, unidentified; identical to SEQ ID NO: 2903
  REGION 1..442: note = Human gut metagenome

SEQ ID NO: 5046 - protein, 417 aa, unidentified
  REGION 1..417: note = Human gut metagenome
MPCSPAKARLLLKEKKAIVKRRTPFTIQLTIATGEAKQPITLGVDSGYKHIGLSATTEKAELYASQVELRQDITDLLSARLALRRSRRSRKTRYRAPRFNNRVASKRKGWLAPSVENRITAHMSRVEAVMRVLPVTAITVETAAFDTQLLKNPDIAGEAYQQGEQLGFWNVREYVLFRDGHVCQHCRGKYKDPILNVHHIESRRTGGDAPNNLITLCETCHKAFHRGEIKLKVKRGKSFKAATFMGIMRWTLFERLKKAHPELSVRNTYGYLTKHKRISHGIAKSHCADAYCIADNLGAKRLEGFFFQKQTRKHNRQIHKLSILKGGLRKKNQAPYEVKGFRLFDKVICKGKEAFIFGRRTSGSFDVRRLDGTRISAGISYKKLRLLEPRTTYLTEFRKEAALPPLHKCRGFCAEFL

SEQ ID NO: 5047 - protein, 415 aa, unidentified
  REGION 1..415: note = Human gut metagenome
MIYVRSKVGKALMPSERGGRIGYLLRHGKAHVVSRVPFVVQLDYESTTYTQEVSLGIDAGSKHIGVSASSEKKELLAAQVELRNDVVNLLSTRRELRRTRRNRKTRYRKVRFDNRKKKDGWLAPSVKQKVESHLKVIRLVRKLLPITKTTIEVAQFDAQKIKRPDIQGEEYQQGEQMGFWNVREYVLARDGHRCVHCKGKSKDHILNVHHLESRKTGGNSPSNLVTLCETCHKAYHRGEFELKIKRGNSLRDAAVMNIMRWVVYERAKEEFENVHLTYGYVTKHTRIENGIAKTHAADAFCIAKNVHAMRLSSFFMCRCVPRHTRVLHVANPKKGGIRRSTIASHKIGKSRFQRFDMVRWRGKECFIFGSTHGNVVLRKIDGVKVHETQAVSAKTIKFLKRIRNNILVEEIVSIS

SEQ ID NO: 5048 - protein, 412 aa, unidentified
  REGION 1..412: note = Human gut metagenome
MPCSPAKARLLLKEKKAIVVRRTPFTIQLTIATGEAKQPVSLGVGYKHVGLSASTEKAELYASEVELRQDVSDLLSARRALRQSRRSRNTRYRAPRFDNRIRTKRKGWLAPTVENRINVHLSRIETVLRLLPVTKITVETASFDTQLLKNPDIAGKEYQEGEQLGFWNVREYVLFRDGHVCQHCHGRSKDPVLNVHHLESRRTGGDSPGNLITLCETCHKALHRGEIKLKAKRGRSFRAETFMGIMRWEVLNRLKASHPKLEVHNTYGYRTKHARIANGIAKSHCADAFCIAGNFGAKRLGEFFFQKQTRRNNRQIHKLSILKGGIRKRNQAPFEVKGFRLFDKVACQGEEGFIFGRRSTGYFDVRKLDGTCISAGISYKKLHLLEKRRTYLTEIRKEEALPPPPEGRGLRA

SEQ ID NO: 5049 - protein, 568 aa, Branchiibius sp.; identical to SEQ ID NO: 4833

SEQ ID NO: 5050 - protein, 423 aa, Lactobacillus sp.
MPCRPRKARLLLKSGKAFVVKKYPFTIQLKYGSYGYKQKVSLGVDTGQRHIGFAVVSQDKVLHQSEVELRQDVHTNLYTRKIYHRGRRNRKTRYRQARFLNRVHGKRDGLWLPPSVKSKVSHNIAWIKSYLAVLPNPDLHIEVGKFDMAKMVNPDISGKQYQEGSLKDWKNYEYYVLARDEYTCQLCHKHGECVKLVVHHIVYRSQGGTDRVDNLTTLCTNCHTTKNHQPGGKLYKWMKAKKKVTKQLKGATFMNILRKRIMTTFPEASFQYGSQTYVDRKNLLLPKGHFMDAIAISGIKSVGQMLETVTMISQFRKKKRSLHEATARKGRKQPNTSSKRNEKNTKYACGLWLNDYVRVIGNHVKGYVKGFKSNGYYVYLTDGLGNYVLNSGRNYVNTKQCQLITHNGSWQKAEQKLSLYKFK

SEQ ID NO: 5051 - protein, 470 aa, unidentified; identical to SEQ ID NO: 2825
  REGION 1..470: note = Human gut metagenome

SEQ ID NO: 5052 - protein, 411 aa, unidentified; identical to SEQ ID NO: 3762
  REGION 1..411: note = Human gut metagenome

SEQ ID NO: 5053 - protein, 412 aa, unidentified
  REGION 1..412: note = Human metagenome
MENNIKYCFVIDKDNQPLAPTKVNKGWYLIRKSRAKLKSMYPMVIQLNKKVESNENDKSYMACGIDDGSVHVGLAIVQKCPTKNKVVFKGTIEQRQDVKHLMDTRRGYRQYHRYHKRHRPARFNNRSSSKRIGRLVPSIKQKKDAILRVLYQLNKWINIKEYYLEDVCIDIRAMTDDYKPYKWQYQKSNRLDENLRKAAIIRDNYKCQECGKSNCKLEVHYIRARKYHGADTIGNLITLCSKCHEKTEGKEKDFEDKYFKMINSKPKRFDYAMHVMQGKNYLRNKISKLGLLHLTNGCTTANKRIEWNIEKSHSNDAICITNSIPDSCNIKEWTIKPMRRKSKAKTDNVLGIKHRDLVSYTYKNGETHIGYVTALYPEQLALNFQSKTKHCKKVNAQKCRLLWKFNKIYWLK

SEQ ID NO: 5054 - protein, 431 aa, unidentified
  REGION 1..431: note = Human gut metagenome
MYLHERSTCMVYVLGYNGQPLMPTCRHGKIRHLLDSGKAKVVRRCPFTIKLLYESTTYTQNLTLGQDTGSGTLATAVVDSKGFVVYMSEVTLRNDISERLSQRSRYRRNRRSRKTRYRKARFLNRRNSIRKDRFSPTMVSKFYGHVKEIEFIKKLLPVTRMVLETGTFNPHLMKDPMLAYRPWGYQKGPNYGFGNTKAMVLNRDNYTCQHCKGKHKDSHLEVHHIVYRSQGGSDAPENLITLCHTCHTGVHKSIIKLQISGKKKGSLKYATQMNSIRCQLLKSYPDAIETFGYITKENRQLLGVPKEHYYDACTIASGGDPFVVNTLLYRKRCIPAGDFQQTKGVRSEQKITTGKILGFRKFDKVSYMGSVYFIKGRMSSGYAVLMDLDGNKADFSQMPKGFRTPKLSNLTRLEARPTWMTIPVVVTQNTA

SEQ ID NO: 5055 - protein, 428 aa, unidentified
  REGION 1..428: note = Human gut metagenome
LKVFVLNMRGQPLMPCSPAKARHLLKAGKAVVKRRTPFTIQLRIATGETKQNVTLGVDAGAKHVGLSATTEKEEVFASEVELRQDITGLLAARLSLRRDRRHRKTRYRAPRFLNRVRSKHKGWLAPSVENRIQAHMSRIDAVCRLLPVTKIVIETASFDIQKIKDPSVEGTDYQQGDQLGFWNVREYVLFRDGHVCQHCHGRSKDKILNVHHLESRQTGGDAPNNLITLCETCHKAYHAGKIKLKVKRGQSFRAEAFMGIMRWTLLDRVRKAHPGLPVENTYGYLTKHTRITHGLPKTHCVDAYCIAGNLKAVRRGVYLHQRQMRKHNRQIHKFTVLSKRLEDGTKIGYRKLNQSPYLVHGFRLFDKVRCLGQIGFIFGRRSSGYFDVRRLDGVKLSPSISWRKLTLLEKRSTYLTELRKQDGASSPV

SEQ ID NO: 5056 - protein, 451 aa, Moorena sp.; identical to SEQ ID NO: 4938

SEQ ID NO: 5057 - protein, 509 aa, unidentified
  REGION 1..509: note = Human gut metagenome
VYVLNKDGKPLMPTTRCGHVRYLLKEKKARVVKTKPFTIQLLYETNDVVQPLYLGIDPGRTNIGVAVVKADGTAVFTAHLETRNKEIPKLMKKRKDSRRARRTNGRRCRRQRRAKANGTISKKCVKQATAQNGSASKRAKKIGVIKRHLPGCEKEVLCIGIKNKEAKFNNRTRPAGWLTPTANQLLQTHINLIKKIQKLLPISDVVLEINKFAFMQLDNPNIQKWQYQQGPLYQKANLEEAVSEMQEHHCLFCKKKIDHYHHVVPQHKNGSNTIDNIVGLCTKHHDLVHKDTAWHEKLTKKKTGLNKKYGALSVLNQIIPALTKELSSIFPKHFFVTTGKSTYDYRAAHGVSKDHWLDAYCIACSVLPNDVCDSSINNRVPYELKQFRRHDRRALHKENMSRVYTLNGKKVATNRHKATEQTADSLEEFRQNHPDDVCKLKVKEHHSEYRNPKRNFPGCVFLVGKRTHVMQGTSGSHNGKADGYYDTNGNSYSSGKCKFVAKNEGIIFA

SEQ ID NO: 5058 - protein, 408 aa, unidentified
  REGION 1..408: note = Human gut metagenome
MVYVQDINGKPMMPTTRHGKVRRLPKDKKAVVVDLCPFTIRLMYVTSDYKQEIVLGVDAGTKHVGLSATTKSKELYSSEVILRNDIVDLLSTRRELRRSRRNRLRYRKPRFDNRIKSKRPGWVAPSVKYKVDAHIRVIDNVCSILPISRIVIEVAQFDTQKINNPNISGKEYQEGDQLGFWNVREYVLARDGHKCQYCKGKSKDPVLNVHHIESRKTGGDSPSNLITLCETCHKEYHKGNIDLKIKRGSSLRDAAVMGIMKWRLYEELKSKYDNISMTFGYVTKYNRIKHGIEKSHVFDAFVISKNFDAIRLGYYYKVRLVRRHNRQIHKQKIPKGGIKRPNQSPFEVFGFRLFDRVMFENSYYFIFARRKTGSFNIRDIDGKNQRDITYKKLKLSRCKRFMVQKEMD

SEQ ID NO: 5059 - protein, 424 aa, unidentified; identical to SEQ ID NO: 3434
  REGION 1..424: note = Human gut metagenome

SEQ ID NO: 5060 - protein, 471 aa, Caldicellulosiruptor sp.; identical to SEQ ID NO: 3375

SEQ ID NO: 5061 - protein, 456 aa, unidentified
  REGION 1..456: note = Competibacteraceae bacterium UBA2788
MAVLVWDRHKKPLMPCSEKRARKLLAMGRARVHRLMPFSIRLVDRTIADSCLQPIKIKIDPGSKTTGIALVHESETIHEDTGEINTTVHVLSLFELHHRGKQISESLTARRQMRRRRHGNLRYRQPRFLNRGNKGKGWLAPSLQHRMDTICAWVHRFQRLSPVTGIAQELARFDLQQMENPEISGVEYQQGTLAGYEIREYLLNKWNRTCAYCGVKNVPLHVEHIHPKALGGSNRVSNLAMACSPCNQNKGSRPVAEFLKDKPDVLRRIQTQAKAPLKDAAAVNSTRWALFNTLKNTGVPATTGSGGRTKFNRIRLDLPKTHALDAACVGEMDALRDWKKITLAIKATGRGNYQRTRLNADGFPRGYLTRQKRIKGFQTGDRVKAKVTQGKKIGFYLGRVAVRATGSFNIQTAQGVIQGISYRYCKVIQRSDGYGYLQPMNPKQTELRSARSSSPA

SEQ ID NO: 5062 - protein, 427 aa, unidentified
  REGION 1..427: note = Human gut metagenome
MVYVLAIDGEPLMPTERHGKVRRLLKEKKAKVVKRCPFTIQLLYDSTRYVQEINLGIDAGSKHIGVSATTKEKVLYEADVELRNDIVDLISTRRELRHLRRIRKTRYRKARFNNRVSTKKTGWLAPSVKQKIHTHLTVINNVYKILPIKNLIVETASFDIQKIKNPDISGEEYQQGEQRDFWNVREYVLFRDNHTCQCCKGKSKDKVLNVHHIESRKIGGNAPNNLITLCETCHKGYHNGSVKLPKSIHRGMSFRDAAFMGIMRKTLLSELRKIYPNVKETYGYITKDTRITYNLPKEHYVDARCISGNPDAKPLGYYFYQKKARCHNRQIQKMSILRGGLRKNNQAEYLVKGFRLFDKVKHNSKEYFIFGRRKTGYFDIRNFFGEKVNKGSVSYKKLKFLETRHNMLTERRKAIPYPAIKAEGLLA

SEQ ID NO: 5063 - protein, 447 aa, unidentified; identical to SEQ ID NO: 4640
  REGION 1..447: note = Human gut metagenome

SEQ ID NO: 5064 - protein, 443 aa, Caldicellulosiruptor sp.; identical to SEQ ID NO: 2385

SEQ ID NO: 5065 - protein, 427 aa, unidentified; identical to SEQ ID NO: 5062
  REGION 1..427: note = Human gut metagenome

SEQ ID NO: 5066 - protein, 521 aa, unidentified; identical to SEQ ID NO: 3983
  REGION 1..521: note = Human gut metagenome

SEQ ID NO: 5067 - protein, 426 aa, Nitrosococcus sp.
VNSVFVLDANKTPLMPCRPSRARRLLRDRKAAVYRMQPFTLMLKYRVEASPQPIEFKVDPGSKTTGLALVGKFQAQGRVVLWAGNLTHRGQAIRDRLERRRALRRGRRYRNTRYRAPRFLNRTKPKGWLPPSLRSRVENVSTWLNRLLDRAPISECHIETVRFDIQKIQNPEISGVEYQQGELLGYEVREYLLEKWGRKCAYCNKQDIPLEVEHITPRCRGGSHRVSNLTLACTPCNQRKNHQTAAEFGYPKIQAKAKLPLRDAAVNATRYAIGRAIQSLSLPTSFWSGGRTKKNRLSQGYPKDHWIDAVCVGENGAKVTITEDVRALHIKAMGRGARQVVRTDKHGFPRGKAGRCKRVKGFQTGDLAKLIQPKGKYAGIHIGMLAGIRARGTFDIKAKAGKISANWKNFQLIQRGDGYDYGLLTV

SEQ ID NO: 5068 - protein, 481 aa, unidentified
  REGION 1..481: note = Human gut metagenome
MWTTVLRDEKPYGRSSALPVRECVSIAKKRRHHMVAVLSKTGIRLMPTSSYRARKLLAKKKAVICGYRPFTIRLTERETGDVQPVELAVDTGYFHVGNSLKTAKHELAAVEIRTLMDEKQRYDDRRQYRRMRRSRLRYRAPRFDNRRRPEGWLAPSIQGRMEQNLAFLRRVLSVVPVTRIVMEMGQFDTQVLKAVEEGRPLPEGADYQQGERYGIATLREAVFTRDNYTCQCCKKTVHDGVILHVHHIVYRSQGGTNRMGNLITVCEKCHTPKNHKPGGKLYKWKPTVKSFKGATFMTAVRWIMYRSVKESFPDVDVRITYGAKTKLQRRTLDITKSHVNDAYVMGDFHPKHRARPVILQKKRRNNRILEKFYDAKYIDTRDGSKKTGQQLFNGRTNRNHNTDTENLRPYRGTKLSKGKRAIRTTRYRIQPHDILVYQGQEMEASGCHCKGTRVMTTAKKSLPIGKVRVRRYSGGYYAVAE

SEQ ID NO: 5069 - protein, 443 aa, Caldicellulosiruptor sp.; identical to SEQ ID NO: 2385

SEQ ID NO: 5070 - protein, 429 aa, Parasutterella sp.; identical to SEQ ID NO: 4241

SEQ ID NO: 5071 - protein, 443 aa, Caldicellulosiruptor sp.; identical to SEQ ID NO: 2385

SEQ ID NO: 5072 - protein, 396 aa, unidentified
  REGION 1..396: note = Human gut metagenome
VVRRTPFTIQLTIATGESKQPVSLGVDAGYKHVGLSASTEKAELYASEVELRKDITDLLSARRALRQSRRNRKTRYRAPRFDNRIRTKRKGWLAPSVENRINAHLSRIEAVLRLLPITKITVETASFDMQRLKNPDISGKEYQEGEQLGFWNVREYVLFRDGHVCRHCHGRSKDPVLNVHHLESRRTGSDSPDNLITLCETCHKALHRGEITLKAKRGQSFRAQAFMGIMRREVLNRLKASYPELKVHETYGYLTKHARIANGIVKSHGADAFCIAGNLGAERLGEFFFQKQTRRNNRQIHKLSILKGGIRKRNQAPFEAKGFRLFDKVACQGEEGFIFGRRSSGSFDVRKLDGTRISTGISCKKLRLLEKRRTYLTEIRKEEALPPLPEGRGLRA

SEQ ID NO: 5073 - protein, 471 aa, Caldicellulosiruptor sp.; identical to SEQ ID NO: 3268

SEQ ID NO: 5074 - protein, 421 aa, unidentified
  REGION 1..421: note = Human gut metagenome
MLNKHFKNKLNEMVYVQNIDGNPLMPTTRHGKVRRLLKTKQAVVVNLCPFTIRLTYTTTYYKQEVTLGVDAGTKHIGLSATTKSKELYVGEVTLRSDIVDLLSTRRESRRTRRNRLRHRKPKFDNRISSKKEGWIAPSVRQRISSHLKQISDIHRILPISKIVIEVAQFDTQKIKNPDIKGEEYQQGEQLGFWNIREYVLARDGHKCQHCKGKSKDPILNVHHLESRKTGGNSPSNLITLCETCHKEYHREKFDLKIKRGKSLRDAAVMGIMKWKLYEDLKSLYPEVKMTFGYITKYNRIKHGIQKSHTSDAFVISKNFETKRIGFSYNIKSTRRHNRQIHKMNIPKGGIKRLNQCSFEVFGFRLFDKVKFNNQYYFIYGRRRSGYFNIRDFNGKNPKEISYKKLKLCRGKRNPIHIKENE

SEQ ID NO: 5075 - protein, 424 aa, unidentified
  REGION 1..424: note = gut metagenome
MASMQYVYVLNKHGEPLMPCSPGKARLLLKQQKACVVKRTPFTIKLLYGSAGYKQPVALGIDAGSKHVGLSASTEKRELYREEFTPRNDVVELLSTRRQNRRSRRNRKTRYRAPRFDNRVHSKHKGWLAPSVEVKIQEHITVIKRICRILPITLVRVETAEFDTQRLKAMLKGKPLPVGTDYQLGEMYDEYNVRQYVLKRDNYTCQCCGAHPTEKKPIRLHVHHIESRHVGGNAPNNLITLCVACHKALHEGKITLDKGKKRGKPLRDAAFMGIMRNTLLARLKDELNIPVKQTYGYITKLLREKNKIPKSHVNDARCIAKAPNAKPCDTMLYTRALRHHNRQIHKAKILKGGIRKKNQAPYLVKGFRLWDKVRYNGEECFITGRRSSGYFALKKYDGTVISNSASYKKLMLLEAATNYITERS

SEQ ID NO: 5076 - protein, 392 aa, Moorena sp.
MQNYVFVIDTNKQPLNPIPPKKARRLLNKGKAAVFRMYPFTIILKTAIRQSRRCANNNPTISPSQIKIDPGSKVTGFALVQNNQVIWGMELEHRGGLIKKKLESRGAVRRGRRNRNTRYRKPIFLNRKRPEGWLPPSLEHRILTIQTWVKRLIKFCPVNEIWVERVKFDTQKMQNPEISGIQYQQGELAGYEVREYLLEKWGRECTYCGKQSVPLQIEHIHPRSLGGSDSALPTLRERVSNLCLACEKCNQRKGNKPIEDFLKKKPSLLQKIKSKAKQPLKDATAVNATRNKLVKVLQLIKVVVTGTGAQTKYNRTRLELPKQHWIDAACVGDIETLVLRTSQPLLVTCKGPGGRQKAALNKYGYPIRHNPLKPIKGACYWGHSQASKTRNR

SEQ ID NO: 5077 - protein, 512 aa, unidentified; identical to SEQ ID NO: 4031
  REGION 1..512: note = Human gut metagenome

SEQ ID NO: 5078 - protein, 412 aa, Fervidobacterium sp.
MVFVISKDGKPLMPTKRHGKVRRLLKQGLAKVVNREPFTIQLLYETTSYTQPVTVGIDIGSKTVGVSAVTDKEEIFSAEVQLRQDIKKLLLERRQHRRFRRYRKTRYRKPRFLNRRKEDGWLPPSLQWKVDAHVRIINKLAKMIPITKVVVEVAPFDIQKVQNPDIEGEDYQNGPQKGFADVREYCLWRAGYKSELSGKTGILEVHHIIPRSEGGTDTPSNLIVLTVEEHKMLHEGKIKIPKSRLEQIKVFKHAAHVSTIGWHIVNKLRQNYHVEITYGSITKERRDMYGLEKSHRDDAFVIAGGSIQRRASEWYFGKFFRRQNRLLHKANPIKGGKRPVNTIKQVRGFRRFDKVECEGKIGIVTGLRSSGYFSISELSGEKISDSVKYTKLRVIERSKTLMFERMVEAAWS

SEQ ID NO: 5079 - protein, 462 aa, unidentified
  REGION 1..462: note = Human gut metagenome
MSVLVIGRNGRALMPTNPRKARLLLKKKTASVVCRHPFTIQLLYKTGCATQEGSIGIDTGSQHIGVGITCGDKVILKDEHALRSSMEKRSLLATRAVMRRGRRYRKVRYRKPKWRHHTKRMYFEKANRRGQHWRKVKTTTQSPRPKGWLPPSLQSKCDHHFRIIDRYLKYLPDPITRNLVIEAGRFDMARMNDPTIHGEMYQRGPMYDAENLRAYIFARDNYQCACCKAKAGTTRKADGTTVKLVAHHILFRSRGATDNPKYIISVCDHCHTTKAHQPGGILYSWMENNKKVARGLRDATFMNILRKRLFARYPQAAFTYGNITAADRKKLRLPKSHANDAVAISLFGKEASTVKNICQTMHYKQIRKSKRSLHEAIPRKGRKNPNTKAVRNKKNTTQVNGFKLWDSVLADGKKLFICSFTGTSAYLIDKNGCYISQPGKTYKQWPLSKLKRLHPNGNWLMA

SEQ ID NO: 5080 - protein, 437 aa, unidentified
  REGION 1..437: note = Ga0315284_10013789
VADLKTFSNNLDASLTGAILYYSERSFFVVYIISKTGKPLMPTKRLGRVRHLLKDGLAKVVQRTPFTIQLLYESEEYTQPITLGIDSGYQNIGVSVVTEKEEVFSAEVKLRTDIIKLNSERRAYRRTRRNRKTWHRKLRFLNRKKDKGWLAPSIQHKIDSHIKLVDMVKRILPITKINVEVASFDIQKIKNPDIEGVNYQNGAQLGFWNVREYVLHRDGHICRHCKGKSGDKILNVHHLKSRQTGGDRPENLITLCSNCHQLVSKGKLKLNIKVSSGLKAETFMTMIRWRIVNLLRQTNTNVSHTYGYLTKCKRIAFGISKSHVNDAFVIACGTIQQRMDGYAMQQVRKCNRKLYKGIRSHIKNTAPRLVFGFQRFDKVLWKGIECFVFGRRTRGYFDIRRLDGTKLNTDVKYTELTLLETFRTFLTERKVGNSSPA

SEQ ID NO: 5081 - protein, 420 aa, unidentified
  REGION 1..420: note = Ga0373627_0078149
MLLIHITRKEDLTKMLVYVLNKEGKPLMPTKPSIARILLKEGKAKAIKKTPFTIKMLIETTNYKQEVIAGMDTGSKVIGTACISNGKVLYKSETFIRQDVSKKMEQRKMYRRNRRGRKTRYREARWNNRANSLRKDRLAPSLLSKLNSHLREKKFIEKLLPVSKWILELASFDIHKISNSEVKDYQKGQQKGFYNVKAFILDRDGFTCQHCKTKKSKLHVHHIIFRSNGGTDSPENLITLCEGCHDKLHKGEFEIKGKKSITKHATEIGITKSQLKKKFGDFVETFGYETKFKREQILQLSKSHCNDAIAICCSDSEIIKDLNYYFIKKNVAKGDYQQTKGIRSEKKIPTGKLFGFKKFDKVKTPEGIGFIKGKRSSGAFVIMDILGNIFNKSWNAKKYLERISARKNYIMEVCAVPMQL

SEQ ID NO: 5082 - protein, 279 aa, unidentified
  REGION 1..279: note = Human gut metagenome
VVVETAEFDLQLLKAIADGKPVPQGEDYQKGEMYGHYNVRQYVLWRDNYTCQCCGTHPSKKKEVRLHVHHLESRKVGGDAPDNQVTLCESCHEKLHKGLIAEKDFKKRKRRSTRDATFMGIMRKTLMQRLCSELPIPVVKTRGYITKATREKLLVLPKSHTNDALAIAQGKRGFNVGYLPEIAQIDKIYTIRPVRHHNRQLHKATILKGGIRKSNQTEKYVFGYRLFDKVQFNGQDCFIWGRRTTGIFTIKTINGKMIKDGISFKKLKLVEKSTSYLIA

SEQ ID NO: 5083 - protein, 440 aa, Fervidobacterium sp.
MYGVCVGQKQKASDALFRKARKTVSRGRAVVHKMHPFTIRLKDRTVQQSQLQPLRLKLDPGAKTTGVAVLREDGDVAETVFLCEIHHKTDIKQKLDARCAVRRSRRNRKTRYRKPRFLNRRRPEGWLPPSLKARVDQLINAVRKLTKLLPISAISIEDAKFDTQKLQNPETSGIEYQRGTLFGYEVREYLLEKWGRKCAYCGRSDVPLEIDHIVPRSRGGTDRVSNLTLACRECNQKKGNKTAAEFGYPHIEERARQTYKQAAFMNSIRSYLSKSLSSFGIPVEYGTGALTKANRIRLGFPKEHYFDACCVGESTSSEIRITQSYVQIWRAVGRGTRQMCNTDKFGFPRGHRQRCKKHFGFQTGDIVKAIVPRGKYTGIWIGAVAVRGSGFFDIKDTNGKRICEGIRYKYCKLIQIADGWQYSKRKANYSKSHTTEVACL

SEQ ID NO: 5084 - protein, 377 aa, unidentified
  REGION 1..377: note = Human gut metagenome
MVYVQDIDGKPMMPTTRHGKVRRLLKDNKAVVVNTCPFTIKLTYKTSDYKQEIVLGVDSGTKHVGLSATTKSKELYASEVILRSDVVDLLSTRRGLRRTRRSRLRYRKQRFNNRVKSKKDGWIAPSVRHKIDSHIRIISFVYSILPVSKLIVEVAQFDTQKIKNPEISGKEYQEGEQLGFWNVREYVLARDGHKCQHCKGKSKDPILNIHHIESRKIGGDSPSNLITLCETCHKEFHKGNIKLKVSRGKSLRDAAVMGIMKWKLYEELKSKYDNVSMTFGYITKYNRINHGIEKSHVSDAFVISRNFNSCRLGYYYKRKLVRRHNRQIHKMKILKGGIRKRNQAPFKVFGFRLFDKVMFQGEEHFIYARRLSGQFNI

SEQ ID NO: 5085 - protein, 445 aa, Moorena sp.
VAVFVLDKTGKALMPCTEKRARLLLVRGRARVHRVVPFVIRLKDRQAVSSQFQPVKIKLDPGSRITGIAVVRETGNNGVAVLNLFELVHRGRRISEALTARRAMRRRRRGNLRYRAPRFLNRSKPQGWLAPSLQHRVDTVMSWVARLRKWVPVTSVAQELVRFDMQQMENPEISGAEYQQGTLAGYEVREYLLEKWGRKCAYCGVEHTPLNLDHIHPKAKGGSNRVSNLTLACVPCNTRKGAQPVEAFLAKQPDRLKRIQAQAKRPLKDAAAVNSTRWALFNSLKTTGLPAEVASGGQTKWNRSRLGIPKTHALDAACVGQVESVTNWQKPTLTIKATGRGSYQRTRLDAFGFPRGYLMRQKSIRGFQTGDQVKAIVPLGKKAGIHTGRVAVRKRGVFNVQTGNGLIKDISYRHCRLIQRADGYGYNLVPTSPGTTSRFHLHPRL

SEQ ID NO: 5086 - protein, 457 aa, unidentified
  REGION 1..457: note = Human gut metagenome
MDAVAVISASGKPLMPTNPVRARKLIKKGKAVIYKYRPLFTIRLTERTDGDIQTIEYCCDTGYQHIGLSIKSRKHEYVNERRDLLPNETERHNDSRKYRKARRRRKLRHRACRRDNRHDNQICKDGYAPSIRNKRDQHISLYRSYTEILPVERAVFEMGQFDTQVLKAIEKGEPLPQGKDYQHGERYGYATLREAVFARDDYTCICCGKNAFKDKRILCVHHLGFRIGDRTNRLANLATVCTKCHTPKNHQPRGKLYNLKPELKDFKGATFMTMVRWDMLDKLKVVSKDIQVDVTYGAATKEARRDLKIKKSHANDAYCMGSFHPSHRTDLKRYEKCRRNNRVLSKFYDATYIDIRDGKKKKANALGCNRTKRRESRRSEKNERIYRGEKVSKGRIVLRTKRVVIRPGDIVYVGKKKYIVASSKNLGKQLKLADGSLLTTSKVTKIIHCGGWKTVTL

SEQ ID NO: 5087 - protein, 456 aa, unidentified
  REGION 1..456: note = Human gut metagenome
MSTCVCVLSNSGERLMPTFRLGKVRRLLKDGKAKIVKYHPFTIQLLYDSKTNTQPIEICEDVGYNYIGISVKSESHEYVSAQYDTLQDEKEHHDDCRKYRRTRRNRLRYRKPRFDNRKRSEGWLAPSLEHKKQLNIRLVERYVSVIPITHATVEVGSFDTMLLQAIQKGESKPEGADYQKGPRYNLATLREAVFYRDNYTCQVCGRKIADGAILHMHHMFYWKGRHGNSLDELLTVCEKCHTPANHQKSGKLYGFGEDVKFANLSGAAFMNTVRWQIVNELYAAFGKPFVTFTYGAMTKEKRIALHLEKSHNNDAYAMGDYHPAHRCEFGHYQKRCRNNRVLEKFYDATYIDTRTGNKAKGKELFNGRISRNHKKDSEDLHKYRSKKVSKGRRSIRRQRYAIQPYDTVRLESKTYITSGCHNKGTRLLIPANGKSKSVAISKVQVVCHAGAWIQII

SEQ ID NO: 5088 - protein, 442 aa, unidentified
  REGION 1..442: note = Human gut metagenome
MSTSVFVLDKKHRPLMPCRPARARRLLRAGRARVVKRFPFVIRLVDRTVEQSEVQPVLIKLDPGSRETGAAVVRDDEKKRHHALAFFVIKHRGGAIRDALKARSAFRRRRRSQNFRCRSPRFLNRVKPKGWLPPSLRHRVETTLSFVRRMCRYLPVSGIATELVKFDSQKLQNPEVSGVKYQQGTLFEYEVREYLLEKFGRKCVYCGAEGMPLNIDHVVPRAKGGSNRVSNLVLACVSCNQKKGARSLEDFLKGKPEVLARVRRELKTPLRDAAAVNATRWVLFNELKATGLPVETGSGALTKLNRHAFGVEKEHWLDALCVGRLNGVVTRKGLNALEIRCMGRGSRQRTRLTKYGFPRGYLMRQKCVHGFATGDMVEANVPKGKKAGLWRGRVAVRVSGSFNIQTPKGVIQGVGWKHCRLISHNDGYGYAWLGHAPHSSPA

SEQ ID NO: 5089 - protein, 434 aa, Moorena sp.
LDTNKQALNPVHPGRARRLLSLGQAAVFKRYPFTIILKSAASSPHVWPLRVKLDPGSKTTGLAIVNDASGEVVFAASLIHRGDAIRERLEKRRAARRSRRQRKSRYRQSRFDNRGTKKKGWIAPSVQSRVCNVITWVKRLVRLCPITAISQELVKFDLQQMDHPEISGVNYQQGTLSGYEVREYLLDKWGRQCAYCGAKDVPLEVEHINPRSKSGDDRVCNLTLACEPCNTKKGTQDIRVFLAHQPELLAKLLAQAKSPLKDAAAVNITRWVLHAQLKAFGLPLECGSGGRTKFNRITRGLEKTHWCDAACVGASTPEVLHIGQVRPLSIAAYGHGRRQMCLMNKSGFPRTNPKQKKFKHGFRTGDLVKAVVPPHLKHAGTHVGRMSAKASGAFTIATAGGTVTDIGKKYCRMLQRADGYGYTQKGELAFPPVP

SEQ ID NO: 5090 - protein, 512 aa, Moorena sp.
MQKLEERNTYTPTDIPHVSGNCDLLLNRTETSVHAVSRYGKAIRVCDVNWRNGLEETLSVIGLKTSPNNSDAALIATEHAKQNTSVSAVYVLNMRGKTLMPTTPQKAKKLLKEDKAKVIRRTPFTIQLKYATGETKQPIILGVDSGFLNVGLSAITDRKEVYSAKVILRSDTVKLNSERKQYRRARRSRKTWYRPPRFLNRKKPDGWLAPSIQHKLESHIKLIDNIKRLLPITKIVIEVAAFDIQKIKNPKISGAGYQNGVQKDSWNVREYVLHRDDHTCQACKGKSKDPILEIHHIISRQIGGNAPDNLLTLCQTCHTKVSKGKLKLDIKLPTSFKPETFMSIVRWKMVNMLRAAGNIVNHTYGYITKFNRIALDLDKSHNTDAFVIAGGTIQERSPVSHLIQQVRKCNRKLFKGDRSHIKNTAARFIHGFQRFDKVLWNNIECFVFGRRKTGYFELRQLDGTKIHASAKAKELTLLETANTFLISNLRRGTLPHTLKSVVSATATPHGVL

SEQ ID NO: 5091 - protein, 471 aa, Caldicellulosiruptor sp.; identical to SEQ ID NO: 3375

SEQ ID NO: 5092 - protein, 417 aa, unidentified
  REGION 1..417: note = metagenome
MPCSPAKARLLLKEKKAIVKRRTPFTIQLTIATGEAKQPVTLGVDSGYKHIGLSATTEKVELYASEVELRQDITDLLSARLALRRSRRSRKTRYRVPRFDNRVASKRKGWLAPSVENRITAHMLRVEAVMRVLPVTAITVETAAFDTQLLKNPDITGAAYQQGEQLRFWNVREYVLFRDGHVCQHCRGKSKDPILNVHHIESRRTGGDAPNNLITLCETCHKAFHRGEIKLKVRRGKSFKAETFMGIMRRTLFERLKKAHPELNVRNTYGYLTKHKRISYGIVKSHCADAYCIADNLGAKRLEGFFFQKQTRKHNQQIHKLLILKGGLKKKNQAPYEVKGFRLFDKVICKGEEAFIFGRRTSGSFDVRRLDGTRISAGINYKKLRLLEPRTTYLTEFRKEAALPPLHECRGFRAEFL

SEQ ID NO: 5093 - protein, 420 aa, unidentified; identical to SEQ ID NO: 3685
  REGION 1..420: note = Human gut metagenome

SEQ ID NO: 5094 - protein, 427 aa, Enterococcus sp.; identical to SEQ ID NO: 2410

SEQ ID NO: 5095 - protein, 515 aa, unidentified
  REGION 1..515: note = Human gut metagenome
MTALEERLSKTEYIYVLGFDGKPQMPTRRKRHVLKLLKTGRARIAEDIPFTIRLTYRNAPVLQPVTLAEDPGRTNIGAAVLSPLGDLLFAAVIETRNKEIKKLMTDRQKSRQASRRGERKARQRLAKRYGSMVKSGMVMRKLPMYAADRFVTCKFIRNTQARFCNRKRCPDWITPTVQHLVQTHLNIIRKISRYLPVTDIAFEVNRFAFMHMENPEAMGVDFQNGPLKGYGDVKEAIRTQQHGKCLMCKKPISHFHHIVPRSRGGSDTIQNLAGLCPECHTKVHTDTAFRKDFDEKKSGQLKKYGVLSALNQAVPFICKKLLEEYGEEHVHFCRGLDTSLIRTALGFEKTKKNQMHEVDAYCIGLAALEVNEVETPAFDHTFQIRQFRRQDRSIIHHQTGRSYYQGKEKVAQNRKPGFEQKTTALSQWYEEQVRIHGEKEAEKLRSQLRVEKSCRHYNDMDRFLPGAVFLYEGKRYVLSGRITNGKYLRACGQGMKNFPAAECTFIRHNAGLVFI

SEQ ID NO: 5096 - protein, 437 aa, Thermoanaerobacterium sp.
VVYVISKEGKPLMPTKRHGKARHLLKDGKAKVIRTKPFTIQLLYDTTKYTQPVTLGIDSGYDHIGFSAVTEKEELISGEVELLKSMSERLKERRMYRRQRRNRLRYRPPRFDNRKKDEGWLPPSIQHKFDSHIRFVDFIKKILPITEVIIEVAKFDIQKIKNPDIKGSEYQEGKQKGFWNVREYVMYRDNYECQNPNCQNKSKKKKLQVHHIGYWKNDYSNRPSNLITLCSKCHVPKNHKKTGFLYKWQPKLKSFKAETFMTTVRWKLVDTLKCKYTFGYVTNAKREELKLKKTHYNDAFVIARGSNQERVMPVFFEQIRRNNRSLEKFYDAKYVDARDKKIKTGQELFNGRRTRNKNYNTENLHKYREQKISKGRRSTRKQRYFYQPKDIVIFENNKYIVKGVQNKGSYIKLHGISKPVKTELIKPYMFRKGLCAV

SEQ ID NO: 5097 - protein, 471 aa, Caldicellulosiruptor sp.; identical to SEQ ID NO: 3375

SEQ ID NO: 5098 - protein, 423 aa, unidentified
  REGION 1..423: note = Microcoleaceae bacterium UBA11344
MSNFIFVLDTNKKPLTPCKPSIAHKLLTAGKAAVFRRYPFTIILKKAVTATPKLITLKLDPGSQTTGIALLQDEKVIFGAELTHRGQSIKASLESRRSLRRSRRNRHTRYRPARFLNRTRHKGWLAPSLQHRVETTLTWVTKLIKLAPIGSIVQELVRFDLQQLENPEISGIEYQQGELAGYEVREYLLNKWDRKCAYCGIENVPLQIEHIHPKAKGGSDRISNLCLACEKCNLKKGTQDVEQFLVKKPDVMKCILAQAKRPLKDAAAVNSTRWALFNRLKETGLSVSSGSGGLTKFNRTRLKLPKTHWLDAACVGQVESLSVLTNKPLLIKATGHGTRQMCRTDKFGFPSRYVPRLKFVKGFQTGDIVKAIVTAGKKIGTYVGRVTVRSSGSFNISADTLVQGISSKYCKTIHQKDGYNYAF

SEQ ID NO: 5099 - protein, 462 aa, Moorena sp.; identical to SEQ ID NO: 4759

SEQ ID NO: 5100 - protein, 419 aa, unidentified; identical to SEQ ID NO: 4877
  REGION 1..419: note = Human gut metagenome

SEQ ID NO: 5101 - protein, 420 aa, unidentified; identical to SEQ ID NO: 2812
  REGION 1..420: note = Human gut metagenome

SEQ ID NO: 5102 - protein, 470 aa, unidentified
  REGION 1..470: note = Human gut metagenome
MSVFVVGLNGCRLMPTSERKARLLLKQGKAFVEQKVPFTIRLNYKTGSTTQLGYLGIDTGSQHIGVSVVREDGTVLHKEEIGLMDSMSKRKLLEAKASLRRGRRYRKTRYRHPKWRPKTKRVYCEVPDRKGRHWQKKKITFTSKRPKGWLPPSLQSKTDHHIRWIKKLQDLLPEGYRLSIELGRFDPARMKNPEIHGDLYQKGPQYDYENVRAYVLDRDRYTCQICKKKGGKLHVHHILYRSHGATDDPQYMVTVCSDCHSAQNHLPGGILYQWMQEQKRFSRGLRDATFMNILRKRLIRAFPEAVFTYGNVTKVDREKLKLPKSHGNDATAIALVKTGITAVKDKESVICIQQVRRKKRSLHEETPRKGRKEPNRTAARNNKNTKAVTVTKRQNKKKVSMTGCLFDRVELNGKKGWISGFTGKSCYVKDADDQYLSTSPKYKQVSLSKLRILHHCGNWIIGAKKTLGKG

SEQ ID NO: 5103 - protein, 471 aa, Caldicellulosiruptor sp.; identical to SEQ ID NO: 3268

SEQ ID NO: 5104 - protein, 320 aa, unidentified
  REGION 1..320: note = Human gut metagenome
RAPRFDNRIRTKRKGWLAPSVENRINAHLSRIEAVLRLLPVTKITVETASFDLQLLKNPDISGKEYQEGEQLGFWNIREYVLCRDGHVCQHCYGRSKDPVLNVHHLESRRTGGDSPGNLITLCETCHKALHRGEITLKAKRGQSFRAEAFMGIMRWEVHNRLRALHPGIEVSNTYGYRTKHARIANGIAKSHCADAFCIAGNLGAERLCEFFFQKQTRRNNRQIHKLSILKGGIRKRNQAPFEVKGFRLFDKVACQGEEGFIFGRRSSGFFDVRKLDGTRISAGISCKKLHLLEKRRTYLTEIRKEEALPPLPEGRGLRA

SEQ ID NO: 5105 - protein, 442 aa, Anaerostipes sp.; identical to SEQ ID NO: 2903

SEQ ID NO: 5106 - protein, 470 aa, unidentified; identical to SEQ ID NO: 2825
  REGION 1..470: note = Human gut metagenome

SEQ ID NO: 5107 - protein, 471 aa, Caldicellulosiruptor sp.; identical to SEQ ID NO: 3268

SEQ ID NO: 5108 - protein, 415 aa, unidentified
  REGION 1..415: note = Human gut metagenome
MENRIEYCFVVDKNNRPLTPTKVNKGWYLVRKSRAKLKSKYPMVIQLEKEVKSDEDDESHIVCGIDDGSAHVGLAIVQKCPTKNKVVFKGTIEQRQDVKHLMDVRRGHRRYHRYHKRYRQARFNNRSSSKRTCRLAPSIKQKKDAILRVLYQLNKWVNIQEYHLEDVCIDIRALTDDYKPYRWQYQKSNRLDENLRKATILRDECRCQECGKSNCVLEVHHIRARKYGGADTIGNLITLCSGCHQKTEGRERDFEDRYFNMIKSKPKRFDYAMHVMQGETYLREKISELGSLHLTNGGETANKRIEWNMEKSHGNDAICVTDCIPDNCDVKEWIIKPMRRKSKAKTNNLLGIRHRDLVSYTYKNGETHTGYVTALYPEQLVLNFQSKTKHCKKVNARKCRLLWKFNKIYWLEQCV

SEQ ID NO: 5109 - protein, 415 aa, unidentified
  REGION 1..415: note = Human gut metagenome
MVYVQDINGKPMMPTTRHGKVRRLLKDKKAVVVNLCPFTIKLMYVTSDYKQEIVLGVDAGTKHVGLSATTKSKELYSSEVILRNDIVDLLSTRRELRRARRNRLRYRKPRFDNRIKSRRPGWVAPSVKYKVDAHIRVIDNVCSILPVSRIVIEVAQFDTQKIKNPNISGKEYQEGDQLGFWNVREYVLARDGHKCQYCKGKSKDKILNVHHIESRKTGGDSPSNLITLCETCHDDYHKGNIDLKIKRGSSLRDAAVMGIMKWRLYEELRSKHNRVSITFGYVTKYNRINHGIEKSHVSDAFVISKNFNAIRLGCYYKVRLVRRHNRQIHKQKIQKGGIKRLNQSTFEVFGFRLFDRVMFENGYYFIFGRRKIGSFDIRDIDSKRQNNITYKKLKLSRCKRFMIQMELNKKNTDMF

SEQ ID NO: 5110 - protein, 388 aa, Moorena sp.
VPFVIRLVDRSAADCEFQPVRVKLDPGSKTTGIAVMREDSNEQAVLSLINLIHRGRQISEAMTARRQMRRRRRGNLRYRAPGFLNRTKPQGWLAPSLRHRIETTMSWMARLQRWAPVSAFSQELVRFDMQQMENPEISGAEYQQGQLQGYEVREYLLEKWGRKCAYCGAGHTPLQVEYIQPKARGGSSRISNLTLACQPCNQRKGAMPVEQFLAKKPEVLKWLLAQAKHPLKDAAAVNSTRWALANALKASGLHVELASGGRTKFNRTRMGIPKDHALDAAWVGNVEAVTGWEVPTLQAKAMGRGRHQRTRLDKFGFPRGYCMRTKFVKGFQTGDWVKAVVLKGKHAGTHVGRVAVRATGSFNVGALQGINHKACKVIQRACGYQLTY

SEQ ID NO: 5111 - protein, 515 aa, unidentified
  REGION 1..515: note = Human gut metagenome
MIPNERRHLMPYIYVIGMDGKPQMPTKRRRHVQKLLDTGKARITERVPFTIQLLYDNDPVLQPVILAEDPGRTNIGVATLDLKGNLLLSAAVETRNKEIAKLMEKRRQCRRASRNGERKARQRLAKKYGTMIQAGMRMRKLPQYAADAFITCKVIRNTQARFCNRRRLDGWLTPSARHLVQTHINLVHKVQKYLPVTDVAIEVNRFAFMQLEDPAICGVDFQTGPLKGYDDRDAAVYDLQDGKCLMCKHEITQYHHIVPRSRNGSNTIGNIAGLCDQCHDRVHKDADFAEQMKEKKEGMDKKYGALSVLNQAIPFICKQLETEFGRGHVHYCTGRETSLVRQSTGYQKTRKNQLHEVDAWCIGALALAELPENVPDFKEIHLIRQFRRQDRSLVNAQTERVYKLGGKMVAKNRKKRTGQEIYALEDWYNRQVETYGKQEADCMRSRLKVTKSRRRYNNPNRMMPGAVFLYEGVRYVMRGQHSKGAYLQAVGMENRDFPVRKCKILTRNTGLVFVS

SEQ ID NO: 5112 - protein, 450 aa, Moorena sp.
MVYVINFEGKPLMPTTNAKARKLLKQKKATVKRVNPFIIQLLYKTDTEYIQTITLGIDSGYLNIGFSAITDSKELIVGEVKLLQGMKDRLLEKSQYRRIRRQRLRYRKPRWNNRKIRQGWLAPSLQHKLDTHIKFIDYLNTILPIRNIVLEVANFDIQKIKNPDISGVEYQQGEQMGFWNVREYVLHRDGHKCQNPNCKNKSKEQILEIHHIKYKSEGGSDAPSNLITLCNKCHTSPNHKKGKFLYDWCENGKKVRGFRDATFMSMIRWYLLEQLKEKYTNIKATYGYLTKNHRIEHGIEKSHFNDAFAIAKGVNQVRNLEIFKVEQSRLNNRSLEKFYDAKYIDNRTGEKVSASELNCGRRTRNKNLNSENLRVFRGQKISKGQRRIRKKKSLYQPNDLIKYESKVYTVKGSQNEGKYIALKEIKKVPNVKLIKPYIFKKGVNWSHGLC

SEQ ID NO: 5113 - protein, 472 aa, Acidithiobacillus sp.; identical to SEQ ID NO: 4996

SEQ ID NO: 5114 - protein, 420 aa, Petrotoga sp.
MLVYVLNKHGKPLMPCKPSKARKLLKEGKAKVVKKEPFTIQLLYGSSGYKQPITLGVDAGSKTVGLSATTENKELFAAEVELRDDIPKLISQKGQYRRDRRFRKTRYRKLRFLNRVHSKNKGWLAPSVEHKIKSHIKLIDLVHSLLPVTKIVVEVASFDIQKIKNPNIEGKQYQQREQLDFWNVRQYVLWRDNYTCQHCKGKTKDKRLNVHHIESRQIGGNAPSNLITLCETCHKDYHDGKIKLNFKRGQKFKDATFMGIMRWTLYNRLKDLYSNIHLTYGYITKNTRIQNNLPKTHRIDALCISGHPQAKQLEYYYHIKEVRRHNRQIHKANILKGGIRKLNQAPYLVHGFRLFDKIRYNGIECFIFGRRSTGYFDIRKVDGTVIHRSAKSKDLILVSKTKTLLWERRENSAFLSPLKW

SEQ ID NO: 5115 - protein, 426 aa, unidentified; identical to SEQ ID NO: 3604
  REGION 1..426: note = Cyanobacteria bacterium UBA11166

SEQ ID NO: 5116 - protein, 419 aa, Geobacillus sp.; identical to SEQ ID NO: 3993

SEQ ID NO: 5117 - protein, 442 aa, Lactobacillus sp.; identical to SEQ ID NO: 3226

SEQ ID NO: 5118 - protein, 481 aa, unidentified
  REGION 1..481: note = Human gut metagenome
GIDSGRENIGSGASNEDGDCLYLGELKTSNKSIKLKMTERAGFRKERRRHDRQNKQRKARKDHTEIQNGNADICRTTISCKSVQISYPAAEKSVTHKIIRGKEGKFANRHRDEGWITPSARQLVQMHMNDLKSMCKILPISHVTLERVAFDFQKLENENIKVWEYGKGKLYGYDSPEEYIHDVQNGKCLVCGKPHIDYLHHIIPRSKGGSDKVSNIAGLCYDCHYGPMGVHNCQNTQDRLPELKSEANKQYKVSLLNSVMPVLIEEMDKFCKANSIMFSICEGHDTAKVRDMYDLQKDHCIDGFAISLVDRNVKSVDVMPDRIYQKQRYKKKSKNIIQKRNCREYYDDKKLVAVNRHKGTDQKADSLEEYMNTYAETHTTDECKKHFDSLVVKPARRTYTFHKEWRICPFHIGDKVRYEKKNKIKGNTKVDTFICEGIRFVKDENKAEVKHNKTKSKKMKFCRVLESGCTPYVDYRKLALM

SEQ ID NO: 5119 - protein, 431 aa, Moorena sp.
MSKVFVVDTNSQPLDPVHPARARILLHGGKASVFRMYPFTIILKTEVLEPEVQPLRIKLDPGSRTTGIALVNDTSGEVVFAAELDHRGQTVKASLDDRRAVRRSRRQRKTRYRKARWQNRTRAKGWFPPSLESRLANVLTWVNRLSRYAPISAISMELVRFDMQLMENPEVSGVEYQQGSLAGYEIREYVLEKWQRACAYCEAKDVPLQIEHIHPRAKGGTNRVSNLCLACEKCNTAKGTQDIAVFLKKKPEVLKKIQAQAKKPLKDAAAVNSTRWKLFERLKATGLPVECGSGGLTKYNRTTRNLPKTHWLDAANVGTSAPVVLITKGIKPLKIKATGHGRRKMCVTDAYGFPKHHKERKSSYMGYRTGDMVKAITPKGTYWGRIAIRHRPSFRLGKTDVHPKYMRRLHRADGYEYTYETKGVRDAPPHG

SEQ ID NO: 5120 - protein, 406 aa, unidentified; identical to SEQ ID NO: 3475
  REGION 1..406: note = Human gut metagenome

SEQ ID NO: 5121 - protein, 423 aa, Deinococcus sp.
MSNRVFVLNPDKSPLMPCTAKRARKMLEAGRAAVFRRYPFTIILKQESPRQSQPLTLKLDPGSKTTGMALVLEGKTGRKCIWGAELKHRGMAIKMKLQARRALRSSRRSRKLRHRPARFQNRTKPAGWLPPSLMHRVLTILSWAKRLDRWTPLDSFSMELVSFDAQKMLNPDIQREEYQKGTLFGAEIRAYLRQKWDDKCAYCGKKGEEVEHLVPRSRGGSNRISNLVWSCRSCNEQKGSLTLEEFLKRKPAVLRKIQERQSASLHDAAAVNVTKYRLLDELKRFGYPVETGSGAQTSFNRSQQGYEKAHWVDAACVGESGEQVAVRPLKPLRITCMGRGNRQMCGTDKYGFPVRHRTRQKVFFGFQTGDIVRAVVPAGKKAGTYIGRVSVRATGSFKLPHLDGLHHRFFSTLHKGDGYGYSF

SEQ ID NO: 5122 - protein, 518 aa, unidentified; identical to SEQ ID NO: 3878
  REGION 1..518: note = Human gut metagenome

SEQ ID NO: 5123 - protein, 406 aa, unidentified
  REGION 1..406: note = Human gut metagenome
LDANNKQLTPTKEQKAWFLIRKKRATLVSKYPMVIQLKKKIPDKEICKDEVRCGIDDGGLHVGVALVQKCQTRNKVVFKGVIEQRNDVKHLIDVRCGYRRYHRYHKRYRSARFNNRNSSKREERIAPSILQKRQATIRVINQLNKWINITNYWLEDVAIDIRALTDGYKPYRWQYQKSNRLDENIRKAVILRDGCKCMECGKSNCRLEVHHIKPRRLKGSSTLDNLITLCTKCHQKTESVEELYMDRYFALLNSSDNKNLNYAQHVMIGKKWLREQLSNLGMLYLTNGGDTANKRIDWDIAKSHSNDAICITDLRPDTCEIKEWAIKPMRRQSKAKTDNVLGIKHRDLVEYTFRNGKTHRGYVTALYPEQNAINFQSPTKHCKKVNAKKCKVLWKYSKIYWLDNVG

SEQ ID NO: 5124 - protein, 357 aa, Calothrix sp.; identical to SEQ ID NO: 4929

SEQ ID NO: 5125 - protein, 442 aa, Sutterella sp.; identical to SEQ ID NO: 3234

SEQ ID NO: 5126 - protein, 465 aa, Calothrix sp.
MLTNHVFVLNADKSFLNMVHPARARKLLTQEKAAVFRTYPFVIIVKKQVLNPTIKEYFLKIDPGSKWTGFAIQCGSDIVFRMELQHRGLQIRSNLLTRAGFRCGRRSRDLRYRKKRFNKRKRLGWLAPSLMHRVSTVETWIQRFCKFCPIVVIEIEQVKFDMQKLANPEISGIEYQQGTLWGYEVREYLLEKWGRECVYCGVKDVQLEIEHIAPKSKGGSDRVSNLTLACHDCNQRKGDMDISDFLSDRQKLSKILSQAKSPLRDATAVNSTRIAISNMAGKYNNVKNWTGGRTKMNRVKQNLSKTHSIDAACVGESGSNIKILTQQPLFVTSKGHGNRQSRKTNDKGFPALITETCQKTGNKIVKKNPDGTVKTIAPKTEYNHVHTGDIVRFKLEKPSMTLGNKKKGIEKKVKVPCGSYTARVKTPTPKGFEVLINKERVSVPVMNGVSFAYRADGYDYKFVHV

SEQ ID NO: 5127 - protein, 428 aa, unidentified; identical to SEQ ID NO: 3484
  REGION 1..428: note = Human gut metagenome

SEQ ID NO: 5128 - protein, 415 aa, unidentified
  REGION 1..415: note = Human gut metagenome
KDSRRARRTNGRRCRRQRRAKANGTLSKKCVKQTTAQNGSVSKRAKKIGVIKRHLPGCEKEALCIGIKNKEAKFNNRTRPEGWLTPTANQLLQTHINLVKKIQKFLPISDVVLEVNKFAFMRLDNPNIQKWQYQQGPLYQKASLEEAVSEMQEHHCLFCKNTIDHYHHVVPQHKNGSNTIDNIVGLCTKHHDLVHKETAWQEKLAKKKTGLNKKYGALSVLNQIILALTKGLSFLFPKHFFVTTGKNTYDYRTAHSVSKDHWLDAYCIACSVLPNDVCDSSINSHVPYELKQFRRHDRRALHKENMSRVYTLNGKKVATNRHKAIEQTTDSLEEFRQRQPNDVYKLKVKEHHPEYRNPKRNFPGCVFLVGKRTHVMQGSSGSHNGKADGYYDTNGNSYSSGKCKFVAKNEGIVFA

SEQ ID NO: 5129 - protein, 471 aa, Caldicellulosiruptor sp.; identical to SEQ ID NO: 3268

SEQ ID NO: 5130 - protein, 443 aa, Oligella sp.; identical to SEQ ID NO: 3586

SEQ ID NO: 5131 - protein, 406 aa, unidentified; identical to SEQ ID NO: 3475
  REGION 1..406: note = Human gut metagenome

SEQ ID NO: 5132 - protein, 408 aa, unidentified
  REGION 1..408: note = Human gut metagenome
MVYVQDIDGKPMMPTTRHGKVRRLLKAKKATVVNLCPFTIRLTYAISGYKQEIVLGVDAGTKHVGLSATTKSKELYSSEVILRSDIVELLSTRRELRRTRRNRLRYRKPRFGNRVKSKHHGWVAPSVRHKVDAHIRVIDNICSTLPISRIIVEIAQFDTQKIKNPDISGNEYQEGDQLGFWNVREYVLARDGHKCQHCKGKSKDPILNVHHIESRKTGGDSPSNLITLCETCHKEYHKGNIDLKVKRGKSLRDAAVMGIMKWKLYEELKSRYPNVSMTFGYITKYNRIKYGIEKYHISDAFVISKNFNALRLEYHYKVRLVRRHNRQIHKQKVLKGGAKKPNQSPFEVFGFRLFDRVMFEGNYYFIFGRRKSGSFNIRDINGGNQRNVTYKKLKLSIGKRFMIQKEMN

SEQ ID NO: 5133 - protein, 456 aa, Halomonas sp.
MAVFVLGKNKQPLMPCSEKRARLLLERGRAAVVNLTPFVIRLRDRCLSDCALQPTLLGIDPGSKETGLALMRLEENATDEQAPATRHVLCLFQLVHRGFQIRQALEQRAGFRRRRRSKNLRYRQPRFDNRTRKKGWLPPSLQHRVDTTIAWVNKLCRWAPVTHLSMELVRFDLQKMENPEISGVEYQQGTLLGYEVREYLLEKWGRECAYCGTGDTPLEIEHVVAKSRNGSSRVANLTIACHDCNQTKDSQWLADFFATNKGLKKRLKANGLSAEVRLERVQRQLKLPLRDATAVNATRWALFGAMKTTGLPVAVGSGGRTKYNRQRLGIPKTHALDAACVGKFDTLKGWRVPTQVIKAMGRGSYQRTRLDKYGFPRGYLMRQKQVQGFQTGDRVRAVVPSGKKAGTHTGRVAIRKTGSFNIQTEQGAVQGISWRHCTLLQRGDGYGYHPLPTIQH

SEQ ID NO: 5134 - protein, 427 aa, Ktedonobacter sp.
MVFVLDTKKKPLMPCTPKRARQLLARGRAVVHRVAPFVIRLKDRQVEDSVLQPLALKIDPGSQTTGMTLARVEDRSEGAIHHAVLLAEVQHRGHEVQVRKVTQRYARRRRRSANLRHRAARAANRRIARGWLPPSLLSRIGNVVSWTKRLRRFAPVTRVDVECVRFDTQLLQNPEITGVQYQHGELFGWEIRAYLLLKYAYQCVYCGKRDTPFELDHIRPRSRGGSSRITNLALACHDCNRQKGAQTAAEWGHPEVEVQAQTPLRDAAAVNATRHKLVQELRVFGLPVGTWTGGRTRWNRARFGIAKTHAKDALCVGDLAGVREGRLKTVAITATGRGEHCRTNWSKQGFPRGYRLRHKQVKGFKTGDRVRAVVPDKLKTRGIHVGRVQVRKSGSFDIQTHEREVEGVNATYCCLVQRGDGYAYALA

SEQ ID NO: 5135 - protein, 338 aa, Moorena sp.; identical to SEQ ID NO: 4723

SEQ ID NO: 5136 - protein, 420 aa, unidentified
  REGION 1..420: note = Human gut metagenome
MQYVYVLNKHGEPLMPCSPCKARLLLKQKKACVVKRTPFTIKLLYGSTGYKQPITFGVDAGSKHIGISATTEKYELYREEAAPRNDVVDLLSARRAFRRNRRNRKIRYRAPRFNNRVHSKHKGWLAPSVEVKIQEHITLIKRVCRILPVTLVRVETAEFDTQRLKAMLEGKPLPVGTDYQLGEMYDEYNVRQYVLKRDKYTCQCCGAHPTKTKAVKLHVHHIETRRTGGNAPNNLITLCTACHKALHAGKVTLNGKKRGKPLKDAAFMGIMRKTLMERLLKELKIPVQETYGYITKYLREKHSIPKSHTNDARCISKNPLAIPCDTCYYTKAIRHHNRQLHKATILKGGIRKANQAPYTVKGYRLWDKVFYHGSECFITGRRTSGYFALKKLDGTVVSNSASYKKLRLLEVATNYITERR

SEQ ID NO: 5137 - protein, 419 aa, Geobacillus sp.; identical to SEQ ID NO: 4579

SEQ ID NO: 5138 - protein, 428 aa, unidentified
  REGION 1..428: note = Human gut metagenome
LKVFVLNMRGQPLMPCSPAKARHLLKAGKAAVRRRTPFTIQLRIATGETKQSVTLGVDAGAKHVGLSAATEKEEVFASEVELRQDITGLLAARLSLRRDRRHRKTRYRAPRFLNRVRSKHKGWLAPSVENRIQAHMSRIDAICGLLPVTKIVIETASFDIQKIKHPNVEGTDYQQGDQLGFWNVREYVLFRDGHVCQHCHGHSKDKILNVHHLESHQTGGDAPNNLITLCETCHKAYHAGKIKLKVKRGQSFRAEAFMGIMRWTLLDRVRKAHPGLPVENTYGYLTKNTRITLGLPKAHCVDAYCIAGNLKAVRRGVHLYQRQVRKHNRQIHKCTVLSKTLKDGTKIGYRKLNQTPHLVKNFRLFDKVRCLGKTGFIFGRRSSGYFDVRRLDGVKLSSGISYRKLTLLEKRSTYLTELRKEDGASSPV

SEQ ID NO: 5139 - protein, 413 aa, unidentified; identical to SEQ ID NO: 3476
  REGION 1..413: note = Human gut metagenome

SEQ ID NO: 5140 - protein, 427 aa, Oscillatoria sp.
MSIQPNYVFVLDANRKPLTPCKPSLARKLLKAGKCKVFRLYPFTMILKKEVIQDPQPVTLKIDPGSKVTGFALILDSNLIWVAELTHRGQVIKALLESRRSLRRGRRSRHTRYRQARFLNRTRPKGWLAPSLQHRVETTLTWVNKLSRLAPIKTIFQELVRFDLQKMETPEISGIKYQQGELQGYEVREYLLEKWERRCAYCGEENIPLQVEHIQPKSSGGTNRISNLCLACESCNTKKGTKDIKVFLAKKPDVLKKILSQAKRPLKDAAAVNSTRWALFNRLKETGKIIVTGSGGMTKFNRLRLELPKTHFFDAACVGDTPNISVLANQPLNIKATGHGSRQMCRTDKFGFPSRYVPRLKFVKGFQTGDIVKAVVTSGKKIGTYTGRVAVRSSGSFNVSAVQGLIQGINHKYCFSIHQKDGYNYGF

SEQ ID NO: 5141 - protein, 427 aa, Anabaena sp.
MSKVFVLDTNFIPLNPIHSAQARQLLRNKKAAIFRQFPFTIILKESRPDSPVSSLRLKIDPGAKFTGMALVNDSTGEVVFAAELKHRGFAIRDALTSRRQLRRSRRARKTRYRQPRFLNRTRPEGWLAPSLQSRIENIKTWVKKLRQFAPIGAISQELVRFDMQLMANPDLQGREYQQGTLAGYETREYLLEKWDRQCAYCGVKDVPFQVEHIHPRAKGGSDSITNLTLSCEKCNTKKGTKDIKDFLKKDPSRLEKILKQAKRPLADAASVNTTRLALLKVLKATGLPVETGSGGLTKFNRSQQKLEKTHWIDAACVGQLTPILNIKGVKPLLITANGHGTRQSCRTDKYGFPSRYVPRFKFVNGFQTGDIVKAVVTKGKKIGAYIGRVAVRTSGSFNISTVSGLIQGISYKYCKSIHKKDGYEYGK

SEQ ID NO: 5142 - protein, 438 aa, Scytonema sp.; identical to SEQ ID NO: 3630

SEQ ID NO: 5143 - protein, 428 aa, unidentified
  REGION 1..428: note = Human gut metagenome
LKVFVLNMRGRPLMPCSPAKARHLLKAGKAVVRRRTPFTIQLRIATGETKQSVTLGVDAGAKHVGLSAATEKEEVFASEVELRQDITGLLAARLSLRRDRRHRKTRYRAPRFLNRVRSKHKGWLAPSVENRIQAHMSRIDAVCRLLPVTKIVIETASFDIQKIKDPSVEGTDYQQGDQLGFWNVREYVLFRDGHVCQHCHGHAKDKILNVHHLESRQTGGDAPNNLITLCERCHKACHAGKIKLKVKRGQSFREEAFMGIMRWTLLDRVRKAHPGLPVENTYGYLTKNTRITQGLPKAHCVDAYCIAGNLKAVRRGVHLYQRQVRKHNRQIHKCTVLSKTLKDGTKIGYRKLNQTPHLVKNFRLFDKVRCLGQTGFIFGRRSSGYFDVRRLDGVKISSCINYRKLTLLEKRGTCLTELRKEDGASSPV

SEQ ID NO: 5144 - protein, 427 aa, Moorena sp.
MKQGNRVFVLNMRGEPLMPCSQRKARILLKEGKAVINKYNPFTIQLIYATGETKQDCHIGVDTGAKHIGIAVTSEDKVFYKAEVELRQDVSSNLDTKRIYRRGRRKRKCRYRKPRFLNRKRTDKWLSPSLQNRIDHTFAWIDRFSALVPKPILHIEVGKFDTAKMINPDIHGVDYQHGQTYGFFDERYFVFARDNYTCQVCGKSKGKILQTHHIIYSSNGGTDRVDNLITVCTDCHTSANHKKGGILYEWQAKHKKVKQYKEPPFMNTLRRRIFDKYPNAIITYGSETTPKRKEIGLEKTHYNDAIAISSITAIKENPNEWLLIRQFRKKKRSLHESTARKGRKEPNRTQKRNRKNTPYYKGFWLNDKVSVLDQVGYITGFTSGGAYIKNKNDEYITLPGKSYKQVGISNLRLLSHNNNWQYIRNAV

SEQ ID NO: 5145 - protein, 396 aa, unidentified
  REGION 1..396: note = metagenome
MKVFVINMHGEPLMPCSPRKARILLKEKKAKVVQREPFTIQLLYGSSGYKQDITIGIDTGHDEVGVSVTTETKELFSSVFKMRNDISKKMTTRRMYRRNKRSRLRYRKPRFDNRSASTRKGRLAPSVEWKVEAHKRIISFYQNRLPKCKLILETGIFDMQKMQNPEIKNEMYQKGVQYGYANTKAYVLTRDGHKCQAGKSGCTNRLEVHHIKFKSQGGSDNPNNLITLCSKHHKELHEGKLILNIKKHKSLRSATTMNVIRKRLLEYYPNAIETFGYVTKENRFRLGLEKSHQNDAFVIAGGNTQQRAETIDYKFKQANNRAIGINRKGYAPTARKVRYPIQSGDIVKYEGNIYTSKGNKSKGKSIYLEIENKKKAVSSKKVELIYNRKNIQYVYA

SEQ ID NO: 5146 - protein, 426 aa, Anoxybacillus sp.
MVFVLDTNKRPLAPCHEAVARKLLKQGKAAIYRRFPFTIILKKSVDESEIKATYRLKIDYGSRHTGLAILRGQEVVWLGQLDHRTDIKERIDKRRAFRRARRNRKTRYRKPRFLNRKRKEGWLPSSLESRVQNIQTWVNRLKKLCPIGYISYENAKFDTQLMRNPEINGVEYQQGTLQGYEVREYLLEKFGRKCCYCGKENVPLEVEHIIPKSRGGTDRVDNLCLACHDCNQRKGSKTAEEFGYPHIQKQVKESLKDASAINSTRWKAYEVLKQTGLDVECGTGARTKMNRIRLDLPKTHYFDACCVGESTTNHLYFKTKEVLFIKAKGRGSRSRTNLDRYGFPRGYLARQKFFFVFQTGDMVKAVVPRGKYQGVWFGEVACRKTGSFDIKGKDGKRIAQGINYRYVQVIQRFDGYAYGKGVAELA

SEQ ID NO: 5147 - protein, 421 aa, Moorena sp.
MVYVLSASGNPLMPTRRFGHVRRMLRSGRAKVVRRTPFTIQLMYESTAYTQPVSLGVDAGSKHIGISATTEKSVLYEADFELRNDIVELLSARREARRSRRSRKTRYRGPRFLNRTKPKHKGWLAPSVEQKVQTHLTAVRKACRMLPVSKITVETAAFDTQLLISQEKGLALPEGTDYQRGEQLGFWNVREYVLFRDGHTCRCCKGRSRDPVLEVHHIQSRKTGGNAPDNLVTLCRTCHRGYHDGTAKLPDSIRRGNRYNDAAFMGIMRWTVYNRLKEEYGPDTVHMTYGYITKDTRIRHGLPKEHCIDARCISGHPEAEPSGEVFFQKKVRCHNRQIHKAKTYKGGVRKRNQASYLVKSFRLFDKVEYNGEECFIFGRRSSGYFDIRMLDGTKVHAGISYKKLRFLETRHTTLTERRTAG

SEQ ID NO: 5148 - protein, 504 aa, unidentified; identical to SEQ ID NO: 3854
  REGION 1..504: note = Human gut metagenome

SEQ ID NO: 5149 - protein, 443 aa, Oligella sp.; identical to SEQ ID NO: 4469

SEQ ID NO: 5150 - protein, 440 aa, Lactobacillus sp.
MKGEKAMQNRVFVINQHGEALMPCKPKKARILLRDGKAKVLKKEPFTIQLLYGSAGYKQDISIGIDSGQRHIGLAVTSQDKVLFQGEVELRQDVKKLLDTRRIYRRGRRNRKTRYRKARFLNRTASRKDNWLPPSVASKVNHNINWINRLLLVLPKADLHIEVGKFDIQKMKNPEINGEGYQQGDLYGYQTVKQFVLARDNYTCQACKKKGGKLKIHHIIYRSLGGTNTVDNLITVCSNCHTTKNHQTGILAKWCKNKKKVNKSYKGATFMNILRRRLFLAFPQAKFQYGAWTTLQRADLDLTKSHYNDAVAISGIRKIKAKPTSIMMFKQFRKKKRSLHEATARKGRKTPNVTSKRSAKNTKYAKGFWLNDYVKIKDSNKKGYISGFMSKGTNVRLRDIFGEYVSNSDKSYTSTKNINLINHSNNWQKQVITVKQYVMG

SEQ ID NO: 5151 - protein, 405 aa, Moorena sp.
MVYVINFEGKPLMPTTNAKARKLLKQKKATVKRVNPFIIQLLYKTDTEYIQTITLGIDSGYLNIGFSAITDSKELIVGEVKLLQGIKDRLLEKSQYRRIRRQRLRYRKPRWNNRKIKQGWLAPSLQHKLNTHLKFIDYLNSILPIRNIVIEVANFDIQKIKNPDISGVEYQQGEQMGFWNVREYVFHRDGHKCQNPNCKNKSKEQILEIHHIKYKSEGGSDAPSNLITLCNKCHTSPNHKKGKFLYDWCENGKKVRGFRDATFMSMIRWYLLEQLKEKYTNIKATYGYLTKNHRIEHGIEKSHFNDAFAIAKGVNQVRNLEVFKVEQSRLNNRSLEKFYDAKYIDNRTGEKVSASELNCGRRTRNKNLNSENLRMFRGQKISKGQRRIRKQKSLYQPNDLIKYNG

SEQ ID NO: 5152 - protein, 470 aa, unidentified; identical to SEQ ID NO: 2825
  REGION 1..470: note = Human gut metagenome

SEQ ID NO: 5153 - protein, 443 aa, Caldicellulosiruptor sp.; identical to SEQ ID NO: 2385

SEQ ID NO: 5154 - protein, 257 aa, unidentified
  REGION 1..257: note = Human gut metagenome
MPVPQGEDYQKGEMYGFYNVRQYVFFRDGYTCQCCGAHGKGIKFHTHHLESRKTGGNAPDDLVTVCDKCHKAFHAGLITDAKLKKRRRKSTRDAAFMGIMRKTLLQRLRAELPIPVVETRGYITKATRERLLKLPKSHTNDALAIAMGRHGFGIEEVTYMPQSDRIYQIKPVRHHNRQLHKALPKKGGRRQRSQGPKYVQGFRRFDKVLYRGQECFIWGLRTRGYFQLKLLNGTKVHESAKASELILLEHSSGYLIA

SEQ ID NO: 5155 - protein, 468 aa, Thioalkalivibrio sp.
MAVFVLDRRKQPLMPCSEKRARLLLARGRAVVVRLHPFTLRLKDRVVAASALQPLAIKLDPGSRVTGMALVREEAGTDGGRAHVLWLGEITHRGAAIRKALTQRRAFRCRRRSQLRYRPARFDNRTRPKGWLAPSLQHRVDTTSAWVRRLCRWAPVTDLRQELVRFDMQAMENPEISGVAYQQGTLLGYELREYLLAKWHRTCAYCGAENVPLEIDHIHPRSRNGSDRVSNLTLACVPCNQAKGAQAIETFLVQDPERLRRIQAQAKAPLQDAAAVNSTRWALFQVLTATGLPVTTGSGGQTKFNRRRLGIPKTHALDAACVGTVATVTGWQVPTLAIKATGRGSYQRTRLDRYGFARGYLLRQKKVCGFQTGDHVRALVPAGKKAGTHVGRVAVRASGSFNIQTATGVVQGIGHRRCTLLQRADGYGYATTPFMVPSPTEAVTPSRPLGGTPIPPRPERRGFSEQNG

SEQ ID NO: 5156 - protein, 493 aa, unidentified; identical to SEQ ID NO: 2644
  REGION 1..493: note = Human gut metagenome

SEQ ID NO: 5157 - protein, 413 aa, unidentified; identical to SEQ ID NO: 2636
  REGION 1..413: note = Human gut metagenome

SEQ ID NO: 5158 - protein, 476 aa, unidentified
  REGION 1..476: note = Human gut metagenome
LAASGTEGVSHPGLPGKYKHKGGQLMSVAVISKTGERLMPTSEYRARKLLKSGKAIKHSYHPFTIQLTERETGDIQPIELCMDTGYIHIGISVKSEKHEYLAEQIDTLTDERGRHDACRMYRRQRRSRKRYRQARFNNRKRDQGWIAPSLEHKKKIHIQAISRINNVMPITDITLEMGNFDTQVLKAKEEGKPLPHGADYQHGGRYGIATLREAVFSRDGYKCQCCGRTIKDGAILHIHHIKYRSQGGTNSMSNLATVCDKCHTPKNHKPGGKLYNWKPKLSSFKGATFMTAIRWQLYNEVKALFPDIDIHITYGAATKERRRKLDIDKSHVNDAFVMGQLHPKHRIKAILCKKKRRNNRCLEKFYDAKYIDSRDGKKRSGQELFNGRINRNHKKNSENLHQYRLQKVTAGKRTVRKQHYKIQPHDIVIYENRKRETAGCHCNGTRMMLLPDKKSASIKKVKIYKYAGGYFKSAFN

SEQ ID NO: 5159 - protein, 406 aa, unidentified; identical to SEQ ID NO: 2874
  REGION 1..406: note = Human gut metagenome

SEQ ID NO: 5160 - protein, 423 aa, unidentified
  REGION 1..423: note = Human gut metagenome
MRVFVFNMRGEPLMPCTQRKARLLLKAGKAKIYKYNPFTIQLKYATGETKQECHVGIDTGSKYIGLAVTSENKVLFKGEVELRQDVKSKIDTKRIYRRSRRNRKTRYRRCRFLNRKRFGKWLPPSLQNRINHTFKWIDKLCSFIPESILHIEVGKFDIAKMINPEVHSVDYSQGQTYGYQGERYFIFARDNYTCQVCGERNKPLQTHHIIYVSNGGTNRVDNQITVCKECHTSTNHKNGGIFYKWQKEHKKVKQYKAPPFMNVLRQQILNQYPQALITYGFETTIKRKNIGLEKTHYNDAIVISGVSTISENFHEWLLIRQFRKKKRSLHEGVPRKGRKEPNRIQKRNSKNTPYYRGFYLNDKVSVFGKSGYITGFTNSGAYVKGVDGEYIVLPNKSYKRVNIASLKFICHNNNWQYITKNAV

SEQ ID NO: 5161 - protein, 453 aa, Moorena sp.
MWTYRLQGLIYSFKGVTVMVYVISKDGIPLMPTKRYGKVRRLLKQKLARVIRRKPFTIKLLYQTTIYTQPVSLGIDSGYTYIGFSAVTDKKELISGELKLLSGISERLKERLMYRRMRRSRLRYRKPRFLNRTRPAGWLAPSIQHKLDSHIRFINFIKSILHVTDTNIEVSNFDIQKIKNLDISGTDYQNGDQKGFWNVREYVLYRDGHKCQLCGKSDLPLEVHHIGYWKHDRTDRPSNLITLCTNCHTPNNHLPSGKLYQWQPNLKSFRDATFMSTVRWKLINKLNCNLTYGYLTKSKRIDMNLPKSHYNDAFCIAGGTANHTRVEPIYFTQSRRNNRSLEKFYDAKYIDIRTGKPAKGQELFNGRRTRNKSLSSDNLHKYRGAKLSKGRRQIRRQHYFYQPNDLVRLNGKVLMVKGIQNNGQYIKLAELPKPVRTDLVKPYMFRRSIYACG

SEQ ID NO: 5162 - protein, 395 aa, unidentified
  REGION 1..395: note = Human gut metagenome
MMPTTRHGKVRRLLKDNKAVVVNTCPFTIKLTYKTSDYKQEIVLGVDSGTKHVGLSATTKSKELYASEVILRSDVVDLLSTRRGLRRTRRSRLRYRKQRFNNRVKSKKDGWIAPSVRHKIDSHIRIISFVYSILPVSKLIVEVAQFDTQKIKNPEISGKEYQEGEQLGFWNVREYVLARDGHKCQHCKGKSKDPILNIHHIESRKIGGDSPSNLITLCETCHKEFHKGNIKLKVNRGESLRDAAVMSIMKWELYDELKSLYPNVKMTFGYITKYNRINHGIEKSHVSDAFVISRNFDSERLGYYYKRKLVRRHNRQIHKMKAPKGGNKRMNQSPFKVFGFRLFDKVMFQGKERFIYARRLRGIFNIRDINGENKKDISYKKLEYVSHGLISIVAG

SEQ ID NO: 5163 - protein, 470 aa, unidentified
  REGION 1..470: note = Human gut metagenome
MSVFVVGLNGCRLMPTSEREARLLLKHGKASVYRKVPFTIKLNYKTGSTTQPGYLGIDTGSQHIGVSVVREDGTVLHKEEIGLRDSMSKRKLMESRSSLRRGRRHRKTRYRHPKWRLKAKRVYYETPDRKGRHWKKQKITFASKRPQGWLPPSLQSKTDHHIQWIKKLQDLLPDGYRLSIELGRFDPARMKNTEIHGDLYQKGPQYDYENVRAYVLDRDRYTCQVCGKKGGKLHIHHILYRSHGATDNPQYMATICSDCHSTENHQPGGILYQWMQEQKKFTRGLRDATFMNILRKRLMKAFPKATFTYGNITKADREKLKIPKSHGNDATAIAIVKTGIMTVKDNEPVIYIQQVRRKKRSLHEETPRKGRKEPNRKASRYNKNTKAVTVTKRKNKKRISITGCLFDRVELNGKKGWISGFTDKSCYIKDENDQYIRISPKYKQVSLSKLKILHHCGNWVIGARRSLGKG

SEQ ID NO: 5164 - protein, 427 aa, unidentified; identical to SEQ ID NO: 5062
  REGION 1..427: note = Human gut metagenome

SEQ ID NO: 5165 - protein, 471 aa, Caldicellulosiruptor sp.; identical to SEQ ID NO: 3375

SEQ ID NO: 5166 - protein, 414 aa, unidentified
  REGION 1..414: note = Human gut metagenome
MVYVINKQGQALMPTERFGKVRRLLKNSLAHVVCRIPFTIQLDYDTTDYTQPVSLGVDAGSKHIGISATTSEKELYAADVELRNDIVDKLSTRRELRRTRRSRLRYRKARFNNRVSSKRKGWLAPSVENKIQTHLTVVEKIHKFLPITNIVVETASFDIQKINNPSISGVEYQQGEQLDFFNVREYVLFRDNHICQHCKGKSKDKVLNVHHIESRKTGGDSPKNLITLCETCHKAYHRGEFELNVKRGKSFRDSAFMGIMRWKLYDRLKNIYPNVSMTFGYITKNTRITNNLSKEHYVDARCISGNPTAKPLGYYFYQKKVRCQNRQIHKANFLKGGRKKLNQAPFLVKGFRLFDLVEYKKELYYIFGRRSNGSFDIRKLDGTKVNKGSINCKYLRLIDKRKSILTEKRTQVNL

SEQ ID NO: 5167 - protein, 415 aa, Selenomonas sp.
MPTENHAKVRLLLKSSKAVVVKRTPFTVKLIGTNKTFVQDVTLGVDAGSKHVGLSATTTKKELFSAELRPRNDVVELMSSRREMRRSRRNRTTRYREPRFNNRVHLKNKGWLAPSVEVKIWNHIQAIKLVAKLLPLAVIRVETAEFDLQRIKAMEQGKPSPVGTDYQLGEQYDHYNTRQYVLHRDGYKCACCGAKPTSKKEVKFHVDKVKLNTHHIESRKTGGDAPDNLITLCDKCHKLHHAGKLDIPEKKRRLRSTRDAAFMGIMRKTLIQRLKMMFPTIKVCETYGYITKYWRERKNIEKTHISDAFVVAKNFDAARLDKSLLVVPKRQHNRQIYKCKINKGGVRKLNQTPKFVFGYQLFDRVLCKGQEGFVFGRRAKGSFDIRKLDGMRIAEISYKKLRRIEHRKPLLIAYN

SEQ ID NO: 5168 - protein, 477 aa, unidentified; identical to SEQ ID NO: 2707
  REGION 1..477: note = Human gut metagenome

SEQ ID NO: 5169 - protein, 471 aa, Caldicellulosiruptor sp.; identical to SEQ ID NO: 4560

SEQ ID NO: 5170 - protein, 443 aa, Caldicellulosiruptor sp.; identical to SEQ ID NO: 2385

SEQ ID NO: 5171 - protein, 413 aa, Blautia sp.; identical to SEQ ID NO: 2636

SEQ ID NO: 5172 - protein, 456 aa, unidentified
  REGION 1..456: note = Human gut metagenome
MSTCVCVLSNSGERLMPTFRLGKVRRLLKDGKAKIVKHHPFTIQLLYDSKANTQPIEICEDVGYNYIGISVKSESHEYVSAQYDTLQDEKEHHDDCRKYRRTRRNRLRYRKPRFDNRKRSEGWLAPSLEHKKQLNIRLVERYVSVIPITHATVEVGSFDTMLLQAIQKGESKPEGADYQKGPRYNLATLREAVFYRDNYTCQVCGRKIADGAILHMHHMFYWKGRHSNSLDELLTVCEKCHTPANHQKSGKLYGFGEDVKFANLSGAAFMNTVRWQIVNELYAAFGKPSVTFTYGAMTKEKRIALHLEKSHNNDAYAMGDYHPAHRCEFGHYQKRCRNNRVLEKFYDATYIDTRTGNKAKGKELFNGRISRNHKKDSEDLHKYRSKKVSKGRRSIRRQRYAIQPYDTVRLESKTYITSGCHNKGTRLLISANGKSKSVAISKVQVVCHAGAWIQII

SEQ ID NO: 5173 - protein, 406 aa, unidentified
  REGION 1..406: note = metagenome
MVYVQDINGKPMMPTTRHGKVRRLLKDKKAVVVNLCPFTIRLTYISDSYKQEIVLGVDAGTKHVGLSATTKSKELYSSEVILRNDIVDLLSTRRELRRTRRNRLRYRKPRFDNRIKSRRPGWVAPSVKYKVDAHIRVVENVCSILPISRIVIEVAQFDTQKIKNPNISGKEYQEGDQLGFWNVREYVLARDGHKCQYCKGKSKDHVLNVHHIESRKTGGNSPSNLITLCETCHKEYHKGNIDLKIKRGSSLRDAAVMGIMKWRLYEELRSKYDRVSMTFGYVTKYNRINHDIEKSHVSDAFVISKNFNAIRLGYYYKVRLVRRHNRQIHKQKIPKGGIKRLNQSPFEVFGFRLFDRVMFENNCYFIFARRKTGSFNIRDINGKNKRDITYKKLKLSRCKRFMIEKS

SEQ ID NO: 5174 - protein, 512 aa, unidentified
  REGION 1..512: note = Human gut metagenome
MSTVYVLNKDGKPLMPTTRGGHVRHLIKEQKARVVRAKPFTIQLLYETNDVVQPLYLGIDPGRTNIGVAVVKANGTAVFTAHLETRNKEIPKLMQDRKKARRARRTNGRRCRRQRRAKANGTISKKCVKQTTAQNGSVSKRAKDIGVIKRRLPGCEKDVLCIGIKNKETKFTNRTRPEGWLTPTANQLLQTHINLVKKIQKFLPISDVVLEVNKFAFMRLDNPNIQKWQYQQGPLYKKESLESAVSEIQEHHCLFCKKPIDHYHHVVPQHKNGSNTIGNIVGLCAKHHDLVHKDSAWEKKLAQKSTGLNKKYGALGVLNQIIPTLTNELSSLFPKHSFVTNGKSTYDYRAAHGVSKDHWLDAYCIACSVLPSNVCDSNINNHMPYVLKQFRRHDRRVLNNENMNRVYTLNNKAVAINRHKAKDQKTVSLEEFRKEHPDDVCKLKVKEHHPTYRNMNRNFPGSVFLVGKQIHVMQGIASSKDGKATKYNDTSATAIAAGKCKFVAKNTGILFV

SEQ ID NO: 5175 - protein, 408 aa, unidentified; identical to SEQ ID NO: 4810
  REGION 1..408: note = Human gut metagenome

SEQ ID NO: 5176 - protein, 493 aa, unidentified; identical to SEQ ID NO: 4345
  REGION 1..493: note = Human gut metagenome

SEQ ID NO: 5177 - protein, 457 aa, unidentified
  REGION 1..457: note = Human gut metagenome
MDAVAVISASGKPLMPTNPVRARKLIKKGKAVIYKYCPLFTIRLTERTDGDIQTIEYCCDTGYQHIGLSIKSRKHEYVNEQRDLLPNETERHNDSRKYRKARRRRKLRHRACRRDNRHDNQICKDGYAPSIRNKRDQHISLYRSYTEILPVERAVFEMGQFDTQVLKAIEKGEPLPQGKDYQHGERYGYATLREAVFARDDYTCICCGKNAFKDKRILCVHHLGFRIGDRTNRLANLATVCTKCHTPKNHQPKGKLYNLKPELKDFKGATFMTMVRWDMLDKLKAVSKGIQVDVTYGAATKEARRDLKIKKSHANDAYCMGSFYPSHRTDLKRYEKCRRNNRVLSKFYDATYIDIRDGKKKKANALGCNRTKRRESRRSEKNERIYRGEKISKGRIVLRTRRAVIRPGDIVYVGKKKYIVASSKNLGAQLKLADGSLLTTSKVTKIIHCGGWKRVTL

SEQ ID NO: 5178 - protein, 480 aa, unidentified
  REGION 1..480: note = Human gut metagenome
LYTKPLDNIGEGSLPPSGEINLKGMTFMVYVKSIDGKVLMPTSNAKARKLLKQKKAKVVSLRPFVVKLTYKTKTEYIQKLNLGVDSGYSNIGFSVIDAKQEYIAGEVKLLEGMKKRLLEKASYRRIRRSRLRYRKARWNNRVKSKKKGWLAPSLKHKLDTHIKFIDYLKNILPIEKITIEVANFDIQKMKDDLISGIDYQNGDMFGFWNVREFVLHRDGHKCQNPNCKHKDKKEQILKVHHIRYRSEGGSDRPENLITLCSKCHTPANHKKGKFLYDWCVNGKKVRGFKDATFMSMIRWYLVNELKSKHNNVSITYGYITKNHRIQNGIEKSHLNDAFAIAKGTNQARTKDRFLVIQDRLKNRSLEKFYDSKIIDIRTEKKVSGGDLNCGRSTRNKNLNTENLRKYRGAKISKGQRRIRKQKYFYQSNDLVKYDGKVYTVKGTQNEGKYIALKEIKKVPKVELLIPYVFKKGLNWSYRLC

SEQ ID NO: 5179 - protein, 406 aa, Geobacillus sp.
MPCSPRKARLLLKQKKAKVVRRTPFTIQLLYGSSGYKQPVSLGVDMGTRHVGISATTKKDVLFEAEAQLRTDIVELLAIRRQFRRSRRNRKTRYREARFLNRRKPEGWLPPSIQHKINSHIKLIDLVHNILPVTSVTIEVAAFDTQKLKNLNIRGVEYQQGEQMGFWNVREYVLYRDNHTCQYCKGKKKDPVLQVHHIESRKTGGDSPDNLITLCKTCHHEIHEKGLEHIFQRKRPPMRDASQMTAMRWAMFSRIREKYSHANITYGYITKFIRIANGLSKSHMVDARCISGNPLAKPSGTVYLLKFVRKNNRQLHKATILKGGKRKSNKAPRFVKGFQLFDKVVYERKECFIFGRRSSGYFDLRLLDGTKVHASASWKKLKRVEHASTLLIERRKGDSSPTFALA

SEQ ID NO: 5180 - protein, 415 aa, Selenomonas sp.; identical to SEQ ID NO: 5167

SEQ ID NO: 5181 - protein, 443 aa, Caldicellulosiruptor sp.; identical to SEQ ID NO: 2385

SEQ ID NO: 5182 - protein, 413 aa, Moorena sp.; identical to SEQ ID NO: 2636

SEQ ID NO: 5183 - protein, 424 aa, Enterococcus sp.; identical to SEQ ID NO: 4410

SEQ ID NO: 5184 - protein, 430 aa, Citrobacter sp.
MNRVFVLGKTGQALMPCHPARARQLLQSKKARVKRLYPFTIQLTQRSDGYIQPVELKFDPGSKQTGVGLVLHGKNRLSAIYAAVLTHRGQEIKSNLDSRRMIRRARRNRKTRYRQERFLNRVRSKHKGWLAPSVHSRVDNIVEWSKRFMRLSHVDFITVESVKFDMQKMESAAVEGLEYQRGTLFDYEVKEYLLEKYHYSCVYCGIKNVPFEKEHVVPRSRGGSNRISNLVLSCRSCNEKKDNLPIEEFLKDNPALLKKIKAQLKSSLKDAAAVNITRKQIVKELSDLNVPVLTGIGAETKYNRVSQGYGKEHYIDALCAGTTGTKVYIPSKLKPLLIKKERRNNRQMCLVDKYGFPRGKAKGSKIVHGFKTGDIVKAVVLKGKKKGVYKGKVAVRSSGSFNINVKQGRIEGIGWKNCVMLHRFDGYSYT

SEQ ID NO: 5185 - protein, 470 aa, unidentified; identical to SEQ ID NO: 4959
  REGION 1..470: note = Human gut metagenome

SEQ ID NO: 5186 - protein, 458 aa, Lactobacillus sp.; identical to SEQ ID NO: 4474

SEQ ID NO: 5187 - protein, 480 aa, unidentified
  REGION 1..480: note = Human gut metagenome
LYTKPLDNIGEGSLPPSGEINLKGMTFMVYVKSIDGKALMPTSNAKARKLLKQKKAKVVSLRPFVVKLTYKTKTEYIQKLNLGVDSGYSNIGFSVIDAKQEYIAGEVKLLEGMKKRLLEKASYRRIRRSRLRYRKARWNNRVKSKKKGWLAPSLKHKLDTHIKFIDYLKNILPIEKITIEVANFDIQKMKDDLISGIDYQNGDMFGFWNVREFVLHRDGHKCQNPNCKHKDKKEQILKVHHIRYRSEGGSDRPENLITLCSKCHTPANHKKGKFLYDWCVNGKKVRGFKDATFMSMIRWYLVNELKSKHNNVSITYGYITKNHRIQNGIEKSHLNDAFAIAKGTNQARTKDRFLVIQDRLKNRSLEKFYDSKIIDIRTEKKVSGGDLNCGRSTRNKNLNTENLRKYRGVKISKGQRRIRKQKYFYQPNDLVKYDGKVYTVKGTQNEGKYIALKEIKKVPKVELLIPYVFKKGLNWSYGLC

SEQ ID NO: 5188 - protein, 426 aa, Moorena sp.
MSNYVFVIDQNQTPLKPVHPKRARQLLSFGKAAVFRLFPFTLILKQEVSEPNVHPLILKIDPGSQVTGFALVTEGGEVVWRMQLEHRGGIIKKRLEQRRALRRQRRSRLRYRKPRFLNRKRKEGWLPPSLMHRVQTTETWVKRLLKFCPIQEIWIERVKFDTQLMENPEISGQEYQQGTLQGYTVREYLLEKWYRKCTYCKKEGIPLQVEHIYPRSKGGSNRVSNLGLACEKCNQKKGNTLIEDFLKRKPTLLESVLKQAKTPLKDTSAVNATRKKIVEVISKHSSLKTATGAQTKMNRVRLGLPKEHCLDAACVGEVERLTILSDQPLMVTATGTGGRQKCQTNKFGYPIKHRPLRPIQGFQTGDIVKVDIPKGKNQGQWRGRLCPYSDGNCEIYPKGRKRLGTKLSNVSEVMHRKDGYKYRHQP

SEQ ID NO: 5189 - protein, 237 aa, unidentified
  REGION 1..237: note = Human gut metagenome
MYDEYNVRQYVLKRDHYTCQCCGAHTTTKKTVKLHVHHLESRKVGGNAPSNLITLCTTCHDALHKGKVSLDGKERGKPLRDAAFMGIMRKTLMARLRDELSIPVQGTYGYITKMRREQNDIKKSHVNDARCISKHPLAEPCSVCYRTKAIRHHNRQTHKANFSKGSIRKRSQMPYVVEGYRLWDKVLYKGQECFVSGRRASGSFTLKKLDGTRISKGVTFKKLRLLEPATNYLIERM

SEQ ID NO: 5190 - protein, 419 aa, unidentified; identical to SEQ ID NO: 4877
  REGION 1..419: note = Human gut metagenome

SEQ ID NO: 5191 - protein, 406 aa, unidentified
  REGION 1..406: note = Human gut metagenome
LRVFVLNKRGKPLMPCSPAKARLLLKEKKAIVVRRTPCTIQLTIATGESKQPVSLGVDAGYKHVGLSASTEKAELYASEVELRKDITDLLSARRALRQSRRNRKTRYRAPRFDNRIRTKRKGWLAPSVENRINAHLSRIEAVLRLLPITKITVETASFDMQRLKNPDISGKEYQEGEQLGFWNVREYVLFRDGHVCRHCHGRSKDPVLNVHHLESRRTGSDSPDNLITLCETCHKALHRGEITLKAKRGQSFRAQAFMGIMRREVLNRLKASYPELKVHETYGYLTKHARIANGIVKSHGADAFCIAGNLGAESSANSSSRSRLAETTGRFTNFPSSKGAFESAIRHPLRPKASVFLIRLPAREKKASFSAVDHPGLLMYESSTAPAFQPASAARSCVCWRRDGPI

SEQ ID NO: 5192 - protein, 417 aa, unidentified
  REGION 1..417: note = Human gut metagenome
MSTTVFVLDKKHRPLMPCRPARARRLLRAGRARVVKRFPFVIRLVDRTVEQSEVQPVLIKLDPGSRETGAAVVRDDGKKRHHALAFFVIKHRGGAIRDALKARSAFRRRRRSQNLRCRSPRFLNRVKPKGWLPPSLRHRVETTLSFVRRMCRYLPVSGIAAELVKFDSQKLQTPEVSGIEYQQGTLFEYEVREYLLEKFGRKCVYCGAEGVPLNIDHVVPRAKGGSNRVSNLVLARVRRELKTPLRDAAAVNATRWVLFNELKATGLPVETGSGALTKFNRHAFGVEKEHWLDALCVGRLNGAVTRKGLNVLEIRCMGRGSRQRTRLTKYGFPRGYLMRQKCVHGFATGDMVEANVPKGKKAGLWRGRVAVRVSGSFNIQTPKGVIQGVGWKHCRLISHNDGYGYAWLGHAPHSSPA

SEQ ID NO: 5193 - protein, 442 aa, Lactobacillus sp.
MKHENANRVFLLNKDGKPLMPCRPRKARLLLKSGKAFVVKKYPFTIQLKYGSYGYKQKVSLGVDTGQRHIGFAVVSQDKVLHQSEVELRQDVHTNLYTRKIYRRGRRTRKTRYRQARFLNRVHGKRDGLWLPPSVKSKVSHNIAWIKRYLAVLPNPDLHIEVGKFDMAKIVNPDISGKQYQEGSLKDWKNYEYYVLARDEYTCQLCYKHGEGVKLVVHHIVYRSQGGTDRVDNLITLCTNCHTTKNHQPGGKLYKWMKAKKKVTKQLKGATFMNILRKRIMTTFPEASFQYGSQTYVDRKNLLLPKGHFMDAIAISGIKPVGQMPETVTMISQFRKKKRSLHEATARKGRKQPNTSSKRNEKNTKYACGLWLNDYVRVIGNHVKGYVKGFKSNGYYVYLTDGLGNYVLNNGKNYINGQQCRLIMHNGNWQKAEQKLSLYEFK

SEQ ID NO: 5194 - protein, 450 aa, Moorena sp.
LTKRTNPSNRSIHIMRVFVLDKNRKPLDPCHPAKARKLLKSGRAKVLRRYPFTIIIKDLEVENCSTHDHQLKIDPGAKTTGLAIVQGDRVIWGAELTHRGFQIKEALTSRRQLRRSRRNRKTRYRKPRFLNRTRPKGWLPPSLMSRVHNILTWVKKLIKFCPVTGISQELVRFDTQKMLNPEISGIEYQQGTLYGYELREYLLEKWNITCAYCGANNTRLEIEHIKPKSKGGSDRVSNLAIACHNCNQAKGNLEIEEFLSSKPNILKRILSQAKKPLADAAAVNATRWKLHDELKLIGLPVEVGSGGLTKYNRCRQNLPKTHWLDAANVGKVETLYIEDYQPLLITAKGHGTRQICRTDKFGFPRLHCSPKKIHKGFQTGDIVRAVVTKGKKIGTYMGRIATRKTGSFDITTHLAGFQELAINIAKLSIAKMDIVINFTADKSAESTSSA

SEQ ID NO: 5195 - protein, 419 aa, unidentified
  REGION 1..419: note = Human gut metagenome
MVYVISQDGKPLMPCSNVIARLLLKQGKAKVKRREPFTIKLTCETTNYTQDLTLGVDTGSGTIGTAVSKNNGDIVYMAEIAVRNDITDKMTQRAKYRRNRRNRKTRYRKARWLNRANSIRNNRFSPTMQSKLHSHVKEIEYIKSILPVTEMVFETNQFDTHLLKNPMLASEKVKHWGYQKGTNYGFEDTKAFVLNRDKYTCQCCKGKHKDNKLEVHHIIFRSQGGSDGESNLITLCHTCHKNLHSGKINPKLRGKVKGNLKYATQMNSIRKQLLRLYPNTIETFGYITKSNRLNLRVDKKHYYDACTIATQGNAFYIKSNLYKKKCVSDGDFQKTKGVRSEQCITTGKICGFRKFDKVKYFGKKCFIKGRMSTGYAILMDIDGDKIDFSAMPKGYKTPKLFNCKRITARTTQIIQTIAI

SEQ ID NO: 5196 - protein, 448 aa, unidentified
  REGION 1..448: note = Fermentation metagenome
MSVYVINQRKQLLMPTTEQKARLLIKQGKAKVIKIKPFIIQLLYATGETKQPITLGIDSGYNNIGFSAITDKKELIVGELKLLQNIKERLLERAMYRRQRRSRLRYRKPRWNNRIKSKQKGWLAPSLQHKLNSHIKFIDSLYKILPITKCIIEIANFDIQKIKNPNIKGIEYQQGDMLGFWNLREYVLYRDGHKCQNLNCKNKDKNPILEVHHIKYKSFGGTNNPNNLITLCTKCHTSDNHKKGKFLYKWCQKGKKVREFKDATFMSIIRWYLVNQLKEKYNNVSFTYGYITKNHRIEYKIEKSHYNDAFCIAKGINQIRNNKIWQLQQCRRNNRSLEKFYDAKYIDIRTGHKVSGSELNNGRRTRNKNKNSENLKVYRGQKLSKGQRRIRKSKYFYQPNDLIKYEGKIYTVKGTQNGGKYVALKEIKKVPKVELIKPYKFQKGIVWN

SEQ ID NO: 5197 - protein, 443 aa, Anoxybacillus sp.; identical to SEQ ID NO: 2800

SEQ ID NO: 5198 - protein, 429 aa, Ktedonobacter sp.; identical to SEQ ID NO: 4951

SEQ ID NO: 5199 - protein, 413 aa, unidentified
  REGION 1..413: note = Human gut metagenome
MTSYAFVLDANGKQLAPTKEQKAWFFIRKKRASLVSKYPIVIQLMKEIPEKEICQDEIRCGIDDGGLHVGIALVQKCKTKNKVVFKGTMEQRNDVKHLMEVRRGYRRYHRYHKRYRQARFDNRKSSKREGRIAPSILQKRQATIRVIHWLNKWINITNYWLEDVSVDIRALTDGYQSYRWQYQKSNRLDENIRKAAILRDGGKCMECGKSNCRLEVHHIKPKRRNGSNTLDNLITLCESCHQKTEGQEELYMDRYFSLLKSSDNKNLNYAQHVMIGKMWLRKQLSGLGVLYLTSGGDTANKRIDWNIEKSHANDAVCITDLRPDTCDVKEWTMKPMRRQSKAKTDHVLGIHHRDLVEYTFKNGETHRGYVTALYPDQKAINFQSQTKHCKKVNARKCKLLWNYSKIYWFENAS

SEQ ID NO: 5200 - protein, 406 aa, unidentified
  REGION 1..406: note = Human gut metagenome
MVYIQDIDGKPMMPTTRHGKVRRLLKDSKAVVVNTCPFTIKLMYKTSGYKQEIVLGVDAGTKHVGLSATTKSKELYSSEVILRSDIVELLSTRRESRRTRRNRLRYRKPRFNNRIKSKRTGWVAPSVRHRIDAHIRVIDNICSILPVSRVIVEVAQFDTQKIKNPDISGDEYQEGDQLGFWNVREYILARDGHKCQHCKGKSKDPILNVHHIESRKTGGDSPSNLITLCETCHKEYHKGNIDLKVKRGKSLRDAAVMGIMKWKLYDELKSRCDNVSMTFGYITKYNRIKYGIEKSHTSDAFVISRNFNAKRIERQYLKRLIRRHNRQIHKMKILKGGKKKNNQAPFEIFRFRLFDKVLYNNEILFVYGRRKSGNFNIRDFNGENPKDVSHKKLKLIRGKRHLIILK

SEQ ID NO: 5201 - protein, 471 aa, Caldicellulosiruptor sp.; identical to SEQ ID NO: 3375

SEQ ID NO: 5202 - protein, 456 aa, Halomonas sp.
MAVFVLDKKKQPLMPCSEKRARLLLARGRAVVHKRYPFTIRLKDRVGGETQPLRLGIDPGSKTTGLALMREPDSQQRHVLCLFELIHRGYQIKKALQQRAAFRRRRRSANLRYRAPRFNNRTKPKGWLAPSLQHRVDTVMAWVNRLSKSAPITGISQELVRFDTQKLENPEISGVEYQQGTLLGYEVREYLLEKWGRECAYCGTADTPLEIEHVVPRSRGGSNRVSNLTLSCHPCNAEKDSQTLTDFFATNKGLKKRLKANGLSADAQLERVQRQLKQPMRDASAVNATRWALFSALKTTDLPVAVSSGGRTKYNRQRLNIPKTHALDAACVGAFGKLHDWTVPTLTIKAMGRGSYQRTRLTKHGFPRGFLMRQKQVHGFQTGDMVRAIVPTGKKAGTHTGRVAIRKTGSFNIQAEYGAVQGISHKYCTLIQRSDGYGYYVTLFSNLTGEAGRAVA

SEQ ID NO: 5203 - protein, 451 aa, unidentified
  REGION 1..451: note = Human gut metagenome
MSVAVMSKTGMRLMPTSEYRARKLLKSKKATVYRYNPFTIQLTERETGDVQTVELCMDTGYLHIGTSVKSEKHEYLGVQIDTLTDEKQKHDACRMYRRQRRSRKRYRQSRFNNRKRSDGWIAPSLEHKKDIHIQTISRICNAMPITNITLEMGNFDTQVLKALEENRPLPQGTDYQHGERYGIATLREAVFARDKYTCQCCRKTIADGAILHVHHIIYRSRGGTNRMSNLATVCDRCHTPANHKPGGRLYNWKPKIASFKGATFMTAVRWKMYNEVKSKFSDINIHITYGAETKEQRRAFDITKSHVNDALVMGQFHPKHRSRPVCYKKKRRNNRCLEKFYDAKYIDSRDGKKRSGQELFNGRINRNHKKDSENLHQYRQQKVSAGRRTIRKQHYSIQPHDIIVFNRQQFETSGCHCNGARAILLPQKKSVAIKKLSIHKYAGGYFKSDFT

SEQ ID NO: 5204 - protein, 422 aa, unidentified
  REGION 1..422: note = metagenome
LNKRGKPLMPCSPAKARLLLKEKKAIVVRRTPFTIQLTIATGESKQPVSLGVDAGYKHVGLSASTEKAELYASEVELRKDITDLLSARRALRQSRRNRKTRYRAPRFDNRIRTKRKGWLAPSVENRINAHLSRIEAVLRLLPITKITVETASFDMQRLKNPDISGKEYQEGEQLGFWNVREYVLFRDGHVCRHCHGRSKDPVLNVHHLESRRTGSDSPDNLITLCETCHKALHRGEITLKAKRGQSFRAQAFMGNMRREVLNRLKASYPELKMHETYGYLTKHARIANGIVKSHGADAFCIAGNLGAERLGEFFFQKQTRRNNRQIHKLSILKGGIRKRNQAPFEAKGFRLFDKVACQGEEGFIFGRRSSGSFDVRKLDGTRISAGISCKKLRLLEKRRTYLTEIRKEEALPPLPEGRGLRA

SEQ ID NO: 5205 - protein, 443 aa, Oligella sp.
MAVFVLGKNKRPLMPCSEKRAWLLLERGRARVHRLVPFTIRLVDRTVADCALQPLELKIDPGSKTSGLALVRTRQSVNAQSGEITATAHGLNLFELIHRGFQISQALTARSQMRRRRRSANLRYRAPRFLNRTRPTGWLAPSLQHRVDTIQSWVQRIRRYAPVTHLAQERVHFDMQQLENPEITGVEYQQGELVGYEVREYLLEKWQRQCAYCDAIDVPLQIEHIHPKARGGPNRISNLTLACAPCNVKKAAQHITEFLATDPKRLTHIQAQAKRPLRDAAAVNATRWALLNTLNATGLPVNTGSGGLTKFNRTRLKIPKTHALDAVCVGSVDHVKQWQKPTLVIKATGRGSYQRTRLNRFGFPRGYLTRQKQIHGFQTGDRVKAVVAQGKKIGTYVGRVAVRASGSFNIQTAQSLIQGISYRYCTLIQRGDGYGYSLRTDSN

SEQ ID NO: 5206 - protein, 441 aa, Acidithiobacillus sp.
MPCHPARARELLREGRARVHRMVPFTIRLVDRLQADSVLQPLRLKLDPGSRTTGLALVREKETVDISTGEIIRTITVLMLLELKHRGHAIRDALTSRRAFRRRRRGNLRYRPARFNNRTRKDGWLAPSLQHRVDTTLAWVKRLMRWAPVMALSQELVRFDTQAMQNPEISGTEYQQGTLLGYEVREYLLEKWGRECVYCGAEHTPLEIDHIHPRSKGGSDRVSNLTVSCHDCNQAKGNRPLEQFLAKHPERIRKILAQAKAPLRDAAAVNSTRWALFQRLKATNLPVEVASGGRTKYNRHRLHISKEHCLDAVCVGHVDAIKNWQQPVLSIKATGRGSYQRTRLTKYGFPRGYLTRSKSAFGFQTGDMVKAVVTKGKKAGIYLGRVAIRASGSFNIQTGNGLAQHIHHRFCTLVQRGDGYGYNLTLLHPALNHGVAEAGEY

SEQ ID NO: 5207 - protein, 412 aa, unidentified; identical to SEQ ID NO: 3155
  REGION 1..412: note = Human gut metagenome

SEQ ID NO: 5208 - protein, 442 aa, unidentified; identical to SEQ ID NO: 3161
  REGION 1..442: note = Human gut metagenome

SEQ ID NO: 5209 - protein, 420 aa, unidentified
  REGION 1..420: note = Human gut metagenome
MQYVYVLNKHGEPLMPCSPRKARLLLKQKKACVVKRTPFTIKLLYGSTGYKQPITLGVDAGSKHIGISAATEKYELYCEEATPRNDVVDLLSARRAFRRSRRNRKTRYRAPRFNNRVHSKHEGWLAPSVEVKIREHITLIKRVCRILPVTLVRVETAEFDTQRLKAMLEGKPLPVGTDYQLGEMYDEYNVRQYVLKRDNYTCQCCGAHPTKAKAVKLHVHHIETRRTGGNAPNNLITLCTACHKALHAGKVTLDGKKRGRSLKDAAFMGVMRKTLMERLLKELKIPVQGTYGYITKYLREKHSIPKSHTNDARCISKNPLAIPCDTCYYTKAIRHHNRQLHKATILKGGIRKANQAPYTVKGYRLWDKVSYNGSECFITGRRTSGYFALKKLDGTVVSNSASYKKMRLLKVATNYITERR

SEQ ID NO: 5210 - protein, 430 aa, Moorena sp.
MSNFVFVIDTGLQPLDPVPPGQARRLLKQGKAAVYRRYPFSIILKYAVPDPKTQPHQLKLDPGSKTTGLAIVQSDKVVWGAELTHRGQQIKNDLESRRAIRRNRRNRKTRYRKPRFLNRTRSVGWLPPSLQSRVENTLTWVNRICQYVPITGISQELVKFDTQAMQNPEVSGVQYQQGELTGYEVREYLLEKWGRKCAYCGGENTPLEIEHIHPKSKGGSNRVSNLTLACSPCNQAKGNRDIKDFLAQKPDVLNRILKQVKQPLKDASAVNSTRWCLFNRLKQIGLPIETGTGGRTKYNRTRLELPKTHWLDATCVGVVESLRVLTQQPLLITAKGWGNRQMCTPNKYGFPTKHKTRYKTFFGFQTGDMVRAILPTGKFAGTHVGRLTIRESGVFEMRTPKGKVSPVRYKYCKSIHRNDGYMYSFSTNVQ

SEQ ID NO: 5211 - protein, 427 aa, Enterococcus sp.; identical to SEQ ID NO: 2410

SEQ ID NO: 5212 - protein, 415 aa, unidentified
  REGION 1..415: note = Human gut metagenome
MVYVLNICMAPLMPCKEAKARKLLKSGKAKIIKRNPFTIQLLFECENVTQDIALGVDAGSKHIGLSATTDKKELYAAEVELRNDIVDLLSTRRENRRTRRNRKTRYRKPRFENRMRNAGWLAPSVQNKVDTHLTLVRRVHEILPVTRIIVEVAAFDIQKIKNPNIEGIEYQHGEQLGFWNVREYVLFRDGHTCQCCKGKSKDKILNVHHIESRKTGGDAPNNLITLCETCHKGYHEGKVKLPKNIRRGMSFKDATFMGIMRWAFYNQLKKLYSDASLTYGYLTKNSRIRNGLPKTHCVDARCISGHPLAEPLGYYFYQKKIRCHNRQIYKRTILKGGYRKRNQAPYIVKGFRLFDKVVYNNQECFIFGRRSSGYFDLRKLDGTKIHASASYRKLKLLETRKLMLCERRLAIPPTA

SEQ ID NO: 5213 - protein, 414 aa, unidentified; identical to SEQ ID NO: 2588
  REGION 1..414: note = Human gut metagenome

SEQ ID NO: 5214 - protein, 449 aa, unidentified
  REGION 1..449: note = Human metagenome
MVFVLDKSKKPLDMITNAEARILIKKKLAVIHKVYPFTIRLRDNSCVSKDRAYTVKIDPGSRYTGIAITDDKDSVVMLAEIEHRGHLIKKDMDSRRNVRNSRRQRNTRYRAARFLNRARHKGWLAPSVKSRANNVINFIKKYKKLINIDKVMIEHASFDVAQMTSDDCLIGIDYQQGPLYQQKLKSFIFNRFNNKCVYCGSKAEEIDHVIPRAKGGTNSVYNLVASCRSCNEKKSNLTLKAFGKLMNKDYSNLKPKRLPKDAAIVQLARNYMVREITKLVSDTTTYNAWLTKYNRDQLGLPKEHYYDALSVGNVANYKFPTDKVLQISAKGRGARQMCSMNKYGFPRTSTKTSKSVYGFQTGDMVKAIVPTGSKAGEYLGKVAVRSRGYFDIQTKTKRIQGIWHKHCHIVQRCDGYLYSYKECDPLSDMLTSALQTKRSKNNRVSIANS

SEQ ID NO: 5215 - protein, 413 aa, unidentified
  REGION 1..413: note = Human gut metagenome
MTSYSFVLDANGKQLAPTKEPKAWFLIRKKRAALVSKYPMVIQLKKKIQENEICKDEIRCGIDDGGLHVGIALVQKCKSKNKVVFKGTIEQRNDVKHLMEVRRNYRRYHRYHKRYRQARFDNRKSSKRKGRIAPSILQKRQATIRVINRLNKWINITNYWLEDVSIDIRVLTDGYKSYSWQYQKSNRLDENIRKATILRDGGKCMECGKSNCRLEVHHIKPRRRNGSNTLDNLITLCESCHQKTEGQEELYMDRYFSMLKSSDHKNLNYAQHVMIGKKWLRKQLSSLGVLYLTNGGDTANKRIDWNIEKSHANDAVCITDLQPDTYDMKEWTMKPMRRKSKAKTDNVLGIRHRDLVEYTFKNGETHRGYVTALYPEQKAINFQSQTKHCKKVNARKCKLLWNYSKIYWFENAS

SEQ ID NO: 5216 - protein, 448 aa, unidentified
  REGION 1..448: note = Human gut metagenome
MSTGLRAVQAEPAGIRKGDALKVFVLNMRGRPLMPCSPARARHLLKAGKAVVRRRTPFTIQLRIATGETKQSVTLGVDAGAKHVGLSAATEKEEAFASEVELRQDITGLLAARLLLRRERRQRKTRYRAPRFLNRVRSKHKGWLAPSVENRIQAHMSCIDAVCRLLPVTRIVIETASFDVQKIRNLEVEGTGYQQGDQLGFWNVREYVLFRDGHVCQHCHGYSKDKILNVHHLESRQTGGDAPNNLITLCETCHKACHAGKIKLKVKRGQSFRAEAFMGIMRWTLLDRMRKAHSGLPVENTYGYLTKNTRITLGLPKTHCVDAYCIAGNLKAVRRGVCLHQRQVRKHNRQIHKCTVLSKTLKDGTKIGYRKLNQTPHLVKSFRLFDKVRCLGQTGFIFGRRSSGYFDVRRLDGVKISSCISYRKLTLLEKRSTYLTELRKEDGASSPV

SEQ ID NO: 5217 - protein, 471 aa, Caldicellulosiruptor sp.; identical to SEQ ID NO: 3268

SEQ ID NO: 5218 - protein, 423 aa, Moorena sp.
MRVFVLNKNRQPLDPCRPARARILLSTGKAKVYRRYPFTIILTEEIIDPVTHDHKIKIDPGAKTSGFAIVQGERVVWGAELIHRGFQIRDSLTSRRQLRRSRRNRKTRYRKPRFLNRTRPKGWLAPSLMSRVQNIETWTKKLIKLCPVAGISQELVKFDTQKLENPEISGIEYQQGTLYGYELREYLLEKWNRKCAYCGTTGTQLEIEHIKPKSKGGSDRVSNLAIACHPCNQAKSNQDIELFLSNKPSILKRILSKAKRPLADAACVNSTRWKLYHDLKSTGLPVEVGSGGLTKFNRCRQNLPKTHWLDAANVGKVETLIIEVTNPLIITAKGHGTRQICRTNKYGFPTRHCSRIKFHKGFQTGDIVRAVVTKGKKIGTYVGRVATRKSGSFNISTKSGLVEGISHKYCQFIHRKDGYAYTT

SEQ ID NO: 5219 - protein, 417 aa, unidentified
  REGION 1..417: note = Human gut metagenome
MPCSPAKARLLLKEKKAIVKRRTPFTIQLTIATGEAKQPVTLGVDSGYKHIGLSATTEKAELYASQVELRQDITDLLSARLALRRSRRSRKTRYRAPRFDNRVASKHKGWLAPSVENRIAAHLSRVEAVMRVLPVTAITVETAAFDTQLLKNPDVAGAAYQQGEQLGFWNVREYVLFRDGHVCQHCRGKSKDPILNVHHIESRRTGGDAPNNLITLCETCHKAFHRGEIKLKVRRGKSFKAETFMGIMRWTLFERLKKAHPELSVRNTYGYLTKHKRISHGIAKSHCADAYCIADNLGAKRLEGFFFQKQTRKHNRQIHKLLILKGGLKKKNQAPYEVKGFRLFDKVICKSEEAFIFGRRTSGSFDVRRLDGTRISAGISYKKLRLLEPRTTYLTEFRKEAALPPLHKCRGFRAEFL

SEQ ID NO: 5220 - protein, 431 aa, unidentified
  REGION 1..431: note = Human gut metagenome
MPDKVYVISRLGHPLMPCSPAKARHLLDDKKAKVVKRMPFTIRLLYGSTKYIQPIILGVDAGSKTIGLSASTAKEEVFAAEVMPRNDVVENLSTRREFRRARRNRTTRYRKPRSDNRVRSNHERWLAPSVKVKIQEHITSIKRVCTILPISKVVIETAEFDLQLLKAIQEGKPIPEGEDYQKGEMYGSYNVCQYVLWRDNYTCICCGVRGTPKNPVRLHVHHFESRKYGGNAPDNHGTLCDDCHKKFHLGIITDVKLKTRRRQSTRDAAFMGIMRKTLMWRLRTELFIPVAETKGYITKATREKLLVLPKSHTRDALAIAQGRHGFGIKEYAYVEPANHIYTVRPVRHHNRQLHKASILKGGIRKRNQASKYVFGFRLYDKVLYQGKACFVWGRRTRGTFLLRTIDGIKVKDGVSYRNLTLLERSSNYLIA

SEQ ID NO: 5221 - protein, 513 aa, unidentified
  REGION 1..513: note = Human gut metagenome
LKKEAAGHRQGKDCRPVRYGPPYRAGMPDGRRKPERKHMVAVVTSTGKPLMPTSAYRARKLLKKGRAVIFKYRPYFTIQLVDRADGEVQEVEYKSDTGSVHVGISVCTEKKELLSEQRDLLENEPEHHNDRKKNRRTRRNRKRYRKPRFDNRKKKPQEGHEKWLPPTLLHKMEVQVRLFREFCRVVPVTSACFEMGKFDTQALKAVSKGEPVPEGEGYQKGERYGTDTLRAAVFLRDGHTCRFCGRSVKDGAILHVHHVGYWKGDRTNRPANLASACEQCHTPANHGKNGILYGKEPEFKTLKDASYMTSVRWIMLDEIKKAAPGVQVSVTYGVTTKRKRQELHLPKSHVNDAFSMASFHPKKRSDTEYWKKIPRHDRVLQKFYDAIYLDTRDGSEKKGSELSNGRISRNHKKDSENLHQYRGHKVSKGHNSIRRGASSLKPGSIVMYKGEKMTVHGTHTRYVKGKDGKTAKKVNVQFTCPASDGKKSASLEKCTPVSRVYNTGWKRYWPDKK

SEQ ID NO: 5222 - protein, 424 aa, unidentified; identical to SEQ ID NO: 3434
  REGION 1..424: note = Human gut metagenome

SEQ ID NO: 5223 - protein, 415 aa, unidentified
  REGION 1..415: note = Human gut metagenome
MVYVLDKNGQPLMPTDRHRKVRLMLQSGQAKVIKRCPFTIQLNYDSGHQTQEISLGIDAGSKHIGVSATTKIKVLYEADVELRNDIVDLLSSRRELRRGRRNRKTRYRQAKFNNRRRGNGWLAPSIRQKIGTHLTVVENICKILPISRIMVETASFDIQKIKNPDIQGAEYQQGDQLGFWNVREYVLFRDGHTCQCCKGKSKDKILNVHHIESRKTGGNAPNNLITLCETCHTGYHKDTVQLPKAIKRGMRFKDAAFMGIMRWAFYEALKQQYEPVALVHNTYGYITKHTRIEHNLPKEHYVDARCISGNPDAFPNGEYYYQKKVRCHNRQIHKLTILKGGIRKQNQATYLVKGYRLFDKVSYQGKGYFVFGRRQSGFFDIRTLSGEKVNKGSLSCKKLKFIATRTYYLTERRAV

SEQ ID NO: 5224 - protein, 427 aa, Nostoc sp.
MSKVFVIDSEKRPLNPIHPAQARQLLRNKKAAIYRQFPFTLILAKSVPETPVSPLRLKLDPGAKVTGIALVNDASGEVVFAAELKHRGFAIRDVLTSRRQLRRGRRARKTRYRQPRFLNRTRPDGWLAPSLQSRVDNIETWIKKLRQFAPIEAISQELVRFDMQLMRNPDIQGEEYQQGTLQGYETREYLLEKWGRQCAYCGVKDVPFQVEHIHPRAKGGSNSISNLTLSCEKCNTKKGTKDIKDFLKKDPSKLTKILAQAKKPLADAAAVNTTRWALLETLKSTRLPVETGSGGLTKFNRSQQMLEKRHWLDAACVGKSTPVLIIKGIKPLLITANGHGSRQSCRTDKFGFPSRHVPREKIHFGFQTGDIVKAVVTTGKKIGNYVGKVAIRSSGSFNISTKNGLIQGISHNFCLRIHAKDGYSYAI

SEQ ID NO: 5225 - protein, 352 aa, Caldicellulosiruptor owensensis
  SITE 352: note = misc_feature - Xaa can be any naturally occurring amino acid
LLHGSSGYKQKCIAGIDAGSKNIGIAVTTEDGRVIYKAQVELRQDIKENIETRRRLRRARRSRKKRYRKPRYLNRKRPEGWLPPSVRAKIEAHYNIIKRLSKIIPIAEIKVEVGQFDTQALQNPDIQGIEYQNGEMKGFDSVKEYVKIRDKFKCHYAELRPDISCSDKLTVDHIIPRSRGGTNNPSNLVCCCEAHNIAKGNMSYKEFTGKELPAIEDFRPATFMNVLRDYLVPRLMEIAPTSYTFGLYTRRTRKEWELEKSHINDAIAITGIKPKWQDDVWYCIRQVRKKKRSLHEEIPRRGRKEPNREAKRNSKNTKEIIVNGNKWCLWDKVYIPAINKTGYISGFSNNWX

SEQ ID NO: 5226 - protein, 411 aa, unidentified
  REGION 1..411: note = Human gut metagenome
MVYVQDIDGKPMMPTTRHGKVRRLLKDNKAVVVNTCPFTIKLTYKTSDYKQEIVLGVDAGTKHVGLSATTKSKELYSGEVILRNDIVELLSTRRESRRTRRNRLRYRKPRFENRVKSKRLGWVAPSVRHRIDAHIRIINNVCSILPVSRVIVEVAQFDTQKIKNPEISGKEYQEGDQLGFWNVREYVLARDGHKCQHCKGKSKDPILNIHHIESRKTGGDSPSNLITLCETCHKEFHKWNIKLKVKRGKSLRDAAVMGIMKWRLYDKLKSLYPNVRMTFGYITKHDRINHGIEKSHVSDAFVISRNFDSERLGYYYKLKLVRRHNRQIHKMKIPKGGKKRMNQSPFKVFGFKLFDKVMFQGEERFIYARRLSGQFKIKDIDGNNERNISYKKLRYVSHGLISIKTNLFLSQ

SEQ ID NO: 5227 - protein, 422 aa, Lactobacillus sp.
MPCRPSKCRHLLHCNRAIIVSHTPFTIQLKYQSGSCLQDVSIGVDSGQRHIGLAVTSNEKVLWQGEVTLRQNVKSLLDTRHMYRHTRRQRHTRYRMVRFSNRKPRDIRLGVWLPPSVRQKCEHNIQWINRVRNVLPQADISIEVAKFDVQKLKDPTIHGIGYQQGDAFGYENVKQYVLERDEHTCQLCKRKIDTETKKTLKLHIHHIVYRSKGGTNAATNLLTVCTKCHTDRNHRAGGPLYALFEQKKTIPPLKNATFMNMLRNRLLTAFPEAHFTYGYITTVQRKKLGLAKAHYRDAVAISGIQQIIEEPKSVVMFDQFRTKKRSLHEATARRGRKQKNVTQKRVKKNTKKVKGWCLNDYVRISDGRCGFITGFSGLWMAHIRDRQGGLVKKLVSLTKLAFLHHTGTWRCTTLPTDVYDMQ

SEQ ID NO: 5228 - protein, 395 aa, unidentified
  REGION 1..395: note = gut metagenome
VGYNYIGISVKSESHEYVSAQYDTLQDEKEHHDDCRKYRRTRRNRLRYRKPRFDNRKRSEGWLAPSLEHKKQLNIRLIERYVSVIPITRATVEVGSFDTMLLQAIQKGESKPEGVDYQKGPRYNLATLREAVFYRDNYTCQVCGRKIADGAILHMHHMFYWKGRHGYQLDELVTACEKCHTPANHQKGGKLFGFGEDKEFANLSGAAFMNAVRWQIVNALYATYGKEFVTITYGAMTKEKRIILGIEKTHNNDAYAMGDYHPAHRCVFRHYQKRRRNNRVLEKFYDATYIDARTGNKAKGKELFNGRINRNHKKDSENFHKYRSKKVSKGRRSIRRQRYAIQPYDTVHLEGKTYITSGCHNKGTRLLIPVNGKSKSVAISKVQVVCHAGAWIQII

SEQ ID NO: 5229 - protein, 450 aa, Moorena sp.; identical to SEQ ID NO: 4205

SEQ ID NO: 5230 - protein, 438 aa, Moorena sp.
VAVFVLDRRGKPLMPCNEKRARLLLARGRARVHRVIPFVIRLVDRQIGVCSFQPLRLKLDPGSRVTGMALVRETDDAIAVLNLFELVHRGRQIGEALTARRACRRRRRTNLRYRTPRFLNRTRPSGWLPPSLMHRVHITIAWVNRMRRWAPVTALSSEQVRFDMQALANPEISGVMYQQGTLAGYEVREYLLGEWSRTCIYCDATDRPLQVEHLTARARNGSNRIGNLGLACGECNQDKGALDVREYVKDPKRLARILATASRPLNDAAAVNATRRALSSALRTTGLPLELASGGQTKFNRVTHNIPKTHALDAVCVGEVAALRGWQRPSLTIRATGRGSYQRTRLTRHGFPRGYLMRQKQVQGFQTGDHVRADVPHGKKAGVHTGRVAVRATGSFNIQTAMTVVQGISHRYCKLVQRGDGYAYSLQPNDSFRQDGGG

SEQ ID NO: 5231 - protein, 455 aa, Thiomicrospira sp.
VSVFVLAKNKKPLMPCSEKRARLLLSRGRAVVHLMVPFTIRLKGRTDGAIQPLHVKLDPGSKQTGMAVVLESKLDLKVLWLSVIHHRSHQISEQLTARRAMRRRRRNQLWYRPARFDNRTRPSGWLAPSLQHRVDTTLAWVKKLSKLAPVSDIGLERVKFDMQKMVNGDIAGAEYQQGTLFGFEVKEYLLAKHKHTCAYCNGVSGDNRLEVEHVQPRSKGGGNSVKNLVIACRSCNEAKGSQLLPEWKQSLGKSKLDKSRAIGIEKTIKGKWTGLRDAAAVNTTRNALLHELLLFAKDNVSVYTGTGAMTKFNRKQQGISKHHALDALCVGESLKPVKNWTKPVLEIKCTGRGSYQRTRLNKFGFPRGYLMRQKAVHGFQTGDQVKAVVPSGKKQGIYTGRVAVRASGSFNIQAANGLVQGISHKHCTLIQRGSGYGFNLTTIALTHGEREKQAA

SEQ ID NO: 5232 - protein, 431 aa, unidentified
  REGION 1..431: note = Human gut metagenome
MPNKVYVINKHGRPLMPCSPAKARHLLDAGKAKVKKRTPFTIQLVYGSSGYTQEVILGVDAGSKTIGMSASTTKEELLSAEVKPRNDVVDLLSTRREFRRVRRNRKTRYRKPRFDNRVRSKHKEWLAPSVEVKIQEHITSIKRVCRILPVSKVVIETAEFDLQLLKAIADGKSVPQGEDYQKGEMYGHYNVRQYVLWRDNYTCQCCGAHATKKKEVRLHVHHLESRKVGGDAPSNLITLCDSCHEKFHKGIITAANLKKRKRRSMRDATFMGIMRKTLIQRLRAELTIPVAETRGYITKTTREKLLVLPKSHTNDALAIALGKHGFNVGYLPEIAQIDKIYTIRPVRHHNRQLHKVTILKGGIRKSNQAEKYVFGYRLFDKVQFNGQDCFIWGRRTTGIFTIKTINGKMIKDGISFKKLKLVEKSTSYLIA

SEQ ID NO: 5233 - protein, 458 aa, Moorena sp.; identical to SEQ ID NO: 4474

SEQ ID NO: 5234 - protein, 551 aa, Moorena sp.; identical to SEQ ID NO: 3229

SEQ ID NO: 5235 - protein, 414 aa, unidentified
  REGION 1..414: note = Human gut metagenome
MVYVINKQGQALMPTERFGKVRRLLKNSLAHVVCRIPFTIQLDYDTTDYTQPVSLGVDAGSKHIGISVTTSEKELYAADVELRNDIVDKLSTRRELRRTRRSRLRYRKARFNNRVSSKRKGWLAPSVENKIQTHLTVVEKIHKFLPITNIVVETAAFDIQKIKNPSISGSGYQQGEQLDFFNVREYVLFRDNHICQHCKGKSKDKVLNVHHIESRKTGGDSPNNLITLCETCHKAYHRGEFKLNVKRGRSFRDAAFMGIMRWSFYDRLKNIYPNVSMTFGYITKNTRITNNLPKEHYVDARCISGNPTAKPLGYYFYQKKVRCQNRQIHKANFLKGGRKKLNQAPFLVKGFRLFDLVEYKKELYYIFGRRSNGSFDIRRLDGTKVNKGSINCKYLRLIDKRRSILTEKRMQVNL

SEQ ID NO: 5236 - protein, 414 aa, unidentified
  REGION 1..414: note = Human gut metagenome
MVYVINKQGQALMPTERFGKVRRLLKNSLAHVVCRIPFTIQLDYDTTDYTQPVSLGVDAGSKHIGISATTSEKELYAADVELRNDIVDKLSTRRGLRRTRRSRLRYRKARFNNRVSSKRKGWLAPSVENKIQTHLTVVEKIHKFLPITNIVVETASFDIQKINNPSISGVEYQQGEQLDFFNVREYVLFRDNHTCQHCKGKSKDKVLNVHHIESRKTGGDSPNNLITLCETCHKAYHRGEFKLNIKRGKSFRDSAFMGIMRWSFYDRLKNIYPNVSMTFGYITKNTRITNDLPKDHYVDARCISGNPTAKPLGYYFYQKKVRCQNRQIHKANFLKGGRKKLNQAPFLVKGFRLFDLVEYQKELYYIFSRRNSGFFDIRKLDGTKVNKGSINCKYLRLVDTRKSILTEKRMQVNL

SEQ ID NO: 5237 - protein, 413 aa, unidentified; identical to SEQ ID NO: 2636
  REGION 1..413: note = Human gut metagenome

SEQ ID NO: 5238 - protein, 512 aa, unidentified
  REGION 1..512: note = Human gut metagenome
MSTVYVLNKDGKPLMPTTRGGHVRYLLKEKKARVVTSKPFTIQLLYETDDVVQPLYLGIDPGRTNIGVAVVKTDGTAVFTAHLETRNKEIPKLMQGRKKARRARRTNGRRCRRQRRAKANGTISKKCVKQTTAQNGSVSKRAKKIGVIKRHLPGCEKKVLCIGIKNKEAKFSNRTRPEGWLTPTANQLLQTHINLIKKIRKFLPVNDVVLEINKFAFMQLDNPNIQKWQYQQGPLYQKASLEEAVSEMQEHHCLFCKKSIVHYHHVVPQSENGSDTIGNIVGLCTKHHDLVHKDTAWQKKLAKKKTGLNKKYGALSILNQIIPALTKELSSLFPKHFFATNGKSTHDYRAAHDVSKDHWLDAYCIACSILPNDTCDKNINGRVPYKLKQFRRHDRRALHKENMSRVYTLDGKKVATNRHKAIKQTTDSLEEFRQRQPNDVCKLKVKEHHPEYRNPERNFPGCVFLVGKHTHVMQGTSGSHNGKADGYYDTNGNSYPSGKCKFVAKNKGIVFA

SEQ ID NO: 5239 - protein, 432 aa, Thiorhodovibrio sp.
MNTVFVLSNTKKPLMPTRPARARRLLRDKKAAVYRMYPFTIILKERADGETQPIEAKFDPGSKTTGIALVAEFPQQGRVVLWAANLNHRGDSIRKRLADRRAIRRNRRNRKTRYRQMRVLNRKRPQGWLPPSLQSRVDNVENWLKKIIDRAPIAAVAVETARFDTQALQNPEISGVEYQQGELAGYELREYLLEKWNRTCAYCGAQHVPLEIEHIVSRSKGGSDRVSNLTLACHDCNQKKGNQPLEVFLAHDPKRLARIKAHAKAPLKDAAAVNVIRYAIGNALKKFGLPVSFWSGGRTKKNRVLQGYTKDHWIDAACVGETGAEVHIPQEMRPLIITATGRGHRQFTRVNKFGFPCAKAKTGKTVNEIRTGDVVKLIQPKGKYAGEYCARVTAIKNSNNYISITVNHKQTWFAAKLAHIMQRGDGYAYAYA

SEQ ID NO: 5240 - protein, 439 aa, Aeromonas sp.
MSVFVLDKHGKPLMPCSEKRARLLLSRHRARVHRLVPFVIRLTDIRLQDVSLQPLQVKLDPGSKTTGIAVVRVAEPVGIGRSVSVLFLMELIHRGRQISESLTARRAMRRRRRGQLRYRAPRFNNRTKPKGWLAPSLRHRVETTINWVARLRRWAPVTGLVSELVRFDMQVMENPDISGVEYQQGTLFGYEVREYLLEKWGRSCAYCSKKEVPLQIEHVVPKARGGSNRISNLTLACGPCNTKKGARSIEEFVKDSATLKRILAKLKAPLRDAAAVNSTRWALLNELKKTGLPVESASGGRTKFNRSQLGIPKTHALDAVCVGKIDAVIDWRRPTLTVTCMGRGTYQRAKLNKFGFPRGYSIREKRIKGFQTGDIVLAMVPASSKKAGQYIGRVAIRKTGSFNIQAGGNVIEGISHKYCQLIQRGDGYRYHQSQTKIAN

SEQ ID NO: 5241 - protein, 430 aa, unidentified; identical to SEQ ID NO: 4817
  REGION 1..430: note = Human gut metagenome

SEQ ID NO: 5242 - protein, 406 aa, unidentified; identical to SEQ ID NO: 2752
  REGION 1..406: note = Human gut metagenome

SEQ ID NO: 5243 - protein, 476 aa, unidentified
  REGION 1..476: note = Human gut metagenome
LEIVDTEGVSIPACRENIRIKGGQLMPVAVISKTGERLMPTSEYRARKLLKSGKAIKYSYRPFTIQLTERETGDIQPIELCMDTGYIHIGISVKSEKHEYLADQIDTLTDEKARHDACRMYRRQRRSRKRYRQPRFNNRKRNDRWIAPSLEHKKSIHIQAILRICKVMPVTDITLEMGNFDTQVLKAREEGKSLPQGVDYQHGERYGITTLREAVFSRDGYTCQCCGRTIKDGAILHVHHIVYRSQGGTNRMSNLITVCDKCHTPANHKQGGKLYNWKPKIASFKGATYMTTIRWKLYNEVKALFPDIDIHVTYGAETKERRRALDIDKSHVNDAFVMGQFHPKHRSKPICYKKKRRNNRCLEKFYDAKYIDSRDGKKRSGQELFNGRISRNHKKDSENLHQYRLQKVTPGRRAIRRQHYPIQPHDIIVYNGNKIEVSGCQHKGTRVVFSKTKKSVQISKIKLFKYAGGYSKSVFN

SEQ ID NO: 5244 - protein, 443 aa, Caldicellulosiruptor sp.; identical to SEQ ID NO: 2385

SEQ ID NO: 5245 - protein, 414 aa, unidentified
  REGION 1..414: note = Human gut metagenome
MPCSPAKARLLLKEKKAIVKRRTPFTIQLTIATGESKQPVTLGVDAGYKHVGLSASTEKAELYASEVELRQDVSDLLSARRALRQSRRNRKTRYRAPRFDNRIRTKRKGWLAPSVENRINAHLSRIEAVLRLLPVTKITVETASFDLQLLKNPDISGKEYQEGEQLGFWNVREYVLFRDRHVCQHCYGRSKDPVLNVHHLESRRTGGDSPDNLITLCETCHKALHRGDITLKAKRGKSFRAEAFMGIMRWEVHNRLRALHPGIEVSNTYGYRTKHARIANGIAKSHCADAFCIAGNLGAERLCEFFFQKQTRRNHRQIHKLSILKGGIRKRNQAPFEVKGFRLFDKVACQGEESFIFGRRSSGFFDVRKLDGTRISAGISCKKLHLLEKRRTYLTEIRKEEALPPLPEGRGLRA

SEQ ID NO: 5246 - protein, 465 aa, unidentified
  REGION 1..465: note = Human gut metagenome
MSTCVCVLSNSGERLMPTFRLGKVRHLLKDGKAKIVKHHPFTIQLLYDGKTNTQPIEICEDVGYNYIGISVKSQSHEYVSAQYDTLQDEKACHDSCRKLRRSRRNRLRYRKPRFDNRKRGEGWLAPSLEHKKQLNIRLIERYVSVIPITHATVEVGSFDTMLVKAIEEGKATPESADYQKGPRYNLATLREAVFYRDNYICKVCGRKATEGAILHMHHMFYWKGRHGNSLSELITVCEKCHTPANHQKSGKLYGFGENVKFADLSGAAFMNTVRWQIVNELYAAFGKDFVTVTYGAMTKEKRIALHLEKSHNNDAYAMGSFHPVNRCAFEHYEKVKRNNRILEKFYDSQYIDTRTGELTNGKSLFNGRISRSHKKDSENLHKYRGKRICKGHRALRRKKLALNPGDLVSLNGEILVVHGTHTKKNGSVNVEFKTPSRGGKKSASLKKLKIVKTSNLMHSAWTKVS

SEQ ID NO: 5247 - protein, 544 aa, Blautia sp.; identical to SEQ ID NO: 4004

SEQ ID NO: 5248 - protein, 471 aa, Caldicellulosiruptor sp.; identical to SEQ ID NO: 4560

SEQ ID NO: 5249 - protein, 437 aa, Ktedonobacter sp.; identical to SEQ ID NO: 5013

SEQ ID NO: 5250 - protein, 570 aa, Streptomyces sp.
MRHVRSLNSNVTHTTPLSPKSLRAPASGATCPRRPHVRVISPDPCSLGNPRCVASGASREGRSLAPSYRVTSPGHHDLRISRGASMTTFFTGEQTHQAVLPQQPALESAGAYTPGSRDETAHGLPDPKPGTGVGHGRGETGAVRTRTRRRHARRLDPGSKATGIAVTDERDEVGAKGRTALVRRGLVSIELRHRGRQIHSGMVRRAGHRRRRRSANLRYRAPRRDNRTRPDGWLPPSLRHRIDSTMSLVARLCRYAPVLEIHVEQVAFDTALIAAAVSSREQDFSERTHAGSEIREVLLAKWERSCAYCGATGVLLNIEHVRPRSRGGSDRVANLVIACVPCNQAKGTARIDEFLADRPARLERVIARLRRPLHDVAAMNTTRLLLVKTLATHGVAVHTWSGGRTSWNRLAMGLPKSHTLDALATGVIDLERGDAVVRIPAQILVVRSTGRGSYARTTPDRYGFPRLQRPRRKIHHGFSTGDLAAAVVPKGKWAGRWVGRVSVRAGGQHRITTLTSRFDVSHRNLRLLQRADGYTYGFADEIRLSEEHGPAYSGRTLKGGDPGNVRTPDA

SEQ ID NO: 5251 - protein, 406 aa, unidentified
  REGION 1..406: note = Human gut metagenome
MVYVQDIDGKPMMPTTRHGKVRRLLKDNKAVVVNTCPFTIKLTYKTSDYKQEIVLGVDSGTKHVGLSATTKSKELYASEVILRSDVVDLLSTRRGLRRTRRSRLRYRKQRFNNRVKSKKDGWIAPSVRHKIDSHIRIISFVYSILPVSKLIVEVAQFDTQKIKNPEISGKEYQEGEQLGFWNVREYVLARDGHKCQHCKGKSKDPILNIHHIESRKIGGDSPSNLITLCETCHKEFHKGNIKLKVSRGKSLRDAAVMGIMKWKLYEELKSRYDNVSMTFGYITKYNRINHGIEKSHVSDAFVISRNFDSERLGYYYKRKLVRRHNRQIHKMKAPKGGNKRMNQSPFKVFGFRLFDKVMFQGKERFIYARRLRGIFNIRDINGENKKDISYKKLEYVSHGLISIVAG

SEQ ID NO: 5252 - protein, 442 aa, unidentified; identical to SEQ ID NO: 2903
  REGION 1..442: note = Human gut metagenome

SEQ ID NO: 5253 - protein, 443 aa, Caldicellulosiruptor sp.; identical to SEQ ID NO: 2385

SEQ ID NO: 5254 - protein, 446 aa, unidentified
  REGION 1..446: note = Cyanobacteria bacterium UBA8543
MSKVFLIDQGKQPLNPIHPAQARQLLRDGKAAVFRRYPFTLILKEEVSLLTLASCAGITSRTQRRSNPNINSLRIKIDPGAKTTGLALVDDNTGEVVWVAELQHRGFQIRDALTSRRQLRRSRRNRKTRYRKPRFLNRTRPKGWLPPSLSSRVANILTWVKRLSSSSQIIAISTELVRFDTQKMEDVEISGVGYQQGTLAGYEVREFLLEKWDRTCAYCGAKDTKLEIEHIQPRSKSGSNRASNLCLACVPCNQKKGNQDIKDFLKDKPDLLKRILSHAKKPLADTAAVNATRWNLYENLKKTGLPVEVGTGGRTKYNRTVRGLEKTHYWDAACVGVSTPEQLITSGVKPLRIAAKGHGTRQQCRTDKWGFPVRYCSRTKFHKGFQTGDIVAAVVTSGKKIGIYVGRVATRATGSFNISTPDGLIQGISHKYCTHIHKKDGYSYVQ

SEQ ID NO: 5255 - protein, 433 aa, Lactobacillus sp.
MPNRVFVINKHGQALMPCKPRKARVLLRTGKAKVIKKEPFTIQLLYGSTGYKQAVSLGVDSGQRHIGLAVTSQAKVLFQTEVELRQDVKSLLDTRRTYRRSRRNRKTRYRKARFLNRIASKKANWLPPSVASKVNHNINWVKRLLAVLPKPELHIEVGKFDMQKMKNPNIKGEGYQQGDLYGYQTVKQFVLARDNYTCQACKKKGGKLKIHHLIYRSLGGTNTVDNLITVCSECHTTKNHQTGILAKWCQDKKQVHKSYKGATFMNILRRRLFTAFPQAKFQYGAWTTLQRADLGLAKSHYNDAVAISGIKQIKVKPTRIVMFKQFRKKKRSLHEATARKGRKTTNVMSKRNAKNTKYAKGFWLNDYVKIKDSRSKGYISGFSKATCYIKDIFENYLTVSPKYKQVALSKLVRITHNNNWSRQEINEKNYQMY

SEQ ID NO: 5256 - protein, 386 aa, Ktedonobacter sp.
MSKVFVVDMMHRALDPVHPGYARKLLTEGKAAVFRRYPFTIILKREVEQPVTHPLRIKLDPGSKTTGLAIVNDASGEVVWAAELTHRGHAIKAALNTRRAVRRSRRLRHTRYRKARFQNRRRKEGWLPPSLESRIANIETWVRRLMRLCPVQAISQEVVKFDTQMMDNPEIQGVEYQQGTLVGYEVREYLLEKWNRQCVYCSANDVPLHVEHIHPRAKGGTNRVSNLTLACEPCNTKKGTQDIQAFLHDKPDVLNTILAQAKASLKDASAVNTTRWALFRRLQALDVPVECGTGGRTKFNRVIRGLDKAHWIDAACVGASMPDVLCIEGVKPLLITATGHGNRQMCGTDKYGFPMRHRTRQKRLYGFQTGDSVKAVVPSGKSRAYM

SEQ ID NO: 5257 - protein, 443 aa, Caldicellulosiruptor sp.; identical to SEQ ID NO: 2385

SEQ ID NO: 5258 - protein, 471 aa, Caldicellulosiruptor sp.; identical to SEQ ID NO: 3375

SEQ ID NO: 5259 - protein, 442 aa, Deinococcus sp.
MTERPIVHLDSFKPRDRQLPNRALVVSATHKPLMPCHPARARELLRKGRAAVLRHQPFTIVLKDRACGVTQPLSLKLDPGSKTTGICAVAEMKRGPKVVWAALLHHRGRAIQQSLDARRVLRRARRSRKLWYRQPRFDNRTRPMGWLPPSLTHRVLTTLTWVGRLSRWAAATHLATELVSFDTQRLQNPFIRREGYQRGTLYGYTVRRYLLQKWQGRCAYCDRNDRPLEVEHLTPRSQGGSDRISNLVLSCTPCNLKKGTQSLQQFLAENLILLKKIRAQVQDPLHDSAAVNATKAKLLRELQKTGLLVEIGDGAQTSFNRDIQGYPKAHWIDAACVGPSGARVIVPNLRPLAIICIGHGNRQMCGTNKFGFPTRHRTRQKTHFGFQTGDLVRAVVTTGKKAGSYVGRVSVRATGKFRLPMVDGLHYRFFVLIQKGDGYAYS

SEQ ID NO: 5260 - protein, 431 aa, Klebsiella sp.; identical to SEQ ID NO: 3801

SEQ ID NO: 5261 - protein, 443 aa, Caldicellulosiruptor sp.; identical to SEQ ID NO: 2385

SEQ ID NO: 5262 - protein, 442 aa, Lactobacillus sp.
MKHENANRVFLLNKDGKPLMPCRPRKARQLLKSGKAFVVKKYPFTIQLKYGSYGYKQKVSLGVDTGQRHIGFAVVSQDKVLHQSEVELRQDVHTNLYTRKIYRRGRRNRKTRYRQARFLNRVHGKRDGLWLPPSVKSKVSHNIAWIKRYLAVLPNPDLHIEVGKFDMAKMVNPDISGKQYQEGSLKDWKNYEYYVLARDEYTCQLCHKHGEGVKLVVHHIVYRSQGGTDRVDNLITLCTNCHTTKNHQPGGKLYKWMKAKKKVTKQLKGATFMNILRKRIMTTFPEASFQYGSQTYVDRKNLLLPKGHFMDTIAISGIKSVGQMPETVTMISQFRKKKRSLHEATARKGRKQPNTSSKRNEKNTKYARGLWLNDYVRVIGNNAKGYVKGFKSNGYSVYLTDGLGNYVLNDGRNYVNSKQCQLITHNSSWQKAEQMLLLYEFK

SEQ ID NO: 5263 - protein, 413 aa, unidentified
  REGION 1..413: note = Human gut metagenome
MTSYAFVLDANGKQLAPTKEQKAWFFIRKKRASLVSKYPIVIQLMKEIPEKEICQDEIRCGIDDGGLHVGIALVQKCKTKNKVVFKGTMEQRNDVKHLMEVRRGYRRYHRYHKRYRQARFDNRKSSKREGRIAPSILQKRQATIRVIHWLNKWINITNYWLEDVSIDIRVLTDGYKSYSWQYQKSNRLDENIRKATILRDGGKCMECGKSNCRLEVHHIKPKRRNGSNTLDNLITLCESCHQKTEGQEELYMDRYFSLLKSSDNKNLNYAQHVMIGKMWLRKQLSGLGVLYLTSGGDTANKRIDWNIEKSHTNDAVCITDLQPDTCDIKEWAIKPMRRQSKAKTDHVLGIHHRDLVEYTFKNGETHRGYVTALYPDQKAINFQSQTKHCKKVNARKCKLLWKYSKIYWFENAS

SEQ ID NO: 5264 - protein, 431 aa, Moorena sp.; identical to SEQ ID NO: 5119

SEQ ID NO: 5265 - protein, 431 aa, Moorena sp.
MSYVFVIDQEKRPLDPVHPGRARKLLSSGKAAVYRRFPFVLILKHPVSEAHPQPLRLKIDPGSKTTGLAVLNDTSGQVLWAAELVHRGEEVHQALQKRAGVRRGRRSRHTRYRAARFSNRRRKRGWLAPSLCSRMQNVQTWTRRLMRWCPLGAISYEAVRFDTQAIQNPEIKGVAYQHGTLAGLEVKEYLLLKWRHKCVYCQKGDIPLEVEHIVPKRRGGSDRITNLTLACEACNQQKGSQTAQAFGFPHLQAQALQPLKDAAAVNSTRWALYERLKATGLPIEVSTGGQTKWNRKQRGIPKSHWLDAVCVGPSTPERVQWQHVIPLLITARGRQCRQLCNVDGWGFPRSRPKGPSKVFGFQTGDMVQAVVTRGKRMGTYVGRVAIKTDGYFKITGTHGMVEGIHARYCSPLHRVDGYEYQKGSAALPPQM

SEQ ID NO: 5266 - protein, 433 aa, unidentified
  REGION 1..433: note = Candidatus Falkowbacteria bacterium
MVRVIAKDGTVLQPTNRHGKVRRLLRDRKARVVSKEPFTIQLLYKTRRKKTQPIKVYFDTGSKYQGFGLVSNNKVISKGTIELRDGISEHISQRRRYRRSRRHRKKRYRPPRFDNRKRKEGWLPPSIESKYQHIIHWIDKLTSYLPDYQLIVEIAKFDIQAMDNPGIEGEGYQRGDLYGYENTKQYMIHREKGRCQLCGNPKGDDKWNLHHRSAKKGGGSDRAKNLALLHSICHRKFHNQDLNDSDLTSLEAKSQRFKDATFMNIIKNRLQKELKVYYDKQVHFTYGFITNINRRMLDLEKTHYNDALAIHGLPVINKVKPLYIKQVRQKKRSLHEAVPRAGRGDKVNREQVRRAKNSKSITKNGKLFSLWDKVYVPKLKTTGFISGFSGKWVYLQDIDGKYLKLPGKSYKQMNPDQLELVGRNNNWICKIAG

SEQ ID NO: 5267 - protein, 424 aa, unidentified
  REGION 1..424: note = Human metagenome
MVFVLNKSKKPLNMISNAEARILLRKKLAVIHKIYPFTIRLKDNSYVSKDKTYTVKLDPGSRTTGVAIIDNKDSVVMLAEIEHRGHIIKKNMDSRRMVRRHRRNRKTRYRPARFLNRTKPKGWIAPSVKSRADNVINFIKKYKKFLNINKVMIENVSFDTAQMTSDDNLVGTDYQQGPLYQNKLRSFIFNRSNNQCIYCGAKAEEIDHIIPRSNGGTNSVYNLVASCKSCNEKKSNLTLKEFGKLMGKDFSYLTPKKLPKDASIVQIARNYMVKEITKLVPDTKSYNAWLTKYNRDELGLPKQHYYDALSVGNIQDYKFLADKVLQISAKGRGKRQMCRADKYGFPRTSAKAYKSVEGFQTGDMVRAIVPNGSKAGEYLGRIIVRSNKCFDIQTKAKIIQGIWYKHFHIVQRGDGYSYNYKERS

SEQ ID NO: 5268 - protein, 428 aa, unidentified
  REGION 1..428: note = Human gut metagenome
LKVFVLNMRGQPLMPCSPAKARHLLKAGKAAVRRRTPFTIQLRIATGETKQSVTLGVDAGAKHVGLSAATEKEEVFASEVELRQDITGLLAARLSLRRDRRHRKTRYRAPRFLNRVRSKHKGWLAPSVENRIQAHMSRIDAVCRLLPVTKIVIETASFDIQKIKDPSVEGTDYQQGDQLGFWNVREYVLFRDGHVCQHCHGHAKDKILNVHHLESRQTGGDAPNNLITLCETCHKACHAGKIKLKVKRGQSFRAEAFMGIMRWTLLDRVRKAHPGLPVENTYGYLTKHTRITHGLPKTHCVDAYCIAGNLKAVRRGVYLHQRQMRKHNRQIHKFTVLSKRLEDGTKIGYRKLNQSPYLVHGFRLFDKVRCLGQIGFIFGRRSSGYFDVRRLDGVKLSPSISWRKLTLLEKRSTYLTELRKQDGTSSPV

SEQ ID NO: 5269 - protein, 557 aa, unidentified
  REGION 1..557: note = Human gut metagenome
MIYNLVSIRERSFMKQKKQKVMVYILNKKGKPLMPTTRCGHVRKLLDSKKAVVVSSNPFTIRLKYDTPNGVQDVFAGIDSGRENIGSGASNEDGDCLYLGELKTSNKSIKMKMTERAGFRKERRSHDRQNKQRKARKDHTEIQNGNADICRTTISCKSVQISYPAAEKSVTHKIIRGKEGKFANRHRDEGWITPSARQLVQMHMNDLKSMCRILPISHVTLERVAFDFQKLENENIKAWEYGKGKLYGYDSPEEYIHDVQGGKCLICGKPHIDYLHHIIPRSKGGSNKVSNLAGLCYDCHYGPMGVHNCQDTQDRLPELKNEANKQYKVSLLNSVMPVLIEEMDKFCKANSIIFSICGGHDTAKVRDMYDLQKDHCIDGFAISLAGRNVKSVDVMPDRIHQKQRYKKKSKNIIQKRNCREYYDGKKLAAVNRHKGTDQKADSLEEYMNTYAETHTADECKKHFESLTVKPARRTYTFHKEGRICPFHIGDKVRYEKKNKIKGNTKVETFICEGIRFPKDENKAKVEHNKTKSKKMKFCRVLEPGCTPYIDYRKLVLI

SEQ ID NO: 5270 - protein, 465 aa, unidentified
  REGION 1..465: note = Human metagenome
LAKALKGVVYTRLPHKINQFKRKDFVKRMTKTETQKVTQVCVLDQNGQPLMPTQRLGKVYRLLKTRKAHIVNYEPFTIKLDYEPKTHIIQPMTLGVDSGAIHSGYSLANEHREYYNAEVIARDNISKNLSDRRMYRRTRRSRKTRYRKPRFNNRKNKKKGWLPPSLEQKVYVQVKEIEHLHKYFPINNIIIEVAEFDTQKIENPDISGNEYQQGTLHGYNIRNYLLEKYHHKCFYCAKEVSAFEVEHMIPKARNGSNRIDNLTLSCHDCNQKKGTLTAEEFIEQTLSPQKAAQKLRQLPKTKQLLKYMAHMNATRWVLYNTIKETYDSVSITYGYITKYNRINAGLPKTHHIDAKCITGFSTVPSFDVTVVKTKMRRHNRQLHRATFSKGHIRRAATLPRFVHGFQLYDIVLFNNHRYYIKSRRSSGSFALVSLEGLKNENRNYKKITFLAHTNAYLTNHYVNDK

SEQ ID NO: 5271 - protein, 419 aa, unidentified
  REGION 1..419: note = Human gut metagenome
MVYVISQDGKPLMPCSNPIARLLLKQGKAKAKCREPFTIKLIYETTDYTQDLTLGIDTGSGTIGTAVSKNNGDIVYMSEVVVRNDITDKMAQRAKYRRNRRNRKTRYRKARWLNRSNSIKKDRFSPTMQSKLHSHVREIEYIQSILPITEMVFETGQFDMHLMKNPSLANPKVRHWGYQKGTNYGFENTKAMVLNRDNYTCQCCKGKHKDSKLEVHHVIFRSQGGSNEESNLITLCHTCHKNLHSGKVNLKLKGKMKGNLKYATQMNSICKQLFRLYPNAIETFGYVTKANRLHLGVDKEHYYDACIIATQGNAFNVKSNLYKKKCVSDGDFQKTKGIRSEQSIVTDKIWGFRKFDKVCYFGNDYFIKGRMSTGYAILMDIDGNKIDFSTMPRGYKTPKLSNCKRITARSTVMMQVEVV

SEQ ID NO: 5272 - protein, 558 aa, Moorena sp.
MLASFFWWHSRMFLVLDSAEPAPSLRKHFICCAQAYHRCRDTVISAILHSYKKGNNMSEYIYVLGMDGRPQMPTRRKRHIDRLLSTGKAKVVEYVPFTVQLLYENHPVLQPVILAEDPGRTNIGVAAVSQKGELLFSAVVETRNKEITKFMEKRRKARQRLAKRCHTMIKAGQVMRKLPMFGEEKYITCRYIRNTESRFYNRRRKDGWLTPSAEQLVRTHINLVHRIQGFLPVTDVALEVNRFAFMQLEDPYITGVDFQNGPLKGYDDRKAAVYDQQDGQCLLCNKKPIEHYHHIVPVAKRGSDTLANIAGLCCRCHEKVHKDAGAARRLQNKKQGLTKKYGALSVLNQAIPFICKRLEEEFGEHVHYCSGRDTSRLRQSFGFHKTKDEPLHEVDAWCIGVLSLREIPEKCPDFTKVYQIKQFRRQNRRRINHQTERRYYLDGKLVAVNRKKRMGQTGRKDNQTKDSLADWFTKMVHLYREKEAEHLRSRLTVKKSQHSYNDLKREMPGAEFIYENQRYILSGQLTNGKYYRAVGSTQNFPAAKCRIRRHNRGLVFVS

SEQ ID NO: 5273 - protein, 443 aa, Caldicellulosiruptor sp.; identical to SEQ ID NO: 2385

SEQ ID NO: 5274 - protein, 431 aa, unidentified
  REGION 1..431: note = Human gut metagenome
MPDKVYVISRLGHPLMPCSPAKARHLLDDKKAKVVKRMPFTIRLLYGSTKYIQPIILGVDAGSKTIGLSASTAKEEVFAAEVMPRNDVVENLSTRREFRRARRNRTTRYRKPRSDNRVRSNHERRLAPSVKVKIQEHITSIKRVCTILPISKVVIETAEFDLQLLKAIQEGKPIPEGEDYQKGEMYGSYNVCQYVLWRDNYTCICCGVRGTPKNPVRLHVHHFESRKYSGNAPDNHGTLCDDCHKKFHLGIITDVKLKTRRRQSTRDAAFMGIMRKTLMWRLRTELFIPVAETKGYITKATREKLLALPKSHTRDALAIAQGRHGFCIKEYAYVEPANHIYTVRPVRHHNRQLHKASILKGGIRKRNQASKYVFGFRLYDKVLYQGKACFVWGRRTSGTFLLRTIDGIKVKDGVSYRNLTLLERSSNYLIA

SEQ ID NO: 5275 - protein, 485 aa, Moorena sp.
MQKLKERNTYTPTVIPQDCSNCGLSLNSPFEVRDSVASLKTSFNSSDAALTAREQAGQNLRVSVVNVLNKRGVPLMPCKPQKARRLLKEGKAKVLKRTPFTIQLLYTTGESKQNLTLGVDAGYSNVGLSVVSADKELYSAELKLRTDMVKLNSERATYRRTRRSRKTWYRKARFLNRKKPQGWLAPSIQNKLDTHLKIIERIRGILPISNVVIEVAAFDTQKIQNPEITGVEYQQGELVGYKIREYLLEKWKRKCAYCGEKDIPLEIEHIIPKSRGGSSRISNLTISCNKCNLKKGNKTAEEFGHQEIQKQAKESLRATVFMNNVRWKLVNLLGCKWTYGYITKHNRIKLGLKKSHSNDAFIIAGGSTQKRNDQIFWIKQVRKCNRKLFKGKRSHLKNTAPRFVKEFQRFDKVLWKNIECFIFGRRSTGYFDIRMLNGHKLSSSAKAKDLKLLETFKTLLTEKMRFLPYLKDGVSAQRMEDEKRI

SEQ ID NO: 5276 - protein, 414 aa, unidentified
  REGION 1..414: note = Human gut metagenome
MPCSPAKARLLLKEKKAIVKRRTPFTIQLTIATGETKQPVSLGVDAGYEHVGLPASTEKAELYASEVELRQDITDLLSARRTLRQSRRNRKTRYRAPRFDNRIRTKRKGWLALSLENRINAHLSRIEAVLRLLPVTKITVETASFDLQLLKNPDISGKEYQEGEQLGFWNIREYVLCRDGHVCQHCYGRSKDPVLNVHHLESRRTGGDSPGNLITLCETCHKALHRGEITLKAKRGQSFRAEAFMGIMRSEVLNRLKASHPELEVNNTYGYRTKHARIANDIAKSHCADAFCIAGNLGAERLGEFFFQKQTRRNNRQIHKLSILKGGIRKRNQAPFEVKGFRLFDKVACQGEEGFIFGRRSSGFFDVRKLDGTRISAGISCKKLHLLEKRRTYLTEIRKEEALPPLPEGRGLRA

SEQ ID NO: 5277 - protein, 471 aa, Caldicellulosiruptor sp.; identical to SEQ ID NO: 3268

SEQ ID NO: 5278 - protein, 450 aa, Moorena sp.; identical to SEQ ID NO: 5112

SEQ ID NO: 5279 - protein, 420 aa, unidentified
  REGION 1..420: note = Human gut metagenome
MQYAYVLNKRGEPLMPCSPGKARILLKQQKACVVKRTPFTIKLLHGSAGYKQPITLGVDAGSKHVGLSASTEKRELYSEEFTPRNDVVELLSTRRQNRRSRRNRKTRYRAPRFNNRVHSKHKGWLTPSVEVKIQEHITVIKHICRILPITLVRVETAEFDTQRLKAMLAGKPLPVGTDYQPGEMYDEYNVRQYVLKRDNYTCQCCGAHTTAKKTVKLHVHHLESRKVGGNAPSNLITLCTTCHNNLHKGKITLDGKKRGKTLRDAAFMGIMRNTLLTRLRNELNIPVQNTYGYITKLLREQNDIKKSHVNDARCISKHPLAKPCSVCYRTKAIRHHNRQIHKAKILKGGIRKANQAPYIVKGFRLWDKVLYNEQECFISGRRSSGYFALRKFDGTTITNSISFKKLRLLEPATNYLIERK

SEQ ID NO: 5280 - protein, 451 aa, unidentified
  REGION 1..451: note = Human gut metagenome
VTTILKTCFAAFNLAKVVVLMDAWDIIVVLNKRGKPLMPCSPAKARLLLKEKKAIVVRRTPFTIQLTIATGEAKQPVSLGIDAGYKHVGLSASTEKAELYASEVELRQDITDLLSARRALRQSRRNRKTRYRAPRFDNRISTKRKGWLAPSVENRINAHLSRIEAVLRLLPVTKITVETASFDLQLLKNPDISGKEYQEGEQLGFWNIREYVLCRDGHVCQHCYGRSKDPVLNVHHLESRRTGGDSPGNLITLCETCHKALHRGDITLKAKRGKSFRAEAFMGIMRWEVHNRLRALHPGIEVSNTYGYRTKHARIANGIAKSHCADAFCIAGNLGAERLGEFFFQKQTRRNNRQIHKLSILKGGIRKRNQAPFEVNGFRLFDKVACKGEEGFIFGRRSSGFFDVRKLDGTRISAGISCKKLHLLEKRRTYLTEIRKEEALPALPEGRGPRA

SEQ ID NO: 5281 - protein, 463 aa, Mahella sp.
MVFVLDKHKKPLMPCSEKRARLLLERSRAVVHKKEPFTIRLKDRTEEESQLQSLRLKLDPGSKATGAAVLADDTKAIWLGEIHHKSNIKKKLKDRRALRSSRRNRKTRYRQARFNNRHPAKCVACGKNAKHGSRYCRPCQKARNYVDNGYREKRLPPSLQARVNQTINCVTKLCKLLPITAISTEHVKFDTQLMQNPDINDVEYQHGELFGYEVKEYLLEKWGRKCAYCGKENVPLEVEHIIPKSRGGTDRISNLTIACHKCNQKKGNMTAEEFGYPEIQKQAKQPLKDAAMMNATRWALYDNLKKFGLPVECGTGAMTKKQRLAHKLPKTHYYDACCVGASTSDEITISTEYVSIWSAIGRGTRQMCRTDKYGFPKGYRKNRKQYFGFQTGDIVKANIPNGKYQGNFTGRVAVRSSGYFDIKDSTGNCLCQGVSWKYMQVLQRNSGWQYDKERRNPLLSQLK

SEQ ID NO: 5282 - protein, 533 aa, Verrucomicrobium sp.
MRQVRKPTPWMLPQSRTLEGEDHVGERESAEGSLRRREAEAGCIPSRGERSRKTPVTAERREERGNSMRIFVIGSHREPLMPCHPARARELLREGRAVVHRRYPFTIRLKDREDGIRQPIRLKLDPGSRTTGLALVREAANGTQHALWLAELEHRGSAIRERLATRRAFRRRRRSTLRHRPARFNNRRRPEGWLAPSLRHRVDTTMTWVARLRRLAPVTGLSQELVRFDTQAMQNPEIAGVEYQQGTLAGYEVREYLLEKWSRQCAYCGKKNLPLEVDHIDPKSRGGSDRVSNLTLACHECNQDKGNRDIREFLANHPDRLMAVLAKAQTPLHDAAAINSTRWALFERLKDTDLPVETATGGRTKWNRNRLNIPKTHCLDAACVGDLDRLLGWNVPVLGVKAAGRGSYQRTRLMKDGFPRGYLTRSKRHCGFQTGDLVRASVPRGKKAGIHIGRVAVRASGSFNIQTLHGVVQGISHRRCSLIQRADGYGYAIKPKIAERKDVGTGAACSRRAIPPRHECQGSPAQKRWSLGQ

SEQ ID NO: 5283 - protein, 412 aa, Enterococcus sp.
MVYVLSINNEPLMPCSNVIARLLLKQGKAKVKYREPFTIKLTYETTTYTQPLTLGVDTGSQTFATAVTNGKGNILYTSEVVLREDKNHSIKKKMDQRRMYRRNRRNRKTRYRKARFNNRKNSKRKNRFSPTMTSKLHSHQKEIEFIKSILPIAKLILETGTFDPHLMKNPSLANLKVKPWGYQQGPNYGFENMKARILARDNHTCQICKKKPKNERLEVHHIIFRSQGGSDEENNLVTVCHSCHVELHKGLIHPNFEGSLKNALKYATQMNSIRVQLLKLYPDAIETFGYVTKANRLNLGLPKEHYVDAAVIATAGNQVNFACNLMIKRCIPKGDFQRTKGIRSEKIIPKGKIDGFKKYDKVRYFGNEYFVKGRMTTGYIQLMNIYGEKISFNHMPKGFKTPKTKKLSKNIC

SEQ ID NO: 5284 - protein, 421 aa, Moorena sp.
MQNRVFVLDTNKQPLSPTHPARARKLLKQGKAAVFRTYPFTIILRKTVKDPGDEPHRIKLDPGAKVTGIALVNERTGTVVWAAELTHRGDMIRQKLEKRRVVRRNRRKHKTRYRPARFNNRKRPNGWLAPSLQHRVETAMTWVKRLRKYCPITDISMELVRFDMQKLRNPEISGVSYQQGVLFGYELREYILTKWRHQCAYCGAKEVPLEIEHIHPKSKGGSDRVSNLAIACHKCNQKKGDKHVEQFLKKKPEVLKRLLAQAKAPLRDAAAVNSTRWALYNRLKETGLAIETGTGGLTKYNRTLQGLSKTHWLDAACVGKSTPMLKIATTQPLLITCKGRGGRQKAVVNKYGYPISHRPLKPIKGWQTGDITKHQVYGIGRITPRSRGSFVLTKSDKTQKSVKPTDLKPVSRRDGYSYKWV

SEQ ID NO: 5285 - protein, 430 aa, Moorena sp.
MGELLRKEADYMLVYVINRHGKPLMPCKPQKARKLLKEQKAKVVKRTPFTIQLLYGSSGYKQDVILGVDAGSKTIGLSATTENREVFSAEVELRTDIVDLLSTRRMLRRSRRNRKTRYRQSRFLNRKKPEGWVAPSVQNKIDTHIKVVKMVHDILPITKVIVEVAQFDIQKIKNPDILGEDYQQGEQLGFYNVREYVLFRDKHTCQHCNGKSKDPVLNVHHIESRKSGGNSPDNLITLCETCHRKYHKGEIELKVKRNSSFRDAASMNIMRWAFYNKLKELYSNVSLTFGYITKNVRIKHNLEKSHRIDARCISGNPSTKESDCWYFFKQVRKQNRQLHKTNPKKGIRRENKAPGYIHGYQLFDKVEYLDRECFVFGRRSSGYFDLRTLDGEVVSRSASVGKLKLVERASSLLCERREASFLTGLKHGVS

SEQ ID NO: 5286 - protein, 438 aa, unidentified
  REGION 1..438: note = Human gut metagenome
VSYGLYDAGLPQKIIQKERSTYMVYVLSQNGQPLMSTIRHGKVRRLLKEGKANVVKKCPFTIRLTYPSGDQTQEISLGIDSGSKYIGISATTQKKVLYEAEVELRNDISKLLAARRQNRRSRRSRKTRYRKPRFDNRKRKEGWLAPSVQQKVDCHLKVVEDVCKLLPVTRIIAEVASFDIQKIKDPKIHGTDYQQGDQLGFWNVREYVLFRDGHTCQCCKGKSKDKILNVHHIESRQTGGNAPNNLITLCETCHKGYHKGQVKLPKKIKRGMTFKDAAFMGIMRWAFYDRLKEIYLPLGIDVSLTYGYLTKNTRIAHQLPKTHYLDARCISGHPDAISDGIYYHQKKIRCHNRQLHKANTLKGGIRKRNQAEYLVHGFRLFDKVRYQGKDYFIFGRRKSGYFDIRDLNGEKVNKGSISYKKLRLVETRRSYLTERRLA

SEQ ID NO: 5287 - protein, 393 aa, Moorena sp.
MSNYVFLIDANKTPMNPIHPAHARKLMEAGKAAVFRRYPFTLIVNRAVENIVTYPLALKIDPGSKTTGISLVTNQNEAIWGMELEHRGQGIKDALLARRAVRRGRRGRHTRYRQARFLNRSRAKGWLAPSLMHRVLTVETWVKRLCKFAPVAQIRQELVKFDMQQMQNPEISGTDYQQGTLAGYEVREYLLVKWGRKCTYCSKEGVPLQIEHIQARANGGTDRVSNLCLACEKCNLKKGNKDIRDFLKGKPDLVSRILKQASSPLKDAAAVNSTRWKLFLMLKATGLPVKTGTGGQTKYNRTRLGLPKEHWLDAACVGVVESLKVLTSKILRVKSTGQGGRQRCQTDKLGYPQKYRPLRPIHGFCTGDIVKTVIPLMCECWNVYREAMPVQQW

SEQ ID NO: 5288 - protein, 296 aa, unidentified
  REGION 1..296: note = Human gut metagenome
INAHLSRIEAVLRLLPVTKITVETASFDLQLLKNPDISGKEYQEGEQLGFWNIREYVLCRDGHVCQHCYGGSKDPVLNVHHLESRRTGGDSPGNLITLCETCHKALHRGEITLKAKRGQSFRAEAFMGIMRSEVLNRLKASHPELEVNNTYGYRTKHARIANDIAKSHCADAFCIVGNLGAERLGEFFFQKQTRRNNRQIHKLSILKGGIRKRNQAPFEVKGFRLFDKVACKGEEGFIFGRRSSGFFDVRKLDGTRISAGISYKRLRLLEKRQTYLTEIRKEEGLPPLPEGRGLRA

SEQ ID NO: 5289 - protein, 420 aa, Bacillus sp.
MTHCFVLDAQGRKLSPTKEKRAWYLIRKQKAILKCKFPMVIQLVREVPEEEIDSTPIHLGIDDGSKLVGIALVQECRTENKPVFKGTIELRIDVKEKLAVRRGYRRYRRHHKKYRPARFDNRSSSRKEGRIPPSIRQKKDSILRVVRQLTKWVRIDEIFLEDVLIDIRALEKGYNPYRWEYQLSNRLDENIRKAAILRDRNTCQDCGATNTRMEVHHITPRRLNGSDSIHNLITLCLTCHEKIAGEELLHSQRFYQKIKGKSISFRDAMHVMQGKTYLQKALKEIAPLNPTTGGDTANKRIDWDIEKTHANDSIVICNLRVNPEQCEMKDWVIKPMKKRSNKKIKSANGIYHRDFVRYTKRNGESYIAYITALYPERNQCNMTTIDGKILKRYGLSRLSLLWRFNKIYWLINSNEGGESW

SEQ ID NO: 5290 - protein, 494 aa, unidentified
  REGION 1..494: note = Human gut metagenome
MPLNSLDGVRTVGNPYKPWDNIGEGHLTDLPVWAACSSIAATQKEIQMVYVQNRSGQPLMPTEDHRKVRLLLKNGLAVVVKRTPFTIRLATGSKNYVQPVILGVDAGSRTAGLSVSTKQRELFAAEVTLRNDVVNNLSARREFRKARRHRKPRYRQPRFHNRVHSKQKGWLAPSVEVKIQEHITVIKRVCRILPVSRVVVETAEFDLQLLKAIADGRPVPQGEDYQKGEQAGFYNVRQYVLWRDDYRCQCCRKHGKGIKLHTHHKESRKTGGDAPENLVTLCEVCHRKLHQGLIAEQSLKKRSRMSTRDAVFMGIMRRTLTERLCRELKVPVAGTKGYITKYTRVELLHLPKSHTGDALAIAQGRYGFGIGQVTFIKPAERIYQIKPVRHHNRQLHKATILRGGIRKSNQAPKYVKGSRLYDKVLYQGRECFIWGRRTTGSFLLKLLDGTKVKDGVSCKHLKLLEGAASIWLRKRKEEAAHPHGSIYGAPLIFG

SEQ ID NO: 5291 - protein, 427 aa, Oscillochloris sp.
MSFVFVLSSDGQPLDPCHPARARQLLDHGKAAVWRRYPFTIRLSERSVAERVTHPHRLKLDPGSKTTGIAVVAETTGRVVWAGELTHRGQAIRDALLSRRASRRSRRQRKTRYRQPRFLNRRRPAGWLAPSLQHRVATTLTWVNRLRRFVPVTAISTEMVRFDTQLLENAEISGVAYQQGTLAGYEVREYLLEKWGRRCAYCGATNTPLQVEHIVPRARGGSDRISNLALACEPCNIKKGTQTAAEFGHPDIQAQARRPLKDAAAVNTTRWALYQHLIATGLPVEVGTGGHTKFNRTRLGLEKAHWHDAACVGASTPEALDVRGVRPLLITATGHGNRQMAGLNRYGFPIRHRQRKKRHFGFQTGDIARATVTTGTKQGVYIGRVAVRAIGAFNITTTTSAKIQGLNHRFFRTVHRSDGYTYAAALG

SEQ ID NO: 5292 - protein, 456 aa, unidentified
  REGION 1..456: note = metagenome
MSTCVCVLTNNGERLMPTFRLGKVRHLLKDGKAKIVKHHPFTIQLLYDSKTNTQPIETCEDVGYNYIGISVKSESHEYVSAQYDTLQDEKEHHDDCRKYRRTRRNRLRYRKSRFDNRKRDKGWLAPSLEHKKHLNISLIERYVSVIPITHVTVEVGSFDTMLLQSIQKGEAKPEGADYQKGPRYNLATLREAVFYRDNYTCQVCKRKIADGAILHMHHMFYWKGRHGYQLDELVTVCEKCHTPANHQKGGKLYGFGKDKKFANLSGAAFMNAVRWQIVNALYATYGKEFVTITYGAMTKEKRIALQLVKTHNNDAYAMGDYHPARRCKFRHYQKRRRNNRVLEKFYDATYVDTRTGNKAKGKELFNGRISRNHKKDCKNLHKYRSKKVSKGRRSIRRQHYAIQPYDTVRLEGKTYITSGCHNKGTRLLIPVNGKSKSVAISKVQVVCHAGAWIQII

SEQ ID NO: 5293 - protein, 292 aa, Turicibacter sp.
LSRIKAVLRLLPVTKITVETASFDLQLLKNPDISGKEYQEGEQLGFWNIREYVLCRDGHVCQHCYGRSKDPVLNVHHLESRRTGGDSPGNLITLCETCHKALHRGEITLKAKRGQSFRAEAFVGIMRWEVLNRLKASHPELEVNNTYGYRTKHARIANDIAKSHCADAFCIAGNLGAERLGEFFFQKQTRRNNRQIHKLSILKGGIRKRNQAPFEVNGFRLFDKVACKGEEGFIFGRRSSGFFDVRKLDGTRISAGISCKKLHLLEKRRTYLTEIRKEEALPALPEGRGLRA

SEQ ID NO: 5294 - protein, 418 aa, unidentified
  REGION 1..418: note = Human gut metagenome
MVYVIGKEGQALMPTERFGKVRRLLKNGLAHVVCRIPFTIQLDYETTYFVQPISLGVDAGSKHIGISATTSEKELYAADVELRNDIVEKLSTRREQRRTRRNRLRYRKVRFNNRVSSKRKGWLAPSVENKIQTHLTVVEKIHKFLPITNIVVETASFNIQKIKNPSISSEEYQKGEQLGFWNVREYVLFRDNHTCQHCKGKSKDHILNVHHIESRKIGGNSPSNLITLCESCHKAYHNGKIDIKVKRGASFRDAAFMGITRWTTYERLKNIYPNVNMTFGYITKNNRITNGLPKDHYVDARCISGNSKAKPLGYYFYQKKVRCQNRQIHKVNFLKGGRKKLNQAPFLVKGYRLFDLVEYQNDLYYIFGRRDSGFFDIRKLDGTKVKKGSISCKYIRLVDIRRSVLTERRKSCSIPPTN

SEQ ID NO: 5295 - protein, 462 aa, Halomonas sp.
MAVFVLDKQKQPLMPCSEKRARLLLERGRAVVHKRYPFTLRLKDRVGGDTQPLRLSIDPGSKTTGLALMREADGAEPDDQQRHVLCLFDLVHRGFQIRKALEQRRGFRRRRRSKNLRYRAPRFDNRTRKAGWLPPSLQHRVDTVMAWMERLSRLAPITAISQELVRFDTQRMENPEISGVEYQQGTLLGYEVREYLLEKWGRECAYCGATETHLEIEHVVPSSSGGSDRVSNLTIACHDCNQAKDSLPLATFFASDKGLKKRLKANGLSADARLERVQRELKRPLRDASAVNATRWALFNALNATGLPVAVGTGGRTKFNRERLDIPKTHSLDAACVGAFDMLHDWRVPTLTIKCTGRGSYQRTRLTKHGFSRGYLMRQKQVHGFQTGDMVKAIVPTGKKAGTHTGRVAVRKTGSFNIQTDHGAVQGILHKHCTVIQRGDGYGYHLTPTIHQLKGGAGQAVA

SEQ ID NO: 5296 - protein, 436 aa, unidentified
  REGION 1..436: note = Human metagenome
MVLVIDKHKKPCNTISNAYARVLLFKKQAVIHKRFPFTIRLKNDSAVLKDRAYTVKVDPGSRTTGIAVTDDKDSVVMLAEIEHRGKIVKRNLDSRKVIRRSRRNRKTRYREARFLNRTKPKGWLAPSVKSRADNVINFIRKYKKLLTIDKIMIESVSFDVAQMSSDDYLIGTDYQEGPLYQKKLREFIFSKTKGRCAYCGAKAEEIDHIIARANGGSNSTYNLIASCRKCNKLKSNLALKDFGKLVGKDFSKLTPKKLPKDAAIVQSARNYMVKEIVKLVPDTTTHDAWLTKYNRNELGLPKEHYYDALSIGNVQDYKFLTDKVLQISAKGRGSRQMCLMNKFGFPRTSPKGSKLVKGFQTGDIVKAIVPKGLNRGEYLGRVIIHSSGYFDIKINDCLVHGIGHKYCSLIQKNDGYSYNYKERNFLSATWSVNPSI

SEQ ID NO: 5297 - protein, 471 aa, Caldicellulosiruptor sp.; identical to SEQ ID NO: 3375

SEQ ID NO: 5298 - protein, 414 aa, unidentified; identical to SEQ ID NO: 2588
  REGION 1..414: note = Human gut metagenome

SEQ ID NO: 5299 - protein, 457 aa, Ralstonia sp.; identical to SEQ ID NO: 2434

SEQ ID NO: 5300 - protein, 424 aa, unidentified; identical to SEQ ID NO: 3434
  REGION 1..424: note = Human gut metagenome

SEQ ID NO: 5301 - protein, 443 aa, Caldicellulosiruptor sp.; identical to SEQ ID NO: 2385

SEQ ID NO: 5302 - protein, 408 aa, unidentified
  REGION 1..408: note = Human gut metagenome
MVYVQDIDGKPMMPTTRHGKVRRLLKANKATVVNLCPFTIRLTYATSGYKQEIVLGVDAGTKHVGLSATTKSKELYSSEVILRSDIVELLSTRRELRRTRRNRLRYRKPRFGNRVKSKHHGWVAPSVRHKVDAHIRVIDNICSTLPISRIIVEIAQFDTQKIKNPDISGNEYQEGDQLGFWNVREYVLARDGHKCQHCKGKSKDPILNVHHIESRKTGGDSPSNLITLCETCHKEYHKGNIDLKVKRGKSLRDAAVMGIMKWKLYEELKSRYPNVSMTFGYITKYNRIKYGIEKYHISDAFVISKNFNALRLEYHYKVRLVRRHNRQIHKQKVLKGGAKKPNQSPFEVFGFRLFDRVMFEGNYYFIFGRRKSGSFNIRDINGGNQRNVTYKKLKLSIGKRFMIQKEMN

SEQ ID NO: 5303 - protein, 419 aa, Halobacteroides sp.
MAQLQYALVIDNEGKILDPTKVKKAWYLIRKGRVKLVEEYPLIIQLKKKIPKEEVNNDKIVLGIDDGYDKVGFALIQKCQSKNKVLFKATMKQRQEVSKLMTQRREYRRYRRQHKRYRAKRFDNRSSSKRKGRIAPSIKQKKQAILRVVNYLNKFIRIDKIVLEDVAIDIRKAVEGKELYSWEYQESNRLDENLRKATLYRDDCAFQICGATDTMLEAHHIIPQRDSGADSIYNLITLCKDCHKDKVDGSEYKYKDEFLNIIDGKELNIKPAMHVMQGKTWLREKLSKIVNLEITTGGDTANKRIDYDIKKSHSNDSICITNLLPVDNLDVKEYFIKPLRKKSKAKIKELKGFKHRDIVRYTKRNGETYDGYITSLRIKNNKYKSKVCNFTTLNGEKTFRGYGLTNLTLINRPKGLMII

SEQ ID NO: 5304 - protein, 462 aa, unidentified; identical to SEQ ID NO: 2823
  REGION 1..462: note = Human gut metagenome

SEQ ID NO: 5305 - protein, 414 aa, unidentified; identical to SEQ ID NO: 2588
  REGION 1..414: note = Human gut metagenome

SEQ ID NO: 5306 - protein, 443 aa, Oligella sp.; identical to SEQ ID NO: 5205

SEQ ID NO: 5307 - protein, 477 aa, unidentified
  REGION 1..477: note = Human gut metagenome
MIIALDKYKRPLGFLTERRCRILMERKRAVLYRVFPTVVILMDVDARTIPGLPSFRIKIDPGSKYTGIAIIRNDTDEFVYAMQIEHRGDAVRAALNKRKNARRNRRSRETGYRRAKWGNRCLSEKDKRSYDSSREDGWLPPSIRSAADNVISWVRRLGRWINLTECSFEAVRFDTQLMEDPDIEGEEYQHGTLFGLEIKEYLMEKFGHTCQYCGGKSGDPVLEWEHMRPKSRGGSDRVKNALLSCSSCNKDKGNRTPEEWLELIKARLPREKGKRKELDEERVELIQKVIDGKPQGGALRYAAWVSSSRRYLEKALFGIFGNVECSSGGRTKYNRTELGYPKEHHYDALCVGTVPEKGYHDRTNGYYLYAKAAGRGTRLRGHLNKCGMIVTKWTDRKNGFFGFQTGDIVVAEVPHKTPKPYKYEGRFVGRVMVRATGSFDIKTTDGKLVTVKEQYCRLLQANSGYQYTMKRAIPLGH

SEQ ID NO: 5308 - protein, 471 aa, Caldicellulosiruptor sp.; identical to SEQ ID NO: 3268

SEQ ID NO: 5309 - protein, 447 aa, unidentified
  REGION 1..447: note = Human gut metagenome
MVAVLSKTGIRLMPTSSYRARKLLARKKAVIAGYRPFTIRLTERESGEIQPIEYTIDTGYYHIGNSVKTVKHELAAVEVRTLMDEKLRQEDRHRYRRQRRSRLRYRAARFDNRRRREGWLAPSVRHRMEQNLSVLNRIARVVPVSRIVMEMGQFDTQVLKAVASGIPLPQGADYQQGDRYGIATLREAVFTRDNYTCQCCGKKGTDGVILHVHHIRYRSQGGTDAMSNLATVCYKCHTPKNHKPGGILYGWKLKLPSFKGATFMTSVRWMLYHQVKELYPELEIQLTYGAATKEQRRILDVPKSHVNDAYTMGDFHPSHRVRPVIYQKKRRNNRVLEKFYDAKYIDLRDGKKHSGQELFNGRTNRNHNRDTENLHKYRGKKVSKGRRSIRRRRYPFQPHDLVVYRGKSLETAGCHNKGTRLLIGKRSIAVKEVKIRQYCGGYFAVEI

SEQ ID NO: 5310 - protein, 414 aa, unidentified
  REGION 1..414: note = metagenome
MVYVINKQGQALMPTERFGKVRRLLKNSLAHVVCRIPFTIQLDYDTTDYTQPVSLGIDAGSKHIGISATTSEKEMYAADVELRNDIVDKLSTRREQRRTRRSRLRYRKARFNNRISSKRKGWLAPSVENKIQTHLTVVEKIHKFLPITNIVVETASFDIQKINNPSISGSEYQQGEQLDFFNVREYVLFRDNHICQHCKGKSKDKVLNVHHIESRKTGGDSPKNLITLCETCHKAYHRGDFELNVKRGKSFRDSAFMGIMRWKLYDRLKNIYPNVSMTFGYITKNTRITNNLPKDHYIDARCISGNPVAKPLGYYFYQKKVRCQNRQIHKSNFLKGGRKKLNQAPFLVKGFRLFDLVEYQKDLYYIFGRRDSGFFDIRKLDGTKVNKGSINCKYLRLVDKRKSILIEKRMQVNL

SEQ ID NO: 5311 - protein, 429 aa, Parasutterella sp.; identical to SEQ ID NO: 4241

SEQ ID NO: 5312 - protein, 451 aa, unidentified; identical to SEQ ID NO: 5203
  REGION 1..451: note = Human gut metagenome

SEQ ID NO: 5313 - protein, 471 aa, Caldicellulosiruptor sp.; identical to SEQ ID NO: 3375

SEQ ID NO: 5314 - protein, 476 aa, unidentified
  REGION 1..476: note = Human gut metagenome
LAASGTEGVSHPGLPGKYKHKGGQLMSVAVISKTGERLMPTSEYRARKLLKSGKAIKHSYHPFTIQLTGRETGDIQPIELCMDTGYIHIGISVKSEKHEYLAEQIDTLTDERGRHDACRMYRRQRRSRKRYRQARFNNRKRDHGWIAPSLEHKKKIHIQAISRINNVIPITDITLEMGNFDTQVLKANEEGKPLPQGADYQHGERYSIATLREAVFSRDSYKCQCCGRTIKDGAILHIHHIKYRSQGGTNSMSNLATVCDKCHTPKNHKPGGKLYNWKPKLSSFKGATFMTAIRWQLYNEVKALFPDIDIHITYGAATKERRRKLDIDKSHVNDAFVMGQFHPKHRIKAILCKKKRRNNRCLEKFYDAKYIDSRDGKKRSGQELFNGRINRNHKKNSENLHQYRLQKVTAGKRTVRKQHYKIQPHDIVIYENRKRETAGCHCNGTRMMLLPDKKSASIKKVKIYKYAGGYFKSAFN

SEQ ID NO: 5315 - protein, 477 aa, unidentified; identical to SEQ ID NO: 4853
  REGION 1..477: note = Human gut metagenome

SEQ ID NO: 5316 - protein, 447 aa, unidentified
  REGION 1..447: note = Human gut metagenome
VPAYRIKHITKKEAPYMVYVLDIDGQPLMPTSRHRKVRKLLNSHLAKVVKRCPFTIQLLYQSTKETQPVSLGVDAGSRHIGLAATTEQKVVYQEELVPRNDVVKLLSARRALRSSRRSRKTRYRKPRFNNRVHSKHKGWLAPSVEVKIQEHITAIKRICQILPISDIHVETAEFDLQRLKAMEEGRPLPVGTDYQLGEQYDFYNTRQYVLHRDEYTCQCCGTHDNNVKLHVHHIESRQTGGDAPNNLITLCEHCHKLLHAGKTILPKGKKRGKSYRDATFMGIMRKTLLERLKKEIDVPVEGTYGYITKYWRERAGLEKSHINDAICISKHPYARPLETYYLTKAVRHHNRQIHKTKFSKGGIRKRNQAPYLVKGFRLFDKVLYQGESYFIFGRRITGYFDIRTLDGTKVNKGSTSYKKLRIQDTAEAYLTEVRAIPHMNEFTCVLA

SEQ ID NO: 5317 - protein, 507 aa, unidentified
  REGION 1..507: note = Human gut metagenome
MPEVIYVLGMDGKPQMPTARKRHVRKLLDTGRARIAEHVPYTIQLLYENHPVLQPVILALDPGRTNIGAAAISEKGELLFSAVAETRNREIAKLMLKRRQYRRASRNGERKARQRLAKRFGTVFKAGIRMRKLPMYGGEKFLACKWIRNTEARFCNRKRPKGWLTPSVNHLVNTHLNLVHKCRKYLPVTDVALEVNRFAFMLLEDPSVSGVDFQDGPLRGFASLQDAVNHLQHGKCLLCGDRIEQYHHIVPRSRNGSNTISNVAGLCCHCHEKVHKDKKHAGILSDKKSGIDKKYGALSVLNQAVPFICGKLEAEFGLDHIHYCTGKDTSGMRHCYGFHKTKEEQMHEADAWCIGICALGISPEKIPDFAAVHTIRQFRRQDRSLIKALTERTYRLDGKAVAKNRKKRMDQKTDSLEEWYGKQAQVHGEAKAKQLRNQLSVTKSCRRYQNPDRIMPGAVFLYKGTRHVLSSSITHGRYFRAVGDPKTNYPARDCVILKQNEGLVFMD

SEQ ID NO: 5318 - protein, 408 aa, unidentified; identical to SEQ ID NO: 4142
  REGION 1..408: note = Human gut metagenome

SEQ ID NO: 5319 - protein, 324 aa, unidentified
  REGION 1..324: note = Human gut metagenome
MVYVQDIDGNPLMPTTRHGKVRRLLKSNKAVVVNLCPFTIRLTYDSNRYKQEIMLGVDAGTKHLGLSATTKSKELYASEVTLRSDIVDLISTRRESRRTRRSRLRYRKPRFNNRVKTKKEGWIAPSVRQRTNSHLKQISDIHRILPISKIIIELAQFDIQKIKNPDIKNEEYQQGEQLGFWNVREYVLDRDGHKCQHCKGKSKDPILNVHHMESRKTGGDSPSNLITLCEKCHKEYHKGELELKIKRSKSLRDAAVMGIMKWRLYEELKSSYQDVKITFGYITKYNRINYGIQKSHTSDAFVISKNFDASRIKFLSRHQTYEKT

SEQ ID NO: 5320 - protein, 470 aa, unidentified
  REGION 1..470: note = Human gut metagenome
MSVFVVGLNGCRLMPVSERKARLLLKGGKASIYRKVPFTIKLNYKTGSTVQPGYLGIDTGSQHIGVSVVQKDGTVLHKEEIGLRDSMSKRKLLESRASSRRGRRYRKTRYRHPKWKPKTKRTYNEKADRKGRHWKKQKNTFTSKRQAGWLPPSLQSKTDHHIQWIRKLLDLLPEGYRLSIELGRFDPARMKDPEIHGELYQKGPQYDYENVRAYVLARDGYTCRVCKKKGGKLHVHHILYRSRGASDNPKYMAAVCSKCHTTENHLPGGILYQWMQDQKKFTRGLRDATFMNILKKRLRKAFPDAVFTYGNITKADREKLELPKSHGNDATAIALVKTEVKSVKDEEPVIHIQQVRRKKRSLHEETPRKGRKEPNRTASRSDKNTKSVTVTKGSGEKKASMTACLFDRVELDGKKGWITGFTGTSCYVKDKEDNYICTSPKYKQVSISRLRILHHCGNWAIGAEKPLGKG

SEQ ID NO: 5321 - protein, 438 aa, Ktedonobacter sp.; identical to SEQ ID NO: 2377

SEQ ID NO: 5322 - protein, 454 aa, unidentified
  REGION 1..454: note = Human gut metagenome
LDTVAVISASGRKLMPTNSYRARRLLKSKRAVIYRYRPVFTIKLVDRTNGYTQPIEYKCDTGYQNIGISICSDTKEFVNEQRDLLKDEVKRHSDSRKYRRTRRNRLRYRKARWNNRKGMISKDGFAPSIRNKRDVHARLYEEYYKVFPITKAVFEMGQFDTQVLKAVEVGLPILDGTDYQRGEQYGYATLREAVFARDSYTCICCGKSAIKDGVKLRIHHIGYLSGDRSNRMANLGSVCENCHTSKNHKPGGKLYSLKPELKTFKGATFMTTVRYSMVKQLKAATPDVDIRVTYGAATKLARKALNVKKTHSNDAYCMGEFHPKHRSDFKHYRKCRRNSRVLSRFYDAKYRDLRDGSVKTGSQLSCGRTNRKISRHTELDERIYRAHKISKGRVSTRRQHYSLRPGDKVLYDGKVYFVTGMQNSGTHVKLTNGKVCSLKKVHVLQHCNAWTAVI

SEQ ID NO: 5323 - protein, 427 aa, Moorena sp.
MSKTLVLDTNKRPLYPIHPAQARQLLKNKKAAVFRQFPFTIILKESRPDSPVSPLRLKIDPGAKFTGMALVNDSTGEVVFAAELKHRGFVIRDALTSRRQLRRSRRARKTRYRQPRFLNRTRPNGWLAPSLQSRVENIKTWVKKLRKFAPIEAISQELVRFDMQLMANPDIQGKEYQQGTLAGYETKEYLLEKWNRQCAYCGVKDVPFQVEHIHPRAKGGSNSITNLTLSCEKCNTKKGTKDIKDFLKKDPTRLQKILKQAKRPLADAAAVNATRWALFRVLKDTGLPVETGSGGLTKFNRSQQNLAKTHWIDAACVGQSTPILTIKGIKPLLIAANGHGSRQSCRTDKFGFPSRYVPRFKFVKGFQTGDIVKAVVTAGKKVGEYFGRVAIRTSGTFNISTNSRLVQGISHKYCLATHKKDGYSYAN

SEQ ID NO: 5324 - protein, 465 aa, Calothrix sp.; identical to SEQ ID NO: 5126

SEQ ID NO: 5325 - protein, 471 aa, Caldicellulosiruptor sp.; identical to SEQ ID NO: 3375

SEQ ID NO: 5326 - protein, 470 aa, unidentified
  REGION 1..470: note = Human gut metagenome
MSVFVVGLNGCRLMPTSERKARLLLKQGKAFVEQKVPFTIRLNYKTGSTTQLGYLGIDTGSQHIGVSVVREDGTVLHKEEIGLRDSMSKRKLLEAKASLRRGRRYRKTRYRHPKWRPKTKRVYCEVPDRKGRHWQKKKITFTSKRPKGWLPPSLQSKTDHHIRWIKKLQDLLPEGYRLSIELGRFDPARMKNPEIHGDLYQKGPQYDYENVRAYVLDRDRYTCQICKKKGGKLHVHHILYRSHGATDDPQYMVTVCSDCHSAQNHLPGGILYQWMQEQKRFSRGLRDATFMNILRKRLIRAFPEAVFTYGNVTKVDREKLKLPKSHGNDATAIALVKTGITAVKDKESVICIQQVRRKKRSLHEETPRKGRKEPNRTAARNNKNTKAVTVTKRQNKKKVSMTGCLFDRVELNGKKGWIFGFTGKSCYVKDADDQYLSTSPKYKQVSLSKLRILHHCGNWIIGAKKTLGKG

SEQ ID NO: 5327 - protein, 551 aa, Moorena sp.; identical to SEQ ID NO: 3229

SEQ ID NO: 5328 - protein, 419 aa, Anoxybacillus sp.
LFVYVINKHGNPLMPCSPRKARILLKNKKAKVVKRTPFTIQLLYGSSGYKQPISLGVDTGTKHVGLSATTKNQVLLEAEVQLRTDIQELLATRRQFRRSRRNRNTRYRKARFLNRKKPNGWLAPSIQHKVDSHIKLVKWVHSLLPITHITVEVAQFDTQKIKNPDIQGAAYQQGEQLGFWNVREYVLYRDGHTCQWCKGKSKDPVLNVHHIESRKTGGDSPSNLMTLCKTCHDMIHREGLEHEIQRRFSSLKDASHMTVMRWFIWNGLKKVYPHANITYGYITKCIRIANGLPKSHMVDARCISGNPLAKPSGTVYFLKFVRKNNRQLHKATILKGGKRKSNKAPRFVKGFQLFDKVVYEGKECFIFGRRSSGYFDLRLLDGTKVHASASWKKLKRVEYASTLLIERRKGDSSPTFALA

SEQ ID NO: 5329 - protein, 426 aa, Moorena sp.; identical to SEQ ID NO: 3294

SEQ ID NO: 5330 - protein, 431 aa, unidentified
  REGION 1..431: note = Human gut metagenome
MPDKVYVISRLGHPLMPCSPAKARHLLDDKKAKVVKRMPFTIRLLYGRTKYIQPIILGVDAGSKTIGLSASTAKEEVFAAEVMPRNDVVENLSTRREFRRARRNRTTRYQKPRSDNRVRSNHERWLAPSVKVKIQEHITSIKRVCTILPISKVVIETAEFDLQLLKAIQEGKPIPEGEDYQKGEMYGSYNVCQYVLWRDNYTCICCGVRGTPKNPVRLHVHHFESRKYGGNAPDNHGTLCDDCHKKFHLGIITDVKLKTRRRQSTRDAAFMGIMRKTLMWRLRTELFIPVAETKGYITKATREKLLVLPKSHTRDALAIAQGRHGFGIKEYAYVEPANHIYTVRPVRHHNRQLHKASILKGGIRKRNQASKYVFGFRLYDKVLYQGKACFVWGRRTSGTFLLRTIDGIKVKDGVSYRNLTLLERSSNYLIA

SEQ ID NO: 5331 - protein, 442 aa, Streptomyces sp.
MPCHPARARELLSRGRAVVARQVPFMIRLKDRTSAESEVEGVQLRIDPGSKGTGIVLTDEKKETGDRGAVVTVRRGLISVELQHRGDQIRAGMRKRAGHRRRRRSANLRYRMPRSNNCGRPEGWLPPSVRHRVDTTFSLTSRLCLYAPVTEIHVEHVVFDTNSLSAGRPLKGTEHQQSPLAGTTARAHLQAKWNSACAYCGVTGVPLNMEHLRPRSRGGSDRISNLVLACVPCNKAKGSKPVEVFLAHRPNCLKQFLQQVRNPLDDAATMNATGRALGYALGSIGRPVHAWFGRLTSANRSAMGLDKTHTLDALSIGPLDHATGDRIVRLPERVLIAKATGRGSYARTTPDRYGFPRLLRPRAKQHHGYVTGDLVGAVVTAGKWAGTWTGRVSVRSSGQHSLATASGRFNCSHRNLRLLQRGDGYGHSSRREPAGSTSRKNS

SEQ ID NO: 5332 - protein, 470 aa, Blautia sp.; identical to SEQ ID NO: 2925

SEQ ID NO: 5333 - protein, 422 aa, unidentified
  REGION 1..422: note = Human gut metagenome
LNKRGKPLMPCSPAKARLLLKEKKAIVVRRTPFTIQLTIATGESKQPVSLGVDAGYKHVGLSASIEKAELYASEVELRKDITDLLSARRALRQSRRNRKTRYRAPRFDNRIRTKRKGWLAPSVENRINAHLSRIEAVLRLLPITKITVETASFDMQRLKNPDISGKEYQEGEQLGFWNVREYVLFRDGHVCRHCHGRSKDPVLNVHHLESRRTGSDSPDNLITLCETCHKALHRGEITLKAKRGQSFRAQAFMGIMRREVLNRLKASYPELKVHETYGYLTKHARIANGIVKSHGADAFCIAGNLGAERLGEFFFQKQTRRNNRQIHKLSILKGGIRKRNQAPFEAKGFRLFDKVACQGEEGFIFGRRSSGSFDVRKLDGTRISAGISCKKLRLLEKRRTYLTEIRKEEALPPLPEGRGLRA

SEQ ID NO: 5334 - protein, 470 aa, unidentified; identical to SEQ ID NO: 2825
  REGION 1..470: note = Human gut metagenome

SEQ ID NO: 5335 - protein, 443 aa, Caldicellulosiruptor sp.; identical to SEQ ID NO: 2385

SEQ ID NO: 5336 - protein, 429 aa, Petrotoga sp.
MVYVIAKDGTPLMPTKRHGKVKHLLREGKATVVRNKPFTIKLSYDTTHFTQPITVGVDSGHKHIGFSAVTEKEEVLSGEVELRDDVSELIKEKGMYRRIRRNRLRYREPRFDNRRKPDGWLAPSIRHKLDTHIRFIEFIKKILPITSIVIEVAKFDTQKLVNPEIKGIEYQQGEQRDFYNLREYILYRDNYACQLCGKSNVPLEVHHIGFWKGDRTDRPSNLITLCTKCHNPVDHGVNGKLYGIKPVYKPLKAATFMTTVRWKLVDMLGCAYTYGYMTKLKRIELNLDKTHYNDAFCIVGGTNQRRIEPIYFEQIRRNNRSLEKFYDAKYIDTRDGSTKKGQELFNGRTTRNKNYNTQNLKKFRGQKVSKGRRSIRTQRYSYQPKDIVIYEGRKYTVKGIQNKGSYIKLAELSRPVKTDTVKPYMFRKV

SEQ ID NO: 5337 - protein, 417 aa, unidentified
  REGION 1..417: note = Human gut metagenome
MYRRQRSSRKRYRQSRFNNRKRSDGWIAPSLEHKKDIHIQTISRICNAMPITNITLEMGNFDTQVLKALEKNRPLPQGTDYQHGERYGIATLREAVFARDKYTCQCCRRTIADGAILHVHHIIYRSRGGTNRMSNLATVCDRCHTPANHKPGGKLYNWKPKLASFKGATFMTAVRWKMYNEVKSKFSDINIHITYGAETKGQRRAFDITKSHVNDAFVMGQFYPKHRSRPVCYKKKRRNNRCLEKFYDAKYIDSRDGKKRSGQELFNGRINRNHKKDSENLHQYRQQKVSAGRRTIRKQHYSIQPHDIVVFNRQQFETSGCHCNGARAILLPQKNLLLSKNLASTNMLVDISNQILRKEKGVRIPPTPDYEKYFFVGWGFLRRIQMKYSYICLFCAKIYLSECRRQLFIYYYNGIVI

SEQ ID NO: 5338 - protein, 418 aa, unidentified
  REGION 1..418: note = Human gut metagenome
MTSYAFVLDANGKQLAPTKEQKAWFFIRKKRASLVSKYPIVIQLMKEIPEKEICQDEIRCGIDDGGLHVGIALVQKCKTKNKVVFKGTMEQRNDVKHLMEVRRGYRRYHRYHKRYRQARFDNRKSSKREGRIAPSILQKRQATIRVIHWLNKWINITNYWLEDVSVDIRALTDGYQSYRWQYQKSNRLDENIRKAAILRDGGKCMECGKSNCRLEVHHIKPRRRNGSNTLDNLITLCESCHQKTEGQEELYMDRYFSLLKSSDNKNLNYAQHVMIGKMWLRKQLSGLGVLYLTSGGDTANKRIDWNIEKSHANDAVCITDLRPDTCDVKEWTMKPMRRQSKAKTDHVLGIHHRDLVEYTFKNGETHRGYVTALYPEQKAINFQSPTKHCKKLMRESANYYGNIQKSIGLRMRAKHTCL

SEQ ID NO: 5339 - protein, 423 aa, Arthrospira sp.
MSNHIFVLDTNRKPLTPCKPGVARSLLKAGKASVFRRYPFTIILNKEVDANPEPLELKLDPGSKVTGIALKQGNHIIFAAELQHRGQQIKEALLSRRQLRRSRRNRKTRYRPARFLNRTRSKGWLAPSLQHRVDTLMTWVHRFRRLAPVGRITQELVRFDLQLMENPEISGVEYQQGELQGYEIREYLLEKWGRTCAYCGAQNVPLEVEHIQPRSKGGSDRVSNLTMACHSCNQAKGNGDIRDFLSGQPDVLSRLLRQAKSPLKDAAAVNSTRWALFKALKATGLPVTTGTGGQTKFNRLRLNLPKAHWLDAACVGPVESLEVLTSKPLLILAKGHGTRQMCGTNKYGFPNRHRSRRQIHKGFQTGDMVTALVTAGKKIGSYLGRVLCRASGSFDITTASVRVAGISHKYCQPIHRKDGYAYA

SEQ ID NO: 5340 - protein, 507 aa, unidentified
  REGION 1..507: note = Human gut metagenome
LKKEAAGHRQGKDCRPVRAGMPDGRRKPERKHMVAVVTSTGKPLMPTSAYRARKLLKKGRAVIFKYRPYFTIQLVDRADGEVQEVEYKSDTGSVHVGISVCTEKKELLSEQRDLLENEPEHHNDRKKNRRTRRNRKRYRKPRFDNRKKKPQEGHEKWLPPTLLHKMEVQVRLFREFCRVVPVTSACFEMGKFDTQALKAVSKGEPVPEGEGYQKGERYGTDTLRAAVFLRDGHTCRFCGRSVKDGAILHVHHVGYWKGDRTNRPANLASACEQCHTPANHGKNGILYGKEPEFKTLKDASYMTSVRWIMLDEIKKAAPGVQVSVTYGVTTKRKRQELHLPKSHVNDAFSMASFHPKKRSDTEYWKKIPRHDRVLQKFYDAIYLDTRDGSEKKGSELSNGRISRNHKKDSENLHQYRGHKVSKGHNSIRRGASSLKPGSIVMYKGEKMTVHGTHTRYVKGKDGKTAKKVNVQFTCPASDGKKSASLEKCTPVSRVYNTGWKRYWPDKK

SEQ ID NO: 5341 - protein, 384 aa, unidentified
  REGION 1..384: note = Human gut metagenome
VVTVQRSTQHLLFGRVFIRRNLFMVYVISQDGKPLMPCSNPIARLLLKQGKAKVKKREPFTIKLTYEAPNYTQDLTLGVDTGSGTIGTAVSKDNGDIVYMSEVIVRNDITDKMTQRVKYRRNRRNRKIRYRKARWLNRANSIKNDRFSPTMQSKLHSHVKEIEYIKSILPITEMVFETGQFDTHFMKNPSLANPKVKHWGYQKGTNYGFENTKAMVLNRDSYTCQCCKGKHKDSKLEVHHIVFRSQGGSDEESNLITLCHTCHKDLHSGKINPKLSGKVKGNLKYATQMNSIRKQLFRLYPNAIETFGYVTKANRLHLGVNKEHYYDACTIATQGNAFNVKSNLYKKKCVSDGDFQKTKGVCSEQPIVTDKICGLDCQHFFRQI

SEQ ID NO: 5342 - protein, 423 aa, Clostridium sp.
LRVYVINQRKEPLMPTSQRKARVLLKQGKAKIHSYNPFTIQLLSSTGETKQDITLGVDAGSKTIGISATTKKVELYSAELELRTDIVELLSTKKQYRRSRRNRKTRYRKSRFLNRVKSKNKGWLAPSIENKIQGHFRIIEKVNQLLPISETIVEVASFNIQKINNPTIQGKEYQQGNQLDFWNVREYVLFRDGHKCQGKKNCKGKILNVHHIESRKVGGNAPANLITLCEDCHNDYHSGKLNKTFKRGKSFKDSTFMGIMRWTFYNRLKEIYPNVKMTYGYITKTIRITNKLEKAHRIDARCISGNSLAKESDVWYHVKQVRKKKRSLHEAVARKGRKTPNRQSKRNSKNTKEIIYKEKKWCLYDKVKVNGGIGFISGFSGNMVYVQDIDGKYIQLSPKYKQISTDNIELINRNNNYICECIA

SEQ ID NO: 5343 - protein, 413 aa, unidentified; identical to SEQ ID NO: 2605
  REGION 1..413: note = Human gut metagenome

SEQ ID NO: 5344 - protein, 536 aa, unidentified; identical to SEQ ID NO: 2718
  REGION 1..536: note = Human gut metagenome

SEQ ID NO: 5345 - protein, 427 aa, Enterococcus sp.; identical to SEQ ID NO: 2410

SEQ ID NO: 5346 - protein, 465 aa, unidentified
  REGION 1..465: note = Human gut metagenome
MSTCVCVLSNSGERLMPTFRLGKVRHLLKDGKAKIVKHHPFTIQLLYDSETNIQPIEICEDVGYNYIGISVKSQSHEYVSAQYDTLQDEKACHDSCRKYRRTRRNRLRYRKPRFDNRKRSEGWLAPSLRHKKELNVNVIKMYCEVVPITHATVEVGSFDTMLVKAIEEGKATPEGADYQKGPRYNLATLREAVFYRDNYTCQVCGREASEGAILHVHHMFYWKGRHGNSLSELITVCEKCHTPANHQKGGKLYGFGENVKFADLSGAAFMNTVRWQIVNELYAAFGKPFVTFTYGAMTKEKRIALHLEKSHNNDAYAMGEFHPNCRCTFEHYEKVRRNNRILEKFYDSRYIDIRTGEIATGKELFNGRINRSHKKDSENLHKYRGKRIRKGYRALRRKKVALNPGDLVSLNGEILTVHGTHTKKNGSVNVEFKTPSKSGKKSTSLKKLKIIKTISPMRSAWDKVS

SEQ ID NO: 5347 - protein, 431 aa, unidentified
  REGION 1..431: note = Human gut metagenome
MPNKVYVINKHGRPLMPCSPAKARHLLDDGKAKVKKRTPFTIQLVYGSSGYTQEVILGVDAGSKTIGMSVSTTKEELLSAEVKPRNDVVDLLSTRREFRRARRNCKTRYRKPRFDNRVRSKHKGWLAPSVEVKIQEHITTIRRVYGILPVSKVVVETAEFDLQLLKAIADGKPVPQGEDYQKGEMYGHYNVRQYVLWRDDYTCQCCGAHATKKKEVRLHVHHLESRKVGGDAPDNQVTLCESCHEKLHKGLIAEKDFKKRKRKSTRDATFMGIMRKTLMQRLYSELPIPVIETRGYITKATREKLLVLPKSHTNDALAIAQGKRGFNVGYLPEIAQIDKIYTIRPVRHHNRQLHKAAILKGGIRKSNQAGKYVFGYRLFDKVQFNGQDCFIWGRRTTGIFTIKTINGKMIKDGISFKKLKPVEKSTSYLIA

SEQ ID NO: 5348 - protein, 413 aa, unidentified
  REGION 1..413: note = Human gut metagenome
MTSYAFVLDANGKQLAPTKEQKAWFFIRKKRASLVSKYPIVIQLMKEIPEKEICQDEIRCGIDDGGLHVGIALVQKCKTKNKVVFKGTMEQRNDVKHLMEVRRGYRRYHRYHKRYRQARFDNRKSSKREGRIAPSILQKRQATIRVIHWLNKWINITNYWLEDVSVDIRALTDGYQSYRWQYQKSNRLDENIRKAAILRDGGKCMECGKSNCRLEVHHIKPKRRNGSNTLDNLITLCESCHQKTEGQEELYMDRYFSLLKSSDNKNLNYAQHVMIGKMWLRKQLSGLGVLYLTSGGDTANKRIDWNIEKSHANDAVCITDLRPDTCDVKEWTMKPMRRQSKAKTDHVLGIHHRDLVEYTFKNGETHRGYVTALYPEQKAINFQSPTKHCKKVNARKCKLLWKYSKIYWFENES

SEQ ID NO: 5349 - protein, 498 aa, unidentified
  REGION 1..498: note = Human gut metagenome
MPTTRCGHVRRLLKEQKARVVTSKPFTIQLLYETNDVVQPLYLGIDPGRTNIGVAVVKTDGTAVFTAHLETRNKEIPKLMQGRKKARRARRTNGRRCRRQRRAKANGTISKKCVKQTTAQNGSVSKRAKEIGVIKRHLPGCEKDVLCIGIKNKEAKFNNRTRPTGWLTPTANQLLQTHVNLVKKIQKFLPISDVVLEVNKFAFMQLDNPNIQKWQYQQGPLYRKANLEKAVSEMQEHHCLFCKKKIDHYHHVVPQHKNGSNTIDNIVGLCTEHHDLVHKETAWQEKLAKKKTGLNKKYGALSALNQIVPVLTKELGSLFLKHFYVTTGKSTYDYRAAHGVSKDHWLDAYCIACSVLPNDVCDSNINSHVPYELKQFRRHDRRALHKENINRVYTLNGKKVATNRHKAIEQTTDSLEEFRQNHPNDVCKLKVKEHHPEYRNPKRNFPGCVFLVGKHTHVMQGTSGSHNGKADGYYDTNGNSYPFGKCKFVAKNEGIVFA

SEQ ID NO: 5350 - protein, 427 aa, unidentified; identical to SEQ ID NO: 2980
  REGION 1..427: note = Cyanobacteria bacterium UBA11153

SEQ ID NO: 5351 - protein, 450 aa, Moorena sp.; identical to SEQ ID NO: 2935

SEQ ID NO: 5352 - protein, 412 aa, Moorena sp.; identical to SEQ ID NO: 3973

SEQ ID NO: 5353 - protein, 427 aa, Anabaena sp.; identical to SEQ ID NO: 5141

SEQ ID NO: 5354 - protein, 456 aa, Lactobacillus sp.
MNLTPWSGLLYLTENYSSKEGIMQNRVFVINRQGEPLMPCKQQKCRKLLQGGRAKVIKKEPFTIQLLFGSTGYKQPISIGVDSGQHHIGLAVTSQDKVLFQGEVSLRQDVKKLLDTRRSYRRGRRNRNTRYRPPRFLNRAKPAGWLPPSVANKVQHNINWIQRIQAVLPKAELHIEVGKFDMAKMVQPGITGLGYQQGDLYGYETTKQYVLDRDNYTCQICRGKNKDPKLKIHHIIYRSNGGTNQVSNLLTVCASCHTQANHQPGGKLFVLQAKKFQSHRSLKGATFMNILRRRLFTAFPEAKFQYGAQTTLDRAKLDLPKAHYNDAVTISGIQKIAQRPTAVVMFHQFRKKKRSLHEATARKGRKTPNRASKRNAKNTKAVSGFHLNDYVQLPDGQKGNISGFSGKTKCFVKAGDGHYLAISSKYKHISLSKLKVIRHQNNWNVTEIKAMTYEMA

SEQ ID NO: 5355 - protein, 424 aa, unidentified
  REGION 1..424: note = Human gut metagenome
LYTKPLDNIGEGSLPPSGEINLKGMTFMVYVKSIDGKVLMPTSNAKARKLLKQKKAKVVSLRPFVVKLTYKTKTEYTQKLNLGVDSGYSNIGFSVIDAKQEYIAGEVKLLEGMKKRLLEKASYRRIRRSRLRYRKARWNNRVKSKKKGWLAPSLKHKLDTHIKFIDYLKNILPIGKITIEVANFDIQKIKDDLISGVDYQNGDMFGFWNVREFVLHRDGHKCQNPNCKHKDKKEQILKVHHIRYRSEGGSDRPENLITLCSKCHTPANHKKGKFLYDWCVNGKKVRGFKDATFMSMIRWYLVNELKSKHNNVSITYGYITKNHRIQNGIEKSHLNDAFAIAKGTNQARTKDRFLVIQDRLKNRSLEKFYDSKIIDIRTGKKVSGGDLSCGRSTRNKNLNTENLRKYRGVKISKGQRCKCQYIFV

SEQ ID NO: 5356 - protein, 427 aa, Enterococcus sp.; identical to SEQ ID NO: 2410

SEQ ID NO: 5357 - protein, 442 aa, unidentified; identical to SEQ ID NO: 2637
  REGION 1..442: note = Human gut metagenome

SEQ ID NO: 5358 - protein, 414 aa, unidentified
  REGION 1..414: note = Human gut metagenome
MPCSPAKARLLLKEKKAIVKRRTPFTIQLTIATGETKQPVGLGVDAGYKHVGLSASTDKAELYASQVELRQDITDLLSARRALRRARRNRKTRYRAPRFNNRIRTKRKGWLAPSVENRINAHLSRIEAVLRLLPVTKITVETASFDMLLLKNPDIAGKEYQEGEQLGFWNVREYVLFRDGHVCQHCYGRSKDPVFNVHHLESRRTGGDSPGNLITLCETCHEALHRGEIALKTKRGHSFRAEAFMGMMRWEVLNRLKASHSELEVNNTYGYRTKHARIVNGIDKSHCADAFCIAGNLGAERLCEFFFQKQTRRNNRQIHKLSILKGGIRKRNQTPFEIKGFRLFDKVACKGEESFIFGRRSSGYFDVRKLDGTRISAGISYKKLRLLEKRRTYLTEIRKEEALPPLPEGRGLRA

SEQ ID NO: 5359 - protein, 426 aa, unidentified
  REGION 1..426: note = Human oral metagenome
MLVYVLKQNGQPFMPTERFSKVRRLLKEGKAKVVRREPFTVKLLYEPETDVVQECYCGVDTGSRHIGVAVVGNDKVLYQSQTELRDDIKKKMDARRMFRRHRRFRKTRYRKPRFLNRRNSIRKDRYCPTIISKCYGHEREIEFCKKILPVSDLILEVSQFDTQLMEKPWLQEYKWAYQKGINYGYANAREHALVRDKYTCQCCGKKNCRLEVHHIVFRRNGGSDNIENLITLCEDCHKAIHLGEVDLKLKGKRKSTLRYATQMSVIRNMLLKKYPDAIETFGFVTKANRENLGIGKEHYIDACVIASGGLEFEQSGILYQKRCVPKQDRQLCKGIRGERKLPKGKVHGFNRYDKVKYLGDICFVKARRVSGNFTLMDISNNSLDFRDREGKQNPSYKSIKRINARKSILCINKRIERQERFGKVSN

SEQ ID NO: 5360 - protein, 450 aa, unidentified
  REGION 1..450: note = Human gut metagenome
ARLLLKQGKAFVEQKVPFTIRLNYKTGSTTQLGYLGIDTGSQHIGVSVVREDGTVLHKEEIGLRDSMSKRKLLEAKASLRRGRRYRKTRYRHPKWRPKTKRVYCEVPDRKGRHWQKKKITFTSKRPKGWLPPSLQSKTDHHIRWIKKLQDLLPEGYRLSIELGRFDPARMKNPEIHGDLYQKGPQYDYENVRAYVLDRDRYTCQICKKKGGKLHVHHILYRSHGATDDPQYMVTVCSDCHSAQNHLPGGILYQWMQEQKRFSRGLRDATFMNILRKRLIRAFPEAVFTYGNVTKVDREKLKLPKSHGNDATAIALVKTGITAVKDKESVICIQQVRRKKRSLHEETPRKGRKEPNRTAARNNKNTKAVTVTKRQNKKKVSMTGCLFDRVELNGKKGWISGFTGKSCYVKDADDQYLSTSPKYKQVSLSKLRILHHCGNWIIGAKKTLGKG

SEQ ID NO: 5361 - protein, 429 aa, unidentified
  REGION 1..429: note = Human gut metagenome
LKDGKAKIVKHHPFTIQLLYDSKTNTQPIEICEDVGYNYIGISVKSESHEYVSAQYDTLQDEKKHHDDCRKYRRTRRNRLRYRKPRFDNRKRGEGWLAPSLEHKKQLNIRLIERYVSVIPITRATVEVGSFDTMLLQAIQKGESKPEGTDYQKGPRYNLATLREAVFYRDNYTCQVCGRKIADGAILHMHHMFYWKGRHGYQLDELVTACEKCHTPANHQKGGKLFGFGEDKEFANLSGAAFMNTVRWQIVDALHATYGKEFVTITYGAMTKEKRIILGIEKTHNNDAYAMGDYHPACRCKFRHYQKRCRNNRVLEKFYDATYIDTRTGDKAKGKELFNGRISRNHKKDSEDLHKYRSKKVSKGRRSIRRQRYAIQPYDTVRLENKTYITSGCHNKGTRLLIPANGKSKSVAISKVQVVCHAGAWIQII

SEQ ID NO: 5362 - protein, 413 aa, unidentified
  REGION 1..413: note = Human gut metagenome
LKVFVLNMRGKPLMPCSPAKARHMLKAGKAFVVRRTPFTIKLTIATGETKQDVTLGVDAGARHVGISATTEKEEVFASEVALRQDITGLLADRLAFRRARRNRKTRYRSPRFNNRVRSKHKGWLASSVENRIQAHMSRIDAVCRLLPVTKIVIEAASFDVQKIKNPTIEGTDYQQGDQLGFWNVREYVLFRDGHVCQHCHGRSRDKILNVHHLESRKTGGDAPNNLITLCETCHKAYHAGKIKLKVKRGQSFRAEAFMGIMRWTLLDRVRKTHPELPVEYTYGYLTKHKRIALGLPKTHCADAFCIAGNLKALRRGDFLFQQQTRKHNRQIHKCSILKGGVRKLNQAPFLVKGFRLFDKVRIGGQIGFVFGRRVRGTFNIRRLDKTVIGTDINCKKLSLLETRKTFLTELRKE

SEQ ID NO: 5363 - protein, 471 aa, Caldicellulosiruptor sp.; identical to SEQ ID NO: 4560

SEQ ID NO: 5364 - protein, 452 aa, Pseudoalteromonas sp.
MGSQPRCEAKLSGREEVEFAVCLKHSYTHNSKEIRAMLAYVLNKHGKPLMPCKAAKARKLLKNGMAKVIKRAPFTIKLLYGSSGHTQHVVAGMDTGSKHVGCAAIANGKVIYQSEVALRTDVSKKMQQRAMYRRTRRNRKLRYRPARWLNRASMRKEGRLAPSLKSKLDSHLREKKQVEAILPISHWKVETASFDIHKITNPIVTGAGYQQGYYNVKAYVLQRDNYKCQSGHKTKHNAKLHVHHKVLRSQGGTDTPSNLIALCETCHNDLHAGKFDLKVKRSKTKHATEIGILKAQLKQCWDFEETFGYVTKFKREQVLGLPKTHYYDAVSICCENGELVQQAKHVLRKRHVASGDYQQIKGVRSEKRIPVGKLFGLKKHDFVQTPQGTGFVKGKRSSGYFALETILGDKVHASANIKKNTVRISARTTTLTQPMEAAIPLGTKVPRGIAVN

SEQ ID NO: 5365 - protein, 413 aa, Blautia sp.
MTSYSFVLDANGKQLAPTKEPKAWFLIRKKRAALVSKYPMVIQLMKEIPEKEICQDEIHCGIDDGGLHVGIALVQKCKTKNKVVFKGTMEQRNDVKHLMEVRRGYRRYHRYHKRYRQARFDNRKSSKREGRIAPSILQKRQATIRVIHWLNKWINITNYWLEDVSVDIRALTDGYQSYRWQYQKSNRLDENIRKAAILRDGGKCIECGKSNCRLEVHHIKPKRRNGSNTLDNLITLCESCHQKTEGQEELYMDRYFSLLKSSDNKNLNYAQHVMIGKMWLRKQLSGLGVLYLTSGGDTANKRIDWNIEKSHANDAVCITDLRPDTCDVKEWTMKPMRRQSKAKTDHVLGIHHRDLVEYTFKNGKTHRGYVTALYPEQKAINFQSPTKHCKKVNARKCKLLWKYSKIYWFENAS

SEQ ID NO: 5366 - protein, 425 aa, Caldicellulosiruptor sp.
MVYVISKDGKPLMPTKRHGKVRRLLKQGLAKVVRREPFTIQLLYDTTTYTQPVTVGVDIGSKVVGVSAITEKQELFSSEVELRQDIRKLLLERREHRRFRRYRKRRYRKPRFLNRRRPEGWLAPSVQWKVDAHIRLVNFVAKILPVTKVVVEVAPFDIHKIVNPTVEGTKYQEGPQKDFWDVREYCLWRAGHKSELSGKKGVLEIHHIIPKSQGGTNNPSNLIVLTVEEHKAIHEGKIKIPRSKLEKVKIFKDASHVSTIGWYIVNRLKYQYEVEITYGSITKAKRVEMGLERTHRNDAFVIAGGNKNVNRVPEWYFGKFFRRQNRSLHKANPIKGGKRPVNTVKEVHGFRRFDKIEYQGGTYIIFGLRSSGYFATGTLSGEKISDSVKYTCLRLVEKAKTLMFERREQRIFLHLAEDGVSCAVL

SEQ ID NO: 5367 - protein, 443 aa, Caldicellulosiruptor sp.
MVFVLNKNKKPLAPCHEAVARKLLKEGKAVVHRVYPFTIRLKELKDTSTFTPNYRLKIDYGSRHTGIAILKNDSEVIFMMQIHHRTDVKEKMDARRSSRRNRRNRKTRYRKPRFLNRKRDEDWLPPTLQSRVNNIETWIKRLCKLCPITTISYENVKFDTQKLRNPEISGVEYQQGTLQGYEVKEYLLEKFNRRCVYCGATNVPLEVEHIIPKSRGGTDRVDNLVIACHECNQRKGNRTAEEFGYPEIQELVKEPLKDCALVNATRWKIYEVLKKTGLPIECGSGGLTKMNRIKLGLPKDHHFDAICVGQSTPERIWFKTKTVLHVTAKGRGTRQMANVNKYGFPVGYRARQKLFFGFQTGDIVKVVVPRGKYKGTWKGTVACRNSGYFDIKDRNGKRIVQGISYKYCRVIQRFDGYSYELEQAKISGTFPLQPAEAGASMCH

SEQ ID NO: 5368 - protein, 424 aa, unidentified
  REGION 1..424: note = Human metagenome
MVLVVDKHKKPCNTISNAYARMLLFKKQAVIHKRFPFTIRLKNDNAVLKDRAYTVKIDLGSRHTGIAIVDDKDQVVMLAEIEHRGHIIKKDLASRRMVRRNRRNRKTRYRPARFLNRTRPEGWLAPSIKSRADNVINFIKKYKKLLHITKVMIENVSFDVAQMTTSTNLVGTAYQQGPLYQNQLRTFIFSRSNNKCVYCGAKATEIDHIIPRSSGGTNSTYNLVASCRVCNQRKSNKTLKEFGKIMNKDYSHLAPKKLPKDAAIVQSARNYMVKEVTKLVADTTLHDAWLTKYNRDQLGLPKEHYYDALSVGNVENYKFLTDKILTISARGRGSRQMCSMDKYGFPRTKPKGSKLVEGFQTGDMVKAIVPKGPKQGEYLGRVAVKSSGYFDIKTKNGLAQSIGYKYCRLIQKNDGYSYNYKERI

SEQ ID NO: 5369 - protein, 451 aa, Moorena sp.
MSVCVVTPDKNPLMPTSEYRARKLLKSGKAVIFKHKPFTIMLTRVVSENMQPIEYCCDTGYKHIGVSIKSEKHEYFDCQFDMLQDEKKRHDDRRKLRRTRRNRLRYRKPRFSNRTASKKKGWLAPSLRNIRDQHIRIFEQFLEVMPIASATFEMGSFDVHAMHEFEATGTVLKGEGYQKGPRYGMNTLRKAVFYRDGYECQVCGKTTDEGAILRAHHIGFRTGDHSDRMSNLLSVCTKCHTPANHKPGGKLYDLKPKVRPLNGAAFMNAVRWQMLSMLKSAHPDVEWHMTYGAATQEARRVLCLGKSHANDAYAMGRFHPKHRTPFMHFKKLRCNNRILEKFYDAKYTDARDGKKKKGAELSCGRTNRSESRHSKKNLRIYRKQKVSKGRRVIRRRHYALRPGDIVVVDSKKHRTKGVHNQGASIALDTGKSVSVKKVEKIIHAGGYMLVK

SEQ ID NO: 5370 - protein, 338 aa, unidentified
  REGION 1..338: note = Human gut metagenome
LLCKDEIRCGIDDGGLHAGIALVQKCQTRNKVVFKGTIEQRNDVKHLMDVRRGYRSYHRYHKRYRPARFNNRSSSKREGRIAPSILQKRQAAVRVINQLNRWINITNYWLEDVAIDIRALTDGYKPYRWQYQKSNRLDENIRKAVILRDGCRCMECGKSNCRLEVHHIKPRRLKGSSTLGNLITLCTECHQKTEGVEELYMNKYFALLNSSDNRNLDYAQHVMIGKKWLREQLSNLGMLYLTNGGDTANKRIDWDITKSHSNDAICITDLRPDTCEIKEWVIKPMRRQSKAKTDNVLGIKHRDLVEYTFRNGETHRGYVTALYPEQNAINFQSPIKHC

SEQ ID NO: 5371 - protein, 425 aa, Nodularia sp.; identical to SEQ ID NO: 3113

SEQ ID NO: 5372 - protein, 412 aa, unidentified; identical to SEQ ID NO: 3155
  REGION 1..412: note = Human gut metagenome

SEQ ID NO: 5373 - protein, 471 aa, Caldicellulosiruptor sp.
LVIFTVDKHGRPGHPTRRFDMVRKLVKQGRAKIIGGGTSGKPPVVMFLDREFDYTKTIERRLFVVLDPGYHHIGFAVCELRWGVLIVYCIGVLETRIPEIKDLMTKRRGYRRNRRYHSRCRKKRMSKRQSRVLTKFKAPRNVRTKDRTNATLRHGIETHLNLYKKLLKFFPFPVEQFVFVMEDNIFDVRTMTWGKTDGTGYQKSPRVPAEKKCILCGTEDNLQKHHLIQRKCGGTDVQENVVYLCRDCHEDVHAGRVYIPVDGVKQWRALGTVNAIIGRLREIPWLKFVPASDVVQMRKRLGLEKGHANDALATAAVFCNCTETDRTHMIELNMVKFRRHNRARIHAVRDRLYKVDGKIVAKNRRKRTDQKEPSFADISPLPPEIQRKLKVYPGTKILNPLRKEMPTIAGEVWVHEPTGKRFVTTGVVSQKYLYSPQLEKIVGKTYVKPEECKRILRNEGIVVMYNSLYHS

SEQ ID NO: 5374 - protein, 415 aa, unidentified
  REGION 1..415: note = Human gut metagenome
MVYVQNVHGNPLMPCKEAKARKLLKNNRATVIQRTPFVIRLNFECENQTQPITLGVDAGSKHVGLSATTEKEELYAAEVELRTDIVDLLSTRRQYRRTRRNRLRYRPARFDNRVHSKNKGWLAPSIEQKIQSHLKAVEDVHRLLPISKIIVETASFDIQKIKNPDISGKEYQEGEQLGFWNVREYVLWRDDHVCQNCKGRSGDKILNVHHIESRKTGGDAPNNLITLCDTCHDKYHKGESELHIKRGQSFKDAAFMGVMRWAFYARLKEQYSDVHITYGYITKHIRISNHLEKDHCVDARCISGNPLAKPLGYYYYQKKVRCHNRQIYKVNFLNGGKKKRNQASYLVHGFRLFDKVLYAGRECFIFGRRATGYFDLRLLTGERVHSSASYKKLQLLEPKRPFLTERRMRQFLPSL

SEQ ID NO: 5375 - protein, 545 aa, Actinomadura sp.; identical to SEQ ID NO: 4885

SEQ ID NO: 5376 - protein, 430 aa, unidentified
  REGION 1..430: note = Human gut metagenome
MPSPTKITPKGRYPEMENRIEYCFVVDKNNRPLTPTKVNKGWYLVRKSRAKLKSKYPMVIQLEKEVKSDEDDESHIVCGIDDGSAHVGLAIVQKCPTKNKVVFKGTIEQRQDVKHLMDVRRGHRRYHRYHKRYRQARFNNRSSSKRTCRLAPSIKQKKDAILRVLYQLNKWVNIQEYHLEDVCIDIRALTDDYKPYRWQYQKSNRLDENLRKATILRDECRCQECGKSNCVLEVHHIRARKYGGADTIGNLITLCSGCHQKTEGRERDFEDRYFNMIKSKPKRFDYAMHVMQGKTYLREKISELGSLHLTNGGETANKRIEWNMEKSHGNDAICVTDCIPDNCDVKEWIIKPMRRKSKAKTNNLLGIRHRDLVSYTYKNGETHTGYVTALYPEQLVLNFQSKTKHCKKVNARKCRLLWKFNKIYWLEQCV

SEQ ID NO: 5377 - protein, 410 aa, unidentified
  REGION 1..410: note = Human gut metagenome
YDSKTNKQPIEICEDVGYNYIGISVKSESHEYVSAQYDTLQDEKEHHDDCRKMRRARRNRLRYRKPRFDNRKRSEGWLAPSLEHKKQLNISLVERYVSVIPITHATVEVGSFDTMLLQAIQKGETKPEGADYQEGPRYNLATLREAVFYRDNYTCQVCGRKITDGAILHMHHMFYWKGRHGYKLDELVTACEKCHTPANHQKGGKLFGFGEDKEFADLSGAAFMNAVRWQIVNALHTTYSKEFVTITYGAMTKEKRIALQLEKSHNNDAYAMGDFHPVHRCGFRHYQKRRRNNRVLEKFYDATYIDARTGNKAKGKELFNGRISRNHKKDSENLHKYRSEKVSKGRRSIRKRRYAIQPYDTVRLKGKTYITSGCHNKGTRLLIPVNGKSKSVTISKVQVVCHAGPWIQII

SEQ ID NO: 5378 - protein, 443 aa, Caldicellulosiruptor sp.; identical to SEQ ID NO: 2385

SEQ ID NO: 5379 - protein, 418 aa, unidentified; identical to SEQ ID NO: 4424
  REGION 1..418: note = Human gut metagenome

SEQ ID NO: 5380 - protein, 471 aa, Caldicellulosiruptor sp.; identical to SEQ ID NO: 3268

SEQ ID NO: 5381 - protein, 407 aa, Succinatimonas sp.
MVYVLNCKGVPIMPTTRHGMVRRLLREHKAKVVKRCPFTIQLSYECANITQLITLGVDTGYENVGISACTEKKVLFEAKAKIRTDIVKLLSARKEARRTRRNRKTRYRKARFLNRGIANGWLPPSIRAKVESHLRLVAKAHEILPIGKIVVEIASFDIQKIKNPEIKCAEYQQGDQLGFKNVKAYVLARDGCTCRCCNGKSKDKVLRVHHLESRLIGGDAPNNLVTLCDSCHTKFHKGLISLDDIKRGKSFKAETFMGLMRNFFFKELCNKYPCVKCTYGYITKHLREKYHLKKDHHVDARCICGVPQALPSDVYLMKKVRCHNRQIHKFTTLKGGRRKLNQAPYTVKGFRLFDKVKVGDRVGFIFGRRTSGAFDIRTVYGERINGSISYKKLQLIETRKIWLIEKC

SEQ ID NO: 5382 - protein, 442 aa, unidentified; identical to SEQ ID NO: 3161
  REGION 1..442: note = Human gut metagenome

SEQ ID NO: 5383 - protein, 471 aa, Caldicellulosiruptor sp.; identical to SEQ ID NO: 4560

SEQ ID NO: 5384 - protein, 415 aa, unidentified
  REGION 1..415: note = metagenome
MVYVLDKNGQPLMPTDRHRKVRLMLQSGQAKVIKRCPFTIQLNYDSGHQTQEISLGIDAGSKHIGVSATTKIKVLYEADVELRNDIVDLLSSRRELRRGRRNRKTRYRQAKFNNRRRGNGWLAPSIRQKIGTHLTVVENICKMLPISRIMVETASFDIQKIKNPDIQGAEYQQGDQLGFWNNREYVLFRDNHTCQCCKGKSKDKILNVHHIESRKTGGNAPNNLITLCEICHTGYHKGAIQLPKTVKRGMRFKDAAFMGIMRWAFYEALKQQYEPVALVHNTYGYITKHTRIEHNLPKEHYVDARCISGNPDAFPNGEYYYQKKVRCHNRQIHKLTILKGGIRKQNQATYLVKGYRLFDKVSYQGKGYFVFGRRQSGFFDIRTLSGEKVNKGSLSCKKLKFIATRTYYLTERRAV

SEQ ID NO: 5385 - protein, 475 aa, unidentified
  REGION 1..475: note = Human gut metagenome
MVAVVTSTGKPLMPTSAYRARKLLKKGRAVIFKYRPYFTIQLVDRADGEVQEVEYKSDTGSVHVGISVCTEKKELLSEQRDLLENEPEHHNDRKKNRRTRRNRKRYRKPRFDNRKKKPQEGHEKWLPPTLLHKMEVQVRLFREFCRVVPVTSACFEMGKIDTQALKAVSKGEPVPEGEGYQKGERYGTDTLRAAVFLRDGHTCRFCGRSVKDGAILHVHHVGYWKGDRTDRLANLASACEQCHTPANHGKNGILYGKEPEFKTLKDASYMTSVRWIMLDEIKKAAPGVQVSVTYGVTTKRKRQELHLPKSHVNDAFSMASFHPKKRSDTEYWKKIPRHDRVLQRFYDAVYLDTRDGSEKKGSELSNGRISRNHKKDSENLHRYRGYKVSKGHNSIRRGASSLKPGSIVMYKGEKMTVHGTHTRYVTDKDGKTVKKVNVQFTRPASDGKKSASLKKCTPVSRVYNTGWKRYWPDKK

SEQ ID NO: 5386 - protein, 431 aa, unidentified; identical to SEQ ID NO: 4306
  REGION 1..431: note = Human gut metagenome

SEQ ID NO: 5387 - protein, 470 aa, unidentified; identical to SEQ ID NO: 2825
  REGION 1..470: note = Human gut metagenome

SEQ ID NO: 5388 - protein, 443 aa, Oligella sp.; identical to SEQ ID NO: 3678

SEQ ID NO: 5389 - protein, 406 aa, unidentified
  REGION 1..406: note = Human gut metagenome
MPCSSRKARTLLNNKKACVVKRTPFTIKLLHGSAGYKQPITLGVDAGSKHIGLSVSTETHEIYREEFAPRNDVVDLLSTRREFRRARRNRKTRHRAPRFNNRVHSKHKGWLAPSVEVKIQEHITVIKHVCQIMPISLVRVETAEFDTQRLKAMIAGKPLPVGTDYQLGEMYDEYNVRQYVLKRDNYTCQCCGAHATKTKQVKLHVHHLESRKVGGNAPNNLITLCPICHKAIHEGKKALGKKKRGKPLRDAAFMGIMRKTLLARLREELSIPVQQTYGYVTKMLREKNNLLKSHMNDALCIAKHPKAAPCENCYRSKAVRHHNRQIHKATILKGGIRKNNQAPYIVKGFRLWDKVLYNRQECFISGRRATGYFALKKLDGTVVTTGASYKKLRLLETTKNYLRERM

SEQ ID NO: 5390 - protein, 415 aa, Bacillus sp.
MRVFVKNLRGEPLMPCSNRKARLLLKQGKAKIIGYTPFTIQLQYATGETVQSVAIGVDSGSKYVGIAITTEDKVLAKGTIELRQDVKENLTMRATLRRSRRQRKTRYRKARFLNRKKREGWLPPSIQSRMHNQIHWIEIFRSLLPSPKVIVEVGKFDAQKLKNSDIQGKEYQQGDAFGFWNTRYYVFTRDHYTCQICKKKGGILHTHHIIERCSGGSDMADNLVTVHEECHQKFHQGTIKHIFKKPKQYKETAFMNILRLQIMNRLGCEITYGSYTTPKRKELRLSKTHYNDAIAITTPTKLQEYEQSGEFRIKQFRKKKRSLHESTARKGRKTKNTTAKRNNKNTPKVHGIYLGDKVKVFGQVGFVTGFTGKMMYVQDIDGHYLQNPSKSYKQVKISDIECIHHNNNWLFLQIS

SEQ ID NO: 5391 - protein, 424 aa, Halobacteroides sp.
MEVAEMPNKYAFVLDSKGKLLDPTKSKKAWYLIRKGKASLVEEYPLIIKLKREVPKDQVNSDKLILGIDDGAKKVGFALVQKCQTKNKVLFKAVMEQRQDASKKMEERRGYRRYRRSHKRYRPARFDNRSSSKRKGRIPPSILQKKQAILRVVNKLKKYIRIDKIVLEDVSIDIRKLTEGRELYNWEYQESNRLDENLRKATLYRDDCTCQLCGATETMLHAHHIMPRRDGGADSIYNLITLCKACHKDKVDGREYQYKDQFLDIINSKELSDLKSASHVMQGKTWLRDKLSKIAQLEITSGGNTANKRIDYEIEKSHSNDAICTTGLLPVDNIDDIKEYYIKPLRKKSKAKIKELKCFRQRDLVKYTKRNGETYTGYITSLRIKNNKYNSKVCNFSTLKGKIFRGYGFRNLTLLNRPKGLMIV

SEQ ID NO: 5392 - protein, 470 aa, Acidithiobacillus sp.; identical to SEQ ID NO: 3952

SEQ ID NO: 5393 - protein, 471 aa, Caldicellulosiruptor sp.; identical to SEQ ID NO: 3268

SEQ ID NO: 5394 - protein, 440 aa, Moorena sp.
LSNVFVLDTNKQALNPVHPGRARRLLSLGQAAVFKRYPFTIILKSAASSPHVWPLRVKLDPGSKTTGLAIVNDASGEVVFAASLIHRGDAIRKRLEKRRAARRSRRQRKSRYRQSRFDNRGTKKKGWIAPSVQSRVCNVITWVKRLVRLCPITAISQELVKFDLQQMDHPEISGVNYQQGTLSGYEVREYLLDKWGRQCAYCGAKDVPLEVEHINPRSKSGDDRVCNLTLACEPCNTRKGTQDIRVFLAHQPELLAKLLAQAKSPLKDAAAVNITRWVLHAQLKAFGLPLECGSGGRTKFNRITRGLEKTHWCDAACVGASTPEVLHIGQVRPLSIAAYGHGRRQMCLMNKSGFPRTNPKQKKFKHGFRTGDLVKAVVPPHFKHAGTHVGRMSAKASGAFTIATAGGTVTDIGKKYCRMLQRADGYGYTQKGEVAFPPVP

SEQ ID NO: 5395 - protein, 415 aa, unidentified
  REGION 1..415: note = Human gut metagenome
MVYVLNINGAPLMPTDRHGKVRRLLKTKKAKVVKRTPFTIQLLYVSTEYTQPLTLGVDAGSKHIGISVTSSNKEVYCGQVEPRQDVSKHLDARRKVRRSRRNHLRYRKPRFNNRVASKHKGWLAPSVECKINTHIKVIENITKILPITNIIVEVAEFDTQKLLNPDIQGVEYQQGPLYQSNLRQYVLARDNYTCQWCKGKSKSKILHLHHWNYWNNDHSNKPSSLITLCDVCNDSKNHKENGFLYGWQPKITNNLKDAALMNCMRWALYNRLKEIYPNVKLTYGYITKTTRSEHNIPKSHVNDALCITGNSDVIRMDTMYLSKKNRVHNRQIHKANKLPKGRLKLNQAPYIVKGFRLNDKVLYNGTICFITGRRKTGYFGLKDIEGQTLSNSAKWKDLTLLEKAKYYSTERISRS

SEQ ID NO: 5396 - protein, 442 aa, unidentified
  REGION 1..442: note = Human gut metagenome
MSTSVFVLDKKHRPLMPCRPARARRLLRAGRARVVKRFPFVIRLVDRTVEQSEVQPVLIKLDPGSRETGAAVVRDDGKKRHHALAFFVIEHRGGAIRDALKARSAFRRRRRSQNLRCRSPRFLNRVKPKGWLPPSLRHRVETTLSFVRRMCRYLPVSGIAAELVKFDSQKLQTPEVSGIEYQQGTLFEYEVREYLLEKFGRKCVYCGAEGVPLNIDHVVPRAKGGSNRVSNLVLACVSCNQKKGARSLEDFLKGKPEVLARVRRELKTPLRDAAAVNATRWVLFNELKATGLPVETGSGALTKFNRHAFGVEKEHWLDALCVGRLNGVVTRKGLNVLEIRCMGRGSRQRTRLTKYGFPRGYLMRQKCVHGFATGDMVEANVPKGKKAGLWRGRVAVRVSGSFNIQTPKGVIQGVGWKHCRLISHNDGYGYAWLGHAPHSSPA

SEQ ID NO: 5397 - protein, 364 aa, unidentified
  REGION 1..364: note = Human gut metagenome
MSASTTKEELLSAEVKPRNDVVDLLSTRREFRRVRRNRKTRYRKPRFDNRVRGKNKEWLAPSVEVKIQEHITAIKRVCYILPVSKVVVETAEFDLQLLKAIEEGKPVLQGEDYQQGEMYGHYNVRQYVLWKDNYICQCCGAHATKEKEVRLHVHHLESRKTGGDAPGNLVTLCDSCHEKLHKGLIAEKDFKKRKRRSTRDATFMGIMRKTLMQRLCSELPIPVVETRGYITKATREKLLVLPKSHTNDALAIAQGKRGFNVGYLPGIIQTDKIYTIRPVRHHNRQLHKAAILKGGIRKSNQAGKYVFGYRLFDKVQFNGQDCFIWGRRTTGIFTIKTINGKMIKDGISFKKLKLVEKSTSYLIA

SEQ ID NO: 5398 - protein, 447 aa, unidentified
  REGION 1..447: note = Human gut metagenome
VPAYRIKHITKKEAPYMVYVLDIDGQPLMPTSRHRKVRKLLNSHLAKVVKRCPFTIQLLYQSTKETQPVSLGVDAGSRHIGLAATTEQKVVYQEELVPRNDVVKLLSARRALRSSRRSRKTRYRKPRFNNRVHSKHKGWLAPSVEVKIQEHITAIKRICQILPISDIHVETAEFDLQRLKAMEEGRPLPVGTDYQLGEQYDFYNTRQYVLHRDEYTCQCCGTHDNNVKLHVHHIESRQTGGDAPNNLITLCEHCHKLLHAGKTILPKGKKRGKSYRDATFMGIMRKTLLERLKKEIDVPVEGTYGYITKYWRERAGLEKSHINDAICISKHPYARPLETYYLTKAVRHHNRQIHKTKFSKGGIRKRNQAPYLVKGFRLFDKVLYQGESYFIFGRRITGYFDIRTLNGTKVNKGSTSYKKLRIQDTTEAYLTEVRAIPHMNEFTCVLA

SEQ ID NO: 5399 - protein, 444 aa, Fervidobacterium sp.
MPTKRHGKVRRLLKQGLAKVVNREPFTIQLLYETTSYTQPVTVGIDIGSKTVGVSAVTDKEEIFSAEVQLRQDIKKLLLERRQHRRFRRYRKTRYRKPRFLNRRKEDGWLPPSLQWKVDAHVRIVNKLSKIIPITKVVVEVAPFDIQKVQNPDIEGEDYQNGPQKGFADVREYCLWRAGYKSELSGKTGILEVHHIIPRSEGGTDTPSNLIVLTVEEHKMLHEGKIKIPKSRLEQIKVFKHAAHVSTIGWHIVNKLRQNYHVEITYGSITKERRDMYGLEKSHRNDAFVIAGGSIQKRANEWYFGRFFRRQNRSLHKANPIKGGRRPINTVKQVNGFIRFDKVECEGEIGIIKGLRSSGYFSISSLSGEKISDSVKYTKLRLIERAKTLMFERRERATCSWLKPRVSVARFHEIKTAHSRSFKRSTICFTMDNWFSYFYAYTAH

SEQ ID NO: 5400 - protein, 430 aa, Moorena sp.; identical to SEQ ID NO: 5210

SEQ ID NO: 5401 - protein, 428 aa, Enterococcus sp.; identical to SEQ ID NO: 4335

SEQ ID NO: 5402 - protein, 459 aa, Tolypothrix sp.; identical to SEQ ID NO: 3010

SEQ ID NO: 5403 - protein, 422 aa, Petrotoga sp.
MLVYVLNKHGKPLMPCKPSKARKLLKEGKAKVVRKEPFTIQLLYGSSGYKQPITLGVDAGSKTVGLSATTENKELFAAEVEIRDDIPKLISQKRQYRKGRRFRKTRYRKPRFLNRVHSKNKGWLAPSVEHKIKSHIKLIDLVHSILPITKIVVEVANFDIQKIKNPYIEGKQYQQGEQLDFWNVREYVLRRDNYTCQHCKGKTKDKRLNVHHIESRQIGGNAPNNLITLCETCHKDYHDGKIKLNFKRGQKFKDATFMGIMRWTLYNRLKTLYPNIHLTYGYITKNTRIQNGLPKTHRIDALCISGHPQAKQLEHYYHIKEVRRHNRQIHKAKILKGGIRKLNQAPYLVHGFRLFDKIRYNGIECFIFGRRSTGYFDIRKVDGTVIHRSAKSKDLILVNKAKTLLWERRENSAFLSPLPYLP

SEQ ID NO: 5404 - protein, 423 aa, Arthrospira sp.; identical to SEQ ID NO: 3079

SEQ ID NO: 5405 - protein, 414 aa, unidentified
  REGION 1..414: note = Human gut metagenome
MPCSPAKARLLLKEKKAIVVRRTPFTIQLTIATGESKQPVSLGVDAGYKHVGLSASTEKAELYASEVELRQDITDLLSARRALRQSRRNRKTRYRAPRFDNRIRTKRKGWLAPSVENRINAHLSRIETVIRLLPVTKISVETTSFDMQLLKNSDIAGKEYQESEQLGFWNVREYVLFRDGHVCQHCHGRSKDPVLNVHHLESRRTGGDSPGNLITLCETCHKELHRGEITLKAKRGQSFRAETFMGIMRWEVLDRLKASHPKLEVQNTYGYRTKHARIVNGIAKSHCADAFCIAGNLGAERLGEFFFQKQTRRNNRQIHKLSILKGGIRKRNQAPFEVNGFRLFDKVACQGEEGFIFGRRSSGFFDVRKLDGTRISAGISYKKLHLLEKRRTYLTEIRKEEALPPLPEGSGLRA

SEQ ID NO: 5406 - protein, 461 aa, Parasutterella sp.; identical to SEQ ID NO: 3646

SEQ ID NO: 5407 - protein, 462 aa, unidentified
  REGION 1..462: note = Human gut metagenome
MSVLVIGRNGRALMPTNPRKVRLLLKKKTASVVCRHPFTIQLLYKTGCATQEGCIGIDTGSQHIGVGITCGDRVILKDEHALRSSMEKRSLLATRAVMRRGRRYRKVRYRKPKWRHHTKRMYFEKANRRGQHWRKVKTTTQSPRSKGWLPPSLQSKCDHHFRIIDRYLKYLPDPITRNLVIETGRFDMARMNDPTIHGEMYQRGPMYDAENLRAYIFARDNYQCACCKAKAGTTRKADGTTVKLVAHHILFRSRGATDNPKYIISVCDHCHTTKAHQPGGILYSWMENNKKVARGLRDATFMNILRKRLFARYPQAAFTYGNITAADRKQLRLPKSHANDAVAISLFGKEASTVKNICQTMHYKQIRKSKRSLHEAIPRKGRKNPNTKAVRNKKNTTQVNGFKLWDSVLADGKKLFICSFTGTSAYLIDKNGCYISQPGKTYKQWPLSKLKRLHPNGNWLMA

SEQ ID NO: 5408 - protein, 431 aa, unidentified
  REGION 1..431: note = Human gut metagenome
MPNKVYVINKHGRPLMPCSPAKARHLLDDGKAKVKKRTPFTIQLVYGSSGYTQEVILGVDAGSKTIGVSALTKKEELFAANVIPRNDVVDLLSTRREFRRARRNRKTRYRKPRFDNRVRSKHKGWLAPSVEVKIQEHITAIRRVCGILPVSKVVVETAEFDLHLLKAIADGKPVPQGEDYQKGEMYGHYNVRQYVLWRDNYTCQCCGAHATKKKEVRLHVHHLESRKVGGDAPDNQVTLCESCHEKLHKGLIAEKDFKKRKRKSTRDATFMGIMRKTLMQRLCSELPIPVIETRGYITKATREKLLVLPKSHTNDALAIAQGKQGFNVGYLPGIVQINKIYTIRPVRHHNRQLHKATILKGGIRKSNQVGKYVFGYCLFDKVQFNGQDCFIWGRRTTGIFTIKTINGKMIKDGISFKKLKPVEKSTSYLIA

SEQ ID NO: 5409 - protein, 512 aa, unidentified
  REGION 1..512: note = Human gut metagenome
MSTVYVLNKDGKPLMPTTRGGHVRHLLKEQKARVVRTKPFTIQLLYETNDVVQLLYLGIDPGRTNIGVAVVKTDGTAVFTAHLETRNKEIPKLMKKRKNSRRARRTNGRRCRRQRRAKANGTISKKCVKQDTAQNGSVSKRAKKIGVIKRHLPGCEKEVLCIGIKNKEAKFSNRVRPEGWLTPTANQLLQTHINLVKKIQKFLPISDVVLEVNKFAFMQLDNPNIQKWQYQQGPLYQKANLEEAVSEMQEHHCLFCKKPIAHYHHVVPQSENGSDTIGNIVGLCTKHHDLVHKDTEWQKKLAKKKTGLNKKYGALSVLNQIIPALTKELSSLFPKHFFATNGKSTYDYRAAHGVSKDHWLDAYCIACSVLADDVCDNNINSHVPYELKQFRRHDRRALHKENMSRVYTLNGKSVATNRHKATEQTTDSLEEFRQCQPDDVCKLKVKEHYPEYRNPKRNFPGCVFLVGKHTHVMQGTSGSHNGKADGYYDTNGNSYSSGECKFVAKNEGIVFA

SEQ ID NO: 5410 - protein, 423 aa, Moorena sp.
MSNHVFVLDTHKRRLNPVPPGKARLLLDQGKAAVFRRYPFTIILKEAYPDVPVQDLELKVDPGSRVTGIALKQGNKVIFAAELQHRGQQIKDVLLSRRQLRRGRRNRKTRYRQARFLNRTRPVGWLAPSLQHRVLTTLTWVRKFMRLAPISSIAQELVRFDLQLMQNPEISGVEYQQGELAGYECREYLLKKWSRKCAYCGAENAQLEVEHIQPRSKGGSDRVSNLTLACHPCNQSKGNQDVRDFLVDNPDLLNRILKQAKSPLKDAAAVNSTRWALFNALKETDLPVTSGTGGQTKFNRTRLNLPKAHWIDAACVGQVDSLQLLTAQPLLIAAKGHGTRQMCGTDKYGFPIRHRANQKTWFGFQTGDLVCAVVLSGKYAGRWTGRISVRSRPSFKLSGKQVFDVHPKYLEVIHRADGYSYGF

SEQ ID NO: 5411 - protein, 450 aa, Moorena sp.; identical to SEQ ID NO: 2935

SEQ ID NO: 5412 - protein, 438 aa, Lactobacillus sp.; identical to SEQ ID NO: 4646

SEQ ID NO: 5413 - protein, 431 aa, unidentified
  REGION 1..431: note = Human gut metagenome
MPNKVYVINKHGRPLMPCSPAKARHLLDAGKAKVKKRTPFTIQLVYGSSGYTQEVILGVDAGSKTIGLSASAETEELLSAEVKPRNDVVDLMSTRREFRRARRNRKIRYRKPRFDNRVRSKHKGWLAPSVEVKIQEHITSIKRVCRILPVSKVVIETAEFDLQLLKAIADGKPVPQGEDYQKGEMYGHYNVRQYVLWRDNYTCQCCGAHATKKKEVRLHVHHLESRKVGGDAPDNQVTLCESCHEKLHKGLITAKDFKKRKRKSTRDATFMGIMRKTLMQRLCSELPIPVVKTRGYITKATREKLLVLPKSHTNDALAIAQGKHGFNVGYLPGILQIDKIYTIRPVRHHNRQLHKAAILKGGIRKSNQTEKYVFGYRLFDKVQFNGQDCFIWGRRTTGIFTIKTINGKMIKDGISFKKLKPVEKSTSYLIA

SEQ ID NO: 5414 - protein, 512 aa, unidentified
  REGION 1..512: note = Human gut metagenome
MSTVYVLNKDGKPLMPTTRGGHVRHLLKEQKARVVRAKPFTIQLLYETNDVVQPLYLGIDPGRTNIGVAVVKANGTAVFTAHLETRNKEVPKLMQDRKKARRARRTNGRRCRRQRRAKANGTISKKCVKQDTAQSKNPSKRAKEIGIIKRRLPGYKKDVLCIGIKNKEAKYTNRTRPEGWLTPTANQLLQTHINLVRKIQKFLPISDVVLEVNKFAFMRLDNPDIQKWQYQQGPLYQKGSLENAVSEMQEHHCLFCDKPIDHYHHVVPQSENGSNTIANIVGLCAEHHNLVHKDAAWQKKLAEEKVGLNKKYGALSVLNQIIPALTNKLSVLFPKHFFVTAGKSTHDYRATHGVSKDHWLDAYCIACSVLPNDTCDKTINSRVPYELKQFRRHDRRALNNENMSRVYTFNGKMVATNRHKATEQTTDSLEEFRQRRPNDVCNLKVKEHHPTYRNMNRNYPGSIFLVGKHVHIMQGIAGSKDGKATTYKDSNANSITASKCKFVAKNSGILFV

SEQ ID NO: 5415 - protein, 402 aa, unidentified
  REGION 1..402: note = Human gut metagenome
CRRQRRAKTNGTISKKCVKQTTAQNGSVSKRAKEIGVIKRHLPGCEKDVLCIGIKNKEAKFTNRARPEGWLTPTANQLLQTHINLVKKIQKFLPISDVVLEVNKFAFMQLDNPNIQKWQYQQGPLYQKGSLENAVSEMQEHHCLFCEKPIEHYHHVVPKSENGSNTIANIVGLCTEHHNLVHKDATWQKKLAKEKVGLVKKYSALSVLNQIIPALTKEMNSLFPKHFFVTNGKSTYDYRTAHGVSKDHWLDAYCIACSVLPNDVCDSNINSHVPYELKQFRRHDRRVLHKANMSRVYTLNGKTVATNRHKAIKQTTDSLEEFRQSHPGDVCKLKVKEHHPAYRNLNRNYPGSVFLVDGQVHVMQGVSGSHNGKADGYYNTNGNAYPYYKCKFVVKNEGIVFA

SEQ ID NO: 5416 - protein, 442 aa, unidentified
  REGION 1..442: note = Human gut metagenome
MVYVLNKDGQPLMPTNRHGKVRRLLKTKKAKVIKRCPFTIQLLYDTTNHTQNITLGIDAGSKHIGLSATTKNKVLFEADVELRNDISKLLEARHTFRCSRRNRKTRYRKKRFDNRVSSKHKGWLAPSIEHKIQSHFAMVEKVHRILPVTKIVVETASFDTQLLKAQLEGKPIPQGTDYQNGELAGWNIREYIFHRDNYTCQWCRGKSKDPVLVTHHHAYWKGDHTNKPSSLITLCNTCNDSKYHKKEANRLWGWEPKITNSYKHAVFMGVMRWTFYNRLKEIYPNISITYGYITKNTRIENNLPKAHYVDARCISGHPKAKSSGEYFYYKKVRCHNRQLHKANTLKGGIRKRNKAEYIVKGFRLFDRVEYQNNEYFVFGRRASGFFDIRTLDGQKVNKGSISFKKLKLKETSRTYLIERRMADTGVSLAHLTTEVTSLRQTD

SEQ ID NO: 5417 - protein, 427 aa, unidentified
  REGION 1..427: note = Human gut metagenome
LRVFVLNKRGKPLMPCSPAKARLLLKEKKAIVVRRTPFTIQLTIATGESKQPVSLGVDAGYKHVGLSASTEKAELYASEVELRKDITDLLSARRALRQSRRNRKTRYRAPRFDNRIRTKRKGWLAPSVENRINAHLSRIEAVLRLLPITKITVETASFDMQRLKNPDISGKEYQEGEQLGFWNVREYVLFRDGHVCRHCHGRSKDPVLNVHHLESRRTGSDSPDNLITLCETCHKALHRGEITLKAKRGQSFRAQAFMGIMRREVLNRLKASYPELKVHETYGYLTKHARIANGIVKSHGADAFCIAGNLGAERLGEFFFQKQTRRNNRQIRKLSILKGGIRKRNQAPFEAKGFRLFDKVACQGEEGFIFGRRSSGSFDVRKLDGTRISAGISCKKLRLLERRRTYLTEIRKEEALPPLPEGRGLRA

SEQ ID NO: 5418 - protein, 462 aa, unidentified
  REGION 1..462: note = Human gut metagenome
MSVLVIGRNGRALMPTTSRKARLLLKKKTASVVCRHPFTIQLLYKTGCATQEGCIGIDTGSQHIGVGVTCGDRVILKEEHELRSSMEKRSLLVTRAAMRRGRRYRKVRHRKPKWRHHTKRIYFEKPNRRGQHWRKVKTTTQSPRPKGWLPPSLQSKCDHHFRIIDRYLKYLPDSITRNLVIEAGRFDMARMNDPMIHGEMYQRGPMYDAENRRAYIFARDNYQCACCKAKAGTTRKTDGTTVKLVAHHILFRSQGATDNPKYMVSVCDHCHTTKAHQPGGILYSWMENNKKVTRGLRDAAFMNILRQRLFARYPQAAFTYGNITAADRKQLRLPKSHANDAVAISLFRKEVSAVRDTCQTVHYKQVRKSKRSLHEAIPRKGRKNPNTKAVRNKKNTTQVNGFKLWDSVLADGKKLFICSFTGTSAYLVDKNGCYVSQPGKTYKQWPLSKLKRLHHNGNWLMT

SEQ ID NO: 5419 - protein, 456 aa, unidentified; identical to SEQ ID NO: 2773
  REGION 1..456: note = Marine metagenome

SEQ ID NO: 5420 - protein, 482 aa, unidentified
  REGION 1..482: note = Human gut metagenome
LVWNVQAPWDVYPSPTLCGLCLKVLRGRNGDADKKPIPTLTKDENRPSGRTTGLRAEQAEPAGIRKGDTLKVFLLNMRGKPLMPCSPAKARHMLKAGKAFVVRRTPFTIKLTIATGETKQDVTLGVDAGARHVGISATTEKEEVFASEVALRQDITGLLADRLAFRRARRNRKTRYRAPRFNNRVRSKHKGWLAPSVENRIQAHISRIEAVCRLLPVTKIVIETASFDIQKIRNPEVEGTGYQQGDQLGFWNVREYVLFRDGHICQHCRGRSKDPILNVHHLESRKTGGDAPNNLITLCETCHKAYHAGKIKLKVKRGQSFRAEAFMGIMRWTLLDRVRKTHPKLPVENTYGYLTKHKRIALGLPKTHCADAFCIAGNLKALRRGDFLFQQQTRKHNRQIHRCSILKGGVRKLNQAPFLVKGFRLFDKVRIGGQIGFVFGRRVRGTFNIRRLDKTVIGTDINCKKLSLLETRKTFLTELRKE

SEQ ID NO: 5421 - protein, 423 aa, unidentified; identical to SEQ ID NO: 3951
  REGION 1..423: note = Human gut metagenome

SEQ ID NO: 5422 - protein, 426 aa, unidentified
  REGION 1..426: note = Wastewater metagenome
MSNYVFLIDANKQPMNPIHPAHARKLMEAGKAAVFRRYPFTLIMNRVIENIVTYPLTLKIDPGSKTTGISLVNNRNEVVWGMELEHRGQQIKDTLESRRAVRRGRRQRNTRYRKARFLNRRRVKGWLAPSLMHRVLTIETWVKRLCKFAPIVEIRQELVRFDMQQMENPEISGAGYQQGTLAGYEVREYLLEKWGRKCTYCSKENVPLQIEHIQARANGGSNRVSNLCLACEKCNQKKGTKDIRDFLKSKPDLVSRILKQAKAPLKDAAAVNATRWKLFETLKATELPVTTGTGGQTKFNRSRLGLPKAHWIDAACVGVTESLKVLTSKILRVKATGQGGRQRCQTDKLGYPQKYRPLRPIHGFCTGDIVKTVILKGVNAGTYIARLCPYSNGNGEIYPTSGKKRIGIKLGYVEKPIYRKDGYSYA

SEQ ID NO: 5423 - protein, 471 aa, Caldicellulosiruptor sp.; identical to SEQ ID NO: 3268

SEQ ID NO: 5424 - protein, 443 aa, Oligella sp.
MAVFVLGKNKRPLMPCSEKRARLLLERGRARVHRLVPFTIRLVDRTVADCVLQPLELKIDPGSKTSGLALVRTRQSVNAQSGEITATAHVLNLFELIHRGFQISQALTARSQMRRRRRSANLRYRAPRSLNRTRPTGWLAPSLQHRVDTIQSWVQRIRRYAPVTHLAQELVRFDMQQLEHPEITGVEYQQGELAGYEVREYLLEKWQRQCAYCDATDVPLQIEHIHPKARGGSNRISNLTLACAPCNVKKAAQHITEFLAKDPKRLAKIQAQAKRPLRDAAAVNATRWALLNTLNATGLPVNTGSGGLTKFNRTRLQIPKTHALDAVCVGSVDHVKQWQKPTLVIKATGRGSYQRTRLNRFGFPRGYLTRQKQIHGFQTGDRVKAVVTQGKKIGTYVGRVAVRASGSFNIQTAQSLIQGISHRYCTLIQRGDGYGYSLRTDSN

SEQ ID NO: 5425 - protein, 417 aa, unidentified
  REGION 1..417: note = Human gut metagenome
MLMAVAVVSRTGVPLMPTSPYRARKLLASGKAEKYGYDPFTIRLTERETGDTQPVELCMDTGYIHIGVSVKSEKHEYLALQIDTLTDEKKKHEKCREKRRNRRSRKRYRKPRFDNRKRDKGWLAPSLKHKKEIHVRAAERICRVVPVTDITMEMGNFDTQVLKAKEEGRPLPQGTDYQQGERYGTATLREAVFSRDNYTCLCCGRTMKDGAYFHVHHIRYRSQGGTDRMANLATVCEKCHTPANHQPGGKLYNWKPEIKSFKGATFMTAVRWQMYREIKEKIPDVSVHLTYGAATKERRRALDIEKSHVNDAFVMGRFHPGHRARPELYIKKRRNNRVLESFYDARYIDSRDGKRKSGKELFNGRISRNHKKDSENLHKYRLRKVSKGKRCIRKKHYLIQPHDILVYCGRKYETAGC

SEQ ID NO: 5426 - protein, 417 aa, unidentified
  REGION 1..417: note = Human oral metagenome
MFVYVISKDGQPLMPTTRFGKVRRLLRDKKAKVVRSCPFTIKLLYEPETSVVQEVVLGQDTGSKHIGTACVSNDKVLYQSEVTLRDDIKKKMDDRRVSRRNRRQRKTRYRKTRFLNRANSTKKDRLPPSVKSKVQSHIDEIEFCKKILPISKIVLEVSQFDTHLMKNPSLIFEKVKYWGYQKGFDYEYSSRREAVLHRDNYTCQCCGKKHVRLEVHHIIFRIMGGTDDERNLIALCEKCHKLIHDGVLILTKKPRKLNLKYATQMSIIRSQLLKIYPDAIETFGFVTKENRNNLNLSKGHYIDACVIASGGKEFKQSNWLFKRRHIAKQSRRLCKGAHGEKKLPIGKILGFKRFDKVRYLGEICFVKSRKNSGFFTLMDVDNNTIDFRDRGGRAYPSYKLLKRLNTRKGILCISQRI

SEQ ID NO: 5427 - protein, 425 aa, unidentified
  REGION 1..425: note = Human gut metagenome
MVYVISQDGQPLMPTDRHGKIRRLLKSDKAKVVKHCPFTIQLLYGSTDYTQEISLGIDAGSKYIGISATTQNRVLYESDVELRNDIVSLLSARRQNRRTRRNRKTRYRKPRFNNRISCKKKGWLAPSVRQRVNTHLTVVAKVHQILPVTRIIVETASFDIQKIKNPTISGTDYQQGDQLGFWNVREYVLFRDGHVCQCCKGKSKDKILNVHHIESRKTGGDSPDNLITLCKTCHTGYHRGTIKLPKTIHRGMSFRDASFMGIMRWSFYDELKTLYPDVNLTFGYITKNTRIKNNFPKEHYIDARCISGHPLTVSDETYYYQKKVRCHNRQIHKNTILKGGVRKRNQAPYFVKGFRLFDKVMYQGQECFIFGRRSTGRMDLRLLDRTHINASVSYKKLKLIESRKNYITERRTAVPPTGKSVDFPA

SEQ ID NO: 5428 - protein, 427 aa, unidentified
  REGION 1..427: note = Human oral metagenome
MSVYVISKDGQPLMPTERFGKVRRLLRDKKAKVIRRCPFTVKLLYEPETKAVQEVVLGQDTGSKCAGTACIANDKVLYQSEVILRDDIKKKMDNRRGARRNRRNRKTRYRKARFLNRANSTRKDRLPPSVSSKVQSHVDEIEFCKKILPISKIVLEVSQFDTQLMKNPVLINEKVRHWGYQKGFNYEYSSRREAVLNRDNYTCQCCGKKRVRLEVHHIIFRSKGGTDDENNLITVCKGCHDAIHNGTLVLTKTPRRLNLKHATHMSIIRGQLLKIYPDAIETFGFVTKENRNNLNLQKEHFIDACVIASGGKEFKQLDLLFKKRRVPRQNRQLCKGIRGEKKIPTGKILGFRRYDKIKYLNEICFVKGRRSRGVFVLMDIDNKTIDFRDRGGRLNVSYKLLERLNTRRSVLCIGQISLNCDKGVKRC

SEQ ID NO: 5429 - protein, 385 aa, Moorena sp.
MVYVLNCKGVPIMPTTRHGMVRRLLKEHKAKVVKRCPFTIQLDYECANITQLITLGVDTGYENVGISACTEKKVLFEAKAKIRTDMVKLLSTRRETRRTRRARKTRYRKARFLNRGIAKGWLPPSIRAKVDSHLRLVAKVHEILPIGKIIVEIASFDIQKIKNPEIKGAEYQQGEQLGFKNVKAYVLARDGCTCRCCKGKSKDKVLRVHHLESRLIGGDAPDNLVTLCDSCHTKFHKGLIALDDIKRGKSFKAETFMGLMRNFFFKELCNKYPCVKCTYGYITKYLREKYYLKKDHHVDARCICGVPQALPSDVYLIKKVRCHNRQIHKFTTLKGGRRKLNQAPYTVKGFRLFDKVKLGDQVGFIFGRMSTGYLDIKNLQGDLLY

SEQ ID NO: 5430 - protein, 408 aa, unidentified
  REGION 1..408: note = Human gut metagenome
MVYVQDIDGKPLMPTTRHGKVRRLLKDKKAVVVNLCPFTIKLMYVTSDYKQEIVLGVDSGAKHVGLSATTKSKELYSSEVILRNDIVDLLSTRRELRRARRDRMRYRKPRFDNRIKSRRPEWVAPSVRYKVDAHIRVIDNVCSILPISRIVIEVAQFDTQKIKNPNISGKEYQEGDQLGFWNVREYVLCRDGHKCQHCKGKSKDEILNVHHIESRKTGGNSPSNLITLCETCHKEYHKGNIDLKIRRGKSLRDAAVMGIMKWRLYEELKSKYSNVSMTFGYVTKYNRINHGIEKSHVSDAFVISKNFDAIRLGYYYKVRLVRRHNRQIHKQKIQKGGIKRLNQSPFEIFGFRLFDRIMFENSYYFIFGRRKTGYFNIRDIDGKNQRDITYKKLKLSRCKRFMIQNEMN

SEQ ID NO: 5431 - protein, 471 aa, Caldicellulosiruptor sp.; identical to SEQ ID NO: 4560

SEQ ID NO: 5432 - protein, 417 aa, Geobacillus sp.
VYIINKHGKPLMPCSPRKARLLLKQKKAKVVRRTPFTIQLLYGSSGYKQPVSLGVDMGTRHVGISATTKKDVLFEAEAQLRTDIVELLAIRRQFRRSRRNRKTRYREARFLNRRKPEGWLPPSIQHKINSHIKLIDLVHNILPVTSVTIEVAAFDTQKLKNLNIRGVEYQQGEQMGFWNVREYVLYRDNHTCQYCKGKKKDPVLQVHHIESRKTGGDSPDNLITLCKTCHHEIHEKGLEHIFQRKRPPMRDASQMTAMRWAMFSRIREKYSHANITYGYITKCIRIANGLSKSHMVDARCISGNPLAKPSGTVYLLKFVRKNNRQLHKATILKGGKRKSNKAPRFVKGFQLFDKVVYERKECFIFGRRSSGYFDLRLLDGTKVHASASWKKLKRVEHASTLLIERRKGDSSPTFALA

SEQ ID NO: 5433 - protein, 418 aa, Exiguobacterium sp.
MFVFVLNHHGEPLMPCKPSKARKLLHNSKAKLVKQTPFTIQLFYGSSGYKQEISLGVDAGTKHIGFSATTSTKVLLEGEVQLRTDIQDLLATRRAMRSARRSRKTRYRQARFLNRKKPKGWLAPSIQHKVDAHLKLIRMIHRLLPIKHLTIEVAQFDIQKIKNPDISGDLYQKGDQLGFWNVREYVFFRDKHICQHCKGKSKDKILNVHHIESRRTGGDSPDNLITLCETCHKKIHKEKLEHLFQRKSRSFRDASQMTVMRWFIYNAVKETYPYVKLTYGFLTKNTRIENGLEKRHAVDARCISGNPLAEAPKVSYLFRQVRANNRQLHKMTIGKKGKRKANKAERLVHGYQLFDKVQYEEQTCFVFGRRKNGYFDLRTIAGFSIHKSASYKKLTLLEKAKTWLVDIQSEGGEGRSQP

SEQ ID NO: 5434 - protein, 414 aa, unidentified; identical to SEQ ID NO: 2588
  REGION 1..414: note = Human gut metagenome

SEQ ID NO: 5435 - protein, 414 aa, unidentified
  REGION 1..414: note = Human metagenome
MVYVINKQGQALMPTERFGKVRRLLKNSLAHVVCRIPFTIQLDYDTTDYTQPVSLGVDAGSKHIGISATTSEKEMYAADVELRNDIVDKLSTRREQRRTRRSRLRYRKARFNNRVSSKRKGWLAPSVENKIQTHLTVVEKIHKFLPITNIVVETASFDIQKINNPSISGSEYQQGEQLDFFNVREYVLFRDNHICQHCKGKSKDKVLNVHHIESRKTGGDSPNNLITLCETCHKAYHRGEFELNVKRGKSFRDAAFMGIMRWGFYDRLKNIYPNVSMTFGYITKNTRTTNNLPKEHYVDARCISGNPTAKPLGYYFYQKEVRCQNRQIHKANFLKGGRKKLNQAPFLVKGFRLFDLVEYQKELYYIFGRRSSGSFDIRKLDGTKVNKGSINCKYLRLVDKRKSILTEKRTQVNL

SEQ ID NO: 5436 - protein, 464 aa, Moorena sp.
MAVFVLDRQGLPLMPCTEKRARLLLERGRARVHRVVPFVIRMTDRRAQASSFQSLRLKLDPGSKTTGIALVQEKADGIAVLNLMDLVHRGRQITEALTQRRAFRRRRRGANLRYRAPRFDNRTRAAGWLAPSLQHRVESSMSWVRRVMRWAPVSALSMELVRFDMHAMQNPEISGLEYQQGELFGYEVREYLLEKWGRKCAYCDAAGVPLQIEHILARARGGSNRVSNLTLGCAPCNIGKGARDVREFVKDKARLTRILSKAKAPLRDAAAVNSTRWALLNALKETELAVETGSGGRTKWNRARLEIPKTHALDAACVGEVKAVCGWQRSTLELRCTGRGSYQRTRLTAQGFARGYLTRKKHAYGFQTGDRVRAIVPKGKKAGTHVGRVAIRASGSFNIQTPVGVVQGIAHRHCTMVQRADGYGYSTVPLTKEGDSGNGTKAWLAAQAVLSLPGMNAEVSRANG

SEQ ID NO: 5437 - protein, 471 aa, Caldicellulosiruptor sp.; identical to SEQ ID NO: 3268

SEQ ID NO: 5438 - protein, 279 aa, unidentified
  REGION 1..279: note = Human gut metagenome
VVVETAEFDLQLLKAIADGKPVPQGEDYQKGEMYGHYNVRQYVLWRDNYTCQCCGTHPSKKKEVRLHVHHLESRKVGGDAPDNQVTLCESCHEKLHKGLIAEKDFKKRKRRSTRDATFMGIMRKTLMQRLCSELPIPVVKTRGYITKATREKLLVLPKSHTNDALAIAQGKQGFNVGYLPGIVQINKIYTIRPVRHHNRQLHKATILKGGIRKSNQTEKYVFGYRLFDKVQFNGQDCFIWGRRTTGIFTIKTINGKMIKDGISFKKLKLVEKSTSYLIA

SEQ ID NO: 5439 - protein, 521 aa, Streptomyces sp.
MTTSSSREKTHRAVLPQRRALESVGADTPGSRDETACGLPATVPGAGAEHGRGEILSAGTHPAGRHPAPASAGKGETREGHPAVFVLDRHHQPLMPCTPARARKLLSHGRAVVHRHTPFVIRLKDRTAAASEVTGVELGIDPGSRFTGIALFRAVDEADASVRHGLFAIELVHRGGPISVRLTSRATLRRARRQRNLRYRAPRFNNRARPEGWLAPSLRHRVDTITAWVNRMTRWAPVRAVHVELSVFDPHAMSAGTSASDAECRGGTLQGMEVREYLLMKWNRACAYCGATSTPLNIDHIHPRSRGGSDRVSNLTLACLPCNKRKSNMPVEDFLKKKPAVLSKILQQAKTPLRDAAAMNATRCAVLRALEALNPDVRPSTGGRTRWNRRRTSTPKSHTLDALCVGVLASVVRHPKAIQVVTATGRGTYRRTAPDRYGFPRLALPRTKPYFGYATGDLVRANVPNGKRQGNHTGRVAVRATGNFNIKTRRGLVQGVNHRHVRLLQRADGYAYTTRAEVTHA

SEQ ID NO: 5440 - protein, 448 aa, Chromatium sp.
MAVFVLDKTTHPLMPCSEKRARLLLARGRAVVVRLTPFVIRLKDRIGGDLQPVRLKLDPGSRTTGLALVRETDAMDPETGAITRTSTVLWLSALTHRGQAIRDALTARRAMRRRRRTTNLRYRAPRFDNRTKPTGWLAPSLQHRVNSTRSWINRLRRLAPITAISQELVRFDMQAMQKPDTSGVEYQQGTLAGYEVREYLLENWQRTCAYCGAKHVPLQIENIQPKSAGGSNRISNLTLACEPCNRKKGAQPVEVFLKGKPDTLTRIQSQAKAPLKDAAAVNATRWALLNALKDTDLPVETGSGGRTKFNRSRLDIPKTHALDAACVGQLDALHDWQRPTLAIKSTGRGSYQRTRLDRFGFPRGYLTRQKRIHGFQTGDRVIARVLSGKNAGIHVRRVAVRATGSFNIQTMSGVIQGISHRHCSVLQRADGYGYSFNPVPTEEARSAA

SEQ ID NO: 5441 - protein, 413 aa, unidentified; identical to SEQ ID NO: 2605
  REGION 1..413: note = Human gut metagenome

SEQ ID NO: 5442 - protein, 453 aa, Anaerotruncus sp.
MSVAVLSSTGRKLMPTSNYRARKLLKSKRAVIECYRPIFTIRLTDREEGNTQPIEYACDTGYQHVGVSIKSEKHEFVHAQYDMLSDETERHNDCRKCRRTRRNRLRYRKPRFDNRSKKNKEMTPSLRHRKENQIRLFESFCKVMPITSAAFEMGKFDTQLLQAIADKKPLPKGKDYQRGSKYLYQTEREAVFGRDHYTCQVCGKSVKDGVILHTHHIGFWKGYRSNRISNLLTVCEHCHTAKNHQPGGKLWGLEPKSTNLAPATYMSTVRWAMYRDLVLTHPELDIYFQYGAKTAVTRKSLHLEKTHANDAYCIGSLHPKHRTAELVYQKKRRNNRILAKFYDAKYIDIRDGEKKSGSALSCGRTNRRESRRSDKNQRIYRGKKCSSGRTSVRKKRYSYQPGDAILFRSQRFTVNGAHCNGTRVILNTGKSVKMADLTCIKMEGGWCFLPAQA

SEQ ID NO: 5443 - protein, 419 aa, Paenibacillus sp.; identical to SEQ ID NO: 3664

SEQ ID NO: 5444 - protein, 378 aa, Moorena sp.; identical to SEQ ID NO: 2642

SEQ ID NO: 5445 - protein, 424 aa, unidentified; identical to SEQ ID NO: 4676
  REGION 1..424: note = Human gut metagenome

SEQ ID NO: 5446 - protein, 411 aa, unidentified
  REGION 1..411: note = Human gut metagenome
MVYVQDIDGKPMMPTTRHGKVRRLLKDNKAVVVNTCPFTIKLTYKTSDYKQEIVLGVDSGTKHVGLSATTKSKELYASEVILRSDVVDLLSTRRGLRRTRRSRLRYRKQRFNNRVKSKKRGWIAPSVRHKIDSHIRIISFVYSILPVSKLIVEVAQFDTQKIKNPEISGKEYQEGEQLGFWNVREYVLARDGHKCQHCKGKSKDPILNIHHIESRKIGGDSPSNLITLCETCHKEFHKGNIKLKVSRGKSLRDAAVMGIMKWKLYEELKSRYDNVSMTFGYITKYNRINHGIEKSHVSDAFVISRNFNSCRLGYYYKRKLVRRHNRQIHKMKILKGGIRKRNQAPFKVFGFKLFDKVMFQGEEHFIYARRLSGQFNIRDINGENKKDVSCKKLKYVSHGLVSVKTNLFLSQ

SEQ ID NO: 5447 - protein, 417 aa, unidentified
  REGION 1..417: note = Ga0307928_10008236
MQKTYIQNKNGEPLMPTTRCGAVRRWLRDNKARVIKLTPFTIRFNKDCESNTQEVIVGLDTGAVNIGCSAVSNTKVLYASETKLRTDITKKMQRRAMYRRTRRTRKIRYRPARFDNRTRPEGWLPPSLKSKLDSTVKVIKQLSKILPISKVRVEIAKFDTQKLQNPEIRGKGYQKGVTEGYDNIRAYVFERDNYTCQICKKQLGILQTHHITQRKDGGSDRPDNMVTVHKSCHKDFHLGLIKHKFRKPKEYKMAAHVTILKDFIVNELRKDFNVETTFGHITKRIRQRLHLPKSHCFDAIAICNPKKVERTKTIFQRVCVSQRRYQMTKGVRSERRLPAGQIFGFNQWDKVRFNNQIAFIKGRRSSGYFDVCDINNNSLSHSVKYTKLHKLSSNNTMEVIVSLPTAKAVGIRNENVL

SEQ ID NO: 5448 - protein, 430 aa, Desulfobacter sp.
LSVFVLDTNKKPQNPVHPAKARLLLTEGKAAVFRQFPFTIILKETVLDVASNPLRIKIDPGSRETGIAVINDDSGEIVFAMELRHRGRQIKNNLESRRAIRRSRRNRKTRYRKPRFDNRTRAEGWLPPSLKSRIHNIETWVNRLCRFCNIQAISMELVRFDMQKIQNPEISGVAYQQGELMGYEVREYLLEKWDRTCAYCGKTDIPLEIEHIVPKSKGGSNRVSNLTLACTACNRKKGNKPLEQFLSRKPRLLKRIQKQSKVPLKDAGAVNTTRWDLFRTLKKTGLPVETGSGGLTKFNRTTRGLHKTHWLDAACVGESTPEKIFQIDKAVLIVKADGHGSRQMCRVNKFGFPRTTAKSTEKKVKGFQTGDIVKAVVTSGKKVGTYTGRVAVRKSGSFNIKTVDKTVQGISWKYCRRLHASDGYSYNTTC

SEQ ID NO: 5449 - protein, 408 aa, Fervidobacterium sp.
MVFVISKDGKPLMPTKRHGRVRRLLRQGLAKVVNREPFTIQLLYETTNYTQPVTVGIDIGSKIVGISAVTDKMEIFSAEIQLRQDISKLLPERRQHRRFRRYRKTRYRKPRFLNRRKENGWLPPSLQWKVDAHVRIVNKLSKIIPITKVVVEVAPFDIQKVLNPDIEAKDYQNGPQKGFADVREYCLWRAGYKSELSGKTGVLEVHHIIPRSKGGTDTPSNLIVLTVEEHKMLHEGKIKIPKSRLEQVKVLKDAAHVSAIGWYIVNKLKQNYQVAITYGSITKARRATYGLEKSHRDDAFVIAGGNIQERANEWYFGKLLRRQNRSLHKANPIKGGKRPLNTIKQVKGFRRFDRVECEGKIGIISGLRSSGYFSISSLNGEKISDSVKYTKLRLLERAKTLMFERRER

SEQ ID NO: 5450 - protein, 470 aa, unidentified; identical to SEQ ID NO: 2825
  REGION 1..470: note = Human gut metagenome

SEQ ID NO: 5451 - protein, 448 aa, unidentified; identical to SEQ ID NO: 5196
  REGION 1..448: note = Fermentation metagenome

SEQ ID NO: 5452 - protein, 442 aa, unidentified; identical to SEQ ID NO: 2903
  REGION 1..442: note = Human gut metagenome

SEQ ID NO: 5453 - protein, 385 aa, unidentified
  REGION 1..385: note = Human gut metagenome
MGHEHRIHHVVQRLHQLTDEKQKHDACRMYRRQRRSRKRYRQSRFNNRKRSDGWIAPSLEHKKDIHIQTISRICNAMPITNITLEMGNFDTQVLKALEENRPLPQGTDYQHGERYGIATLREAVFARDKYTCQCCRKTIADGAILHVHHIIYRSRGGTNRMSNLATVCDRCHTPANHKPGGRLYNWKPKIASFKGATFMTAVRWKMYNEVKSKFSDINIHITYGAETKEQRRAFDITKSHVNDALVMGQFHPKHRSRPVCYKKKRRNNRCLEKFYDAKYIDSRDGKKRSGQELFNGRINRNHKKDSENLHQYRQQKVSAGRRTIRKQHYSIQPHDIIVFNRQQFETSGCHCNGARAILLPQKKSVAIKKLSIHKYAGGYFKSDFT

SEQ ID NO: 5454 - protein, 471 aa, Caldicellulosiruptor sp.; identical to SEQ ID NO: 4560

SEQ ID NO: 5455 - protein, 414 aa, unidentified; identical to SEQ ID NO: 2588
  REGION 1..414: note = Human gut metagenome

SEQ ID NO: 5456 - protein, 398 aa, Parasutterella sp.
  SITE 124: note = misc_feature - Xaa can be any naturally occurring amino acid
  SITE 398: note = misc_feature - Xaa can be any naturally occurring amino acid
MPCSPAKARLLLKEKKAIVKRRTPFTIQLTIATGETKQPVSLGVDTGYKHVGLSASTEKAELYASEVELRQDITDLLSARRALRQSRRNRKTRYRAPRFDNRIRTKRKGWLAPSVENRINAHLXTPFTIQLTIATGETKQPVSLGVDAGYKHVGLSASTEKAELYASEVELRQDITDLLSARRALRQSRRNCKTRYRAPRFDNRIRTKRKGWLAPSVENRIDAHLSRIEAVLRLLPVTKITVETASFDMQLLKNPDISGKEYQEGEQLGFWNIREYVLCRDGHVCQHCYGRSKDPVLNVQHLKSRRMGGDSPGNLITLCETCHKALHRGEITLKAKRGQSFRAEAFMGIMRWEVQNRLKASHPELEVNNTYGYRTKHARIANDIAKSHCADAFCIAGX

SEQ ID NO: 5457 - protein, 422 aa, unidentified
  REGION 1..422: note = Human gut metagenome
LNKRGKPLMPCSPAKARLLLKEKKAIVVRRTPFTIQLTIATGESKQPVSLGVDAGYKHVGLSASTEKAELYASEVELRKDITDLLSARRALRQSRRNRKTRYRAPRFDNRIRTKRKGWLAPSVENRINAHLSRIEAVLRLLPITKITVETASFDMQRLKNPDISGKEYQEGEQLGFWNVREYVLFRDGHVCRHCHGRSKDPVLNVHHLESRRTGSDSPDNLITLCETCHKALHRGEITLKAKRGQSFRAQAFMGIMRREVLNRLKASYPELKVHETYGYLTKHARIANGIVKSHGADAFCIAGNLGAERLGEFFFQKQTRRNNRQIHKLSILKGGIRKRNQAPFEAKGFRLFDKVACQGEEGFIFGRRSSGSFDVRKLDGTRISAGISCKKLRLLEKRRTYLTEIRKEEALPPLPEGRGLRA

SEQ ID NO: 5458 - protein, 447 aa, Exiguobacterium sp.
MFVFVLNHHGEPLMPCKPSKARKLLNNGKAKLVKQTPFTIQLLFGSSGYKQEISLGVDAGTKHIGFSATTSTKVLLEGEVQLRTDIQDLLATRRAMRSARRSRKTRYRQARFLNRKKPKGWLAPSVQHKVDAHLKLVRMIHRLLPIKHLTIEVAQFDIQKIKSPDISGDLYQKGDQLGFWNVREYVFFRDKHICQHCKGKSKDKILNVHHIESRHTGGDAPDNLLTLCETCHKKIHKENLEHLFQRKSRSFRDATQMTVMRWFIYNAVKETYPYVKLTYGFLTKNIRIQNGLEKRHAVDARCISGNPLSEEPNVSYLFRQVRANNRQLHKMTIGKKGKRKANKAERFVRGYQLFDKVHYEGQTCFVFGRRKTGYFDLRTLQGVRVHKCASHKKLTLLERATTWLVDIPTRRRWRSAPPMTEATGLRRPINNETNSCWYRHGSVYDGF

SEQ ID NO: 5459 - protein, 470 aa, Thermoanaerobacterium sp.
VWQTQKAEITLARRDYLLIALLVLYRTPKGEFYMVFVLDKHKKPLMPCTEKRARLLLESGRAVIHKINPFVIRLKDVTVDNCIIQPCRIKIDPGSKVTGIAILQGEKVLLLVKLYHKQGIKKSLDDRRNHRRFRRNKLRYREPRFDNRKREKGWLPLSLEARVQQVINTVKKLAKYIPIDNISIEHVKFDTQLMQNPEISGVEYQQGELQGYEVREYLLVKWGRKCAYCGKENVPLEVEHIVPKSRGGTDRVSNLTIACHECNQKKGNMTAEEFGYPDIQKQAKQPLKDAAMINATRWKTYNLLKEMYPVECGTGALTKKNRIDRNLPKEHYCDACCVGQSTPKEFVFKADYILEFHAKGRGTRQRTLLNKYGFPRAYLSRQKEYFGFQNGDYVKAEVPKGKYKGQYTGYVAVRKSGYFDIRDANGKNIAQGISYQYCHIIQRYDGYKYGRRKRHILLHPSDAMDGVSCA

SEQ ID NO: 5460 - protein, 413 aa, unidentified; identical to SEQ ID NO: 2636
  REGION 1..413: note = Human gut metagenome

SEQ ID NO: 5461 - protein, 427 aa, Moorena sp.
MSKVFVLDTNFTPLNPIHSAQARQLLRSKKAAIFRQFPFTIILKKSRPDSPISSLRLKIDPGAKFTGMALVNDLTGEVVFAAELKHRGFAIRDALTSRRQLRRSRRARKTRYRQPRFLNRTRPEGWLAPSLQSRVENIKTWVKKLLNFAPIQAISQELVRFDMQLMANPDIQGQEYQQGTLAGYETREYLLEKWGRQCAYCGAKDVPFQVEHIHPRAKGGSNSITNLTLSCEKCNTKKGTKDIKDFLKKDFSKLEKILKQAKRPLADAAAVNTTRTALLKVLKATGLPVETGSGGLTKFNRSEQNLEKTHWIDAACVGQSTPILNIKGVKLLLITANGHGSRQSCRTDKYGFPNRHVPREKIHFGFQTGDIAKAVVTTGKKIGTYVGKVAIRSTGSFNISTKNGLIQGISHKFCKRIHAKDGYSYAV

SEQ ID NO: 5462 - protein, 519 aa, Streptosporangium sp.
VLPQPAALESTSADTPEGGHETGRGGRKASGVEHGRGEIGTDGTRPLRRHPDPAQAGQGAAREGHPAVFVLDRRSHPLDPCHPARARRLLASGRAVVVRHTPFVIRLKDRAAEQSTVQGVAVGVNPGSKHTGIAVFTETGAGRMGRFALQLDHRGSAIRGRLTARAALRRGRRSRNLRYRAPRFANRAKPQGWLAPSLRHRVDTTMSWVVRLTRWAPVRAVHVERVSFDTHALSAGRPLEGVEYQQGTLAGYEVREYLLAKWGRRCAYCGIQNVPLNIDHIRPRSRGGSDRIGNLTLACIPCNQAKGATPVEEFLTGRPRGLARVLARAKAPLRDAAAVNATRRALWRALAATGLRVHPSSGGRTKWNRSRTGAAKSHTLDALHVGHLQAVTGWPGTVLVVKATGRGGYARTRTDRYGLPRLRLPRTKSVHGYATGDLVRASVPSGKNAGVHTGRIAVRTSGSFNVRTRHALVQGIHHRHVRLLQRADGYGYTTHPETRHRSAFPSPPEGGGLHAGDIR

SEQ ID NO: 5463 - protein, 411 aa, unidentified; identical to SEQ ID NO: 3917
  REGION 1..411: note = Human gut metagenome

SEQ ID NO: 5464 - protein, 412 aa, Moorena sp.
MENKIEYCFVVDKDNQPLAPTKVNKGWYLVRKGRARLKSKYPMVIQLEKRVKLDENDKSYMTCGIDDGSAHVGLAIVQKCPIKNKVVFKGTIEQRQDVKHLIDVRRGYRRYHRYHKRYRPMRFNNRSSSKRIGRLAPSIKQKKDAILRILFQLNKWINIKEYYLEDVCIDIRAMTDDYKPYKWQYQKSNRLDENLRKAAIIRDNYKCQECGKSNCKLEVHHIQARKYSGADTIGNLITLCSKCHQKTEGKEQDFEDKYFKIIGSKPKRFDYAMHVMQGKNYLRSKISELGLLHLTNGGETANKRIEWNIEKSHSNDAICITDSIPDSCNIKEWTIKPMRRKSKAKINNVLGIKHRDLVSYTYKNGETHTGYVTALYSKQLALNFQSRTKHCKKVNARKCRLLWQFNKIYWLE

SEQ ID NO: 5465 - protein, 470 aa, Thermoanaerobacterium sp.
VWQTQKAEITLARRDYLLIALLVLYRTPKGEFYMVFVLDKHKKPLMPCTEKRARLLLESGRAVIHKINPFVIRLKDVTVDNCIIQPCRIKIDPGSKVTGIAILQGEKVLLLVELYHKQGIKKSLDDRRNHRRFRRNKLRYREPRFDNRKREKGWLPLSLEARVQQVINTVKKLAKYIPIDNISIEYVKFDTQLMQNPEISGVEYQQGELQGYEVREYLLVKWGRKCAYCGKENVPLEVEHIVPKSRGGTDRVSNLTIACHECNQKKGNMTAEEFGYPDIQKQAKQPLKDAAMINATRWKTYNLLKEMYPVECGTGALTKKNRIDRNLPKEHYCDACCVGQSTPKEFVFKADYILEFHAKGRGTRQRTLLNKYGFPRAYLSRQKEYFNFQNGDYVKAEVPKGKYKGQYTGYVAVRKSGYFDIRDANGKNIAQGISYQYCHIIQRYDGYKYGRRKRHILLHPSDAMDGVSCA

SEQ ID NO: 5466 - protein, 418 aa, unidentified
  REGION 1..418: note = Human gut metagenome
MVYVLNIDGQPLMPTTRHGKVKHLLKDGKAKVVKRCPFTIKLLYETPNCTQDLTLGVDTGSGAIGTAVSTDDGEIVYMSEVVVRNDITDKMTQRAKYRRNRRSRKTRYRKARWLNRKNSIKKDRFSPTMVSKLHSHVKEIEYIKSILPITTMVFETGTFDTYLMKNPSIVNENVRHWGYQKGTNYGFENTKAMVLNRDNYTCQYCKGKHKDSKLEVHHIVFRSKHGSDEESNLITLCHTCHKALHSGKISLKLEGKVKGNLKYATQMNSIRKQLFRIYPEAIETFGYITKANRLKLGVDKEHFYDACVIATHGNKFSVRCNLYKKKCVSDGDFQQTKGVRSEQRIPTCKIHGFRKFDKVRYFGKEYFIKGRLSTGYAILMDIDGNKSDFSYMPKGFKTPKIINLKRLEARSSWIVIFK

SEQ ID NO: 5467 - protein, 425 aa, Aphanothece sp.; identical to SEQ ID NO: 3310

SEQ ID NO: 5468 - protein, 440 aa, Clostridium sp.
VPLMVYVLNKEGKPLMPTNRYAKIRVLLKSKKAVVVNSKPFTIKLSYNTKDFVQPITLGIDSGYLNIGFSAITKENELISGEVKLLKGMSERLKEKAMYRRQRRSRLRYRKPRFNNRKRSKEWLAPSIQHKYDSHIRFIDKLKKLLPITNIIIEVANFDTHKLKNPSIEGEAYQNGEQKDFFNLREYILHRDGHKCQNPNCKSKGAESILQVHHIGFWKQDRSDRPGNLITLCNKCHTPKNHKENGFLYGWQPKIKSFKEATFMSMIRWRLVNTLGCKHTYGYITKSNRIALKLEKTHYNDAFCIAGSSNQNRVKPLIFEQIKRNSRSLEKFYDAKVIDIRTNTKVSGAELFNGRRTRNKNLNSENLRKYRGVKVSKGQRRIRTKRYFYQPGDLVKYEDKVYTVKGTQNKGKYIALKELKKVPKVELLTPYKFRKGLVCV

SEQ ID NO: 5469 - protein, 423 aa, unidentified
  REGION 1..423: note = Human gut metagenome
MRVFVFNMRGEPLMPCTQRKARLLLKTGKAKIYKHNPFTIQLKYVTGENKQECHVGIDTGSKYIGLAVTSENKVLFKGEVELRQDVKSKIDTKRIYRRSRRNRKTRYRRCRFLNRKRFGKWLPPSLQNRINHTFKWIDKLCSFIPESILHIEVGKFDIAKMINPEVHSVDYSQGQTYGYQGERYFIFARDNYTCQVCGERNKPLQTHHIIYVSNGGTNRVDNQITVCKECHTSTNHKNGGIFYKWQKEHKKVKQYKAPPFMNVLRQQILNQYPQALITYGFETTIKRKNIGLEKTHYNDAIVISGVSTISENLHEWLLIRQFRKKKRSLHEGVPRKGRKEPNRIQKRNSKNTPYYRGFYLNDKVSVFGKSGYITGFTNSGAYVKGVDGEYIVLPNKSYKRVNIASLKFICHNNNWQYITKNAV

SEQ ID NO: 5470 - protein, 416 aa, unidentified; identical to SEQ ID NO: 4039
  REGION 1..416: note = Human gut metagenome

SEQ ID NO: 5471 - protein, 471 aa, Caldicellulosiruptor sp.; identical to SEQ ID NO: 3268

SEQ ID NO: 5472 - protein, 470 aa, unidentified
  REGION 1..470: note = Human gut metagenome
MVGGVSQIFQKKEVSVLDTVAVISASGRKLMPTNSYRARRLLKSKRAVIYRYRPVFTIKLADRTDGYIQPIEYKCDTGYQNIGISICSDTKEFVNEQRDLLKDEVKRHSNSRKYRRTRRNRLRYRKKRFDNRRGMISRDGFAPSIRNKRDVHVRLYEEYYKVFPITKSVFEMGQFDTQVLKAVEAGLPVPAGTDYQRGEQYGYATLREAVFARDSYTCVCCGKSAIKDGVKLRIHHIGYLSGDRSNRMANLGSVCESCHTSKNHKPGGKLYSLKPELKTFKGATFMTTVRYSMVKQLKAATPDVDIRVTYGAATKLARKALNVKKTHSNDAYCMGEFHPEHRSDFKHYRKCRRNSRVLSRFYDAKYRDLRDGSVKTGSQLSCGRTNRRIPRHTELNERIYRGHKISKGKLVVRRQHYQYRPGDTVWAEGKRCAVKGIISNGTRIALNERNPVSVNKIDKTVHTGGWAKAS

SEQ ID NO: 5473 - protein, 452 aa, Lactobacillus sp.
MSEIQKVNYIYVVDSNGTPLMPTSRLGMVRRWLKTGQARWFGNSRKIIQFVRPVTTNTQELTLGVDAGFHLGLAVVGNKREYYASESLRKSEKDRITSRRELRRTRRNRLRYRQARFDNRRRKASWLAPSVQHRLDFTIKEIKRLYTFLPIAKLVVEVAPFDNQKLLNPNIKPWEYTHGKTHGFKTIKDYLLARDNYRDALDGKQYPASQLRVHHLVQRKDGGTDQPDNLVLLSDINHTQANHNNGILAKLRENRQKTLDYRGAYFMNILATRLSDYFDNYTTTQGYLTANLRQKYQLEKSHLNDAFIIAGGTDTTLRTNNVYSRQKLRNNNRVLQKFYDAKYIDSRDNKTKPGKELSSGRTRRSRELNYDNLKQFRKTKVKKGRVSIRRNHYQLRPHDVVLNTKTNKIETITGVQNSGTVIKFQTGKTCSIKNVVSLYHVNGMLEKKIENI

SEQ ID NO: 5474 - protein, 428 aa, Enterococcus sp.; identical to SEQ ID NO: 4335

SEQ ID NO: 5475 - protein, 422 aa, Ktedonobacter sp.; identical to SEQ ID NO: 4796

SEQ ID NO: 5476 - protein, 435 aa, unidentified; identical to SEQ ID NO: 4814
  REGION 1..435: note = Bioreactor metagenome

SEQ ID NO: 5477 - protein, 413 aa, unidentified
  REGION 1..413: note = Human gut metagenome
MTNYAFVLDADGKQLAPTKEQKAWFLIRKKRAALVSKYPMVIQLNKEVPDEEICKDEIRCGIDDGGLHVGIALVQKCQTQNKVVFKGTIEQRNDVKHLMDIRRGYRHYHRYHKRYRQARFNNRSSSKQKGRITPSILQKRQATVRVINQLNKWINITDYWLEDVAIDIRAMTDGYKPYKWQYQKSNRLDENIRKAVILRDGCKCMECGKSNCKLEVHHIKPRRSKGSNTLGNLITLCAKCHHKTKGVEELYMDRYFALLNSSDNKNLNYAQHVMIGKKWLREQLSSLGILHLTNGGDTANKRIDWDIAKSHSNDAICITNLRPDECEIKEWTIKPMRRQSKAKTDNVLGIKHRDFVEYTFKNGETHRGYVTALYPEQNALNFQSPTKHCKKVNVRKCKVLWKYSKIYWLDNVS

SEQ ID NO: 5478 - protein, 465 aa, unidentified
  REGION 1..465: note = Human gut metagenome
MSTCACVLSKNGERLMPTIRLGKVRHLLKDGKAKIIKHHPFTIQLLYDSKTNTQPIEICEDVGYNYIGISVKSQSHEYVSAQYDTLQDEKSCHDACRRMRRTRRNRLRYRQKRFDNRKRDKGWLAPSLKHKKELNVNVIKMYCEVVPITHAAVEVGSFDTMLVKAIEEGKATPEGADYQKGPRYNLATLREAVFYRDNYTCQVCGREASEGAILHVHHMFYWKGRHDNSLSELITVCEKCHTPANHQKGGKLYGFGEDIKFANLSGAAFMNTVRWQIVNELYAAFGKPFVTFTYGAMTKEKRIALHLEKSHNNDAYAMGEFHPNCRCTFEHYEKVRRNNRILEKFYDSRYIDIRTGEIATGKELFNGRINRSHKKDSENLHKYRGKRIRKGYRALRRKKVALNPGDLVSLNGEILTVHGTHTKKNGSVNVEFKTPSKSGKKSTSLKKLKIIKTISPMRSAWDKVS

SEQ ID NO: 5479 - protein, 432 aa, Moorena sp.
MEMPEMVYVLNISGQPLMPTENCAKVRILLRRGKARVVKRCPFTIQLLYKTADYTQEVTLGVDSGSKHIGLSATTEDKVLFESDVELRNGIVDLLADRRQNRRARRSRKNRYRKPRFDNRRRKDGWLAPSVQNKVDTHLTAVRRVHEILPVSRIIAEVASFDIQKIRNPAIRGTEYQQGEQMGFWNVREYVLFRDGHECQCCHGKSKDRILNVHHIESRKTGGDAPNNLITLCETCHTGYHRGTVRLPKTIHRGMSFRDATFMGIMRWAFYDKLKEIYPDVHLTYGYITKNTRVRHGLPKDHCIDARCISGHPDAVSDGTVYFQKKVRCHNRQIHKVNFIRGGKRRRNQAPYEVMGFRLFDKVQWKGCECFIFGRRSTGRMDLRLLNGTKLNPSVGYKNICLLEMRKNMLIEKRRKAVPPTGKPVVFPAKRL

SEQ ID NO: 5480 - protein, 512 aa, unidentified
  REGION 1..512: note = Human gut metagenome
MSTVYVLNKNGKPLMPTTRCGHVRYLLKEKKARVVASKPFTIQLLYETNDVVQPLYLGIDPGRTNIGVAVVKTDGTAVFTAHLETRNKEIPKLMKKRKDSRRARRTNGRRCRRQRRAKANDTISKKCVKQATAQNGSVSKRAKEIGVIKRHLPGCEKEILCIGIKNKEAKFNNRTRPEGWLTPTANQLLQTHINLVKKIRKFLPISDVVLEINKFAFMQLDDPNIQKWQYQQGPLYQKASLEEAVSEMQEHHCLFCKKPIAHYHHVVPQSENGSDTIGNIVGLCTKHHDLVHKDTVWQKKLAKKKTGLNKKYGAQSVLNQIIPALTERLNTLFPKHFFVTTGKSTYDYRAAHGVSKDHWLDAYCIACSVLPNDVCDSGINNRVPYELKQFRRHDRRALHKANMSRVYTLNDKAVATNRHKAIKQTTDSLEEFRQNHPDDVYKLKVKEHHPEYRNSKRNFPGCVFLVGKHTHVMQGTSGSHNGQADGYYDTNGNSYSSGKCKFVAKNEGIVFT

SEQ ID NO: 5481 - protein, 432 aa, Ktedonobacter sp.; identical to SEQ ID NO: 4734

SEQ ID NO: 5482 - protein, 458 aa, unidentified
  REGION 1..458: note = Human gut metagenome
LTKDENRPSGRTTGLRAEQAEPAGIRKGDTLKVFVLNMRGKPLMPCSPAKARHMLKAGKAFVVRRTPFTIKLTIATGETKQDVTLGVDAGARHVGISATTEKEEVFASEVALRQDITGLLADRLAFRRARRNRKTRYRAPRFNNRVRSKHKGWLAPSVENRIQAHMSRIEAVCRLLPVTKIVIETASFDIQKIRNPEVEGTGYQQGDQLGFWNVREYVLFRDGHICQHCRGRSKDPILNVHHLESRKTGGDAPNNLITLCETCHKAYHAGKIKLKVKRGQSFRAEAFMGIMRWTLLDRVRKAHPGLPVENTYGYLTKHTRITHGLPKTHCVDAYCIAGNLKAVRRGVYLHQRQMRKHNRQIHKFTVLSKRLEDGTKIGYRKLNQSPYLVHGFRLFDKVRCLGQIGFIFGRRSSGYFDVRRLDGVKLSPSISWRKLTLLEKRSTYLTELRKQDGASSPV

SEQ ID NO: 5483 - protein, 446 aa, Moorena sp.
LKCLSRTRGSLRFKEKTLKVFVINKRGKPLMPCKPAKARHLLRDGKARVVRRTPFTIQLTIATGENVQPIHLGVDAGSKHIGLSATTEKEELFSSEVELRKDITDLLSSRREMRRARRNRKTRYRAPRFDNRVHAKKGWLAPTLENKINAHLSRIKAIRAILPVSRITIEVASFDIQKIKNPEIEGEQYQQGEQLGFWNVREYVLFRDGHKCCHCHGKSKDPILNVHHIESRKTGGDAPNNLITLCEICHKAYHAGKIQLTAKRGKKFTDATHMGIMRWELLKRAKEANLGIPVKATFGYITKVRRIQFGIAKTHCADAFCIAGNFNAKRLGEYLYQKQTRKHNRQIHKMTILKGGYRKRNQAPFEVFNFRLFDKVRFGGNVGFVFGRRTSGSFAVRTLFGEKLSESVSYKKLSLLERRTTFLTQLVKEGAIPPVSKDTGFLARFQ

SEQ ID NO: 5484 - protein, 471 aa, Caldicellulosiruptor sp.; identical to SEQ ID NO: 3375

SEQ ID NO: 5485 - protein, 419 aa, Butyrivibrio sp.; identical to SEQ ID NO: 4426

SEQ ID NO: 5486 - protein, 300 aa, Anoxybacillus sp.
  SITE 300: note = misc_feature - Xaa can be any naturally occurring amino acid
MVFVLDTNKRPLAPCHGAVARKLLKQGKAAIYKRFPFTIILKKSVDESENETTYRLKIDYGSRHTGLAILRGQEVVWLGQLDHRTDIKERIDKRRAFRRARRNRKTRYRKPRFLNRKRKEGWLPSSLESRVQNIQTWVNRLKKLCPIGYISYENAKFDTQLMRNPEINGVEYQQGTLQGYEVREYLLEKFGRKCCYCGKENVPLEVEHIIPKSRGGTDRVDNLCLACHDCNQRKGSKTAEEFGYPHIQKQVKESLKDASAINSTRWKAYEVLKQTGLDVECGTGARTKMNRIRLDLPKTX

SEQ ID NO: 5487 - protein, 471 aa, Caldicellulosiruptor sp.; identical to SEQ ID NO: 4560

SEQ ID NO: 5488 - protein, 408 aa, Natranaerobius sp.
MVYVLAKNGKPLMPTKKHGKVRHLLKDGKAKIVKRTPFTIQLLYESDNYTQPVNLGVDAGTKHVGLSATTGNEVLFEGEAQLRTNIQELLSTRREARRARRNRKTRYRKPRFNNRKKPNGWLAPSIQNKVDTHLKLVDMVCSILPVSNIKVEVAQFDIHKIKNPEIEGEQYQQGEQLGFWNVREYVLYRDNHTCQYCRGKSKDSILNVHHIRSRQSHGDRPGNLVTLCETCHTKLHKESLENYFHPKDKGFKDESQFTILRWFIYNGIKEKYPDVNLTFGYITKNTRIKNNLPKSHAVDARCISGNPLAKPPVNTLYIKQVRKNNRQLHKFNPSKGGIRKANKAPYLVKGFRLFDKVLYNNRKCFIFGRRKSGYFDLRLLDGTKIHASASHKRLDLIESATSMLKEVS

SEQ ID NO: 5489 - protein, 443 aa, Caldicellulosiruptor sp.; identical to SEQ ID NO: 2385

SEQ ID NO: 5490 - protein, 428 aa, unidentified; identical to SEQ ID NO: 5036
  REGION 1..428: note = Human gut metagenome

SEQ ID NO: 5491 - protein, 500 aa, unidentified
  REGION 1..500: note = Human gut metagenome
MHYVYVQDKAGKPLMPTTRYGWVRRALKSGRAKPVTAVPFTIRLTYDPAAHETQPVTLGIDPGRTNIGLAAVTNTGKCLYSARCKTRNKEIPKFMATRRQHRQASRRGERLARKRLAKRLGTIMKSMLERMLPGCEKPVKVKDIINTEARFNNRKRPAGWLTPTATHLLRTHINLAKKIMSILPVTRIAIEMNRFAFMALENKGIRHWDYQKGPLYGYGSLHNAISEQQDGKCLLCRKRSIEHYHHIVPRRKNGSDTIGNIAGLCECCHDLVHKDTVAAEKLQSKKSGLNKKYHALSVLNQIIPYLAGELFQMFGENLFAVNGWDTKQFREDNCIQKGHDIDAYCIACSTLPDRTILDVPKHSFKILQFRRHNRANIHRQTERTYKLDGRTVACNRHKRTDQKEDSLAEWYETAVKEYGAREADAMRSRLTVTKSTRSYNTPGRLMPGTVFIFKGKRYVMSGQLTGGKYLRAVGEALQTRNFPVKKCDIVAENTGLVYAS

SEQ ID NO: 5492 - protein, 471 aa, Caldicellulosiruptor sp.; identical to SEQ ID NO: 3268

SEQ ID NO: 5493 - protein, 470 aa, unidentified; identical to SEQ ID NO: 2825
  REGION 1..470: note = Human gut metagenome

SEQ ID NO: 5494 - protein, 413 aa, unidentified; identical to SEQ ID NO: 2605
  REGION 1..413: note = Human gut metagenome

SEQ ID NO: 5495 - protein, 421 aa, unidentified; identical to SEQ ID NO: 4195
  REGION 1..421: note = Human gut metagenome

SEQ ID NO: 5496 - protein, 406 aa, unidentified
  REGION 1..406: note = Human gut metagenome
MVYVQDIDGKPMMPTTRHGKVRRLLKANKATVVNLCPFTIRLTYAISGYKQEIVLGVDAGTKHVGLSATTKSKELYSSEVILRSDIVELLSTRRESRRTRRNRLRYRKPRFENRVKSKRIGWVAPSVRHRIDAHIRIINNVCSILPVSRVIVEVAQFDTQKIKNPDISGNEYQEGDQLGFWNVREYVLARDGHKCQHCKGKSKDPILNIHHIESRKTGGDSPSNLITLCETCHKEFHKGNIKLKVKRGKSLRDAAVMGIMKWRLYDKLKSLYPNVKMTFGYITKHDRINHGIEKSYVSDAFVISRNFDSERLGYYYKLKLVRRHNRQIHKMKAPKGGNKRMNQSPFKVFGFRLFDKVMFQGKERFIYARRLRGLFNIRDINGENKKDISYKKLEYVSHGLISIVAG

SEQ ID NO: 5497 - protein, 417 aa, unidentified
  REGION 1..417: note = Human gut metagenome
MPCSPAKARLLLKEKKAIVKRRTPFTIQLTIATGEAKQPITLGVDSGYKHIGLSATTEKAELYASQVELRQDITDLLSARLALRRSRRSRKTRYRAPRFDNRVASKREGWLAPSVENRITAHMSRVEAVMRVLPVTAITVETAAFDTQLLKNPDIAEAAYQQGEQLGFWNVREYVLFRDGHVCQHCRGKYKDPILNVHHIESRRTGGDAPNNLITLCETCHKAFHRGEIKLKVKRGKSFKAETFMGIMRWTLFERLKKAHPELSVRNTYGYLTKHKRISHGIAKSHCADAYCIADNLGAKRLEGFFFQKQTRKHNRQIHKLSILKGGLRKKNQAPYEVKGFRLFDKVICKGEEAFIFGRRTSGSFDVRRLDGTRISAGISCKKLRLLEPRTTYLTEFRKEAALPPLHECSGSRAEFR

SEQ ID NO: 5498 - protein, 471 aa, Caldicellulosiruptor sp.; identical to SEQ ID NO: 3375

SEQ ID NO: 5499 - protein, 431 aa, unidentified
  REGION 1..431: note = Human gut metagenome
MPNKVYVINKHGRPLMPCSPAKARHLLDAGKAKVKKRTPFTIQLVYGSSGYTQEVILGVDAGSKTIGLSASAETEELLSAEVKPRNDVVDLLSTRREFRRARRNRKTRYRKPRFDNRVRSKHKGWLAPSVEVKIQEHITSIKRVCRILPVSKVVIETAEFDLQLLKAIADGKPVPQGEDYQKGEMYGHYNVRQYVLWRDDYTCQCCGAHATKKKEVRLHVHHLESRKVGGDAPDNQVTLCESCHEKLHKGLIAEKDFKKRKRRSTRDATFMGIMRKTLMQMLCSELPIPVIETRGYITKATREKLLVLPKSHTNDALAIAQGKQGFNVGYLPEIAQIDKICTIRPVRHHNRQLHKVTILKGGIRKSNQAEKYVFGYRLFDKVQFNGQDCFIWGRRTTGIFTIKTINGKMIKDGISFKKLKPVEKSTSYLIA

SEQ ID NO: 5500 - protein, 414 aa, unidentified
  REGION 1..414: note = Human gut metagenome
MPCSPAKARLLLKEKKAIVVRRTPFTIQLTIATGESKQPVSLGVDAGYKYVGLSASTEKAELYASEVELRQDITDLLSARRALRQSRRNRKTRHREPRFDNRIRTKRKGWLAPSVENRINAHLSRIEAVLRLLPVTKITVETASFNLQLLKNPDISGKEYQEGEQLGFWNVREYVLFRDGHVCQHCYGRSKDPVLNVHHLESRRTGGDSPGNLITLCETCHKALHRGDITLKAKRGKSFRAEAFMGIMRWEVLNRLKVSHPELEVNNTYGYRTKHARIANGIAKSHCADAFCIAGNLGAKRLGEFFFQKQTRRNNRQIHKLSILKHGLRKRNQALFEIKGFRLFDKVVCKGEEGFIFGRRSSGYFDVRKLDGTRISAGISYKTLHLLEKRQTYLTEIRKEEALPPLPEGRGLRA

SEQ ID NO: 5501 - protein, 429 aa, Moorena sp.; identical to SEQ ID NO: 3501

SEQ ID NO: 5502 - protein, 442 aa, unidentified; identical to SEQ ID NO: 2903
  REGION 1..442: note = Human gut metagenome

SEQ ID NO: 5503 - protein, 471 aa, Caldicellulosiruptor sp.; identical to SEQ ID NO: 3268

SEQ ID NO: 5504 - protein, 410 aa, unidentified
  REGION 1..410: note = Human gut metagenome
MVYVQNIEGKLMMPTTRHGKVRRLLKLKKAVVVNLCPFTIRLMYETTDYKQEIVLGVDAGTKHVGLSATTKSNELYASEVILRSDITDLLATRRELRSTRRSRLRYRKPRFNNRVKSKKEGWIAPSVSHKINAHTRVINQVYSILPISKIIIEVAQFDTQKIKNPDISGKDYQSGDQLGFWNVREYVLCRDGHKCQYCKGKSKDNILNVHHIESRKTGGDSPSNLITLCETCHKEYHKGNIDLKIKRGKSLRDASVMGIMKWVLYDKLRSIYPNVNMTFGYITKYNRINNGIEKSHVSDAFTISKNFCAKRLGFYYKRKLVRRHNRQIHKMKIQKGGKKKMNQSPFKVFGFRLFDKVMYQNDCYFIYGRRSSGFFNIRDIDGKNAKDVSYRKLKHISHGLNSIVIDCNRI

SEQ ID NO: 5505 - protein, 458 aa, Moorena sp.
LKGVGMMSEIKKVDYVYVVDSNGTPLMPTSRLGMVRRWLKTGQAKWFGNSRKTIQFVRPVTTNTQELTLGVDAGFHLGLSVVGNNREYYVAESLRKSEKDRITSRRELRRTRRNRLRYRKARFDNRRRKDSWLAPSIQHRLDFTIKEIKRLYMFLPITNLVVEVTPFDNQKLLNPDIQGWQYQKGKMYGFKTIKDYLLARDNYRDALDGKQYPASQLRVHHLVQRKDGGSNQPDNLVLLSDINHNQANHNNGILAKLRENRQKTLDYRGAYFMSILATRLSNYFDNYTITQGYLTANLRQKYEIEKSHLNDAFVIAGGTDITLRTNNVYSRQKLRNNNRVLQKFYDAKYIDSRDGKQKAGKELSSGRTRRSQELNYDNLRQFRKEKVKKGRVSIRKGHYQLRPHDVVLNTRTNRIETVKGVQNSGTVIKFQTGKTCSIKSVISLYHVNGILEKKMESI

SEQ ID NO: 5506 - protein, 496 aa, Streptomyces sp.; identical to SEQ ID NO: 4777

SEQ ID NO: 5507 - protein, 346 aa, unidentified
  REGION 1..346: note = Human gut metagenome
LYSQSKIAQSAQEYGVCRGGIENRRSRRNRKTRYRPPRFDNRVHSKHKGWLAPSVEVKIQEHITVIKRICRILPITLVRVETAEFDTQRLKAMLEGKPLPVGTDYQLGEMYDEYNVRQYVLKRDNYTCQCCGAHTTAKKAVKLHVHHLESRKMGGNAPGNLITLCITCHDALHKGKVSLDNKKRGKPMRDAAFMGIMRRTLMSRLREELPITVQGTYGYITKMQREQNDIKKSHVNDARCISKHPLAEPCSVCYRTKAIRHHNRQTHKANFSKGGIRKRSQMPYVVEGYRLWDKVLYKGQECFVSGRRTSGSFTLKKLDGTRISKGVTFKKLRLLEPTTNYLIERM

SEQ ID NO: 5508 - protein, 431 aa, Klebsiella sp.; identical to SEQ ID NO: 2435

SEQ ID NO: 5509 - protein, 517 aa, Leptospirillum sp.
MLPQSRALEAADADNREGQDETVGGKGAIPKPVANIPEGRRFERSALRPQGQNNVRFDGGFVQVFVLDKKKKPLMPCHPARARELLREGRAVVHRIAPFTIRLKGRIGGETQPIRVKLDPGSKTTGLAVVREEETDGEKTAHVLFQAEIHHRGSAIKKKLDQRRAFRRRRRSQLRYRTPRFDNRTRPDGWLPPSLRHRVDTTLAWVERLRRLVPVSELSQELVRFDMQKIENPEISGVEYQQGTLAGYEVREYLLEKWGRTCAYCGSENVPLEIDHIHPRSLGGSDRVSNLTLACRSCNLKKGNRPVGEFLAKTPERLSTILARAKAPLKDAAAVNTTRWALFQALKATGLPVETASGGRTKYNRTRLGIPKGHSLDAACVGKVDRIEGWNRPCLSVKATGRGSYQRTRLDSFGFPRGFLTRTKAHFGFQTGDRVRAIVTKGKKTGTYAGRVAVRSSGSFNIQTGSGVVQGISYKDCRLLQRADGYGYSIHPITEKGEAGEALSLPGMNAGVSRARG

SEQ ID NO: 5510 - protein, 414 aa, unidentified
  REGION 1..414: note = Human gut metagenome
MVYVINKQGQALMPTERFGKVRRLLKNSLAHVVCRIPFTIQLDYDTTDYTQPVSLGVDADSKHIGISATTSEKELYAADVELRNDIVDKLSTRRELRRTRRSRLRYRKARFNNRVSSKRKGWLAPSVENKIQTHLTVVEKIHKFLPITNIVVETASFDIQKINNPSISGVEYQQGEQLDFFNVREYVLFRDNHTCQHCKGKSKDKVLNVHHIESRKTGGDSPNNLITLCETCHKAYHRGEFELNVKRGKSFRDSAFMGIMRWSFYDRLKNIYPNVSMTFGYITKNTRITNNLPKEHYVDARCISGNPTAKPLGYYFYQKKVRCQNRQIHKANFLKGGRKKLNQAPFLVKGFRLFDLVEYKKELYYIFGRRSSGSFDIRKLDGTKVNKGSINCKYLRLVDKRKSILIEKRMQVNL

SEQ ID NO: 5511 - protein, 430 aa, unidentified
  REGION 1..430: note = Human gut metagenome
MPNKVYVINKHGRPLMPCSPAKARHLLDEGKAKIKKRTPFTIQLLFGSTGYTQEVILGVDAGSKTIGLSASAETEELLSAEVKPRNDVVDLLSTRREFRRARRNRKTRYRKPRFDNRVRSKHKGWLAPSVEVKIQEHITSIKRVCRILPVSKVVIETAEFDLQLLKAIADGKPVPQGEDYQKGEMYGHYNVRQYVLWRDDYTCQCCGAHATKKKEVRLHVYHLESRKVGGDAPDNQVTLCESCHEKLHKGLIAEKDFKKRKRRSTRDVTFMGIMRKTLMQRLCSELPIPVVETRGYITKATREKLLVLPKSHINDALAIAQGKHGFNVGYLPGILQIDKIYTIRPVRHHNRQLHKAAILTGGIRKSNQTEKYVFGYRLFDKVQFNGQDCFIWGRTTGIFTIKTINGKMIKDGISFKKLKLVEKSTSYLIA

SEQ ID NO: 5512 - protein, 429 aa, unidentified
  REGION 1..429: note = Human metagenome
MLVYVVDKNGQPLMPTHNGAKVRVLLKQRRAKVVSKCPFTIKLLYESASFTQPLTLGVDTGSKYVGSAVINDITSEVVYESQTELRDDIKKKMERRKAFRRSRRNKLRYRPSRFNDRKASKRKNHYSPTLISKFQGHTREIKFIKSILPVADVILEVGEFDPQLLQDPTLVFHKWDYANGELYQQENFKQATRARDNYTCQCCGKKDCRLEVHHLIPRSRGGSDKLANLITICSDCHQLAHSSEEQLLLFQRKFGKKAKGTLRYATQMNILRSMLQKEYPDAELTYGFITKEVRRIFKLEKTHTIDACVIASRGTLFRNNNSNKYKKKCVPKGDYVRTSVSHRKFIVLPKRKIAGFRRYDKVLYNNKEYFVVGRMSTGHVYLIDIDNNRVQIERTKRSTSEKYVSKAKIKISLIKKVASARGYICVRIF

SEQ ID NO: 5513 - protein, 420 aa, unidentified
  REGION 1..420: note = Human gut metagenome
MQYVYVLSKHGEPMMPCSPGKARLLLKQQKACVVRRTPFTIKLLYGSAGYKQPITLGVDAGSKHVGLSASTEKRELYREEFTPRNDVVELLSTRRQNRRSRRNRKTRYRAPRFDNRVHSKHKGWLAPSVEVKIQEHITIIKRICKILPISLVRVETAEFDTQRLKAMLAGKPLPVGTDYQLGEMYDEYNVRQYVLKRDHYTCQCCGTHNTAKKVVKLHVHHLESRKTGGNAPSNLVTLCTTCHKNLHKGRVTLDGKERGKPLRDAAFMGIMRKTLMVRLKEELPIPVQGTYGYITKMRREQNDIKKSHTNDARCISKHPLAEPCSVCYRTKAIRHHNRQTHKANFSKKGIRKRSQMPYLVEGYRLWDKVLYKEQECFVSGRRSSGSFTLKKLDGTSISKGVTFKKLRLLEPATNYLIERM

SEQ ID NO: 5514 - protein, 412 aa, unidentified
  REGION 1..412: note = gut metagenome
MFVDMVYVQDINGKPLMPTTRHGKVRRLLKDKKAVVVNLCPFTIKLTYVTSDYKQEIVLGVDAGTKHVGLSATTKSKELYSSEVILRNDIVDLLSTRRELRRSRRNRLRYRKPRFDNRIKSKRPGWVAPSVKYKVDAHIRVIDNVCSILPISRIVIEVAQFDTQKINNPNISGKEYQEGDQLGFWNVREYVLARDGHKCQHCKGKSKDPVLNVHHIESRKTGGDSPSNLITLCETCHKEYHKGNIDLKIRRGKSLRDAAVMGIMKWRLYEELKSKYDNVSMTFGYVTKYNRIKHGIEKSHVFDAFVISKNFDAIRLGYYYKVRLVRRHNRQIHKQKIPKGGIKRLNQSPFEVFGFRLFDRVMFENSYYFIFARRKTGSFNIRDIDGKNQRDITYKKLKLSRCKRFMVQKEMD

SEQ ID NO: 5515 - protein, 415 aa, Bacillus sp.; identical to SEQ ID NO: 2431

SEQ ID NO: 5516 - protein, 406 aa, unidentified
  REGION 1..406: note = metagenome
MVYVQDINGKPMMPTTRHGKVRRLLKDKKAVVVNLCPFTIKLMYVTSDYKQEIVLGVDAGTKHVGLSATTKSKELYSSEVILRNDIVDLLSTRRELRKARRNRLRYRKPRFDNRVKSKRPGWIAPSVKYKVDAHICVINNVCSILPISRIVIEVAQFDTQKIKNPEISGKEYQEGDQLEFWNTREYVLARDGHKCQYCKGKSKDSILNVHHIESRKTGGDSPSNLITLCETCHKEYHKGNIDLKIRRGKSLRDAAVMGIMKWRLYEELKSRYDRVFMTFGYITKHNRIKYGIEKSHTSDAFVISKNINAKRIERQYLKRLIRRHNRQIHKMKILKGGKKKNNQAPFEVFGFRLFDRVLYNNKIFFVYGRRKSGSFNIRDFNGENSKDVSRKKFKLIRGKRHPIILK

SEQ ID NO: 5517 - protein, 415 aa, Bacillus sp.
MRVFVKNLRGEPLMPCSSRKARLLLKQGKAMIVGYTPFTIQLQYATGETVQPVTIGVDSGAKHIGIAITTEDKVLAKGTIELRQDVKENLTLRATLRRGRRQRKTRYRKARFLNRKKKEGWLPPSIQSRVDNQVHWIETFCSLLPSPKVIVEVGKFDVQKLKNPDIQGTEYQQGDAFGFWNTRYYVFARDNYTCQICKKKGGILHTHHIIERCKGGSDMEDNLVTVHDECHQKFHQGKLKHTFKKPKQYKETAFMNILRLQIMNHLDCDITYGSYTTLKRRGLDLSKTHVNDAIAITNPTHIQEYDQSGEFCIKQFRKKKRSLHEATARKGRETKNTNVKRNKKNTPYVDGIYLGDKVKVFGQVGFVAGFTGKMVYVQDIHGQYIQNPAKSYKQVKVSDIERIHHTNNWKFLQIS

SEQ ID NO: 5518 - protein, 431 aa, Calothrix sp.
MEGHMSKIFLLDTNQQPLNPIHPAQARQLLKNKKAAIWRRFPFTLILKEAKPEVEVQPLRLKLDPGAKTTGLTLVNDTTGEVVFAAEIQHRGFQIREALTSRRQLRRGRRNRKIRYRAPRFNNRRRKEGWIPPSLQSRIDNIITWVKRLQKIANISDISQELVRFDMQKMENPEISGIEYQQGTLAGYETRQYLLEKWGRKCAYCGVEHVPLQVEHIHAKAKGGSNRISNLTLTCQKCNLKKGTKDIKDFLNKEPQKLELILKQAKKPLASAAAVNTTRFTLLNALKKAGLPVETGSGGLTQFNRTNQGLEKAHWVDAACVGESTPKLIIKGIKPLIITAKGHGTRQMCRTDKYGFPSRYVPRNKYVYGFQTGDIVKAVVTKGKKVGIYIGRVAVRTTGSFNILTKIGLVQGVSYKNCKSVHKKDGYSYAY

SEQ ID NO: 5519 - protein, 501 aa, Streptomyces sp.
MTTFSAGEQTHQAVLPQQPALESVRADTPGSRDETAHGHPATKRGTGREHGRGETGGRGARARQRHAKSTASAAQAAESGSGDAPPGDQLHEGGIGVGRVFVLSKERQPLMPCHPARARELLTEGRAVVARQTPFTIRLKDRTRAESEVDGVQLRIDPGSKGTGLALTDEKKETDQHGTTVTVRRGLISVELQHRADQISARMRQRAGYRNRRRSANLRYRARRSLNRKQRPDWLPPSLRHRVVTEIHIEQVAFDTHSMSADRPLRGAEYEQGPLAGTNARAYLRAKWNKACAYCDATGVPLNIEHLRPRGRGGSSRISNLVPACVPCNRAKGTQSLEAFLSHRPDRLAEILQQLKTPLTDAAAMNAIGQQLTAALDTLGTLIHAWPGRLTKMNRVAMGPAKTHTLDALSVGPLDHTAGCKIVRFPSHVLVAKATGRGSYARTTPDRYGFPRLLRSTAKQHFGYVTGDLAGRRVWLQQAARGISVNFSEKHLSPGKQVLRV

SEQ ID NO: 5520 - protein, 417 aa, unidentified
  REGION 1..417: note = Human gut metagenome
MPCSPAKARLLLKEKKAIVKRRTPFTIQLTIATGEAKQPVTLGVDSGYKHIGLSATTEKAELYASQVELRQDITDLLSARLALRRSRRSRKTRYRAPRFNNRVASKRKGWLAPSVENRIAAHMSRVEAVMRVLPVTAITVETAAFDTQLLKNPDIAGAAYQQGEQLGFWNVREYVLFRDGHVCQHCRGKSKDPILNVHHIESRRTGGDAPNNLITLCETCHKAFHRGEIELKVRRGKSFKAETFMGIMRWTLFERLKKAHPELRVRNTYGYLTKHKRISHGIAKSHCADAYCIADNLGAKRLSGYLFQKQTRKHNRQLHKLSILKGGLRKKNQAPYEVKGFRLFDKVICKGEEAFIFGRRTSGSFDVRRLDGTRISAGINYKKLRLLEPRTTYLTEFRKEAALPPLHKCRGFRAEFL

SEQ ID NO: 5521 - protein, 429 aa, unidentified
  REGION 1..429: note = Ga0315294_10056449
MLVYVVNKEGKPLMPCSPTKASKLLKSGKAKIHKYEPFTIQLLFGSSGYKQPITLGVDSGSKNVGIVAVTEEGKVLYTAEVELRRNIKELLDTRRMLRQNRRQRKTRYRKSRFLNRKREDGWLPPSIRSRIFSHVKLVIDVTKILPIKDIVVEVGLFDVQALMNPNIEGKEYQEGLLKGYDSVKEYVKVRDKYVCHYKDLRTDILCSKKLEVDHIIPKSKSGADRPTNLVCSCSEHNRIKGNMSYKEFTGKSRPIMESFKETAFMNVVKSHLVPLLRKLKPVTITYGYLTRLVRISFGLEKSHMNDSLAITNIKPKEYIGNSYRIKQVRKKKRSLHQMTPYYSKKGNPLSERWKKNTKEIIVRGKKWCLRDKVKVENRVGFISGFSSPQLDVSDIKGNIVRVFGRTSDSISTKYAQLICRNNNWQCCLV

SEQ ID NO: 5522 - protein, 487 aa, unidentified
  REGION 1..487: note = Human gut metagenome
MHNIGEVDHRTQVLPYSFITIVRKECSVMSNSICVISKNGERLMPTFRPGRVRHLLKDGKAKIVKHQPFTIQLLYDSNNYTQPIEICEDVGYNYIGISVKSTTHEYVSAQYDTLQDEKEHHDSCSKYRRTRRNKLRYRKARFNNRKRKEGWLAPSLEHKKQLNINLIEWYMSVIPITHTTVEVGSFDTMLLQAIQKGEAKPEGTDYQQGPRYNLATLREAVFYRDNYTCAVCGRSSMKDGAILHMHHMLYWKGRHGYQLDELVTVCEKCHTSPNHQKSGVLFGFGENKKFANLSGAAFMNAVRWQIVNALYATYGKDFVTVTYGAMTKERRILLGIEKTHNNDAYAMGDYHPAHRCEFKHYQKRRRNNRVLEKFYDATYIDARTGNKAKGKELFNGRINRNHKKDSENLHKYRARKTAKGRRSIRNKRYTIQSGDTILYAGKKHITSGCFNKGSWLRISVNGTVKSIAVSKVKLINHIGAWKEDTSI

SEQ ID NO: 5523 - protein, 458 aa, unidentified
  REGION 1..458: note = Human gut metagenome
LTKDENRPSGRTTGLRAEQAEPAGIRKGDTLKVFVLNMRGKPLMPCSPAKARHMLKAGKAVVVRRTPFTIKLTIATGETKQDVTLGVDAGARHVGISATTEKEEVFASEVALRQDITGLLADRLAFRRARRNRKTRYRAPRFNNRVRSKHKGWLAPSVENRIQAHISRIEAVCRLLPVTKIVIETASFDIQKIRNPEVEGTGYQQGDQLGFWNVREYVLFRDGHICQHCRGRSKDPILNVHHLESRKTGGDAPNNLITLCETCHKAYHAGKIKLKVKRGQSFRAEAFMGIMRWTLLDRVRKAHPGLPVENTCGYLTKNTRITLGLPKAHCVDAYCIAGNLKAVRRGVHLYQRQVRKHNRQIHKCTVLSKTLKDGTKIGYRKLNQTPHLVKNFRLFDKVRCLGQTGFIFGRRSSGYFDVRRLDGVKLSPSISWRKLTLLEKRSTYLTELRKQDGASSPV

SEQ ID NO: 5524 - protein, 456 aa, unidentified
  REGION 1..456: note = Human gut metagenome
MSTCVCVLSNSGERLMPTFRLGKVRHLLKDGKAKIVKHHPFTIQLLYDSKTNTQPIETCEDVGYNYIGISVKSESHEYVSAQYDTLQDEKEHHDDCRKYRRTRRNRLRYRKSRFDNRKRDKGWLAPSLEHKKQLNISLIERYVSVIPITHVTVEVGSFDTMLVKAIQEGKVIPEGADYQKGPRYNLATLREAVFYRDNYVCKVCGRKATEGAILHMHHMFYWKGRHGYQLDELVTVCEKCHTPANHQKGGKLYGFGKDKKFANLSGAAFMNAVRWQIVNALYATYGKEFVTITYGAMTKEKRIALQLEKTHNNDAYAMGDYHPARRCKFRHYQKRRRNNRVLEKFYDATYVDTRTGNKAKGKELFNGRISRNHKKDCENLHKYRSKKVSKGRRSIRRQHYAIQPYDTVRLEGKTYITSGCHNKGTRLLIPVNGKSKSVAISKVQVVCHAGAWIQII

SEQ ID NO: 5525 - protein, 512 aa, unidentified
  REGION 1..512: note = Human gut metagenome
MSTVYVLNKDGKPLMPTTRGGHVRHLLKEQKARVVRTKPFTIQLLYETDDVVQLLYLGIDPGRTNIGVAVVKTDGTAVFTAHLETRNKEIPKLMKKRKNSRRARRTNGRRCRRQRRAKANGTISKKCVKQDTAQNGSVSKRAKKIGVIKRHLPGCEKEVLCIGIKNKEAKFSNRVRPEGWLTPTANQLLQTHINLVKKIQKFLPISDVVLEVNKFAFMQLDNPNIQKWQYQQGPLYQKANLEETVSEMQEHHCLFCKKKIDHYHHVVPQHKNGSNTIDNIIGLCTQHHDLVHKDATWQKRLAKKKTGLNKKYGALSVLNQIIPALTKELSSLFPKRFFVTNGKSTYDYRAAHGVSKDHWLDAYCIACSVLPNDTCDKTINSRVPYELKQFRRHDRRALNNENMSRVYTFNGKMVATNRHKATEQTTDSLEEFRQRQPNDVCNLKVKEHHPTYRNMNRNYPGSVFLVGNQVHVMQGIAGSKDGEATTYKDTNANSIAAGKCKFVAKNSGILFV

SEQ ID NO: 5526 - protein, 416 aa, unidentified
  REGION 1..416: note = Human gut metagenome
MLMAVAVVSRTGVPLMPTSPYRARKLLASGKAEKYGYDPFTIRLTERETGDTQPAELCMDTGYIHIGVSVKSEKHEYLALQIDTLTDEKKKHEKCREKRRNRRSRKGYRKPRFDNRKRDKGWLAPSLEHKKEIHVRAAERICRVVPVTDITMEMGNFDTQVLKAREEGRPLPQGTDYQQGERYGTATLREAVFSRDNYTCLCCGRTMKDGAYFHVHHIRYRSQGGTDRMANLATVCEKCHTPANHQPGGKLYNWKPEIKSFKGATFMTAVRWQMYREIKEKIPDVSIHLTYGAATKERRRALDIEKSHVNDAFVMGRFHPGHRARPELYLKKRRNNRVLESFYDARYIDSRDGKRKSGKELFNGRISRNHKKDSENLHRYRKKKVSRGKRTIRVQRYKIQPHDIVLFEGRKHETSG

SEQ ID NO: 5527 - protein, 369 aa, unidentified
  REGION 1..369: note = Human gut metagenome
MKEIPEKEICQDEIRCGIDDGGLHVGIALVQKCKTKNKVVFKGTMEQRNDVKHLMEVRRGYRRYHRYHKRYRQARFDNRKSSKREGRIAPSILQKRQATIRVIHWLNKWINITNYWLEDVSVDIRALTDGYQSYRWQYQKSNRLDENIRKAAILRDGGKCMECGKSNCRLEVHHIKPRRRNGSNTLDNLITLCESCHQKTEGQEELYMDRYFSLLKSSDNKNLNYAQHVMIGKMWLRKQLSGLGVLYLTSGGDTANKRIDWNIEKSHANDAVCITDLRPDTCDVKEWTMKPMRRQSKAKTDHVLGIHHRDLVEYTFKNGETHRGYVTALYPEQKAINFQSPTKHCKKVNARKCKLLWKYSKIYWFENAS

SEQ ID NO: 5528 - protein, 529 aa, unidentified
  REGION 1..529: note = Human gut metagenome
MSTIYVLNKDGKPLMPTTRGGHVRHLLKEQKARVVRTKPFTIQLLYETNDVVQPLYLGIDPGRTNIGVAVVKTDGTAVFTAHLETRNKEIPKLMKKRKESRRARRTNGRRCRRQRRAKANDTISKKCVKQPTAQNGSISKRAKEIGIIKRRLPGCEKDVLCIGIKNKEARFNNRTRPEGWLTPTANQLLQTHINLVKKIQKFLPISDVVLEVNKFAFMQLDNPNIQKWQYQQGPLYKKESLERAVSEMQEHHCLFCDKPIDHYHHVVPQSENGSNTIANIVGLCAEHHNLVHKDAAWQKKLAEEKVGLNKKYGALSVLNQIIPALTKELSFLFPEHSFVTNGKSTYDYRATHGVSKDHWLDAYCIACSVLPSDVCDSNINNHMPYELKQFRRHDRRVLHKANTSRVYTLNGKKVATNRHKAAKQTADSLEEFRQSHPDDVCKLKVKEHHPAYRNLNRNYPGSVFFVGKQVHVMQGIASSKDGKATKYNDTSATTIAAGKCEFVAKNSGILFVQCKFRKVFSDETTKKLQ

SEQ ID NO: 5529 - protein, 359 aa, unidentified
  REGION 1..359: note = Human gut metagenome
METSYSKSLYTKRRRKKGAKRYWKKLKVQFSSPRPEGWLPPSLQSKTDHHIRWIHRFLDVLPKNTRMVLEVGRFDAARMKNPEVHGELYQRGPQYDYENVKAYVFDRDSYKCRRCHAKAGTRRKDGTVVKLIAHHIDYRSRGASDNPDALASVCDACHTAANHQPGGVLYDWMIKNKRFRRGQRDTAFMNILRRRLFEAFPDAEYTYGNITAARRKELMLPKSHADDAIAIACTGMDISSIRKRPDHVVYVQQVRKKKRSLHEANPRKWSKTKNRFAVRNSKNTKEVNGVCLFDKVKVPGKGYGWVTGFTGTSCYVLDRNGNYVTTADTYNQVAISRLKVIQHSGNWISGLKCPIGNGS

SEQ ID NO: 5530 - protein, 431 aa, unidentified; identical to SEQ ID NO: 3235
  REGION 1..431: note = Human gut metagenome

SEQ ID NO: 5531 - protein, 478 aa, Moorena sp.
MWLNSSERKEQCCIHGNLGITLGKDSYSLRRGQFCLSLTVTTTRKETTSMYVYVLSQHGEPLMPCSPRKARTMLRDHKATVVRRTPFTIRLLHGCSGYTQRITLGVDAGSKFIGLSACTESKELFAAEVKPRNDVVDLLSTRRELRRSRRNRKTRYRVARFDNRVHSKHKGWLAPSVEVKIQEHITAIKRTCAILPISMVIVETAEFDTQRLKAMLEGKPLPVGTDYQLGEMYDEYNVRQYVLKRDNYTCQCCGIQSTDKAPVKFAVHHKESRHVGGNAPNNLITLCEKCHRLLHAGVITLDEDKRKRGKSFRDAAFMGIMRKTLIQRLRSELSVPAKETYGYITKLLRETHSIQKSHVNDARCIARVPDAKPSDTLYRIRAVRHHNRQLHKTNPIKGGIRKRNQAPYEVFGFHLWDKVLFNGQECFITGRRASGYFALKDFDGKKIHASASYKVLSVVETATSYLIERCIRKPMAAR

SEQ ID NO: 5532 - protein, 333 aa, Bacillus sp.
MLVFVQNQHGEALMPCKPQKATKLLKRKKARIVSYKPFTIQLLYGSSGYKQPIKVGVDLGAKHTGVAVTTNDKVLAKGEIEVRQDSKSLLETRRTYRRSRRNRKCRYRKPRFDNRKRQEEWLPPSVQSRLYNTFHWIDTFLSLAPHSMLTIEVGKFDIQKMINPEIQGEEYQQGQILGYHDVRYFVFARDQYTCQVCKKKGGILNTHHIVYRSHGGSDRADNLLTVCTDCHTHENHQMGAILWKWMVEGKKLPTFKEGTFMNIFRKRVFTKYPQANMTYGSVTTPRRKELGLDKTHANDAIAISGIQSIKSIEITYPIPQIWRRTGHCWSHFK

SEQ ID NO: 5533 - protein, 415 aa, Bacillus sp.
MRVFVKNLRGEPLMPCSNRKARLLLKQGKAKIIGYTPFTIQLQYATGETVQSVAIGVDSGSKYVGIAITTEDKVLAKGTIELRQDVKENLTLRATLRRSRRQRKTRYRKARFLNRKKREGWLPPSIQSRMHNQIHWIEIFRSLLPSPKVIVEVGKFDAQKLKNSDIQGKEYQQGDAFGFWNTRYYVFTRDHYTCQICKKKGGILHTHHIIERCSGGSDLADNLVTVHEECHQKFHQGTIKHIFKKPKQYKETAFMNILRLQIMNRLGCEITYGSYTAPKRKELRLSKTHYNDAIAITTPTKLQEYEQSGEFRIKQFRKKKRSLHESTARKGRKTKNTTAKRNNKNTPKVHGIYLGDKVKVFGQVGFVTGFTGKMMYVQDIDGHYLQNPSKSYKQVKISDIECIHHNNNWLFLQIS

SEQ ID NO: 5534 - protein, 464 aa, Moorena sp.
MTPRSELQPLALSPIIKTKAKRVVGKTQAIATLSRNTLPILRHLTMQNYVFVVDTNKQPLNPISPKKARRLLDKGKAAVFRMYPFTIILKTAVDNPTISPCQIKIDPGSKVTGFALVQNHQVIWGMELEHRGGLIKKKLESRRAVRRGRRNRNTRYRKPRFLNRRRPGGWLAPSLEHRVLTIETWVKRLTKFCPVDEIWIERVKFNTQKIQNPEINGVEYQQGELAGYEVREYLLEKWGRECTYCGKKSVPLQIEHIRPKSKGGSDRVSNLCLACEKCNQRKGNKPIEEFIKKKPNLLQKIKTKAKQPLLDAAAVNTTRNKLVKVLQRIKPVITGTGAQTKYNRTKLGFPKEHWIDAACVGNIETLVLKTSQPLLVTCKGQGGRQKAVLNKHGYPIRHNPLRPIKGWCSGDIAKNLLTGKFGRVNPRSKSNSFNYTVPRKKAISLHVKNLTRVHRKDGYTYGFC

SEQ ID NO: 5535 - protein, 442 aa, Lactobacillus sp.; identical to SEQ ID NO: 3826

SEQ ID NO: 5536 - protein, 451 aa, Moorena sp.; identical to SEQ ID NO: 3199

SEQ ID NO: 5537 - protein, 431 aa, unidentified
  REGION 1..431: note = Human gut metagenome
MPNKVYVINKHGRPLMPCSPAKARHLLDAGKAKVKKRTPFTIQLIYGSSGYTQEVILGVDAGSKTIGMSASTTKEELLSAEVKPRNDVVDLLSTRREFRRARRNRKTRYRKPRFDNRVRSKHKGWLAPSVEVKIQEHIIAIRCVCGILPVSKVVIETAEFDLQLLKAIADGKPVPQGEDYQKGEMYGHYNVRQYLLWRDGYTCKCCGAHTTKKKEVRLHVHHLESRKVGGDAPDNQVTLCESCHEKLHKGLIAEKDFKKRKRKSTRDATFMGIMRKTLMQRLCSELPIPVIETRGYITKATREKLLVLPKSHTNDALAIAQGKQGFNVGYLPGIIQIDKIYTIRSVRHHNRQLHKATILKGGIRKSNQAGKYVFGYRLFDKVQFNGQDCFIWGRRTTGIFTIKTINGKMIKDGISFKKLKPVEKSTSYLIA

SEQ ID NO: 5538 - protein, 412 aa, Eubacterium cellulosolvens; identical to SEQ ID NO: 4755

SEQ ID NO: 5539 - protein, 471 aa, Caldicellulosiruptor sp.; identical to SEQ ID NO: 4560

SEQ ID NO: 5540 - protein, 426 aa, unidentified; identical to SEQ ID NO: 3614
  REGION 1..426: note = Human gut metagenome

SEQ ID NO: 5541 - protein, 452 aa, unidentified
  REGION 1..452: note = Ga0315294_10029339
MSKQTLQREFQNVPTGAPLACSPTSTPLNRDERTSVANKVLSCNNPEVGLRKRVSGRKVIVPVLSINGSPLMPCTPAKARHLLERGKAKVVSLNPFAIKLTFECENKVQEVSLGIDSGYKYIGFSAITKIKEVISGEIGLDDKTSKRLTERKMYRGNRRSRLRYRKPRFDNRKTPKGWLPPSVQRKFDTHLNMVSKLKRLTPAKRVTIEIGAFDIQKLMEPEISGKEYQQGDLYGHNNLKAFLFSREHGKCQLCDKEIVKGEKAHMHHIIPRSETGTDRPSNIALLHEDCHDKLHKKSLYKKLKAPKQYKAETFMSIVADKFKEILNCDVTYGYETATKRNLLGIEKSHVNDAFVIAGGTNQKRCLPYKVEQKRVNNRTLQTNRKGFIPSIRKKRHEIQNRDFVWIGGKKYLCGGVFSKGRQIYYFDDIERKTICYKKVSRFFSTGSLMWMN

SEQ ID NO: 5542 - protein, 460 aa, Methanohalobium sp.
LSKGDGLQDRVTCTIAERGVISMVFVLNKNKKFLTPCHPAKARILLKARKATIHKKYPFTIRLKELKSDDIKDDFRLKIDYGSKHTGLAILKNNKDVIWLAQIHHRTDIKKKLDDRRSFRRRRRSKNLRYRKPRFDNRKKPKGWLPPSLQSRVDNIQTWVRKLMKLIPINSISYENIKFDTQLMQNPEIKGVEYQQGTLKGYEVREYLLEKFQRTCAYCDKQNVQLEVEHIVPRSRGGSDRVSNLTIACHDCNQRKSNLTAEEFGYPEVHEKARKSLKDAAVINATKWKVLDVLKNTGLPVECGTGALTKMNRIKLNLPKDHHFDACCVGESTPDELRFKTNSVLHIHAKGRGSYKRCKLDKYGFPRKPAPRIKYIFGFQSGDIIKAIVENGKYKGTWKGAVTCRSKGYFDIKNGTKRIAQGINHKYFKLVQRFDGYTYQLDRLNLNSNTNTDGRNSSHC

SEQ ID NO: 5543 - protein, 443 aa, Caldicellulosiruptor sp.; identical to SEQ ID NO: 2385

SEQ ID NO: 5544 - protein, 426 aa, Bacillus sp.
MVVFIKNKHGEPLMPCSHRKARLLLKEKKAKVLTYKPFTIQLLYGSYGYKQKVYVGVDLGAKHLGLAITSEDKVLIKGEIELRQDVKSLLDTRRIYRCSRRNRKNRYRKPRFQNRTRPEGWLPPSIQSRIENTFFWIDKFCSLVPNPKLTIEVGKFDSQKMLNPDIQGVEYQQGQTHGYYDVRYFVLARDNYTCQVCRKKNKIFNTHHIVYRSHGGTDRADNLITVCMDCHTYENHQKGSILYKWMMEGKKLPRYKEGAFMNIVRRRVFTNYSHAKFTYGSTTTPKRKELGLEKSHANDAIAISGISTINKHTCSMFKIKQFRKKKRSLHEATARKGRKTKNITSKRNEKNTKQLKSFSLNDKVRAFRRIGFITGFTGTSGAYVKMIDGEYITMPNKNYKQIHLNQLERICRNNNWQFIQSLQDNA

SEQ ID NO: 5545 - protein, 312 aa, Methanohalobium sp.
MRVFVISKNKKPLMPTRPAKARRLLQSGKAKVIRRTPFSIKLLYETTEYTQPVVAGMDSGSKHIGCAAVANDEVLYQSEVELIDDISKKLQQRASYRRNRRSRKTRYRKPRFNNRGNSKKDERIAPSIKSKVQSHERERRFVESILPVKKWIVETASFDIHKITNPNVSGTGYQNGDLKGYYNIRTYVLHRDNYTCQKCKNRSKDPKLECHHIVFRSNGGTDRPDNLITLCETCHGKLHDGEFTINKKPSNTKHPTEMGIVRSQIRKLNWKFQETFGYITKYKREQKLNLEKTHYNDAVAICCNENNPNPNI

SEQ ID NO: 5546 - protein, 442 aa, unidentified
  REGION 1..442: note = Human gut metagenome
MSTSVFVLDKKHRPLMPCRPARARRLLRAGRARVVKRFPFVIRLVDRTVEQSEVQPVLIKLDPGSRETGAAVVRDDGKKRHHALAFFVIKHRGGAIRDALKARSAFRRRRRSQNFRCRSPRFLNRVKPKGWLPPSLRHRVETTLSFVRRMCRYLPVSGIAAELVKFDSQKLQTPEVSGIEYQQGTLFEYEVREYLLEKFGRKCVYCGAEGVPLNIDHVVPRAKGGSNRVSNLVLACVSCNQKKGARSLEDFLKGKPEVLARVRRELKTPLRDAAAVNATRWVLFNELKATGLPVETGSGALTKLNRHAFGVEKEHWLDALCVGRLNGVVTRKGLNVLEIRCMGRGSRQRTRLTKYGFPRGYLMRQKCVHGFATGDMVEANVPKGKKAGLWRGRVAVRVSGSFNIQTPKGVIQGVGWKHCRLISHNDGYGYAWLGHAPHSSPA

SEQ ID NO: 5547 - protein, 471 aa, Caldicellulosiruptor sp.; identical to SEQ ID NO: 3375

SEQ ID NO: 5548 - protein, 507 aa, unidentified
  REGION 1..507: note = Human gut metagenome
MPEYIYVLGIDGKPQMPTKRRRHVQKLLNTGKARIAEHVPFTIQLLYENEPVLQSVVMSEDPGRTNIGAAVVDLNGKLLFSAVVETRNKEIKKLMSDRKAYRRASRNGERKARQRLAKRFHTMLKAGLLMRKLPTYGDEKYITCNYIRNTEARFCNRRRSKGWVTPTVEHLIRTHINLIHKIQNYLPITDVAIEVNRFAFMLLEDPSITGIDFHNGPLKGFDNVNAAVADMQHGKCLLCGKPINQYHHIIPQSKGGSNTLKNLAGLCKECHVAVHTDEKTSKRLQSKKDGLMKQYTALSAINQAIPFICQRLEVEFGKEYVHYCTGLETSIMRSSFGFEKTKDNQLHEVDAYCIALQSTGIVPNTVPTFDKVYQVKQFRRQNRANINNMRERTYYLDGKVVAKNRKSRFEQKGESLETWFQKVIEKYGIKEAERMRSRLKVKKSTRYYNTPGRVMPGAVLYYRGERYVLSGQHCKGKYYRAVGQQTREFTSTDCKIKKQNEGLVFLG

SEQ ID NO: 5549 - protein, 512 aa, unidentified
  REGION 1..512: note = Human gut metagenome
MSTVYVLNKDGKPLMPTTRGGHVRHLLKEQKARVVRAKPFTIQLLYETNDVVQPLYLGIDPGRTNIGVAVVKANGTAVFTAHLETRNKEVPKLMQDRKKARRARRTNGRRCRRQRRAKANGTISKKCVKQDTAQSKNPSKRAKEIGIIKRRLPGYKKDVLCIGIKNKEAKYTNRTRPEGWLTPTANQLLQTHINLVRKIQKFLPISDVVLEVNKFAFMRLDNPDIQKWQYQQGPLYQKGSLENAVSEMQEHHCLFCDKPIDHYHHVVPQSENGSNTIANIVGLCAEHHNLVHKDAAWQKKLAEEKVGLNKKYGALSVLNQIIPALTNKLSVLFPKHFFVTAGKSTHDYRATHGVSKDHWLDAYCIACSVLPSDVCDSNINNHMPYELKQFRRHARRALNNENMNRVYTLNDKAVAINRHKATEQEAASLEEFRKEHPNDVCKLKVKEHHPTYRNMNRNYPGSIFLVGKHVHIMQGIAGSKDGKATTYKDSNANSITASKCKFVAKNSGILFV

SEQ ID NO: 5550 - protein, 424 aa, Anabaena sp.
MSNYALVIDTNKQPLSPCHPSVARKLLDSGKAAVFRMYPFTIILNKSCSDVVNQAIELKIDPGSKTTGIALVQGEKIIFGAELSNRGSAIKASLESRRSLRRGRRNRHTRYRQARFLNRTRTKNWLAPSLQHRVETTLTWVNKLIKFAPLTRISQELVRFDLQQIDNPEISGIEYQQGTLFGYEVREYLLEKWKRKCAYCGIENVPLQVEHIHPKARGGTNRISNLCLACEKCNIKKGTQDVEKFLAKKPDLLKCILAQAKRPLKDAAAVNSTRWALFSRLKETGLPVSTGSGGQTKFNRTKFNFPKTHWLDAACVGQIGELEIFTNKPLLIKATGHGTRQMCRTDKFGFPSRYVPRIKFVKGFQTGDIVKAIVTTGKKIGKYIGRVAVRATGSFNISASKLVQGISYKCCKIVHRKDGYNYAF

SEQ ID NO: 5551 - protein, 443 aa, Caldicellulosiruptor sp.; identical to SEQ ID NO: 2385

SEQ ID NO: 5552 - protein, 424 aa, Enterococcus sp.
MRVFVRNMQGKPLMPCSNRKARLLLKEGKAKIYQYNPFTIQLCYASREYVQECHIGIDTGTKHIGMAVTSEDKVLFKGETELRQDVKSNLDTRRSYRRDRRNRKTRYRKARFLNRKKKESWLPPSIENRINHTFKWINKLVALLPNPKLHIEVGKFDVAKMINLDVQGVDYQHGQTYGFYNVRYFVFARDNYTCQCCKKSKNKILQTHHIIYRSNGGSNRADNLITVCTDCHTYENHQKGGILYQWQENRKKTKQYKEPPFMNVLRKRIFTQYPNSIITYGSETTPKRKELGLEKTHYNDAIVISGITKIKENPNEWLLIKQFRKKKRSLHEATARKGRKEPNRLQKRNAKNTPYYKGFYLNDKVRVFNQVGHITGFTSSGAYIKNSENEYITLPNKSYKQIGISNIRLLHHNNNWQYIHKHIA

SEQ ID NO: 5553 - protein, 429 aa, Moorena sp.; identical to SEQ ID NO: 3501

SEQ ID NO: 5554 - protein, 406 aa, unidentified; identical to SEQ ID NO: 2703
  REGION 1..406: note = Human gut metagenome

SEQ ID NO: 5555 - protein, 524 aa, unidentified
  REGION 1..524: note = Human gut metagenome
MEILRIDWKDICPTGRSGLPQKELFMRPVYVLDMNGKPLMPPCRFGKVRRMLKSGEAKVVDTLPFTIQLDRPTKTHVVQSVTLGCDPGRTNIGLAAVRSDGTDLYRSHCETRNKEIVDLMDARRAARRASRRGERLARKRLAAKHETATTFPDGRKLPGCEKPIMLKDIINTEARFNNRVRPAGWLTPTATQLLWTHLNLIKRISRILPVSDIALEINKFAFMQLDEPDKNKWNIDFQHGPLYGTGGLKAAVRQLQNNTCLLCQENVIEHFHHLIPRSKRGDNTINNIAGLCQKCHEAVHKSADTAEKLSTLKKGQTKRYGGTSVLNQIIPKLVEELGKTYHEHLHLTYGWQTKEFRTKHKLEKTHDTDAYCIAAGTMQTVKPNIRTDVYEIKQFRRHNRANIHHQTERTYKLNGQTVARNRRKRTDQKTDSLAEWFENTVKQYGQQKAEHLRAGLKVRKSTRYYNFKDRVMPGAVFQYEGNRYVVTGQLSGGQYYRAYGKGNQNFPAKKIRIISLNRGLVYVA

SEQ ID NO: 5556 - protein, 419 aa, Moorena sp.; identical to SEQ ID NO: 2999

SEQ ID NO: 5557 - protein, 471 aa, Caldicellulosiruptor sp.; identical to SEQ ID NO: 3268

SEQ ID NO: 5558 - protein, 515 aa, unidentified
  REGION 1..515: note = Human gut metagenome
MQYLDFTLVVDKNNKPCVPILNGRAGYLLRNNKAKIINHDPLVIKRIDDYKSDFENRDIFELKIDSGYLNIGFSVSDNYHEYLAGQVELLKGMSDRLTNRNGYRRTRRSRIRYRKNKNVDYKTVHNPTYKNGNEEGWFAPSIQHKIDSHIRLIDKIASWVPVDKVIVEVAKFDIQMIKALADGKEISGKDYQNGEMKGYENAAAYVRDRDKHTCRLCGANKNVVIEVHHIQPRSKGGTDKPSNLISLCHSCHRKVHSNNNDNKYFEKVKSMKLSDTYKDSTYMNMVRWELFERLSGKYDVKVGYGYQTKINRRNAGLRKFHYTDAVCINDYKDVTLTENIYIVDQKRCNDRSMETFSDAKYIDVRDGKEKSGNTLYKERLPNAPSKRVTQKEYINNMRQFRGKKIKPGKRTFVCNSYCLKCGDLIYINSGKHKGNIAEVESMQKLPNGNFKIRFTYKAQTVKYPSINIKPEEYELLKNNLLDKVKIVRTRRGMIWRKYNRLEYEATHADQEGMAV

SEQ ID NO: 5559 - protein, 443 aa, Caldicellulosiruptor sp.; identical to SEQ ID NO: 2385

SEQ ID NO: 5560 - protein, 408 aa, unidentified
  REGION 1..408: note = Human gut metagenome
MVYVQDINGKPMMPTTRHGKVRRLLKENKAVVVNLCPFTIKLTYVTSDYKQEIVLGVDAGTKHVGLSATTKSKELYSSEVILRNDIVDLLSTRRELRKTRRNRLRHRKHRFNNRIKSRRPGWVAPSVKYKIDAHIRVIDNVFSILSVSRIVIEVAQFDTQKINNPNISGKEYQEGDQLGFWNVREYVLARDGHKCQHCKGKSKDPVLNVHHIESRKTGGDSPSNLITLCETCHKEYHKGNIDLKIRRGKSLRDAAVMGIMKWRLYEELKSKYDNISMTFGYVTKYNRIKHGIEKSHVFDAFVISKNFDAIRLGYYYKVRLVRRHNRQIHKQKIPKGGIKRLNQSPFEVFGFRLFDRVMFENSYYFIFARRKTGSFNIRDIDGKNQRDITYKKLKLSRCKRFMVQKEMD

SEQ ID NO: 5561 - protein, 471 aa, Caldicellulosiruptor sp.; identical to SEQ ID NO: 3375

SEQ ID NO: 5562 - protein, 515 aa, unidentified
  REGION 1..515: note = Human gut metagenome
MQYLDFTLVVDKNNKPCVPILNGRAGYLLRNNKAKIINHDPLVIKRIDDYKSDFENRDIFELKIDSGYLNIGFSVSDNYHEYLAGQVELLKGMSDRLTNRNGYRRTRRSRIRYRKNKNVDYKTVHNPTYKNGNEEGWFAPSIQHKIDSHIRLIDKIASWVPVDKVIVEVAKFDIQMIKALADGKEISGKDYQNGEMKGYENAAAYVRDRDKHTCRLCGANKNVVIEVHHIQPRSKGGTDKPSNLISLCHSCHRKVHSNNNDNKYFEKVKSMKLSDTYKDSTYMNMVRWELFERLSGKYDVKVGYGYQTKINRRNAGLRKFHYTDAVCINDYKDVTLTENIYIVDQKRCNDRRMETFSDAKYIDVRDGKEKSGNTLYKERLPNAPSKRVTQKEYINNMRQFRGKKIKPGKRTFVCNSYCLKCGDLIYINSGKHRGNIAEVESMQKLPNGNFKIRFTYKAQTVKYPSISIKPEEYELLKNNLLDKVKIVRTRRGMIWRKYNRLEYEATHADQEGMAV

SEQ ID NO: 5563 - protein, 414 aa, Moorena sp.
MAVAVLSSTGKKLMPTSNYHARRLLKKGRAVIVRYKPVFTIRMTDRESGETQPMEYTSDTGYIHVGISVKSQRHEFFHEERNMLSNGTERHNNCRKYRWARRNRKRYRKPRFNNRSKKNKELAPSIRHKMECQIRLFDQYCEVLPITTATFEMGKFDTFLMQAAAEGKAKPEGKDYQKGDRYLTKTLRAAVFSRDHYTCQICGKSGIKDHVILHTHHIGFWKGYRSNRVGNLLTVCDKCHTAKNHKQDGKLWGLEPKGTDLAPAAYMNIVRWAMYRAVRDAHPEIEIHIQYGVQTDITRQNRNIEKSHANDAYCIGTMHPKHRCREAVYQKLRRHNRVRTKFYDAEYIDLRDGKKKNGAQLSCGVQNGKKAGGVKRTREFTAVENAEPEAAVSEEKNAKYRPETRCCLTAKSEL

SEQ ID NO: 5564 - protein, 443 aa, Oligella sp.; identical to SEQ ID NO: 5424

SEQ ID NO: 5565 - protein, 419 aa, unidentified
  REGION 1..419: note = Human gut metagenome
MVYVLDMNGQPLMATARHGKVRRLLNSHLAKVVKRCPFTIQLLYQSTKETQPVSLGVDAGSKHIGLAATTEKKVIYQEELIPRSDVVKLLSARRTLRRSRRNKKTRYRKARFSNRIHPKHKGWLAPSVEVKIQEHITAIKNVCKILPVSEIHVETAEFNLQRLKAMEEGKSLPVGTDYQLGEQYDFYNTRQYVLHRDGYTCQCCGAHDKEVKLHMHHIESRQTGGNAPNNLITLCEHCHKALHEGKIELPKGRKRGKSYRDAAFMGIMRNTLLERLKKEVSVPVTMTYGYITKYWREKVGLEKSHINDAICISKHPYAKPLDTYYLTKAVRHHNRQIHKANFSKGGIRKRNQAPYLVKGFRLFDKVLYQGKECFIFGRRVSGRMDVRLLDGTHINASVGYKNLKLLESKKAYLIERRTC

SEQ ID NO: 5566 - protein, 471 aa, Caldicellulosiruptor sp.; identical to SEQ ID NO: 3375

SEQ ID NO: 5567 - protein, 443 aa, Oligella sp.; identical to SEQ ID NO: 5205

SEQ ID NO: 5568 - protein, 442 aa, Lactobacillus sp.; identical to SEQ ID NO: 5193

SEQ ID NO: 5569 - protein, 431 aa, unidentified
  REGION 1..431: note = Human gut metagenome
MPDKVYVISRLGHPLMPCSPAKARHLLDDKKAKVVKRMPFTIRLLYGSTKYIQPIILGVDAGSKTIGLSASTAKEEVFAAEVMPRNDVVENLSTRREFRRARRNRTTRYRKPRSDNRVRSNHERWLAPSVKVKIQEHITSIKRVCTILPISKVVIETAEFDLQLLKAIQEGKPIPEGEDYQKGEMYGSYNVCQYVLWRDNYTCICCGVRGTPKNPVRLHVHHFESRKYGGNAPDNHGTLCDDCHKKFHLGIITDVKLKTRRRQSTRDAAFMGIMRKTLMWRLRTELFIPVAETKGYITKATREKLLVLPKSHTRDALAIAQGRHGFGIKEYAYVEPANHIYTVRPVQHHNRQLHKASILKGGIRKRNQASKYVFGFRLYDKVLYQGKVCFVWGRRTSGTFLLRTIDGIKVKDGVSYRNLTLLERSSNYLIA

SEQ ID NO: 5570 - protein, 409 aa, unidentified
  REGION 1..409: note = Human gut metagenome
VSEMTSYSFVLDANGKQLAPTKEPKAWFLIRKKRAALVSKYPMVIQLKKKIQENEICKDEIRCGIDDGGLHVGIALVQKCKSKNKVVFKGTIEQRNDVKHLMEVRRNYRRYHRYHKRYRQARFDNRKSSKRKGRIAPSILQKRQATIRVINRLNKWINITNYWLEDVSIDIRVLTDGYKSYSWQYQKSNRLDENIRKATILRDGGKCMECGKSNCRLEVHHIKPRRRNGSNTLDNLITLCESCHQKTEGQEELYMDRYFSLLKSSDNKNLNYAQHVMIGKMWLRKQLSGLGVLYLTSGGDTANKRIDWNIEKSHTNDAVCITDLQPDTCDIKEWAIKPMRRQSKAKTDHVLGIHHRDLVEYTFKNGETHRGYVTALYPDQKAINFQSQTKHCKKVNARKCKLLWNLSLI

SEQ ID NO: 5571 - protein, 442 aa, Lactobacillus sp.
MKHENANRVFLLNRDGKPLMPCRPRKARLLLKSGKAFVVKKYPFTIQLKYGSYGYKQKASLGVDTGQRHIGFAIVSQNKVLYQSEVELRQDVHKNLYTRKIYRRSKRNRKTRYRQARFLNRVHGKRDGLWLPPSIKGKVSHNIAWIKRYLAVLPNTDLHIEVGKFDMAKMINPEISGKQYQEGSLKDWKNYEYYVLARDEYTCQLCHKHGEGVKLVVHHIVYRSHGGTDRISNLITLCTDCHTTKNHQPGGKLYKWMKAKKKVTKQLKGATFMNILRKRIMTAFPEASFQYGSQTYVDRKNLLLPKGHFMDAIAISGIKSVGQMPDTVTLISQFRKKKRSLHEATARKGRKQPNTSSKRNEKNMNHARGLWLNDYVRVIGNHAKGYVKGFKSKGYYVYLTDGLGNYVLSNGKNYINRKQCRLIMHNGNWQKAEQKLSLYEFK

SEQ ID NO: 5572 - protein, 433 aa, Scytonema sp.; identical to SEQ ID NO: 2739

SEQ ID NO: 5573 - protein, 375 aa, unidentified
  REGION 1..375: note = metagenome
LNYDSGHQTQEISLGIDAGSKHIGVSATTKIKVLYEADVELRNDIVDLLSSRRELRRGRRNRKTRYRQAKFNNRRLGNGWLPPSIRQKIGTHLTVVENICKILPISRIMVETASFDIQKIKNPDIQGAEYQQGDQLEFWNVREYVLFRDGHTCQCCKGKSKDKILNVHHIESRKTGGNAPNNLITLCETCHTGYHKGTVQLPKAIKRGMRFKDAAFMGIMRWAFYEALKQQYEPVGTPVHNTYGYITKHTRIAYNLPKEHYVDARCISGNPEASSNGEYYYQKKVRCHNRQIHKLTVLKGGIRKQNQATYLVKGYRLFDKVSYQGKGYFVFGRRQSGFFDIRTLSGEKVNKGSLSCKKLKFIATRTYYLTERRAV

SEQ ID NO: 5574 - protein, 443 aa, Caldicellulosiruptor sp.; identical to SEQ ID NO: 2385

SEQ ID NO: 5575 - protein, 427 aa, Moorena sp.
MRVFVLDKNRKPLDPCHPAKARKLLKSGRAKVLRRYPFTIIIKDLEVSNCVTHDHQLKIDPGAKTTGLAIVQGSRVVWGAELTHRGFQIREALTSRRQLRRSRRNRKTRYRQPRFLNRTRPKGWLPPSLMSRIHNVLTWVKKLIKFCPVTGISQELVRFDTQKMLNPEISGIEYQQGTLYGYELREYLLEKWNRTCAYCGANNTRLEIEHIKPKSKGGSDRVSNLAIACHDYNQAKGNLEIEVFLSSKPSILKRILSQAKKPLADAAAVNAARWKLYDELKLIGLPVEVGSGGLTKYNRCRQNLPKTHWLDAANVGKVDTLYIEDYQPLLITAKGHGTRQICRTDKFGFPRLHCSQRKTHKGFQTGDIVKAVVTKGKKIGTYMGRIATRKTGSFDITTAQGKVSGISYKYCQAIHRKDGYSYQFHGG

SEQ ID NO: 5576 - protein, 465 aa, Moorena sp.
LEKNMAVFVIDKHKRPLMPCSEKRARLLLERGRAVVHRQVPFVIRLKDRTVQHSAVQPLRVALDPGSRATGMALVREKNTVDTGTGEVYRERIALNLFELVHRGHRIREQLDQRRNFRRRRRGANLRYRAPRFDNRRRPPGWLAPSLQHRVDTTMAWVRRLCRWAPASAIGIETVRFDTQRLQNPEISGVEYQQGALAGCEVREYLLEKWGRKCAYCGAENVPLEIEHIVPKSRGGSDRVSNLALACRACNQAKGNRDVRAFLADQPERLARILAQAKAPLKDAAAVNATRWALYRALVDTGLPVEAGTGGRTKWNRTRLGLPKTHALDALCVGQVDQVRHWRVPVLGIRCAGRGSYRRTRLTRHGFPRGYLTRNKSAFGFQTGDLIRAVVTKGKKAGTYLGRIAIRASGSFNIQTPMGVVQGIHHRFCTLLQRADGYGYFVQPKPTEAALSSPRLKAGVSSAGN

SEQ ID NO: 5577 - protein, 419 aa, unidentified; identical to SEQ ID NO: 3670
  REGION 1..419: note = Human gut metagenome

SEQ ID NO: 5578 - protein, 442 aa, unidentified; identical to SEQ ID NO: 4418
  REGION 1..442: note = Human gut metagenome

SEQ ID NO: 5579 - protein, 431 aa, unidentified
  REGION 1..431: note = Human gut metagenome
MPDKVYVISRLGHPLMPCSPAKARHLLDDGKAKVVKRTPFTIKLLYGSTEYTQPVILGVDAGSKTIGLSASTTKEELFAAEVMPRNDVVENLSTRREFRRARRNRTTRYRKPRFNNRVHSKNNGWLAPSVEVKIQEHITSIKRVCAILPISKIVVETAEFDLQLLKAVQDGKPVPEGEDYQKGEMYGSYDVRQYVLWRDNYTCTCCGVKGTDKKPVKLHVHHFESRKHGGNAPDNYGTLCEDCHKKLHLGIITDISLKTRKRPSTRDAAFMGIMRKTLMQRLITGLSIPVAETKGYITKAAREEILKLPKTHTNDALAIAQGRHGFGIREQAYVKPTNRIYTVRPVRHHNRQLHKATMLKGGIRKLNQASKYIFGFRLYDKVLYQGGECFVWGRRRSGSFLLRTIDGTKVKDGVGYRNLTLLERSTNYLIA

SEQ ID NO: 5580 - protein, 512 aa, unidentified
  REGION 1..512: note = Human gut metagenome
MSTVYVLNKDGKPLMPTTRGGHVRHLLKNQKARVVRTKPFTIQLLYETNDVVQPLYLGIDPGRTNIGVAVVKANGTAVFTAHLESRNKEIPKLMQDRKKARRARRTNGRRCRRQRRAKANGTISKKCVKQDTAQSKNPSKRAKEIGVIKRHLPGCEKDVLCIGIKNKEAKYTNRARLEGWLTPTANQLLQSHINLVKKIQKFLPISDAVLEINKFAFMRLDNPNIQKWQYQQGPLYQKGSLENAVSEMQEHHCLFCEKPIDHYHHVVPKSENGSNTIANIVGLCAEHHNLVHKDAAWQKKLAEEKVGLNKKYGALSVLNQIVPALTNKLSMLFPKHFFVTTGKSTHDYRESHSVSKDHWLDAYCIACSVLPSDVCDSNINNHVPYELKQFRRHDRRALHKENMSRVYTLNGKTVATNRHKAIKQTTDSLEEFRQNHPDDVCKLKVKEHHPAYRNLNRNYPGSVFLVGKQAHVMQGISSSHNGKADGYYDTNGNAYPYYKCKFVAKNEGIVFA

SEQ ID NO: 5581 - protein, 413 aa, unidentified; identical to SEQ ID NO: 2636
  REGION 1..413: note = Human gut metagenome

SEQ ID NO: 5582 - protein, 423 aa, Arthrospira sp.
MSNHIFVLDTNRKPLTPCKPGVARSLLKAGKASVFRRYPFTIILNKEVDANPEPLELKLDPGSKVTGIALKQGNHIIFAAELQHRGQQIKEALLSRRQLRRSRRNRKTRYRPARFLNRTRSKGWLAPSLQHRVDTLMTWVHRFRRLAPVGRITQELVRFDLQLMENPEISGVEYQQGELQGYEIREYLLEKWGRTCAYCGAQNVLLEVEHIQPRSKGGSDRVSNLTMACHSCNQAKGNGDIRDFLSGQPDVLSRLLRQAKSPLKDAAAVNSTRWALFKALKATGLPVTTGTGGQTKFNRLRLNLPKAHWLDAACVGPVESLEVLTSKPLLILAKGHGTRQMCGTNKYGFPNRHRSRRQIHKGFQTGDMVTALVTAGKKIGSYLGRVLCRASGSFDITTASVRVAGISHKYCQPIHRKDGYAYA

SEQ ID NO: 5583 - protein, 375 aa, unidentified
  REGION 1..375: note = Human gut metagenome
LSKVKTMRVFVFNMRGRPLMPCSQRKARLLLRENKAMIYKYHPFTIQLTYTTGETKQDCHIGIDTGSKYIGAAVRSEDKVFWKGEIELRQDIRSNLDTKRIYRRSRRNRKTRYRKPRFLNRKRRDEWLPPSLQSRINHTFHWIDTLSSLVPNPILHIEVGKFDVAKMINPEIHGVDYQHGQTYGFFDERYFVFARDNYTCQCCGKSKNKILNTHHIIYRSNGGTNRVDNLITVCTDCHTSQNHRKGGIFYQWQEQHKKVKQYKEPPFMNTLRKRIFVAYPDAEITYGSETTPKRKAMKLDKTHYNDAIVISGINEIKENPEEWLLIKQFRKKKRSLHEATARKGRKKPNRNQTRNSKNTPYYKGFYLNDKVSVFG

SEQ ID NO: 5584 - protein, 551 aa, unidentified
  REGION 1..551: note = Human gut metagenome
VLAPLQVLVIFRVQVQLIRLYSDISSEMIYNLVSIRERSFMKQKKQKVMVYILNKKGKPLMPTTRCGHVRKLLDSKKAVVVSSNPFTIRLKYDTPNGVQDVFAGIDSGRENIGSGASNEDGDCLYLGELKTSNKSIKMKITERAGFRKERRRHDRQNKQRKARKDHTEIQNGNADICRTTISCKSVQISYPAAEKSVTHKIIRGKEGKFANRHRDEGWITPSARQLVQMHMNDLKSMCKILPISHVTLERVAFDFQKLENENIKAWEYGKGKLYGYDSPEEYIHDVQGGKCLICGKPHIDYLHHIIPRSKGGSNKVSNLAGLCYDCHYGPMGVHNCQDTQDRLPELKNEANKQYKVSLLNSVMPVLIEEMDKFCKANSIIFSICEGHDTAKVRDIYDLQKDHCVDGFAISLVGRNVKSVDVMPDRIHQKQRYKKKSKNIIKKRNCREYYDGKKLVAVNRHKGTDQKADSLEEYMNTYAETHTADECKKHFESLTVKPARRTYTFHKEGRICPFHIGDKVRYEKKNKIKGNTKVETFICEGIRFPKDENKAK

SEQ ID NO: 5585 - protein, 509 aa, unidentified
  REGION 1..509: note = metagenome
MPDTDYIYVLGIDGKPQMPTKRKRHVKRLLNTGKARIACHVPYTIQLLYENTPVLQPVMLAEDPGRTNIGMAVLSVKGELLMSAVVETRNMEIVRLMNHRRGYRRASRNGERKARQRLAKRFGTMLKAGLLMRRLPKFAADKFITCHYIRNTELCFCNRKRLDGWLTPTSRQLVETHINLIHKIQKYLPVTDIAMEVNRFAFLSLENPSVSGVNFQNGPLKGFDSLHDAVNELQHGKCLLCDKKIEHYHHIVPRSMNGSNTIGNIAGLCMECHNKVHKRAAYQKKLNDVKKGLDKKYGALSALNQAVPFICKRLEAEFGKEHVSYCTGRDTAKMRSSFGFQKTKDNQMHETDAWCIGILALNRIPDVVPNFGQTYCIRQFRRQDRSFVYAQTERVYKLDGVIVAKNRKKRTEQKTDSLEDWYNRQVVLYGKKKADFMRSRLTAVKSKRRYNDLTRVMPGAIFMYNGERYVLSGRLSKGLLFRAVGDAKTNYPASKCKIIRHNEGLVFVC

SEQ ID NO: 5586 - protein, 473 aa, Calothrix sp.; identical to SEQ ID NO: 3997

SEQ ID NO: 5587 - protein, 423 aa, Arthrospira sp.; identical to SEQ ID NO: 3202

SEQ ID NO: 5588 - protein, 471 aa, Caldicellulosiruptor sp.; identical to SEQ ID NO: 3375

SEQ ID NO: 5589 - protein, 267 aa, unidentified
  REGION 1..267: note = Human gut metagenome
LTHQFKKRVPVMVYVLDKNGQPLMPTDRHRKVRLMLQSGQAKVIKRCPFTIQLNYDSGHQTQEISLGIDAGSKHIGVSTTTKIKVLYEVDVELRNDIVDLLSSRRELRRGRRNRKTRYRQAKFNNRRRGNGWLAPSIRQKIGTHLTVVENICKMLPISRIMVETASFDIQKIKNPDIQGAEYQQGDQLEFWNVREYVLFRDGHTCQYCKGKSKDKILNVHHIESRKTGGNAPNNLITLCETCHTGYHKGTVQLPKAIKRGMRFKDAA

SEQ ID NO: 5590 - protein, 413 aa, unidentified; identical to SEQ ID NO: 2605
  REGION 1..413: note = Human gut metagenome

SEQ ID NO: 5591 - protein, 408 aa, unidentified
  REGION 1..408: note = Human gut metagenome
MVYVQDIDGKPMMPTTRHGKVRQLLKDKKAVVINTCPFTIKLMYKTSDYKQEIVLGVDAGTKHVGLSATTKSKELYSSEVILRSDIVDLLSTRRELRRTRRNRLRYRKPRFDNRIKSKRTGWVAPSVRHRIDAHIRVIDNVCSILPISRIIVEVAQFDTQKIKNPNISGNEYQEGNQLGFWNVREYVLTRDGHKCQHCKGKSKDPILNVHHIESRKTGGDSPSNLITLCETCHKEYHKGKIDLRVKRGKSLRDAAVMGIMKWKLYEELRSRYDNVSMTFGYITKYNRIKYGIEKSHISDAFVISKNFNALMLEYHYKVRLIRRHNRQIHKQKVLKGGVKKPNQSSFEVFGFRLFDRVMFEGNYYFIFGRRKSGSFNIRDIDGGNQRDITYKKLKLLRCKRFMIQKETN

SEQ ID NO: 5592 - protein, 438 aa, Ktedonobacter sp.; identical to SEQ ID NO: 2377

SEQ ID NO: 5593 - protein, 545 aa, unidentified
  REGION 1..545: note = Human gut metagenome
VQFAWWLCHPKPSDNIEDVNHETALMLLQIKAGTETFGTAPCGSGPKAEGVSPERKAMNTVAVVTNTNKPLMPTSPYRARKLLSSGKAKIVKHRPFTILLVNRSDGNVQEIEYKSDTGYLHVGISVCSEKREFVREQRDLLPDEKEKHNDRRKYRRTRRNRKRYRKARFDNRIGKIRKKEKNEHVWLPPSLEHKVDDQVQLFLRLYQVMPIKRAVFEMGQFDPALMKALEKGESAPQGIDYQIGERYQIATRRAAVFTRDRYACVFCGRSIKDHAILHVHHIGFWKQDRSNRLDNLATCCEQCHTSENHRPGGILYGVEPKLESLASATYMNVVRFELLQRLKEAAPDVEFHISYGAKTSVIRKQRSISKSHTNDAYCLGQYFPKLRAEEIGFQKIRRNDRILQKFYDAEYLDSRDGTTKKGKELTNGRISRNHMKDHKNLHQYRGKKLSKGRVTIRRGRSSLKPGGLVRFDGEVLTVHGTHRSRRKNKAGHIKVSVNVEFERPSKTGRKSAALSKCQIISQSYNTGWKKIQLRKEEQGKIAAVV

SEQ ID NO: 5594 - protein, 512 aa, unidentified; identical to SEQ ID NO: 3680
  REGION 1..512: note = Human gut metagenome

SEQ ID NO: 5595 - protein, 431 aa, Escherichia sp.; identical to SEQ ID NO: 3801

SEQ ID NO: 5596 - protein, 419 aa, Flavobacterium thermophilum
LFVYIINKHGKPLMPCSPRKARLLLKQKKAKVVRRTPFTIQLLYGSSGYKQPVSLGVDMGTRHVGISATTKKDVLFEAEAQLRTDIVELLAIRRQFRRSRRNRKTRYREARFLNRRKPEGWLPPSIQHKINSHIKLIDLVHNILPVTSVTIEVAAFDTQKLKNLNIRGVEYQQGEQMGFWNVREYVLYRDNHTCQYCKGKKKDPVLQVHHIESRKTGGDSPDNLITLCKTCHHEIHEKGLEHIFQRKRPPMRDASQMTAMRWAMFSRIREKYSHANITYGYITKCIRIANGLSKSHMVDARCISGNPLAKPSGTVYLLKFVRKNNRQLHKATILKGGKRKSNKAPRFVKRFQLFDKVVYERKECFIFGRRSSGYFDLRLLDGTKVHASASWKKLKRVEHASTLLIERRKGDSSPTFALA

SEQ ID NO: 5597 - protein, 451 aa, Moorena sp.
MSNVFVLDSKKRPLEPIHPGRARRLLKEEKAAVYRRYPFTLILKRQVEAPAPAPLRLKVDPGAKTTGLALVNDATGDVVWAAELTHRGAAIKLALDKRRSVRRGRRQRQTRYRAPRFANRRRRAGWLPPSLLSRVENILAWLRRLSGLCTISALSQELVRFDIQKVENPEITGLQYQQGTLFGFEVREYLLEKWGRVCTYCGVQGVPLQVEHILSRAKGGTDRIANLALACEPCNLKKGTQDVRNFLAHDPERLARILTQAREPLKDATAVNATRWHLFERLKANGLPVETGSGGLTKYNRAQRALPKTHWLDAAAVGASTPLHLCTANVFPLLIKATGRGHRRLCNPNEIGLPVSHRKRHKRYFGYQTGDLVRAVVPETLACRGTHVGRVAVRAKGTFNITTKRGKVTDVPHRFCTPIARTTGYSYQTGERHAAPLPTSPSIRSSHSSPA

SEQ ID NO: 5598 - protein, 471 aa, Caldicellulosiruptor sp.; identical to SEQ ID NO: 3268

SEQ ID NO: 5599 - protein, 451 aa, unidentified; identical to SEQ ID NO: 3581
  REGION 1..451: note = Human gut metagenome

SEQ ID NO: 5600 - protein, 442 aa, unidentified; identical to SEQ ID NO: 2903
  REGION 1..442: note = Human gut metagenome

SEQ ID NO: 5601 - protein, 471 aa, Caldicellulosiruptor sp.; identical to SEQ ID NO: 4560

SEQ ID NO: 5602 - protein, 425 aa, unidentified
  REGION 1..425: note = seawater metagenome
MPNYQNYVFVVDTLGQPLSPTHRARARKLLKQGLAAVFRTYPFTIILKKTVENPVNEPLRLKLDPGASVTGIALVNQSRDTVIWGAELTHTGDRIRAKLTAHRVVRRHRRCRKTRYRQARFNNRKRADGWLAPSLKHRVETTLTWVNRLISSCPITDISMKLVRFDTQKLQNPEISGVEYQQGVLLGYELREYLLTKWQHQCAYCGGQNIPLEIEHIQPKSQGGSDRVSNLAIACHKCHQKKGSQALEQFLEKKPEILKRLLVQAKAPLKNAAAVNSTRWALFNSLKLTGLPIEIGTGGLTKYNRTVQGLPKTHWLDDADCVGKSTPTRLKIKTHQPLLITCFGRGGRQKAAPNKRLPIRHNPLKPIKGWLTGDIAKHKTHGIGRITLRSRGSFVLTKPDKTQFSVKPIDLKPVFRRDGYLYKFS

SEQ ID NO: 5603 - protein, 426 aa, unidentified
  REGION 1..426: note = Human gut metagenome
MVYVQNQLGQPLMPTKNHRKVRLLLDSGAAVVVKRTPFTIRLTTRSKTYVQPIILGVDAGSKTIGLSASTEAEELFAAEVTPRNDVVDNLSTRREFRRARRNRKTRHREPRFNNRVRSKHKGWLAPSVEVKIQEHITYIKRVCALLPVGKVVVETAEFNLQLLKAVETGLPVPQEEDYQKGEMLGYYNVRQFILWRDNYTCRCCGAHGKGVKFHVHHLESRKTGGNAPNNLVTLCDGCHKKFHKGIITPDILKKRKRRSTRDAAFMGIMRRTLMERLWAELAIQVVETKGYITKYTRVELLKLEKTHTNDALAIAQGRRGFGVKELTVIPQSDYIYHIRPVRHHNRQLHKATILPGGIRKSNQAPRYVRGFRLFDKVSYLGEDCFIWGRRSSGSFLLKLLDGTKVKDGVSCKHISILERSTNYLIS

SEQ ID NO: 5604 - protein, 414 aa, unidentified; identical to SEQ ID NO: 4524
  REGION 1..414: note = Human gut metagenome

SEQ ID NO: 5605 - protein, 444 aa, Ktedonobacter sp.
VSKVFVLDTQKQPLNPVHPGRARMLLSSGKAAVFKRYPFTLILKGRGEQPQVAPLRIKIDPGSKTTGIAIVNDTSGEVVFAAELSHRGQEIKKRLERRRGVRRSRRQRHTRYRKPRFENRHNKQRGWIAPSLESRVCNVVTWVQRLMRVCPIVAMSQELVKFDMQAMEQAEIKGIEYQQGTLQGYETREYLLEKWNRMCAYCSAKDIPLQIEHIHPRAKGGSDRLSNVTLACEACNSKKGTQDVRAFLATKPDVLRRILAQAQAPLKDAAAVNTTRWALYERLKALGIPLECGTGGRTKYNRVTRGIEKAHWCDAACVGASTPEHLHLSGVVPLLITADGHGSRQMCLMDKHGFPRTGPKQAKHVQGFQTGDMVRAIVTRGTKIGTYVGRVAVRATGSFNITTKQGTIQGISHRYCTALHTCDGYSYGQGEPLHPSPEKECLFP

SEQ ID NO: 5606 - protein, 427 aa, unidentified
  REGION 1..427: note = Human oral metagenome
MFVYVLDKNGQPLMPTSRFGKVRRLLRDKKAKVVRSCPFTIRLLYEPETKIVQDIILGVDTGSKHVGVACVGNDKVLYQSQVELRDDIKRKMDSRRKLRRNRRNRKTRYRKARFLNRGNSIKKDRYCPTIVSKYYGHEREIEFCKKILPVKDLVLETGKFDTQLMEKPWLQEHKWAYQKGVNYGYANAREHALVRDKYTCQCCGKRNCRVEAHHVIFRSNGGSDSLDNLITLCEDCHKAVHLGEVDLKLKGKRRNNLRYGTQMSIIRSMLLKKYPEAIETFGFVTKANRENLGIKKDHYLDACVVASGGLEFNQSNVLYQKKCVPTQDRQLCKGIRGEQKLPTGKIHGFKKFDKVKYLGETCFIKGRRSSGAFVLMDIDNNPIDFRDRGGKQNPSYKCIKRVSTRRSVLCVSKEWRGKVHSYTKFLT

SEQ ID NO: 5607 - protein, 509 aa, unidentified
  REGION 1..509: note = Human gut metagenome
VYVLNKDGKPLMPTTRCGHVRYLLKEKKARVVKTKPFTIQLLYETNDVVQPLYLGIDPGRTNIGVAVVKADGTAVFTAHLETRNKEIPKLMKKRKDSRCARRTNGRRFRRQRRAKANGTISKKCVKQATAQNGSASKRAKEIGVIKRHLPGCEKEVLCIGIKNKEAKFNNRTRPAGWLTPTANQLLQTHINLIKKIQKLLPISDVVLEINKFAFMQLDNPNIQKWQYQQGPLYQKANLEEAVSEMQEHHCLFCKKKIDHYHHVVPQHKNGSNTIDNIVGLCTKHHDLVHKDTAWHEKLTKKKTGLNKKYGALSVLNQIIPALTKELSSIFPKHFFVTTGKSTYDYRAAHGVSKDHWLDAYCIACSVLPNDVCDSSINNRVPYELKQFRRHDRRALHKENMSRVYTLNGKKVATNRHKATEQTADSLEEFRQNHPDDVCKLKVKENHSEYRNPKRNFPGCVFLVGKRTHVMQGTSGSHNGKADGYYDTNGNSYSSGKCKFVAKNEGIIFA

SEQ ID NO: 5608 - protein, 420 aa, unidentified; identical to SEQ ID NO: 3884
  REGION 1..420: note = Human gut metagenome

SEQ ID NO: 5609 - protein, 480 aa, unidentified; identical to SEQ ID NO: 2726
  REGION 1..480: note = Human gut metagenome

SEQ ID NO: 5610 - protein, 470 aa, unidentified; identical to SEQ ID NO: 2825
  REGION 1..470: note = Human gut metagenome

SEQ ID NO: 5611 - protein, 443 aa, Caldicellulosiruptor sp.; identical to SEQ ID NO: 2385

SEQ ID NO: 5612 - protein, 465 aa, unidentified
  REGION 1..465: note = Human gut metagenome
MSTCVCVLSNNGERLMPTIRLGRVRHLLKDGKAKIIKHHPFTIQLLYDSKTNTQPIEICEDVGYNYIGISVKSQSHEYVSAQYDTLQDEKACHDSCRKLRRTRRNRLRYRKPRFDNRKRGEGWLAPSLKHKKELNVNVVKMYCTVMPITHATVEVGSFDTMLVKAIQEGKVIPEGADYQKGPRYNLATLREAVFYRDNYVCKICGRKATEGAILHMHHMFYWKGRHGNSPDELLTVCEKCHTPANHQKSGKLYGFGGDVKFTDLSGAAFMNTVRWQIVNELYAAFGKPFVTITYGAMTKEKRIALQLEKSHNNDAYAMGEFHPNHRCTFEHYEKVRRNNRILEKFYDSRYIDIRTGEITTGKALFNGRINRNHKKDSENLHKYRGKRTYAGHRALLRKKVNLNPGDFVSLNGETLVVHSTHTKKNGAVNVEFETPAKSGQKSASLKKLKIVKAANSIHPAWKKIS

SEQ ID NO: 5613 - protein, 424 aa, Spirulina sp.; identical to SEQ ID NO: 3799

SEQ ID NO: 5614 - protein, 396 aa, unidentified; identical to SEQ ID NO: 4508
  REGION 1..396: note = Human gut metagenome

SEQ ID NO: 5615 - protein, 447 aa, Pseudomonas sp.
MAVYVLDKTGKPLMPCSEKRARLLLERGRARVHRLAPLVIRLVDRRLADSAVQPLTLKLDPGSRFTGMALVRERRKRVSVLSLLELVHRGAAIRKALEQRAGFRRRRRSQNLRHRAPRFNNRTRPAGWLAPSLRHRLDTTLSWVARIRRWAPITALAVERVKFDLQAMQSPEISGLEYQQGELAGYTVREYLLEKWSRRCAYCAAENVPLEIEHIIPRSNGGSDRVSNLTLACHPCNQRKGNRPIEAFLKGQPELLARITARAKTPLHDAAAVNATRNALFVALLKTGLPVATGSGAQTKYNRRRLGIPKTHALDAVCVGEVEAVSGWQRPTLSIKATGRGEYQRTRLTAHGFPRGYLTRQKRHFGFQTGDQVKASVPGGKKAGVHQGRVAVRQSGSFNIQTPAGVVQGIAHRLCILIQRADGYAYAQNPTFDRAQPQQEAARTGAR

SEQ ID NO: 5616 - protein, 415 aa, Moorena sp.
MSNFVFLIDANKTPMNPIHPAQAKKLLNSGKAAVFRRFPFVLIMNRVVENIVTCPIDLKIDPGSKFTGISLVNNRDEVIWGMELQHRGAVIKGELETRRGIRRSRRNRHTRYRKPRFLNRTRTRSWLAPSLKHRVLTTNTWVKRLIKYAPIAAITQELVRFDLQQLENPEISGIEYQQGELQGYEVREYLLEKWERKCSYCDAKDIPLQIEHIQPKAKEGSNRISNLCLSCEKCNQKKGTQDIEKFLAKKPELLTKIKFQSKRPLKDAAAVNSTRWDLFHTLKETGLPITTASGGRTKFNRRKLNLPKEHWIDAACVGVVENLNILTTNILKVKSTGQGTRRLCRINKFGFPCSNPRQKYEHKWNTGDIACCQGVSGRVVVQSATRLEIRVDGKRIGGKLTDFKKLHSKDAYSYF

SEQ ID NO: 5617 - protein, 461 aa, Moorena sp.; identical to SEQ ID NO: 4375

SEQ ID NO: 5618 - protein, 322 aa, Lactobacillus sp.
VQHRLDFTIKEIKRLYTFLPITNLVIEVTPFDNQKLVNPNIKSWEYTHGKMHDFKTIKDYLLARDNYRDALDGKQYPASQLRVHHLVQRKDGGTNQPDNLVLLSDINHSQANHNNGSLAKLRENRQKTIDYRGAYFMSILATRLSDYFDNYTTTQDYLTANLRQKYQIEKSHLNDAFIIVGGTDTTLRTNNVYSRQKLRNNNRMLQKFYDAKYIDSRDGKQKPGKELSSGRTRRSRELNYDNLRQFRKEKIKKGRISIRRNHYQLRPHDVVLNTRTNKIETVTGVQNSGTVIKFQTGKTCSIKTVVSLYHVNGMLAKKIGDI

SEQ ID NO: 5619 - protein, 413 aa, unidentified; identical to SEQ ID NO: 2605
  REGION 1..413: note = Human gut metagenome

SEQ ID NO: 5620 - protein, 444 aa, unidentified
  REGION 1..444: note = Hydrocarbon metagenome
MSKDTKQASYEAPRGEIMVFVLDKHKKPLMPCCEKRARQLLERKRAVVHKTEPFTIRLKDRTVEKGKLQPLRLKLDPGSKETGVAVINEESGYGKVIFLGEIHHKKGIKSKLYSRRALRRGRRNRKTRYRKARFLNRKRKKGWLPPSLQARVNQTINTVNKLQKLLPLTAISTEHVKFDTQLMQNPEISGIEYQQGTLFGYEIKEYLLEKWNRKCAYCGAENIPLEIEHIIPKSRGGSNRISNLTLSCHDCNQKKDKLTAEEFGYPEIQMKAKKPLKDAVMMNATRWRLFNELKKTDLPVECGTGARTKKQRIEHDLPKTHYYDACCVGASTPEKLIIFPQYISIWTATGRGTRQMCNTDKYGFPKSHRKSQKLHFGFQTGDIAKADIPKGKYQGQYTGRIAVRLSGYFDIKDGQGKRICQGVNYKYCHIIQRNNGWQYEKKLA

SEQ ID NO: 5621 - protein, 512 aa, unidentified
  REGION 1..512: note = Human gut metagenome
MSTVYVLNKDGKPLMPTTRGGHVRHLLKEQKARVVRAKPFTIQLLYETNDVVQPLYLGIDPGRTNIGVAVVKANGTAVFTAHLETRNKEVPKLMQDRKKARRARRTNGRRCRRQRRAKANGTISKKCVKQDTAQSKNPSKRAKEIGIIKRRLPGYKKDVLCIGIKNKEAKYTNRTRPEGWLTPTANQLLQTHINLVRKIQKFLPISDVVLEVNKFAFMRLDNPDIQKWQYQQGPLYQKGSLENAVSEMQEHHCLFCDKPIDHYHHVVPQSENGSNTIANIVGLCAEHHNLVHKDAAWQKKLAEEKVGLNKKYGALSVLNQIIPALTNKLSVLFPKHFFVTAGKSTHDYRATHGVSKDHWLDAYCIACSVLPSDVCDSNINNHMPYVLKQFRRHDRRVLNNENMNRVYTLNNKAVAINRHKAKDQKTVSLEEFRKEHPDDVCKLKVKEHHPTYRNMNRNFPGSVFLVGKQIHVMQGIASSKDGKATTYKDSNANSITASKCKFVAKNSGILFV

SEQ ID NO: 5622 - protein, 557 aa, unidentified; identical to SEQ ID NO: 5269
  REGION 1..557: note = Human gut metagenome

SEQ ID NO: 5623 - protein, 442 aa, Lactobacillus sp.; identical to SEQ ID NO: 3826

SEQ ID NO: 5624 - protein, 428 aa, Moorena sp.
LKVFVLNMRGQPLMPCSPAKARHLLKAGKAAVRRRTPFTIQLRIATGETKQSVTLGVDAGAKHVGLSAATEKEEVFASEVELRQDITGLLAARLLLRRERRQRKTRYRAPRFLNRVRSKHKGWLAPSVENRIQAHMSRIDAICGLLPVTKIVIETASFDIQKIKHPDVEGTDYQQGDQLGFWNVREYVLFRDGHVCQHCHGHAKDKILNVHHLESRQTGGDAPNNLITLCETCHKACHAGKIKLKVKRGQSFRAEAFMGIMRWTLLDRVRKAHPGLPVENTYGYLTKNTRITLGLPKAHCVDAYCIAGNLKAVRRGVYLHQRQVRKHNRQIHKCTVLSKTLKDGTKIGYRKLNQTPHLVKNFRLFDKVRCLGQTGFIFGRRSSGYFDVRRLDGVKISSCISYRKLTLLEKRSTCLTELRKEDGASSPV

SEQ ID NO: 5625 - protein, 451 aa, unidentified; identical to SEQ ID NO: 3581
  REGION 1..451: note = Human gut metagenome

SEQ ID NO: 5626 - protein, 512 aa, unidentified
  REGION 1..512: note = Human gut metagenome
MSTVYVLNKDGKPLMPTTRGGHVRHLLKEQKARVVRAKPFTIQLLYETNDVVQPLYLGIDPGRTNIGVAVVKANGTAVFTAHLETRNKEVPKLMQDRKKARRARRTNGRRCRRQRRAKANGTISKKCVKQDTAQSKNPSKRAKEIGVIKRHLPGCKKDVLCVGIKNKEAKYTNRARLEGWLTPTANQLLQTHINLVKKIQKFLPISDAVLEVNKFAFMRLDNPNIQKWQYQQGPLYQKGSLENAVSEMQEHHCLFCEKPIEHYHHVVPKSENGSNTIANIVGLCAEHHNLVHKDVAWQEKLVEEKTGLNKKYGALSVLNQIIPALTKELSFLFPKHSFMTNGKSTYDYRAAHGISKDHWLDAYCIACSVLPIDVCDSTINNCVPYELKQFRRHDRRALNNENMNRVYTLNDKVVATNRHKATEQEAASLEEFRKEHPNDVCKLKVKEHHPTYRNMNRNYPGSVFLVGKQIHVMQGIASSKDGKATKYNDTRATTIAAGKCKFVAKNSGILFV

SEQ ID NO: 5627 - protein, 389 aa, unidentified
  REGION 1..389: note = Human gut metagenome
GKANVVKKCPFTIRLTYPSGDQTQEISLGIDSGSKYIGISATTQKKVLYEAEVELRNDISKLLAARRQNRRSRRSRKTRYRKPRFDNRKRKEGWLAPSVQQKVDCHLKVVEDVCKLLPVTRIIAEVASFDIQKIKDPKIHGTDYQQGDQLGFWNVREYVLFRDGHTCQCCKGKSKDKILNVHHIESRQTGGNAPNNLITLCETCHKGYHKGQVKLPKKIKRGMTFKDAAFMGIMRWAFYDRLKEIYLPLGIDVSLTYGYLTKNTRIAHQLPKTHYLDARCISGHPDAISDGIYYHQKKIRCHNRQLHKANTLKGGIRKRNQAEYLVHGFRLFDKVRYQGKDYFIFGRRKSGYFDIRDLNGEKVNKGSISYKKLRLVETRRSYLTERRLA

SEQ ID NO: 5628 - protein, 431 aa, unidentified
  REGION 1..431: note = Human gut metagenome
MPNKVYVINKHGRPLMPCSPAKARHLLDAGKAKVKKRTPFTIQLVYGSSGYTQEVILGVDAGSKTIGMSASTTKEELLSAEVKPRNDVVDLLSTRREFRRARRNRKTRYRKPRFDNRVRSKHKGWLAPSVEVKIQEHITSIKRVCRILPVSKVVIETAEFDLQLLKAIADGKPVPQGEDYQKGEMYGHYNVRQYVLWRDDYTCQCCGAHATKKKEVRLHVHHLESRKVGGDAPDNQVTLCESCHEKLHKGLIAEKDFKKRKRKSTRDATFMGIMRKTLMQRLCSELPIPVVKTRGYITKATREKLLVLPKSHTNDALAIAQGKRGFNVGYLPEIAQIDKIYTIRPVRHHNRQLHKATILKGGIRKSNQTEKYVFGYCLFDKVQFNGQDCFIWGRRTTGIFTIKTINGKMIKDGISFKKLKLLEKSTSYLIA

SEQ ID NO: 5629 - protein, 425 aa, unidentified
  REGION 1..425: note = Human gut metagenome
MENTLKVFVLNMRGQPLMPCSPPKARKLLRAGKAVPVRRTPFVIQLTVPTGETKQPITLGVDAGYKHVGLSATTAKEELLASEVELRQDVTGLLSNRLALRRARRNRKMRYRAPRFDNRVRSKHKGWLAPSVENRIQAHISRIEAVCRVLPITKIVIETASFDIQKIKNPEVEGTDYQQGEQLGFWNVREYVLFRDGHVCQACKGRSKDLILNVHHIESRKTGGDAPGNLITLCEACHKAYHAGKLKQFSPRRGASFRAETFMGIMRWTVLNRLRERHPELPVTNTYGYLTKHKRIVAGLPKTHCADAFCIAGVLDAKRRGEYLFQKQTRRHNRQIHKLTILKGGVRKRHQAPYLVHGFRLFDKVLCKGEVGFIFGRRSSGAFDVRRLDGTKISAGISYKKLSLLEKRKMFLTELRKEGRDSSRV

SEQ ID NO: 5630 - protein, 427 aa, Enterococcus sp.
MQVFVRNIQGKPLMPCSNRKARLLLKEGKAKIYQYNPFTIQLCYPCREYVQECHIGIDTGSKHIGVAVTSEDKVLFKGEVELRQDVKSNLDTRRSYRRDRRNRKTRYRKARFLNRKKSKKKDVWLPPSIENRMNHTFKWIDTFLSLVPNPQLHIEVGKFDIAKMINPEIQGIDYQQGQTYGFYDVRYFVFARDNYTCQCCGKSKGKILQTHHIIYRSNGGSNRADNLITVCTDCHTYENHQKGGVLYQWQENHKKTKQYKEPPFMNILRKRIFAKYSNAVITYGSETTPKRKELGLEKTHYNDAIVISGISTIKENPDEWLLIKQFRKKKRSLHEATARKGRKEPNCLQKRNAKNKPCYKGFYLNDKVEVFGRIGHITGFASGGVYIKNSENEYITLPNKSYKKVGVSKLKLLHHNNNWQYINKRIA

SEQ ID NO: 5631 - protein, 431 aa, unidentified
  REGION 1..431: note = Human gut metagenome
MPNKVYVINKHGRPLMPCSPAKARHLLDEGKAKVKKRTPFTIQLIYGSSGYTQEVILGVDAGSKTIGMSVSTTKEELLSAEVKPRNDVVDLLSTRREFRRARRNRKTRYRKPRFDNRVRSKHKGWLAPSVEVKIQEHITSIKRVCRILPVSKVVIETAEFDLQLLKAIADGKPVPQGEDYQKGEMYGHYNVRQYVLWRDGYTCQCCGAHTTKKKEVRLHVHHLESRKVGGDAPDNQVTLCESCHEKLHKGLIAEKDFKKRKRKSTRDATFMGIMRKTLMQMLCSELPIPVVKTRGYITKATREKLLVLPKSHTNDALAIAQGKQGFNVGYLPGIVQINKIYTIRPVRHHNRQLHKAAILTGGIRKSNQTEKYVFGYRLFDKVQFNGQDCFIWGRRTTGIFTIKTINGKMIKDGISFKKLKPVEKSTGYLIA

SEQ ID NO: 5632 - protein, 428 aa, unidentified
  REGION 1..428: note = Human oral metagenome
MFVYVLDKNGQPLMPTQRFGKVRRMLRDRKAKVVKRCPFTIRLLYEPKTKIVQDVVLGVDTGSKHVGVACVGNDKVLYQSQVELRDDIKRKMDSRRMYRRSRRNRKTRYRKARFLNRGNSIKKGRHCPTIVSKYYGHEREIEFCKKIIPVKDTVLETGKFDTQLMEKPWLQQYKWAYQRGVNYGYANAREHALVRDKYTCQCCGKKNCRVEAHHIVFRSKNGSNDLENYITLCEDCHKAVHLGEIELKLNGKRKSDLRHATQMSIIRSMLLKKYHDAIETYGFVTKANRENLNIDKEHYLDACVIASCGLAFEPLDVLYGKRCVPTQNRCLSQGIRAEKKIPTGKVHGFKRYDKVKYLGVICFVSARRTRGDFVLMGIDNNTIDFRDIGGVQNPSYKFIKRLNARRSVLCMLQRIEKKGGVVRNVKVS

SEQ ID NO: 5633 - protein, 443 aa, Caldicellulosiruptor sp.; identical to SEQ ID NO: 2385

SEQ ID NO: 5634 - protein, 421 aa, Moorena sp.; identical to SEQ ID NO: 5147

SEQ ID NO: 5635 - protein, 454 aa, Calothrix sp.; identical to SEQ ID NO: 4352

SEQ ID NO: 5636 - protein, 462 aa, unidentified
  REGION 1..462: note = Human gut metagenome
MSVLVIGRNGKALMPTNPRKARLLLKKKTASVVCRHPFTIQLLYKTGCATQEGCIGIDTGSQHIGVGITCGDRVILKDEHALRSSMEKRSLLATRAVMRRGRRYRKVRYRKPKWRHHTKRMYFEKANRRGQHWRKVKTTTQSPRLKGWLPPSLQSKCDHHFRIIDRYLKYLPDPITRNLVIEAGRFDMARMNDPTIHGEMYQRGPMYDAENLRAYIFARDNYQCACCKAKAGTTRKADGTTVKLVAHHILFRSRGATDNPKYIISVCDHCHTTKAHQPGGILYSWMENTKKVARGLRDATFMNILRKRLFARYPQSAFTYGNITAADRKLLRLPKSHANDAVAISLFGKEASTVKNICQTMHYKQIRKSKRSLHEAIPRKGRKNPNTKAVRNKKNTTQVNGFKLWDSVLADGKKLFICSFTGTSAYLIDKNGCYISQPGKTYKQWPLSKLKRLHPNGNWLMA

SEQ ID NO: 5637 - protein, 470 aa, unidentified; identical to SEQ ID NO: 2825
  REGION 1..470: note = Human gut metagenome

SEQ ID NO: 5638 - protein, 403 aa, unidentified
  REGION 1..403: note = Anaerobic digester metagenome
MPTTPCKARKLLKQGKAKVVKREPFTIQLLYATGETKQDITLGVDAGSKIIGLSATTDKQELFSAEVELRNDIVDLLSTRREFRRTRRNRLRYRKPRFLNRVYSKNKGWLAPSVENKIQTHLKIISKIHEILPISKIIIEVASFDIQKIKNPDIEGEQYQQGEQLGFWNVREYVLWRDGYKCQGKKGCKNKILNVHHIESRKTGGNSPSNLITLCESCHKDYHAGKLKLNLKRGQSFKDAAFMGIMRWTFYNRLKEIYSNVKITYGYITKNTRIQNNLPKEHRIDALCISGNPNVKRLDYWYYIKQVRRHNRQIHKANILKGGKKKLNQAPYLVKGFRLFDKVKYKGEECFIFGRRSSGYFDLRKLDGTVIHRSANCKDLKLISKAKTLLWERGIDVAVSSHD

SEQ ID NO: 5639 - protein, 430 aa, Desulfobacter sp.
LSVFVLDTNKKPQNPVHPAKARLLLKEGKAAVFRQFPFTIILKETVLDVASNPLRIKIDPGSRETGIAVIKDDTGEIVFAMELRHRGQQIKNNLESRRAIRRSRRNRKTRYRKPRFDNRTRAEGWLPPSLKSRVHNIETWVNRLCRFCNIQAISMELVRFDMQKIQNPEISGVAYQQGELMGYEVREYLLEKWDRTCAYCGKTDIPLEIEHIVPKSKGGSNRVSNLTLACTACNRKKGNKSLEQFLSRKPRVLKRIQKQSKMPLKDAGAVNATRWDLFRTLKKNGLPVETGSGGLTKFNRTTRGLHKTHWLDAACVGKSTPEKMFQIDKAVLIVKADGHGSRQMCRVNKFGFPRTTAKSTEKKVKGFQTGDIVKAVVTSGKKVGTYTGRVAVRKSGSFNIKTVDKTVQGISWKYCRLLHASDGYSYNMMC

SEQ ID NO: 5640 - protein, 423 aa, unidentified; identical to SEQ ID NO: 3951
  REGION 1..423: note = Human gut metagenome

SEQ ID NO: 5641 - protein, 424 aa, Moorena sp.
MQNYVFVVDTNKQPLNPISPARARELLTKQKAAVFRMYPFTIILKHAVLNPAPKPLTIKLDPGSKVTGLAILEGENVIWVAELEQRGGIIKNALSARRSLRRSRRNRKTRYRPARFDNRKRKEGWLPPSLMHRVLTTETWVKRLCRYAPIAQVVMELVKFDTQKMQNPEIDGVEYQQGELVGYEVREYLLEKWGRKCAYCDTSGVPLQIEHIHPRAKGGSNRVSNLCLSCQRCNIKKGVKLIEEFLKKDNSRLEKIKQLARKPLKDAAAVSATRWSLFHTLKNLLPTTYCSGGQTKYNRTRLELNKQHWIDAACVGDVETIRLLTEQSLRIKCTGWGTRQMCGTDKYGFPIRHRERKQVHFGCRTGDIVKAIVTSGKKAGEYVGRLSCRKSGSFDITTTSSRVAGISHRFCTPIHKKDGYSYGF

SEQ ID NO: 5642 - protein, 449 aa, Allochromatium sp.
MAVFVLDRQKTPLMPCTEKRARLLLERGRAVVVRLAPFTIRLKDRIGGAIQPLRLKLDPGSRVTGLALVRESEARDPETGLVERLEHGLWFGELAHRGQVIREALTLRCQYRRARRARKTRYRAPRFLNRTRRAGWLPPSLQHRLDTTLNWVQRLRRLAPITALSQELVRFDTQALQSPEISGVEYQHGELAGYEVREYLLEKWHRTCAYCGATHVPLEIEHIVPRARGGSDRVSNLTLACRPCNERKSHRPIEDFLQRQPALLHQIQAQAQAPLKDAAAVNATRWALLNALKTTGLPVETGSGGRTKFNRTRLNLPKTHALDAACVGAVDQVRDWNRPVLAIRATGRGAYSRTRTFNNGFPRGYLIRHKRVHGFQTGDWVRAEVPKGKKAGVHVGRVAVRRTGSFNIQAQAGTVQGISYRHCRLLQRADGYGYSFQLKPEMEAARRAA

SEQ ID NO: 5643 - protein, 413 aa, unidentified
  REGION 1..413: note = Human gut metagenome
MTSYAFVLDANGKQLAPTKEQKAWFLIRKKRAALVSKYPMVIQLKKEIQENEICKDEIRCGIDDGGLHVGIALVQKCKTKNKVVFKGTIEQRNDVKHLMEVRRGYRRYHRYHKRYRQARFNNRKSSKREGRIAPSILQKRQATIRVIHWLNKWINITNYWLEDVSIDIRVLTDGYKSYRWQYQKSNRLDENIRKATILRDGGKCMECGKSNCRLEVHHIKPKRRNGSNTLDNLITLCESCHQKTEGQEELYMDRYFSLLKSSDNKNLNYAQHVMIGKMWLRKQLSGLGVLYLTSGGDTANKRIDWNIEKSHANDAVCITDLRPDTCDVKEWTMKPMRRQSKAKTDHVLGIHHRDLVEYTFKNGETHRGYVTALYPEQKAINFQSPTKHCKKVNARKCKLLWKYSKIYWFENAS

SEQ ID NO: 5644 - protein, 421 aa, unidentified; identical to SEQ ID NO: 2738
  REGION 1..421: note = Human gut metagenome

SEQ ID NO: 5645 - protein, 392 aa, unidentified
  REGION 1..392: note = Human gut metagenome
LPQMKGENMVIALDRNKRPLGFMGERRCRILLERKRAVLYRYFPTIVILKDVDARKLSGLSSYRIKIDPGAKYTGIAIVRDDTNEFMYAMQIEHRGEQIKKNLDTRRNARGDRRSRETGYRRPKWGNQCTAKEQRQSYDSRRDENWLPPSVKSTADNIISWVRRLSRWINITNCSFESVRFDTQLMENPEIEGVEYQQGTLYGYEVKEYLLEKYGHTCQYCGGKSSDPILEWEHMIPRSRGGSDRLKNATLACHNCNQDKGNHTLEEWQTILQDRLPKERGKQKELDQMRQKYVQQVMEGKAPLKGLRYAAWVNSSRRYSQRHLYLRFPELECSSGGRTKYNRNALGYPKEHHYDALCVGKIPEDGFVDWTHGYYLYAKATGRGTRLRGQLN

SEQ ID NO: 5646 - protein, 414 aa, unidentified
  REGION 1..414: note = Human gut metagenome
MVYVINKQGQALMPTERFGKVRRLLKNSLAHVVCRIPFTIQLDYDTTDYTQPVSLGIDAGSKHIGISATTSEKELYAADVELRNDIVDKLSTRRELRRTRRSRLRYRKARFNNRVSSKRKGWLAPSVENKIQTHLTVVEKIHKFLPITNIVVETASFDIQKINNPSISGSEYQQGEQLDFFNVREYVLFRDNHTCQHCKGKSKDKVLNVHHIESRKTGGDSPNNLITLCETCHKAYHRGDFELNVKRGKSFRDAAFMGIMRWSFYDRLKNIYPNVSMTFGYITKNTRITNNLPKEHYVDARCISGNPTAKPLGYYFYQKKVRCQNRQIHKANFLKGGRKKLNQAPFLVKGFRLFDLVEYQKELYYIFGRRSNGSFDIRKLDGTKVNKGSINCKYLRLIATRKSILTEKRMQVNL

SEQ ID NO: 5647 - protein, 471 aa, Caldicellulosiruptor sp.; identical to SEQ ID NO: 3375

SEQ ID NO: 5648 - protein, 443 aa, Caldicellulosiruptor sp.; identical to SEQ ID NO: 2385

SEQ ID NO: 5649 - protein, 471 aa, Caldicellulosiruptor sp.; identical to SEQ ID NO: 3375

SEQ ID NO: 5650 - protein, 477 aa, Acidithiobacillus sp.
MFVFVMDQYGRPGHPTRRMDWVRKQLKRKRGKIVGGGISRKPAVLVLREQSFDRRKTVKRRFFVTLDTGFRNIGYAVTELLADSTLRVLLKGTLTARTPELRGLMDERKMYRRSRRYHRRANVKKKGQTPKHRPPRYESRGKRDSVTLQHGLETHRNLYARLARLVPLPDHQVTRGFESVSFDLRALAHGRPRTGSGYQVSPVGKATGEKTHAFVVRRDDGCVVCGSKEHLHTHHLRKRSNAGSNRAGNQVTLCEDCHADVHAGLIELPITDGAQWRDASMVNAVCGKLRKLSAEAGLVPVPVENSVAARRRLGLEKTHALDAVSVAAALTGAGTVDQRNTLDMDLEQYRRHRRAHIHAQRDRLYYLPDKKEPVAHNRHKRCDQGDVDSLAEFRRTYPKDVGMLQVKRAVRLYTPHRAKAPAVGGDVWNIGGLRVVAKGVHSKTNLYVPSLKPITGKVYASPKEGVRLFRNSGMVVA

SEQ ID NO: 5651 - protein, 512 aa, unidentified
  REGION 1..512: note = Human gut metagenome
MSTVYVLNKDSKPLMPTTRGGHVRHLLKEQKARVVRTNPFTIQLLYETDNLVQPLYLGIDPGRTNIGVAVVKTDGTAVFTAHLETRNKEIPKLMQGRKKARRARRTNGRRCRRQRRAKANGTISKKCVKQATAQNGSVSKRANEIGVIKRHHPGCEKEVLCIGIKNKEAKFSNRTRPEGWLTPTANQLLQTHINLVKKIQKFLPISDVVLEINKFAFMRLDNPNVQKWQYQQGPLYQKASLEEAVSEMQEHHCLFCKNTIDHYHHVVPQHKNGINTIGNIVGLCAKHHDLVHKDTSWQEKLAKKKTGLNKRYGALSVLNQIIPALTKELSSLFPKHFFATNGKSTYDYRAAHGVSKDHWLDAYCIAGSVLPNDVCDNNINNHVPYELKQFRRHDRRALHKENMGRVYTLNGKSVATNRHKAIKQTTDSLEEFRQRQPNDVCKLKVKEHHPEYRNPKRSFPGCVFLVGKHTHVMQGTSGSHNGKADEYYDTNGNSYSSGKCKFVVKNEGIVFT

SEQ ID NO: 5652 - protein, 516 aa, unidentified
  REGION 1..516: note = Human gut metagenome
MATVYVLNKDSKPLMPTTRCGHVRHLLKEKKARVVRTNPFTIKLLYETNDVVQPLYLGIDPGRTNIGVAVVKGDGAAVFTAHLETRNKEIPKLMAKRKEYRQGRRHYRRCKRQRRAASHGTLSKKCKKQSTAQGCNISKRAQKIGVFERNLPGCEKPVLCIGIKNKEARFNNRARPAGWLTPTANHLLLTHINLVKKICKFLPINDVVLEINKFAFMALDNPNIQKWQYQQGPLYQKDSLESAVSEQQDHHCLFCKKTIEHYHHVIPRSENGSNTITNIVGLCTKHHDLVHKDDKLKEELAKKKQGLNKKYGALSVLNQIIPALTKELGSLFQGHFYVKTGKSTYDYREAHGVSKDHWLDAYCIVCSVLPSGCFDNTINSRVPYELKQFRRHDRQVCQQQNAKKKYYLDEKLVATNRHKAIKQETDSLEEYRNNGGVTDKLVVKEHKPTNKRLNRILPGALMTANGKLNIMVASRGLHNGIPDYYVFADDSKARPTKCTLINKNNGIVFVSNSVPQ

SEQ ID NO: 5653 - protein, 427 aa, unidentified; identical to SEQ ID NO: 5062
  REGION 1..427: note = Human gut metagenome

SEQ ID NO: 5654 - protein, 536 aa, unidentified
  REGION 1..536: note = Human gut metagenome
VLRPRYQYPTRWYPSREQGSGNGCLSGEENTDLEQEVSGTLSKGDHSHPGEQDFCVPAITIQGGPAMSVFVVGLNGCRLMPTSERKARLLLKHGKASVYRKVPFTIKLNYKTGSTTQSGYLGIDTGSQHIGVSVVREDGAVLHKEEIGLRDSMSKRKLMQSRASSRRGRRHRKTRYRHPKWRPKAKRVYCEIPDRKGRHWKKKEITFASKRAKGWLPPSLQSKTDHHIRWIKKLQDLLPEGYRLSIELGRFDPARLKDPEIHGELYQKGPQYDYENVRAYVLNRDRYTCQVCGKKGGKLHVHHILYRSYGATDDPQYMATVCSDCHNTENHQQGGILYQWMQKQKKFTRGLRDATFMNILRKRLIEAFPGATFTYGNITKADRERLRLPKSHGNDATAIAIVKTGIMTVKDKEPVIYIQQVRRKKRSLHEETPRKGRKEPNRKASRYDKNTKAVTVTKRKNKKKITITGCLFDRVELNGKKGWISGFTDKSCYVKDENDQYIRTSPKYKQVSLSKLKILHHCGNWAIGARQSLGKG

SEQ ID NO: 5655 - protein, 456 aa, unidentified
  REGION 1..456: note = Human gut metagenome
MAYTYVLDMNKNPLMPCHNGGFIRTLLKEKKAKVVRNKPFTVQLLFEVRNKYKQDMTLGIDAGYKHIGFSVSTSKAEVFSAELEQECGMVERNKERRMYRRQRRSRLRYRKPRFNNRIASKQKGWIAPSLKRKRDTHLRFIMMLKNIMPITKITVEIGLFDPALMKAIAEGRTLEDEDYQHGEAEGFENMKSYIRYRDGYTCQNPDCKCHKMSVSDREKLRLAVHHIGYYRNDRSNRPGNLITLCELSHTPENHQPGHLLYGWKPKVKSLKETAFMNIIRKEIVDTLKVIYPTTEIRYTYGYRTNMTRNEWHIEKSHHDDAFCIAGNYSKNRCNTLYFHQKRRNNRSLEIFYDAKYIDGRDRKRKSGKELFCGRTTRNKNYAGENLHKYRIKKISKGKRSIRRQHYFYQPKDIILFEGIKHVIKGSHCNGSRLILDTGKSVSVKKVRIHKFSGGVY

SEQ ID NO: 5656 - protein, 457 aa, unidentified
  REGION 1..457: note = Human gut metagenome
MTANIYLIDMNGNPLMPCRSSAFIRCRLKSKEARVVRRKPFTVQLLYPVRNCHMQDITLGVDAGYRYVGFSASTEKAELFSAELEQDCGMVERNKERRMYRRQRRSGLRYRKARFDNRVSKKKAGWTAPSLQRKRDTHLRFIMMLKSIMPVTKTVIEIGLFDPALMKATAEDREIEGADYQHGEAEGFENMKSYIRYRDSYTCQNPDCRCHKMNPKGREKLRLFVHHIGYWKKDRSNRPANLITLCELSHTAENHQEDGLLYGWKPKVKSLRETAFMNIVRKEIVERLKTIYPDMDVRYTYGYRTNMTRKEWCIVKTHHGDAFCIAGNYSLKRAETLYFTQHRRNNRSLEKFYDAKYLDSRDGKRKSGKELFNGRTARNKNFCSENLHQYRSQKLSKGRRSIRKHHYMYQPNNMVWYERRKYRVKGTHCNGTKVILDSGKSVSVKNISIAAYNQGVS

SEQ ID NO: 5657 - protein, 421 aa, unidentified
  REGION 1..421: note = Human gut metagenome
MIYVRSKDGKALMPSERGGRIGYLLRHGKAHVVSRVPFVVQLDYESTIYTQEVSLGIDAGSKHIGVSASSEKKELLAAQVELRSDVVNLLSTRKELRRTRRNRKTRYRKVRFDNRKKKDGWLAPSVEQKVESHLKVIRLVRKLLPITKTTIEVAPFDAQKIKNPDIKGDEYQQGEQMGFWNVREYVLARDGHKCVHCKGKSRDPILNVHHLESRKTGGNSPSNLVTLCETCHKAYHRGEFDLKIKRGTTLRDAAVMNIMRWSVYERAKAEFGNVYLTYGYITKHTRIENDIEKTHAADAFCIAKNVHARRSRTFFMCRCVPRHTRALHVANPKKGGIRRSCIASHKIGKSRFQRFDMVWWKGKECFIFGSTHGRPILRDVEGKQIAGQPSVNIKTIKFLKRLRNNILVEERTSESWIENES

SEQ ID NO: 5658 - protein, 411 aa, unidentified
  REGION 1..411: note = Human gut metagenome
MVYVQDIDGKPMMPTTRHGKVRRLLKDNKAVVVNTCPFTIKLTYKTSDYKQEIVLGVDSGTKHVGLSATTKSKELYASEVILRSDVVDLLSTRRGLRRTRRSRLRYRKQRFNNRVKSKKDGWIAPSVRHKIDSHIRIISFVYSILPVSKLIVEVAQFDTQKIKNPEISGKEYQEGEQLGFWNVREYVLARDGHKCQHCKGKSKDPILNIHHIESRKIGGDSPSNLITLCETCHKEFHKGNIKLKVSRGKSLRDAAVMGIMKWKLYEELKSKYDNVSMTFGYITKYNRINHGIEKSHVSDAFVISRNFNSCRLGYYYKRKLVRRHNRKIHKMKILKGGIRKRNQAPFKVFGFRLFDKVMFQGEEHFIYARRLSGQFNIRDINGENKKDVSCKKLKYVSHGLVSVKTNLFLSQ

SEQ ID NO: 5659 - protein, 434 aa, unidentified
  REGION 1..434: note = Fermentation metagenome
MVYVLNKDGKPLMPTNRCAKVRILLKEKKARVVKSKPFTIQLLYETKNYTQPITLGIDSGYLNIGFSAVTNNKELISGEVALLQGMSERLKEKRMYRKQRRSRLRHREPRFNNRKHKEGWLAPSIQHKLDSHVRFIEGLKSILPITNTIIEVANFDIQKIKDPSIVGKDYQNGEQKDFYNTREYIFYRDHYTCQICKRTDIPLQVHHIGYWKGNRSNRPENLATLCVKCHTPKNHEKGHILYNWKPKLNGYKDATFMSIVRWRLVDILNCQYTYGYITKSQRIKLNLPKTHYNDAFCIAGGKTQERIEPIFYKQVRRNNRSLEKFYDAKYIDIRTNEKVKSQELFSGRRTRNKNNNTENLHKYRREKVSAGRKTIRKKRYFYQPNDLVKYNNKICVVKGTFNKGAWVMLKLGKGKSVKTGDLKPYKFSKGFALV

SEQ ID NO: 5660 - protein, 269 aa, Moorena sp.
IMVYVVANDGQPLMPTERHGKVCRMLRSGMAKVIKKCPFTIQLQYESERNVQPVSLGVDAGSKHIGISATTKTKVLYESDVELRDDIVKLLATRRQLRRSRRSRKTRYRPARFDNRKRKEGWLAPSIQQKIGSHLTVVANVCKILPINQIIVETASFDIQKIKNPEIQGIEYQQGEQMDFWNVREYVFFRDGHTCQCCKGRSKDKILNVHHIESRKIGGNAPNNLITLCETCHKGYHNGTVILPKNIKRGMQFKDAAFMGIMRWAFTMH

SEQ ID NO: 5661 - protein, 427 aa, Moorena sp.; identical to SEQ ID NO: 2799

SEQ ID NO: 5662 - protein, 420 aa, unidentified
  REGION 1..420: note = Human gut metagenome
MQYVYVLNKHGEPLMPCSPRKARLLLKQKKACVIKRTPFTIKLLYGSTGYKQPVTLGVDAGSKHIGISATTEKHELYREEATPRNDVVDLLSARRAFRRSRRNRKTRYRAPRFDNRVHSKHKGWLAPSVEVKIQEHITLIEHVCRILPVTLVRVETAEFDTQRLKAMLEGKPLPVGTDYQLGEMYDEYNVRQYVLKRDNYTCQCCGAHSTKTKGVKLHVHHIETRRTGGNAPNNLITLCKACHKALHAEKVTLDGKKRGKPLKDAAFMGIMRKTLMERLRKELKIPVQGTYGYITKYLREKNGIPKSHTNDARCISKNPLAIPCDTCYYTKAVRHHNRQLHKATILKGGIRKANQAPYIVKGYRLWDKVAYNGTECFITGRRTSGYFALKKLDGTVASNSISYKKLRLLEAATNYIIERK

SEQ ID NO: 5663 - protein, 453 aa, Lactobacillus sp.; identical to SEQ ID NO: 4050

SEQ ID NO: 5664 - protein, 424 aa, unidentified; identical to SEQ ID NO: 3351
  REGION 1..424: note = Human gut metagenome

SEQ ID NO: 5665 - protein, 431 aa, unidentified
  REGION 1..431: note = Human gut metagenome
MPNKVYVINKHGRPLMPCSPAKARHLLDAGKAKVKKRTPFTIQLVYGSSGYTQEVILGVDAGSKTIGMSASTTKEELLSAEVKPRNDVVDLLSTRREFRRVRRNRKTRYRKPRFDNRVRSKHKEWLAPSVEVKIQEHITSIKRVCRILPVSKVVIETAEFDLQLLKAIADGKSVPQGEDYQKGEMYGHYNVRQYVLWRDNYTCQCCGAHATKKKEVRLHVHHLESRKVGGDAPSNLITLCDSCHEKFHKGIITAANLKKRKRRSMRDATFMGIMRKTLIQRLRAELTIPVAETRGYITKTTREKLLVLPKSHTNDALAIALGKHGFNVGYLPEIAQIDKIYTIRPVRHHNRQLHKVTILKGGIRKSNQTGKYVFGYRLFDKVQFNGQDCFIWGRRTTGIFTIKTINGKMIKDGISFKKLKPVEKSTSYLIA

SEQ ID NO: 5666 - protein, 424 aa, Moorena sp.; identical to SEQ ID NO: 2614

SEQ ID NO: 5667 - protein, 471 aa, Caldicellulosiruptor sp.; identical to SEQ ID NO: 3375

SEQ ID NO: 5668 - protein, 425 aa, Anaerostipes sp.
MLVYVVTKDKRPLMPCTPVIARLLLKQEKAKVKRRDPFTIQLLYETTEYRQDLELGVDTGSGKFATAVRTEQNEIVYLSEVAVRNDITSKMTERRTKRRSRRHRKTRYRKPRFDNRRNSKRKDRFSPTMQSKIHSHVKEIEYIQSILPITRIILETGQFDPHRMKNPALADPNVRHWGYQKGPNYGYENTRAMVLDRDNHQCQCCHGKRKDRHLEVHHIVFRSQGGSDDAKNLITLCHTCHQALHKGKIHLDLEGMEKGTLKYATQMNSIRKQLLRRYPEAIETYGYITKANRLAMDLPKEHYIDACVIVTEGRPFTINSLLYRKKCVSAGDFQQYHGERSEIRQTTGKIMGFRKYDKVRYFGKYYFIKGRMSTGYAVLMDVNGDTVKFSDMPWGFKTPKLERMERIQARSTWMVMGEKVTPNIV

SEQ ID NO: 5669 - protein, 413 aa, unidentified; identical to SEQ ID NO: 3023
  REGION 1..413: note = Human gut metagenome

SEQ ID NO: 5670 - protein, 502 aa, unidentified; identical to SEQ ID NO: 2616
  REGION 1..502: note = Human gut metagenome

SEQ ID NO: 5671 - protein, 406 aa, unidentified
  REGION 1..406: note = Human gut metagenome
MVYVQDIDGKPMMPTTRHGKVRRLLKDSKAVVVNTCPFTIKLMYKTSDYKQEIVLGVDAGTKHIGLSATTKSKELYSGEVILRSDIVDLLSTRRELRRTRRNRLRYRKPRFDNRIKSKRTGWVAPSVRHRIDAHIRVIDNVCSILPVSRVIVEVAQFDTQKIKNPDISGDEYQEGDQLGFWNVREYILARDGHKCQHCKGKSKDHILNVHHIESRKTGGDSPSNLITLCETCHKEYHKGNIDLKVKRGRSLRDAAVMGIMKWKLYEELKSRYPNVSMTFGYITKYNRIKYGIEKSHTSDAFVISRNFNAKRIERQYLKRLIRRHNRQIHKMKILKGGKKKNNQAPFEIFRFRLFDKVLYNNEILFVYGRRKSGNFNIRDFNGENPKDVSHKKLKLIRGKRHLIILK

SEQ ID NO: 5672 - protein, 489 aa, unidentified
  REGION 1..489: note = Human gut metagenome
MTMVYVQNKDGKPLMPTTRYCYVRLLLKEKKARVVSRTPFTIRLNYDTPDVTQDLILGVDPGRTNIGVAVVKEDGQCVFSAHLETRNKDVPLLMKKRAAFRRNHRTLDRRRKRQRRAKAAGTTIAEGSVERLLPGYEKPIVCNHIRNKEARFNNRSRPAGWLTPTANHLLQTHINLIAKVAKFLPITKVVIELNRFAFMAMDNPNIRRWEYQQGPLYGLGSVEDAVYAQQDGHCLFCEKPIDHYHHVVPRHKGGSETLANRCGLCARHHDLVHTDKSWAEKLVTRKGGMNKKYHALSVLNQIIPHLIEHLGSETPYEAYATDGKSTKGFRIAKNVPKEHYTDAYCIACSILDTDIEVSAPTSPFELKQFRRHDRQACIRQMVDRKYLLDGKVVATNRHKAIEQKSDSLQEFREAYGSAAVSQLTVKPHPPQYKDMTRIMPGAVMDFNGTIGVMQSSIVGRFYKSTKGYKAAPRRCVLLAQNAGMVFLPA

SEQ ID NO: 5673 - protein, 413 aa, unidentified
  REGION 1..413: note = Human gut metagenome
MTSYSFVLDANGKQLAPTKEQKAWFFIRKKRASLVSKYPIVIQLMKEIPEKEICQDEIRCGIDDGGLHVGIALVQKCKTKNKVVFKGTIEQRNDVKHLMEVRRNYRRYHRYHKRYRQARFDNRKSSKRKGRIAPSILQKRQATIRVINRLNKWINITNYWLEDVSVDIRALTDGYQSYRWQYQKSNRLDENIRKAAILRDGGKCMECGKSNCRLEVHHIKPKRRNGSNTLDNLITLCESCHQKTEGQEELYMDRYFSLLKSSDNKNLNYAQHVMIGKMWLRKQLSGLGVLYLTSGGDTANKRIDWNIEKSHTNDAVCITDLQPDTCDIKEWAIKPMRRQSKAKTDHVLGIHHRDLVEYTFKNGETHRGYVTALYPDQKAINFQSQTKHCKKVNARKCKLLWKYSKIYWFENAS

SEQ ID NO: 5674 - protein, 434 aa, Anoxybacillus sp.
MVFVLDTNKCPLAPCHEAVARKLLKQGKAAIYKRFPFTIILKKSVDESENETTYRLKIDYGSRHTGLAILRGQEVVWLGQLDHRTDIKERIDKRRAFRRARRNRKTRYRKPRFLNRKRKEGWLPPSLESRVQNIQTWVSRLKKLCPIGHISYENAKFDTQLMRNPKISGIEYQQGTLQGYEVREYLLEKFGRKCCYCGKENVPLEVEHIIPKSRGGTDRIDNLCLACRDCNQRKGNQTAEEFGCPHIQKQVKESLKDTSIINATRWKVYEVLKQARLDVECGTGARTKMNRIRLGLPKTHYFDACCVGESTPNHLYFKTKEVLFINAKGRGSRSRTNLDRYGFPRGYLARQKFFFGFQTGDMVKAIVPRGKYKGVWFGEVACRKTGNFDIKGKDGKRIAQGISYKYIQVIQRFDGYTYRKEEAELAQGAIPPRA

SEQ ID NO: 5675 - protein, 494 aa, unidentified
  REGION 1..494: note = Human gut metagenome
MTMVYVQNKDGKPLMPTTRYCYVRLLLKEKKARVVCTTPFTIRLNYDTPNITQDLILGIDPGRTNIGVAVVKEDGSCVFSAHLETRNKEVPLLMKKRAAFRRQHRTQDRRRKRQRRAIAAGTTVESNTIERLLPGYEKPIVCHHIRNKEARFNNRSRPAGWLTPTANHLLQAHINLIAKAAKFLPITKVVVELNRFAFMAMDNPNIRRWEYQQGPLYGLGSVKDAVYAQQDGHCLFCKKPIDHYHHVVPRHKGGSETLANRCGLCEKHHALVHKDKAWAEKLVTRKGGMNKKYHALSVLNQIIPHLMEYLGSETPYDVYATDGKSTKGFRIAKNVPKEHYTDAYCIACSILDADTKVSAPAEPFKLKQFRRHDRQSCIRQMVDRKYLLDGKVVATNRHKSIEQKSDSLEEFREAYGDAAVSQLTVRPHSPQYKDMARIMPGTVMDFDGIVGVFKGSSGRNNGTPNYYNSTKGARVLTKRCALLAKNAGMVFIPA

SEQ ID NO: 5676 - protein, 451 aa, Verrucomicrobium sp.; identical to SEQ ID NO: 4513

SEQ ID NO: 5677 - protein, 419 aa, unidentified
  REGION 1..419: note = Human gut metagenome
MIYIRSKDGKALMPSERGGRIGYFLRHGKAHVVSRVPFTVQLDYESTTYTQEVSLGVDAGSKHIGVSAGSEKKELLAAQVELRNDVVNLLSTRREQRRTRRNRKTRYRKIRFDNRKKKDDWLAPSVEQKVESHLKVIRLAHKLLPITKTTIEVAQFDVQKIKSPDIKGEEYQQGEQMGFWNVREYVFARDGHRCVHCKGKSKDPILNVHHLESRKTGGNSPSNLVTLCETCHKAYHRGEFTLKIKRGSSLRDAAVMNIMRWAVYERARLEFGKVHLTYGYVTKLTRIENGITKTHAADAFCIAKNVHAKRLRTFFQCRCVPRHTRALHVANPKRGGIRRSTIASHKIGKSHFQRFDMVRWKSKECFIFGSTNGRPVLRDIEGIKMHENVSVNIMTIKFLKRLRNNILVEEKDFRKLSII

SEQ ID NO: 5678 - protein, 372 aa, Aphanizomenon sp.
MNRVVENIVTYPINLKIDPGSKFTGISLVNNKEEVIWGMELQHRGAVIKGELETRSWVRRSRRNRHTRYRKPRFLNRKRPKSWLAPSLKHRVLTTNTWVKRLIKYAPIIAITQELVRFDLQQLENPEISGIEYQQGELKGYEVREYLLEKWERKCSYCDGKDIPLQIEHIQPKAKGGSNRISNLCLSCEKCNQKKGTQEIEKFLAKKPELLKRIKSQSKRPLKDATAVNSTRWDLFQTLKETGLPIATASGGRTKFNRRKLNLTKEHWIDAACVGVVENLNILTTNILKVKSTGQGTRRLCRINKFGFPCSHPRQKYEHKWNTGDIAYCKGVSGRVVVQSATRLEIRVDGKRIGGKLTDFKKLHSKDAYSYL

SEQ ID NO: 5679 - protein, 421 aa, unidentified; identical to SEQ ID NO: 4235
  REGION 1..421: note = Human gut metagenome

SEQ ID NO: 5680 - protein, 413 aa, unidentified; identical to SEQ ID NO: 2605
  REGION 1..413: note = Human gut metagenome

SEQ ID NO: 5681 - protein, 445 aa, Ktedonobacter sp.
  SITE 445: note = misc_feature - Xaa can be any naturally occurring amino acid
VSKVFVLDTQKQPLNPVHPGRARMLLSSGKAAVFKRYPFTLILKGRGEQPQVAPLRIKIDPGSKTTGIAIVNDTSGEVVFAAELSHRGQEIKKRLERRRGVRRSRRQRHTRYRKPRFENRHNKQRGWIAPSLESRVCNVVTWVQRLMRVCPIVAMSQELVKFDMQAMEQAEIKGIEYQQGTLQGYETREYLLEKWNRMCAYCSAKDIPLQIEHIHPRAKGGSDRLSNVTLACEACNSKKGTQDVRAFLATKPDVLRRILAQAQAPLKDAAAVNTTRWALYERLKALGIPLECGTGGRTKYNRVTRGIEKAHWCDAACVGASTPEHLHLSGVVPLLITADGHGSRQMCLMDKHGFPRTGPKQAKHVQGFQTGDMVRAIVTRGTKIGTYVGRVAVRATGSFNITTKQGTIQGISHRYCTALHTCDGYSYGQGEPLHPSPEKECLFPX

SEQ ID NO: 5682 - protein, 418 aa, unidentified
  REGION 1..418: note = Human oral metagenome
MLNNQKEYSFVLDAEGKKLDPTIVQNAWRLVRQKKATLIAKRPMTIQLKKVIDSPNDDEIRMGIDDGAKHVGLALVQKCKTKNKVIFVATMEHRNDVHKKMEQRRGYRQRRRYWKRYRKERFNNRVSVRRKGRIAPSILQKRQAVVRITDSLSKYIRIDSIYLEDVAIDVRVLTDEKRLYSWQYQQSNRLDENLRKATILRDNCKCQLCGKRNCRLEVHHITPRRMNGANTIGNLITLCSECHSNVTGREMEFAEQLYSKIGKKKNNVSLQYASHVMVGKTWLREELSKRVSVLLTTGGDTANKRIDWNLEKSHEIDAICITNLEPESVGVKPWNVKPLRHQRKTMKVKEILGFRHRDIVCYTFKNGEYHEGYVTALYPSEGKQKEGLNFLSPTKHCKRVNPKKCQRLDRPDKFLWLV

SEQ ID NO: 5683 - protein, 430 aa, unidentified
  REGION 1..430: note = Human gut metagenome
LSWSNYSNIQEVIETLVYVLNKQGNPLMPCKEAKARKLLKQNKAIIVKYEPFTIQLTFECENQTQEISLGIDAGSKYIGISATTEKQVLYEADVELRNDIVDKLSSRREARRTRRNRLRYRPTRFNNRVHSKHKGWLAPSIEQKINSHIQAIKRLHQILPISKIIVETAQFDIQKIQNPDIEGEQYQQGDQMGVWNVREYVLFRDDHKCQYCKGKSKDNRLNIHHIESRKTGGNSPNNLITLCESCHNNYHQGKIQLNIKRGKSFRDATFMGIMRKTLLLRLRQIYPNVQEIFGYITKNTRIENRLPKEHYVDARCIGGNPLAKPLEYYLYQKCVRRQNRKMTKDKFIKSGIKKSNQLVGDIFGFGLFDTVEYQKKKYFVFGKRKSGFLDIRTLDGEKVNNGSISYKKLKLIQKNNNILTERSLSIPTQP

SEQ ID NO: 5684 - protein, 471 aa, Caldicellulosiruptor sp.; identical to SEQ ID NO: 3268

SEQ ID NO: 5685 - protein, 406 aa, unidentified
  REGION 1..406: note = Human gut metagenome
MVYVQDINGKPMMPTTRHGKVRRLLKSNKAVVVNLCPFTIRLTYISDSYKQEIVLGVDAGTKHVGLSATTKSKELYSSEVILRNDIVDLLSTRRELRKARRNRLRYRKPRFNNRVKNKRPGWIAPSVRYKVDAHIRVIDNVCSILPISRIVIEVAQFDTQKINNPNISGKEYQEGNKLGFWNVREYVLARDGHKCQYCKGKSKSKILNVHHIESRKTGGDSPSNLITLCETCHKEYHKGNIDLKIKRGSSLRDAAVMGIMKWRLYEELKSRYDRVFMTFGYITKHNRIKYGIEKSHTSDAFVISMNINAKRIERQYLKRLIRRHNRQIHKMKILKGGKKKNNQAPFEVFGFRLFDKVLYNNEIFFVYGRRKSGSFNIRDFNGENSKDVSRKKFKLIRGKRHPIILK

SEQ ID NO: 5686 - protein, 426 aa, unidentified
  REGION 1..426: note = Mouse gut metagenome
MQVYVLNKHGQPLMPCSPAKARRLLEAGKAKVIKRTPFTIQLLYGSTGYKQTIIHGVDAGSKTIGMSASTKSAELFAEEVSPRNDVVKNLSTRREFRRNRRNRKTRYRKPRFNNRVHSKHKGWLAPSVEVKIQEHITAIQKVCSILPISKVVVETAEFDLQLLKAVADGKLVPEGEDYQKGEMLGQYNVRQYVLWRDGYTCQCCGAHGDGVKLHVHHKESRKVGGNAPDNLVTLCDKCHKGFHEGTISLTKLVRHGRKSTRDAAFMGIMRKTLMERLSAALPIPVVETKGYITKGTRAELLKLPKSHINDALAIAQGKHGFGITEPTAITRADRQYTVKPIRHHNRQLHKATVLKGGIRKSNQAAKYVKGFRLFDKVFYQAQECFIWGRRTSGSFLLQTLDGVKIKDGAGWKHLTLLERSSNYLIA

SEQ ID NO: 5687 - protein, 442 aa, Moorena sp.
MSKVLLLDMTKEPLDPVHPGRARLLLKEGKAAVYRRYPFTLILKTKVDAPVVSALRLKLDPGAKTSGLALVDDASGEVVWAAELGHRGASIKKRIDARRGVRRKRRSRFTRYRKPRFHNRKSSRRKGRLPPSLESRVANILTWVGRLRRLCPIEMISMELVKFDMQAMQNPEITGAQYQQGERMGYETREYLLAKWGRRCAYCGVEDVPLEIEHILCRARGGTHRVSNLTLACEPCNVKKGTQLIEDFLNKKPDVLARILAQAKTPLKAAAAVNATRWHLFERLKATGLPLETSSGGLTKYNRAKRHLPKTHWLDAACVGQSTPKPLETSQVVPLLIEATGHGNRQMCGVDEHGFPIRHRQRKKVHFGYQTGDLVRAVVPTGARAGTHVGRVLARASGSFDLRTKAGRQAGISYRYCRPIHRNDGYRYQKGARHAVPATQST

SEQ ID NO: 5688 - protein, 471 aa, Caldicellulosiruptor sp.; identical to SEQ ID NO: 3375

SEQ ID NO: 5689 - protein, 421 aa, unidentified; identical to SEQ ID NO: 4195
  REGION 1..421: note = Human gut metagenome

SEQ ID NO: 5690 - protein, 428 aa, Enterococcus sp.; identical to SEQ ID NO: 4335

SEQ ID NO: 5691 - protein, 536 aa, unidentified; identical to SEQ ID NO: 4526
  REGION 1..536: note = Human gut metagenome

SEQ ID NO: 5692 - protein, 419 aa, Aneurinibacillus sp.; identical to SEQ ID NO: 4563

SEQ ID NO: 5693 - protein, 480 aa, unidentified; identical to SEQ ID NO: 2726
  REGION 1..480: note = Human gut metagenome

SEQ ID NO: 5694 - protein, 408 aa, unidentified
  REGION 1..408: note = Human gut metagenome
MVYVQDIDGKPMMPTTRHGKVRRLLKDSKAVVVNTCPFTIKLMYKTSDYKQEIVLGVDAGTKHVGLSATTKSKELYASEVILRSDVVELLSTRRELRRTRRNRLRYRKPRFDNRVKNKYHGWVAPSVRYRIDAHIRIIDSICSILPISRIIVEVAQFDTQKIKNPDIYGNEYQEGDQLGFWNVREYVLARDGHKCQHCKGKSKDPILNVHHIESRKTGGDSPSNLITLCETCHKEYHKGNIDLKVKRGKSLRDAAVMGIMKWKLYDELKSRCDNVSMTFGYITKYNRIKYGIEKSHISDAFVISKNFNALMLEYHYKVKLVRRHNRQIHKQKVLKGGVKKPNQSPFEVFGFRLFDRVMFEGNCYFIFGRRKSGSFNIRDIDGGNQRDVTYKKLKLLRCKRFMIQKETN

SEQ ID NO: 5695 - protein, 413 aa, unidentified; identical to SEQ ID NO: 3220
  REGION 1..413: note = Human gut metagenome

SEQ ID NO: 5696 - protein, 418 aa, Anoxybacillus sp.
KRPLAPCHEAVARKLLKQGKAAIYRRFPFTIILKKSVDESEIKATYRLKIDYGSRHTGLAILRGQEVVWLGQLDHRTDIKERIDKRRAFRRARRNRKTRYRKPRFLNRKRKEGWLPSSLESRVQNIQTWVNRLKKLCPIGYISYENAKFDTQLMRNPEINGVEYQQGTLQGYEVREYLLEKFGRKCCYCGKENVPLEVEHIIPKSRGGTDRVDNLCLACHDCNQRKGSKTAEEFGYSHIQEMVKKTLKDASVVNATRWKVYEVLKQTGLDVECGTGARTKMNRIRLDLPKTHYFDACCVGESTTNHLYFKTKEVLFIKAKGRGSRSRTNLDRYGFPRGYLARQKFFFGFQTGDMVKAVVPRGKYQGVWFGEVACRKTGSFDIKGKDGKRIAQGINYRYVQVIQRFDGYAYGKGVAELA

SEQ ID NO: 5697 - protein, 471 aa, Caldicellulosiruptor sp.; identical to SEQ ID NO: 3268

SEQ ID NO: 5698 - protein, 473 aa, unidentified; identical to SEQ ID NO: 3562
  REGION 1..473: note = uncultured beta proteobacterium

SEQ ID NO: 5699 - protein, 471 aa, Caldicellulosiruptor sp.; identical to SEQ ID NO: 3268

SEQ ID NO: 5700 - protein, 431 aa, unidentified
  REGION 1..431: note = Human gut metagenome
MPNKVYVINKHGRPLMPCSPAKARHLLDAGKAKVKKRTPFTIQLVYGSSGYTQEVILGVDAGSKTIGVSASTKKEELFAANVIPRNDVVDLLSTRREFRRVRRNRKTRYRKPHFDNRVHSKHKGWLAPSVEVKIQEHITSIKRVCRILPVSKVVIETAEFDLQLLKAIEEGKPVPQGEDYQQGEMYGHYNVRQYVLWRDDYTCQCCGAHATKKKEVRLHVHHLESRKVGGDAPDNQVTLCESCHEKLHKGLITEKDFKKRKRRSTRDATFMGIMRKTLMQRLCSELPIPVVETRGYITKATREKLLVLPKSHTNDALAIAQGKRGFNVGYLPGIIQTDKIYTIRPVRHHNRQLHKAAILKGGIRKSNQAGKYVFGYRLFDKVQFNGQDCFIWGRRTTGIFTIKTINGKMIKDGISFKKLKLLEKSTSYLIA

SEQ ID NO: 5701 - protein, 414 aa, unidentified
  REGION 1..414: note = Human gut metagenome
MPCSPAKARLLLKEKKAIVKRRTPFTIQLTIATGETKQPVSLGVDAGYEHVGLSASTEKAELYASEVELRQDITDLLSARRALRQSRRNRKTRYRAPRFDNRIRTKRKGWLAPSVENRINAHLSRIEAVLRLLPVTKITVETASFDMQLLKNPDIAGKEYQEGEQLGFWNVREYVLFRDRHVCQHCYGRSKDPVLNVHHLESRRTGGDSPGNLITLCETCHKALHRGEITLKAKRGQSFRAEAFMGIMRWEVLNRLKASHSELEVNNTYGYRTKHARIANGIDKSHCADAFCIAGNLGAERLGEFFFQKQTRRNNRQIHKLSILKGGIRKRNQAPFEIKGFRLFDKVACQGEEGFIFGRRSSGSFDVRKLDGTRISAGISCKKLRLLEKRRTYLTEIRKEEALPPLPEGRGLRA

SEQ ID NO: 5702 - protein, 421 aa, unidentified; identical to SEQ ID NO: 4259
  REGION 1..421: note = Human gut metagenome

SEQ ID NO: 5703 - protein, 471 aa, Caldicellulosiruptor sp.; identical to SEQ ID NO: 3268

SEQ ID NO: 5704 - protein, 452 aa, unidentified
  REGION 1..452: note = Human gut metagenome
LPQMKGENMVIALDRNKRPLGFMGERRCRILLERKRAVLYRYFPTIVILKDVDARKLSGLSSYRIKIDPGAKYTGIAIVRDDTNEFMYAMQIEHRGEQIKKNLDTRRNARGDRRSRETGYRRPKWGNQCTAKEQRQSYDSRRDENWLPPSVKSTADNIISWVRRLSRWINITNCSFESVRFDTQLMENPEIEGVEYQQGTLYGYEVKEYLLEKYGHTCQYCGGKSSDPILEWEHMIPRSRGGSDRLKNATLACHNCNQDKGNHTLEEWQTILQDRLPKERGKQKELDQMRQKYVQQVMEGKAPLKGLRYAAWVNSSRRYSQRHLYLRFPELECSSGGRTKYNRNALGYPKEHHYDALCVGKIPEDGFVDWTHGYYLYAKATGRGTRLRGQLNGCGVIISKWKNRSKTAFGFQTGDLVVANVPKDTKYKYKGRFVGRVMIRKSGSFDIRTLSG

SEQ ID NO: 5705 - protein, 413 aa, unidentified
  REGION 1..413: note = Human gut metagenome
MVYVLNENGQPLMPTKNHAKVRVLLRQGKAKVVNNCPFTIQLLYSSTNYTQPVTLGVDAGSKHIGLSATTEDKELYAADVELRNDIARLLAARRESRRSRRSRKARYRKPRFNNRKRDKDWLAPSIREKIGTHLKVVDDTCKLLPVSKIIVETASFDIQKIKNPDVKSTDYQQGEQLGFWNVREYVLFRDGHKCQCCKGKSKDKILNVHHIESRQTGGNAPNNLITLCETCHTGYHKGTVKLPAKIKRGMKFKDAAFMGIMRWAFYGELKKRYPDVSLTYGYITKNTRIENGLPKEHYVDARCISGHPLAKPLGTVFYIKKVRCHNRQIHKFNLLKKGVRKRNQAEYEVYGFRLYDKVSWKGRTCFVFSRKSTGYITLRLLDGTRVKASASYKKIKLLRMRSGYLIELRSAIG

SEQ ID NO: 5706 - protein, 384 aa, unidentified
  REGION 1..384: note = Human gut metagenome
LRVFVLNKRGKPLMPCSPAKARLLLKEKKAIVKRRTPFTIQLTIATGETKQPGSLGVDAGYEHVGLSASTEKAELYASEVELRQDITDLLSARRALRQSRRNRKTRYRAPRFDNRISTKRKGWLAPSVENRINAHLSRIEAVLRLLPVTKITVETASFDLQLLKNPDISGKEYQEGEQLGFWNIREYVLCRDGHVCQHCYGRSKDPVLNVHHLESRRTGGDSPGNLITLCETCHKALHRGEITLKTKRGQSFRAETFMGIMRWEVLNRLKASHSELKVHNTYGYLTKHARIENGIAKSHGADAFCIAGNLGAERLGEFFFQKQTRRNNRQIHKLSILKGALRKRNQAPFEVKGFRLFDKVACQGEEGFIFGRRSSGFFDVRKLD

SEQ ID NO: 5707 - protein, 441 aa, Acidithiobacillus sp.; identical to SEQ ID NO: 5206

SEQ ID NO: 5708 - protein, 433 aa, Fervidobacterium sp.
MVFVISKDGKPLMPTKRLGKVRRLLKQGLAKVVNREPFTIQLLYETTNYTQPVTVGIDTGSKVVGVSAVTDKEEIFSAEVQLRQDIKKLLLERRQHRRFRRYRKTRYRKPRFLNRRKEDGWLPPSLQWKVDAHVRIVNKLSKIIPITKVVVEVAPFDIQKVQNPDIEAKDYQNGPQKGFSDVRDYCLWRAGYKSELSGKTGILEIHHIIPRSEGGTDAPNNLIVLTTQEHKMLHEGKIKIPKSRLEQIKVFKHVAHVSTIGWHIVNKLRQNYHVEITYGSITKEKRILYGLEKSHRDDALVIAGGNIQERASEWYFGKFFRRQNRSLHKANPIKGGKRPINTVKQVRGFRRFDKVECEGEKGIITGLRSSGYFSISSLSGEKISDSVKYTKLRLIERAKTLMFERRERATCSWLKPRVSVARFHEHTNDIASS

SEQ ID NO: 5709 - protein, 465 aa, unidentified
  REGION 1..465: note = Human gut metagenome
MSTCVCVLSNNGERLMPTIRLGKVRHLLKDGKAKIIKHHPFTIQLLYDSKTNTQPIEICEDVGYNYIGISVKSESHEYVSAQYDTLQDEKEHHDDCRKYRRTRRNRLRYRKPRFDNRKRDDGWLAPSLEHKKELNVNVIKMYCEVMPITHAIVEVGSFDTMLVKAIEEGKATPESADYQKGPRYKLATLREAVFYRDNYTCQVCGRKANEGAILHVHHMFYWKGRHGNSLSELITVCEKCHTPANHQKGGKLYGFGEDIKFANLSGAAFMNTVRWQIVNVLNAAFGKPFVTFTYGAMTKEKRIALHLEKSHNNDAYAMGSFHPVNRCAFEHYEKVKRNNRILEKFYDSQYIDIRTGEIATGKELFNGRISRSHKKDSENLHKYRGKRICKGHRALRRKKVALNPGDLVSLNGEILVVHGTHTKKNGSVNVEFKTPSRGGKKSASLKKLKIVKTSNLMHSAWTKVA

SEQ ID NO: 5710 - protein, 438 aa, Methanohalobium sp.
MVFVLNKNKKPLTPCHPAKARILLKAGKATIHKKYPFTIRLKELKSDDVKDDFRLKIDYGSRYTGLAILKNNKDVIWLDQVHHRTDIKKKLDDRRNFRRRRRSQNLRYRKPRFDNRKKPEGWLPPSLQSRVDNIQTWITRLRELVPINCLSYENVNFDTQLMQNPEIKGVEYQQGTLQGYNVREYLLEKFQRTCAYCGKQDVQLEIEHIVPRSRGGSNRVSNLTIACHDCNQRKSNLTAEEFGHPEVYEKAKKPMKDAAVINATKDKVLDVLKNTGLPIECGTGALTKMNRIKLNLPKDHHFDACCVGESTPDELRFKTNSVLHIHAKGRGSYKRCKLDKYGFPRKPAPRIKYIFGFQSGDIIKAIVEKGKYKGTWKGAVACRSNGYFDIKNGTKKIAQGINHKYFKLVQRFDGYTYQLDRLNLNKNTNTDGRNSSHC

SEQ ID NO: 5711 - protein, 420 aa, unidentified
  REGION 1..420: note = Human gut metagenome
MQYVYVLNRHGEPMMPCSPGKARLLLKQQKACVVKRTPFTIKLLYGSAGYKQPITLGVDAGSRHVGLSASTEKRELYREEFSPRNDVVKLLSTRKQNRCSRRYRKTRYRPPKFDNRVHSKHKGWLAPSVEVKIQEHITVIKHICKILPISLVRVETAEFDTQRLKAMLAGKPLPVGTDYQLGEMYDEYNVRQYVLKRDHYTCQCCGAHNTAKKVVKLHVHHLESRKTGGNAPSNLVTLCTTCHKNLHKGRVTLDGKERGKPLRDAAFMGIMRKTLTARLKEELPIPVQGAYGYITKMSREQNDIKKSHVNDARCISKHPLAEPCSVCYRTKAIRHHNRQTHKANFSKKGIRKRSQMPYLVEGFRLWDKVLYKGQECFVSGRRSSGSFALKKLDGTSISKGVTFKKLRLLEPATNYLIERM

SEQ ID NO: 5712 - protein, 427 aa, Moorena sp.
MRVFVLDKNRKPLDPCHPAKARKLLKSGRAKVLRRYPFTIIIQDLEVENCVTHDHQLKIDPGAKTTGLAIVQGERVIWGAELTHRGFQIREALTSRRQLRRSRRNRKTRYRQPRFLNRKKPKGWLAPSLMSRVHNILTWVNKLIKFCPVTGISQELVRFDTQKMLNPEISGIEYQQGTLYGYELREYLMEKWDRTCAYCGAKNTRLEIEHIKPKSKGGSDRVSNLAIACHDCNQAKGNQEIEQFLSKKPSILKRILSQAKKPLADAAAVNATRWKLHDELKLIGLPVEVGSGGLTKYNRCRQNLPKTHWLDAANVGKVDTLYIEDYQTLLIAAKGHGKRQICGTNKYGFPIRHNSRKKIHKSFQTGDIVKAVVTKGKKIGTYVGRIATRKTGSFDITTAKGKVSGISYKYCEAIHRKDGYSYQFHGE

SEQ ID NO: 5713 - protein, 427 aa, Moorena sp.
MRVFVLDKNRKPLDPCHPAKARKLLKSGRAKVLRRYPFTIIIKDLEAENCSTHDHQLKIDPGAKTTGLAIVQGDRVIWGAELTHRGEHIREVLTSRRQLRRSRRNRKTRYRKPRFLNRTRPKGWLPPSLMSRVHNILTWVKKLIKLCPVTGISQELVRFDTQKMLNPEISGIEYQQGTLYGYELREYLLEKWNRTCAYCGAKNTRLEIEHIKPRSKGGSNRVSNLTIACHDCNQAKGNLEIEEFLSSKPNILKRILSQAKKPLADAAAVNVTRWKLHDELKLIGLPVEVGSGGLTKYNRCRQNLPKTHCLDAANVGKVETLYIEDYQPLLIAAKGHGKRQICGTNKYGFPIRHNSRKKIHKGFQTGDIVKAVVTKGKKIGTYIGRVATRKTGSFDITTAKGRVSGISYKYCQAIHRKDGYSYQFHGG

SEQ ID NO: 5714 - protein, 480 aa, unidentified; identical to SEQ ID NO: 2726
  REGION 1..480: note = Human gut metagenome

SEQ ID NO: 5715 - protein, 443 aa, Ktedonobacter sp.
MEQSIIYVLAISGKPLMPTRRRNKVWYWLRCGLAKVVSREPFTIQLRFETTEYRQPVTVGVDTGSKTVGMAATTNGAVVYQAEVHLRTDITDKLTQRRQYRRTRRSRNTRYRAARFANRRKPAGWLPPSLRSKAEATVKAVHFVARVLPVCQVNVEVGSFDTQKMQRPEISGLEYQQGELQGYLLREYLLEKWQRHCAYCGAKEVPLEVEHIVPRSRGGSNRVSNLTLACKPCNVRKEKLTAAEFGYPKIQAQARVPLKDAAHVSTLKTAVVQRLQAIFGTDQVDVTYGYETKYKRIQVLGLPKSHTNDAVAIACVMGEVVEPCAVAHQLRCVPRGNYQLFNGKHSEHKVWAPRKVKGWKLHEQVAAKGQVGYIGGRRLKGSFVLKDLITGKTILEVVPSKLRRIARCTHGWIAATMQFTEQEGGASSPGSSRGVPAPQNSWK

SEQ ID NO: 5716 - protein, 456 aa, unidentified
  REGION 1..456: note = Human gut metagenome
MSTCVCVLSNSGERLMPTIRLGKVRQLLKDGKAKIVKHHPFTIQLLYDSKTNTQPIEICEDVGYNYIGISVKSESREYVSAQYDTLQDEKEHHDDCRKYRRTRRNRLRYRKPRFDNRKCSEGWLAPSLEHKKQLNIRLIERYVSVIPITHATVEVGSFDTMLLQAIQKGKSKPEGVDYQKGPRYNLATLREAVFYRDNYTCQVCGRKIADGAILHMHHMFYWKGRHGYQLDELVTACEKCHTPANHQKGGKLFGFGEDKEFANLSGAAFMNAVRWQIVDALYATYGKEFVTITYGAMTKEKRIALQLEKTHSNDAYAMGNCHPAHRCEFGHYQKRCRNNRVLEKFYDATYIDTRTGNKAKGKELFNGRISRNHKKDSEDLHKYRSKKMSKGCRSIRRQRYAIQPYDTVRLEGKTYITSGCHNKGTRLLIPANGKSKSVAISKVQVVCHAGAWIQII

SEQ ID NO: 5717 - protein, 456 aa, unidentified
  REGION 1..456: note = Human gut metagenome
MNTCVCVLSNNGERLMPTFRLGKVRRLLKDGKAKIVKHHPFTIQLLYDSKTNKQPIEICEDVGYNYIGISVKSESHEYVSAQYDTLQDEKEHHDDCRKMRRARRNRLRYRKPRFDNRKRSEGWLAPSLKHKKELNVNIVKMYCAVMPITHATVEVGSFDTMLVKAIQEGKAIPEGADYQKGPRYNLATLREAVFYRDNYVCKVCGRKATEGAILHMHHMFYWKGRHGYKLDELVTACEKCHTPANHQKGGKLFGFGEDKEFADLSGAAFMNAVRWQIVNALHTTYSKEFVTITYGAMTKEKRIALQLEKSHNNDAYAMGDFHPVHRCGFRHYQKRRRNNRVLEKFYDATYIDTRTGNKAKGKELFNGRISRNHKKDSENLHKYRSKKVSKGRRSIRRRRYAIQPYDTVRLEGKTYITSGCHNKGTRLLIPVNGKSKSVAISKVQVVCHAGPWIQII

SEQ ID NO: 5718 - protein, 413 aa, unidentified; identical to SEQ ID NO: 2605
  REGION 1..413: note = Human gut metagenome

SEQ ID NO: 5719 - protein, 423 aa, Oscillatoria sp.
MSNFVFVLDTQKRPLNPIRPGMARKLLTNGSSAVFRRYPFTIILKVEVITTPERIALKIDPGSKTTGIALVQGEKVIFGAELTHRGQAIKASLESRRLLRRARRNRNTRYRQARFLNRTRPKGWLAPSLQHRVETTLTWVNRLIRLAPIGSVAQELVRFDLQQLENPEISGVQYQQGTLFGYEVREYLLSKWDRKCAYCGVENVPLQIEHIHPKAKGGTNRISNLCLACEKCNIKKGTQDIEQFLAKKPEILKRILSQAKRPLKDAAAVNSTRWALFNRLKETGLPSSTGSGGLTKFNRTRLNLPKTHWLDAACVGQVESLEVLTTKPLLIQANGHGTRQMCRTDKFGFPSRYVPRVKFVKGFQTGDMVKAVVTSGKKVGKYVGRVAVRSTGSFNISASELVSGISYKYCSIIHRKDGYSYAA

SEQ ID NO: 5720 - protein, 417 aa, unidentified
  REGION 1..417: note = Human gut metagenome
MIYVRSKEGSVLMPTERCGKIGYLLRHGKAHVVSRVPFVVQLDYDSTTYTQDVSLGIDAGSKHIGVSASSEKKEMLAAQVELRSDIVKLLSTRRELRRNRRNRKTRYRKARFDNRKKKDGWLAPSVEQKIESHLKVIRLVHKLLPVTKTTIEVAQFDAQKIKNPDIKGDEYQQGEQMGFWNVREYVLARDGHKCVHCKGKSKDPILNVHHLESRKTGGNSPSNLVTLCETCHKAYHRGEFDLKIKRGSSLSDAAVMNIMRWAVYERAKLEFLNVHLTYGYVTKRTRIENGIAKTHAADAFCIAKNVHAMRLSSFFMCRCVPRHTRALHVANPKKGGIRRNTIASHKIGKSNFQRFDMVRWKGMDCFIFGSTNGRPVLRDIDGLQVANQPSVNIKTIKFLKRLKNNILIEEKNFRKLN

SEQ ID NO: 5721 - protein, 443 aa, Caldicellulosiruptor sp.; identical to SEQ ID NO: 2385

SEQ ID NO: 5722 - protein, 443 aa, unidentified
  REGION 1..443: note = Human gut metagenome
MSVFVVGLNGCRLMPTSERKARLLLKQGKAFVEQKVPFTIRLNYKTGSTTQLGYLGIDTGSQHIGVSVVREDGTVLHKEEIGLRDSMSKRKLLEAKASLRRGRRYRKTRYRHPKWRPKTKRVYCEVPDRKGRHWQKKKITFTSKRPKGWLPPSLQSKTDHHIRWIKKLQDLLPEGYRLSIELARFDPARMKNPEIHGDLYQKGPQYDYENVRAYVLDRDRYTCQICKKKGGKLHVHHILYRSHGATDDPQYMVTVCSDCHSAQNHLPGGILYQWMQEQKRFSRGLRDATFMNILRKRLIRAFPEAVFTYGNVTKVDREKLKLPKSHGNDATAIALVKTGITAVKDKESVICIQQVRRKKRSLHEETPRKGRKEPNRTAARNNKNTKAVTVTKRQNKKKVSMTGCLFDRVELNGKKGWISGFTGKSCYVKDADDQYLSTSPKYK

SEQ ID NO: 5723 - protein, 431 aa, unidentified
  REGION 1..431: note = Human gut metagenome
MPDKVYVISRLGHPLMPCSPANARHLLDDKKAKVVKRMPFTIRLLYGSTKYIQPIILGVDAGSKTIGLSASTAKEEVFAAEVMPRNDVVENLSTRREFRRARRNRTTRYRKPRSDNRVRSNHERWLAPSVKVKIQEHITSIKRVYTILPISKVVIETAEFDLQLLKAIQEGKPIPEGEDYQKGEMYGSYNVCQYVLWRDNYTCICCGVRGTPKNPVRLHVHHFESRKYGGNAPDNHGTLCDDCHKKFHLGIITDVKLKTRRRQSTRDAAFMGIMRKTLMWRLRTELFIPVAETKGYITKATREKLLVLPKSHTRDALAIAQGRHGFGIKEYAYVEPANHIYTVRPVRHHNRQLHKASILKGGIRKRNQASKYVFGFRLYDKVLYQGKACFVWGRRTSGTFLLRTIDGIKVKDGVSYRNLTLLERSSNYLIA

SEQ ID NO: 5724 - protein, 418 aa, unidentified
  REGION 1..418: note = Human gut metagenome
MVYVLGQDGHPLMPTCRHGKVRRMLKSGMAKVVQRCPFTIQLQYESTTHTKNINLGIDAGSKTIGVSVTTDTKVLYESEVVLRNDIVELLSGRRALRRSRRNRKTRYRKPRFDNRKKHDGWLAPSIRQKIEIHVTVVENVMKILPVTKIIVETASFDIQKIKNPEIEGEEYQHGEKLDFWNVREYVLFRDGHICQCCKGKSKDNILNVHHIESRKTGGNAPNNLITLCETCHQAYHKGIITLPKEIHRGMRFRDASFMGIMRWAFYDRLKELYTPLDVEVVNTYGYITKNTRIEHGLPKVHYVDARCISDNPASKPMDHYYFQKKVRCHNRQIHKNTILKGGIRKRNQAAYLVNGFRLFDKVKYQNQEYFIFGRRSSGFFDIRTLDGTKVNKGSISCKKFQLVEKSKHYLTEQRKVTA

SEQ ID NO: 5725 - protein, 458 aa, Halomonas sp.
MAVFVLDKQKQPLMPCSEKRARLLLERGRAVVHKRYPFCIRLKDRVGGETQPLRLGLDPGSKTTGLALMRESDGEQRHVLCLFDLVHRGFQIKKALAQRAAFRRRRRSKNLRYRAPRFDNRKRKAGWLPPSLQHRVDTVMAWVERLSRLAPITGISQELVRFDTQKLENPEISGVEYQQGTLLGYEVSEYLLEKWGRACAYCGTAETALEIEHVVPRSRGGSNRVSNLTLSCHACNQAKDSLPLADFFARDKGLKKRFKANGLLADARLERVQRELKRPLRDASAVNATRWALFTALNATGLPVAVGTGGRTKYNRQRLDIPKTHALDAACVGVFETLHDWAVPTLAIQCAGRGSYQRTRLTKHGFPRGHLMHQKQVHGFQTGDMVRAVVPTGKKAGTHTGRVAVRKTGSFNIQTDQGAVQGISHRHCTLIQRGDGYGYYVTPTIHQPTKGEAGQAVA

SEQ ID NO: 5726 - protein, 416 aa, unidentified
  REGION 1..416: note = Human gut metagenome
MVYVLDKNGQPLMPTDRHRKVRLMLQSGQAKVIKRCPFTIQLTYNTGHQAQEISLGIDAGSKHIGVSTTTKIKVLYEVDVELRNDIVDLLSSRRELRRGRRNRKTRYRPARFDNRRREDGWLAPSIRQKIGTHLTVVENICKMLPISRIMVETASFDIQKIKNPDIQGAEYQQGDQLEFWNVREYVLFRDGHTCQCCKGKSKDKILNVHHIESRKTGGNAPNNLITLCEICHTGYHKGAVQLPKTVKRGMRFKNAAFMGIMRWAFYEALKQQYEPVGTPVHNTYGYITKHTRIAYNLPKEHYVDARCISGNPEASSNGEYYYQKKVRCHNRQIHKLTVLKGGIRKQNQATYLVKGYRLFDKVSYQGKGYFVFGRRQSGFFDIRTLSGEKVNKGSLSCKKLKFIATRTYYLTERRAV

SEQ ID NO: 5727 - protein, 406 aa, unidentified; identical to SEQ ID NO: 4082
  REGION 1..406: note = Human gut metagenome

SEQ ID NO: 5728 - protein, 454 aa, unidentified
  REGION 1..454: note = Human gut metagenome
MNTCVCVLSNNGERLMPTFRLGKVRRLLQDGKAKIVKHHPFTIQLLYDSKTNKQPIEICEDVGYNYIGISVKSESHEYVSAQYDTLQDEKEHHDDCRKMRRARRNRLRYRKPRFDNRKRSEGWLAPSLKHKKELNVNIVKMYCAVMPITHATVEVGSFDTMLVKAIQEGKAIPEGADYQKGPRYNLATLREAVFYRDNYVCKVCGRKATEGAILHMHHMFYWKGRHGYKLDELVTACEKCHTPANHQKGGKLFGFGEDKEFADLSGAAFMNAVRWQIVNALHTTYSKEFVTITYGAMTKEKRIALQLEKSHNNDAYAMGDFHPVHRCGFRHYQKRRRNNRVLEKFYDATYIDTRTGNKAKGKELFNGRISRNHKKDSENLHKYRSKKVSKGRRSIRRRRYAIQPYDTVRLEGKTYITSGCHNKGTRLLIPVNGKSKSVAISKVQVVCHAGAWIQ

SEQ ID NO: 5729 - protein, 416 aa, Moorena sp.
LVYVLSKNGNPLMPTNRHGKVKHLLKDGKAKVVRRTPFTIQLLYDSPEYTQPITLGVDAGSKVVGLSATTEKKELFVSEVTLRDDIPELLSTRRQNRRTRRNHLRYRMARFLNRTASKKEGWLAPSVKHKVDSHLKVIENVHRILPVSRIVIETASFDIQKIRNPEISGREYQQGEQLGFWNTREYVLWRDNHECQHCHGKSKDRVLNVHHKESRKTGGDSPGNLVTLCETCHKSHHAGRIKLNLTPNKSYRDASFMGIMRWYVYNSLKELYPEVSMTFGYITKNNRINNNIEKAHSADAYCISGNMNAKRIDEIYNQAFKRKHNRQIHKGNFLKGGKKKLNQSAYEVKGFRLFDHVRYRDKECFIFGRRTSGYFDLRKLDGSVVHRSASFKELTLLKRQNTILIERKGRNGVLLS

SEQ ID NO: 5730 - protein, 418 aa, unidentified; identical to SEQ ID NO: 5294
  REGION 1..418: note = Human gut metagenome

SEQ ID NO: 5731 - protein, 423 aa, Oscillatoria sp.; identical to SEQ ID NO: 5009

SEQ ID NO: 5732 - protein, 443 aa, Caldicellulosiruptor sp.; identical to SEQ ID NO: 2385

SEQ ID NO: 5733 - protein, 438 aa, unidentified; identical to SEQ ID NO: 4848
  REGION 1..438: note = metagenome

SEQ ID NO: 5734 - protein, 423 aa, unidentified
  REGION 1..423: note = Human gut metagenome
VWNKRRKPLMPCSPAKARLLLKEKKAIVKRRTPFTIQLTIATGESKQPVSLGVDAGYKHVGFSASTEKAELYASEVELRQDVSDLLSARRALRQSRRNRKTRYRAPRFDNRIRTKRKSWLAPSVENRINAHLSRIEAVLRLLPVTKITVETASFDMQLLKNPDISGKEYQEGEQLGFWNVREYVLFRDGHVCQHCHGRSKDPVLNVHHLESRRTGGDSPGNLITLCETCHKALHRSEITLKTKRGQSFRAEAYMGLMRWEVLNRLKTSHPGLEVHNTYGYRTKYTRIVNGIDKSHCADAFCIAGNLGAERLGEFFFQKQTRRNNRQIHKLSILKGDIRKRNQAPFEVNGFRLFDKVACKGEEGFIFGRRSSGFFDVRKLDGTCISAGISYKKLHLLEKRRTYLTEIRKEEALPPLPEGSGLRA

SEQ ID NO: 5735 - protein, 431 aa, unidentified
  REGION 1..431: note = Human gut metagenome
MPNKVYVINKHGRPLMPCSPAKARHLLDEGKAKVKKRTPFTIQLVYGSSGYTQEVILGVDAGSKTIGMSASTTKEELLSAEVKPRNDVVDLLSTRREFRRARRNRKTRYRKPRFDNRVRSKHKGWLAPSVEVKIQEHITAIRRVCGILPVSKVVIETAEFDLQLLKAIEEGKPVPQGEDYQQGEMYGHYNVRQYVLWRDGYTCQCCGAHATKKKEVRLHVHHLESRKVGGDAPDNQVTLCESCHEKLHKGLIAEKDFKKRKRKSTRDATFMGIMRKTLMQRLCSELPIPVIETRGYITKATREKLLVLPKSHTNDALAIAQGKQGFNVGYLPGIVQINKIYTIRPVRHHNRQLHKATILKGGIRKSNQTEKYVFGYCLFDKVQFNGQDCFIWGRRTTGIFTIKTINGKMIKDGISFKKLKLAEKSTSYLIA

SEQ ID NO: 5736 - protein, 462 aa, unidentified
  REGION 1..462: note = Marine metagenome
LIQNTLQDPKARPAQNRVLVLDKNKQPLMPCHPARARELLRKGRAAVYRRFPFTIIIKDREGGATQPTVLKFDPGSKKTGIAVVADFQRGKRCIFAAELEHRGEQIKKALEKRRNIRRSRRSRKTRYRKARFENRRKPKGWLAPSLQSRVDNIESWTRKFRALIPVSSLSVENVRFDTHKLVNPEVQGVEYQQGTLFGYQVREYLLEKWGRKCAYCGKQNVPLQVEHMTPKSRGGSNRVDNLTLACEMCNQKKGSKTAGGFGFPGLCKKADRPLRAVAVVNSTRPAILEVLKSTGLSVETGSGGQTKFNRSQQGYAKEHWIDAMCVGDSGRHVFVEKCHEVLEIKAMGRGTRQMCRVDRFGFPRTGAKKKEKRVDGFQTGDIVKAIVTKGKKKGTYVGRVAVRSSGNFNIKEGKKTTQGIAAKYCKMVQKIDGYNYNNRMGVSSPLLRRGSPRLGKMEAFDR

SEQ ID NO: 5737 - protein, 418 aa, unidentified
  REGION 1..418: note = Human gut metagenome
VVYVLSKTGQPLMPTENNAKVRVLLKQQKAKIVHRCPFTIQLLYDSTDYTQPVSLGIDAGSRHIGVSATTETKVLYEADVTLRNDIVDLLSTRREARRTRRSRKTRYRKPRFNNRTRKDDWLAPSVKQKMDTHLTTLRKVTEILPVNSITVETASFNIQKIKNPNIASTGYQHGEQLDFWNVREYVLFRDGHKCQCCKGKSKDPVLNVHHIESRKTGGNAPNNLITLCETCHKGYHNGTVSLPKNIRRGMKFNDAAFIGAMRWAFFNRVKETYEPLGIMVNMTYGYITKNTRIEHNLPKDHFIDARCISGHPDATSDGTVFYQKKVRCHNRQIHKQKILKGGIRKRNQAPYLVKGFRLFEKVKYHGKQYFIFGRRSSGFFDLRTLDGTKVNKGSVSYKKIRSLDMPRSYLTEERKAIV

SEQ ID NO: 5738 - protein, 453 aa, unidentified
  REGION 1..453: note = Human gut metagenome
MLMAVAVVSRTGVPLMPTSPYRARKLLASGKAEKYGYDPFTIRLTERETGDTQPVELCMDTGYIHIGVSVKSEKHEYLALQIDTLTDEKKKHEKCREKRRNRRSRKRYRKPRFDNRKRDKGWLAPSLEHKKEIHVRAAERICRVVPVTDITMEMGNFDTQVLKSREEGRPLPQGTDYQQGERYGTATLREAVFSRDNYTCLCCGRTMKDGAYFHVHHIRYRSQGGTDRMANLATVCEKCHTPANHQPGGKLYNWKPEIKSFKGATFMTAVRWQMYREIKEKIPDVSVHLTYGAATKERRRALDIEKSHVNDAFVMGRFHPGHRARPELYIKKRRNNRVLESFYDAKYIDSRDGKRKPGKELFNGRISRNHKKDSENLHKYRLRKVSKGKRSIRKKHYPIQPHDILVYCGRKYETAGCHNLGTGAILLPERKSIAVSKLKIYRYSGGYYKAEFN

SEQ ID NO: 5739 - protein, 414 aa, unidentified
  REGION 1..414: note = Human gut metagenome
MPCSPAKARLLLKEKKAIVVRRTPFTIQLTIATGETKQPVSLGVDAGYKHVGLSASTEKAELYASEVELRQDITDLLSARRALRQSRRNRKTRYRAPRFDNRIRTKRKGWLAPSVENRIDAHLSRIEAVLRLLPVTKITVETASFDLQLLKNPDISGKEYQEGEQLGFWNIREYVLCRDGHVCQHCYGRSKDPVLNVHHLESRRTGGDSPGNLITLCETCHKALHRGEITLKAKRGQSFRAEAFMGIMRWEVLNRLKASHPELEVNNTYGYRTKHARIANDIAKSHCADAFCIAGNLGAERLGEFFFQKQTRRNNRQIHKLSILKGGIRKRNQAPFEVNGFRLFDKVACQGEEGFIFGRRSSGFFDVRKLDGTRISAGISYKKLHLLEKRRTYLTEIRKEEVLPPLPEGRGLRA

SEQ ID NO: 5740 - protein, 415 aa, Bacillus sp.
MRVFVKNLRGELLMPCSPRKARLLLKQGKAKIVGYTPFTIQLQYATGETVQPVTIGVDSGAKYVGIAITTEERVLTKGTIALRQDVKENLTLRATLRRSRRQRKTRYRKARFLNRKKKEGWLPPSIQSRIDNVIHWIEKFKSLLPSPKVIVEVGKFDAQKLKNPDIQGIEYQQGDAFGFWNIRYYVFARDQYTCQICKKKGGILHTHHIIERHKGGSDMADNLVTVHEECHQKFHKGKIKHSFKKPKQYKETAFMNILRLQIMKRLDCEITYGSYTTPIRKELRLPKTHVNDAIAITNPKRLQEYDQSGEFRIKQFRKKKRSLHEATARKGRKTKNTKANRNKKNTSHVDGIYLGNKVKGFGQIGFVTGFTGKMVYIQDIDGHYIQNPSKSYKQVKISDIECIHHNNNWLFLQVS

SEQ ID NO: 5741 - protein, 465 aa, unidentified
  REGION 1..465: note = Human gut metagenome
MVIALDRHKKPLGFVIERRCRKLLEVRRAVFYRHYPAVIILNDVDARNIYKLPSYRIKIDPGAVHTGIAIVCNETNEVMYFLQIEHRGSEVKKALITRKQTRRNRRSRETRYRRCKFKNGGDFDSSRKNGWLPPSVKSTADNVIHWVEKLCRYINITECSFEAVRFDSQLMDNPEIGGEEYQQGTLSGYELREYLMEHFRHTCQYCGGESGDPVLEWEHKIPRSRGGSDSVKNASLACSCCNRDKGNRTLEEYLEDSKHISPKGKSEKALNEARISHISGILEKGTIYGSNRYSAWVNSTRRYIEKYLFLMFDDVECCSGGRTKYNRIKLKLPKDHHYDALCVGSVPKEGYTDRTNSYVLYVKATGRGTRFRGQCNSCGVITVKYKNNSKRKFGFQTGDIVQLNKPKGKDTGQYTGKVAVRSSGSFDLIRKGCKRITANYKYFRMMQYSDGYEYLGPLRPIPHSA

SEQ ID NO: 5742 - protein, 419 aa, unidentified
  REGION 1..419: note = Human gut metagenome
MYVYVLNKHGEPLMPCSSRKARTLLDNKKACVAKRTPFTIKLLHGSAGYKQPITLGVDAGSKHVGLSASTETHELYREEFTPRNDVVDLLSTRREFRRARRNRKTRYRAPRFNNRVHSKHKGWLAPSVEVKIQEHITVIKHVCQIMPVSLVRVETAEFDTQRLKAMLEGKPLPVGTDYQLGEMYDEYNVRQYVLKRDDYTCQCCGAHATKTKQVKLHVHHLESRKTGGNAPSNLITLCSTCHKAIHEGKKTLDTKKRGKPLRDAAFMGIVRKTLLMRLRKKLSIPVQQTYGYITKMLREKNNLPKSHMNDALCIAKHPKAAPCENCYRSKAVRHHNRQIHKATILKGGIRKNNQAPYTVKGFRLWDKVLCNGQECFISGRRATGYFALKKLDGTVVTNSVSYQKLRLLETAKNYLRERM

SEQ ID NO: 5743 - protein, 429 aa, Ktedonobacter sp.
LSNVFVIDSDYKPLNPVHPARARCLLTQGKASVYRRYPFTIILKRVVDQPEVHPLRLKLDPGSTTTGIAIVNDQTGNVVFAAELSHRGYAVKGDMERRRARRCGRRNRKTRYRKPRFHNRRRKQGWLPPSLESRLANILTWVARLCRYAPITALSQELVRFDMQAMEHPDIAGIEYQQGTLAGYEVREYLLEKWKRTCAYCGKENIPLQIEHIQARAKLGTNRISNLCLACEPCNKAKGTQDIRVFLAKQPEVLTRILAQAKKPLQDAAAVNTTRWALWERLQAFGLPVECGSGGLTKYNRTTRTLPKSHWLDAACVGKSTPETLKVKGVVPLLMTATGHGSRQMCVPDPYGFPEKHKKRVKSFLGYRTGDMVKAVTPKGTFEGRIAIRHRPSFHLGKRDIHPKYMRCVQRADGYEYTQKGVRHAPPHI

SEQ ID NO: 5744 - protein, 475 aa, unidentified
  REGION 1..475: note = Human gut metagenome
MVAVVTSTGKPLMPTSAYRARKLLKKGRAVIFKYRPYFTIQLVDRADGEVQEVEYKSDTGSVHVGISVCTEKKELLSEQRDLLENEPEHHNDRKKNRRTRRNRKRYRKPRFDNRKKKPQEGHEKWLPPTLLHKMEVQVRLFREFCRVVPVTSACFEMGKFDTQALKAVSKGEPVPEGEGYQKGERYGTDTLRAAVFLRDGHTCRFCGRSVKDGAILHVHHVGYWKGDRTNRPANLASACEQCHTPANHGKNGILYGKEPEFKTLKDASYMTSVRWIMLDEIKKAAPGVQVSVTYGVTTKRKRQELHLPKSHVNDAFSMASFHPKKRSDTEYWKKIPRHDRVLQKFYDAVYLDTRDGSEKKGSELSNGRISRNHKKDSENLHQYRGHKVSKGHNSIRRGASSLKPGSIVMYKGEKMTVHGTHTRYVKGKDGKTAKKVNVQFTCPASDGKKSASLEKCTPVSRVYNTGWKRYWPDKK

SEQ ID NO: 5745 - protein, 459 aa, unidentified
  REGION 1..459: note = Human gut metagenome
LYTKPLDNIGEGSLPPSGEINLKGMTFMVYVKSIDGKALMPTSNAKARKLLKQKKAKVVSLRPFVVKLTYKTKTEYIQKLNLGVDSGYSNIGFSVIDAKQEYIAGEVKLLEGMKKRLLEKASYRRIRRSRLRYRKARWNNRVKSKKKGWLAPSLKHKLDTHIKFIDYLKNILPIGKITVEVANFDIQKMKDDLISGIDYQNGDMFGFWNMREFVLHRDGHKCQNPNCKHKDKKEQILKVHHIRYRSEGGSDRPENLITLCSKCHTPVNHKKGKFLYDWCVNGKKVRGFKDATFMSMIRWYLVNELKSKHNNVSITYGYITKNHRIQNGIEKSHLNDAFAIAKGTNQARTKDRFLVIQDRLKNRSLEKFYDSKIIDIRTEKKVSGGDLSCGRSTRNKNLNTENLRKYRGAKISKGQRRIRKQKYFYKPNDLVKYDGKVYTVKGTQNEGKYIALKEIKKSS

SEQ ID NO: 5746 - protein, 442 aa, unidentified; identical to SEQ ID NO: 2903
  REGION 1..442: note = Human gut metagenome

SEQ ID NO: 5747 - protein, 431 aa, unidentified
  REGION 1..431: note = Human gut metagenome
MPNKVYVINKHGRPLMPCSPAKARHLLDDGKAKVKKRTPFTIQLVYGSSGYTQEVILGVDAGSKTIGMSVSTTKEELLSAEVKPRNDVVDLQSTRREFRRARRNRKTRYRKPRFDNRVRSKRKGWLAPSVEVKIQEHITAIRRVCGILPVSKVVVETAEFDLQLLKAIEEGKPVPQGEDYQKGEMYGYYNVRQYVLWRDNYTCQCCGAHATKKKEVRLHVHHLESRKSGGDAPGNLVTLCDSCHEKLHKGLITEDDFKKRKRKSTRDATFMGIMRKTLIQRLRAELTIPVAETRGYITKATREKLLVLPKSHTNDAQAIAQGKQGFNVGYLPGIVQINKIYTICPVRHHNRQLHKATILKGGIRKSNQAGKYVFGYRLFDKVQFNGQDCFIWGRRTTGIFTIKTINGKMIKDGISFKKLKPVEKSTSYLIA

SEQ ID NO: 5748 - protein, 443 aa, Oligella sp.; identical to SEQ ID NO: 5205

SEQ ID NO: 5749 - protein, 446 aa, Moorena sp.
LRVFVKNMRGEALSPCEQRKARILLKEKKAKIIIYQPFTIQMTVPTGETTQSTLLGVDLGAKHLGMAVVSEGNVLAKGEIELRQGIKGDLETRSTYRGSRRNRKTRYRKSKFEHKTKRIYSIKKKKWIKEKKSFISPRPEGWLPPSIRSRIDNTFFWIDTFASLIPNCKIHIEVGKFDVAKMIHPSIQGKEYQEGPAAGYHDVRYFVFARDSYTCQLCKKKNKILQTHHIVYRSHEGTDRASNLITLCTDCHTSENHKEGQILWKWMQEKRKTKSYKEGPFMNSFRRKVFVKYPEAHITYGSITTPKRKELELEKTHYNDAIAIANPSVINRNVEVIFVMKQFRKKKRSLHEATARKGRKEKNRTQKRNEKNTRMVKGFHLNDQVCVFGQIGFITGFSGSSTAYVKDIHDEYLTVPGKTYKQVNLSSLRLIRHNNNWQYFIQKESV

SEQ ID NO: 5750 - protein, 424 aa, unidentified
  REGION 1..424: note = Human gut metagenome
MRVFVLNMRGEPLMPCSQRKARILLKESRAVIYKYNPFTIRLAYATGEAKQDCHIGIDTGSKHVGIAVTSGNKIFFKGEIELRQDVKRNIDMKRAYRRDRRNRKTRYRQPRFLNRKRTDRWLPPSLQNRVNHTFHWIDTLSSLVPNPLLHIEVGKFDTAKMINPEINGVDYQRGQTYGFFDERYFVFARDNYTCQCCGKSKDKILQTHHIIYRSNGGTDRADNLITVCTDCHTSKNHQKGGILYEWQKQHKEVKQYKEPPFMNTLRRKMFVRYPNAVITYGSETTPKRKEMGLAKTHYNDAVIISGIDEINEDCSEWLNIKQFRKKKRSLHEATARRGRKTPNCNQIRNSKNTPYYKGFYLNDKVSILGKTGYITGFTSGGAYIKDNNEDYIKLPCKTYMQVSICKLRLICHNNNWQYIVKDTV

SEQ ID NO: 5751 - protein, 469 aa, Moorena sp.
LAVCVLDRSGKALMPCSEKRARLLLARGRARIHRVVPFIIRLVDRQAHASRFQPLRIKLDPGSRTTGLALVRDTEHVDASSGEIQRGAAVLNLFELVHRGRQISAALSARRAMRRRRRGNLRYRAPRFLNRTRPAGWLAPSLEHRVVTTMAWVNRLMNWAPVTAVSSELVRFDMQALENPEIAGVEYQQGTLAGYEVREYLLAKWGRRCAYCDQEHVPLQIEHILARASGGTHRISNLTLACARCNAKKAARPIEAFLAREPKRLALILAQAKRPLKDAAAVNATRWALANALRATGLPVELTSGGRTKFNRTQLGLPKTHALDAVCVGKVAGVSVWCRPTLVVKCTGRGSYQRTRLDRYGFPRGYLTRSRRMHGFQTGDLVRADVPTGKKAGRHTGRVAVRATGSFNIQVAGDVVQGIAHRHCRLIQRSDGYGYSRIALLKGDASDGTASLSALSLPAVNDGVSRATG

SEQ ID NO: 5752 - protein, 416 aa, unidentified
  REGION 1..416: note = Human gut metagenome
MVYVLDKNGQPLMPTDRHRKVRLMLQSGQAKVIKRCPFTIQLNYDSGHQTQEISLGIDAGSKHIGVSATTKIKVLYEADVELRNDIVDLLSSRRELRRGRRNRKTRYRQAKFNNRRRGNGWLAPSIRQKIGTHLTVVENICKILPISRIMVETASFDIQKIKNTDIQGAEYQQGDQLGFWNIREYVLFRDNHTCQCCKGKSKDKILNVHHIESRKTGGNAPNNLITLCEICHTGYHKGAVQLPKTVKRGMRFKDAAFMGIMRWAFYEALKQQYEPVGTPVHDTYGYITKHTRIAYNLPKEHYVDARCISGNPEASSNGEYYYQKKVRCHNRQIHKLTVLKGGIRKQNQATYLVKGYRLFDKVSYQGKGYFVFGRRQSGFFDIRTLSGEKVNKGSLSCKKLKFIATRTYYLTERRAV

SEQ ID NO: 5753 - protein, 442 aa, unidentified; identical to SEQ ID NO: 2903
  REGION 1..442: note = Human gut metagenome

SEQ ID NO: 5754 - protein, 463 aa, unidentified
  REGION 1..463: note = Human gut metagenome
LAGKIQHKGGQLMSVAVISKTGERLMPSSEYRARKLLKSGKAVKYSYHPFTIQLTKRKTGYAQPIELCMDTGYIHIGISVKSEKHEYLAEQIDTLTDEKTKHGACRMYRTLRRGRKRYRQPRFNNRKRDKDWIAPSLEHKKDIHVQAISRINKVMPLTDITMEMGNFDTQVLKAKEEGKPLPQGADYQHGERYGIATLREAVFSRDGYKCQCCGRTISDGAILHVHHIKYRSQGGTNSMTNLATVCDKCHTPKNHKPGGKLYNWKPKLPDFKGATFMTTIRWQLYNEVKSLFPDINVHITYGAATKEQRRELNIDKSHVNDAFAMGKFHPKHRTNAALYKKKRRNNRCLEKFYDAKYIDSRDGSKRTGQELFNGRINRNHKKDSENLHRYRLQKITAGKRTVRKRHYNIQPHDIVMYENRKRETSGCQSNGTRVILLSDKKSVAVKKVKIYKYAGGYFKSAFN

SEQ ID NO: 5755 - protein, 464 aa, unidentified
  REGION 1..464: note = Human gut metagenome
MYVFVIGLDGTRLMPCKPRKARKLIEAHKAEIYKKQPFTIRLLYKTGCASQPITLGIDTGSQHIGIAVTSENKVLYQAEIELRSTMDKRSLMETRYSYRRSRRYRKTRYRSPKFRFHTKRTYSETLVKRKTTGIMTHWVKHTNSISTNRPDGWLAPSMQSKVDHHIRWINRFLDVLPPDTKLRLEIARFDMARMKNPEVHNELYQYGPQYDYENLKAYVFDRDHYKCVVCKRKLGSKQPDGHSLKGMMHHITFRSKGATDNPDQLVTVCEYCHIPQAHKEGGVLWNLKEKHKPVQRGLRDATQMNIIRTRLVKAFPDAELTYGNITAADRKKMHLPKSHAGDAVAIAMKGEDVNICEPTVYIKQIRKKKRSLHEATPRKGRKRPNTQAVRNPKNTKSIGIYHIYDTVRFQNETGFISGFTGKSAYVQDFDGNYITMPGKSYKQINLSSLELVKHNNNWIQKTRN

SEQ ID NO: 5756 - protein, 443 aa, Caldicellulosiruptor sp.; identical to SEQ ID NO: 2385

SEQ ID NO: 5757 - protein, 471 aa, Caldicellulosiruptor sp.; identical to SEQ ID NO: 3268

SEQ ID NO: 5758 - protein, 465 aa, unidentified
  REGION 1..465: note = Human gut metagenome
MSTCVCVLSNSGERLMPTFRLGKVRRLLKDGKAKIVKHHPFTIQLLYDSKTNTQPIEICEDVGYNYIGISVKSKSCEYVSAQYDTLQDVKEHHDDCRKMRRTRRNRLRYRKPRFDNRKRGEGWLAPSLRHKKELNVNVIKMYCAVMPITHATVEVGSFDTMLVKAIQEGKAIPEGVDYQKGPRYNLATLREAVFYRDNYACQVCGRKATEGAILHMHHMFYWKGRHGNSLDELLTVCEKCHTPANHQKSGKLYGFGEDVKFADLSGAAFMNTVRWQIVNELYAAFGKPFLTITYGAMTKEKRIALRLEKSHNNDAYAMGEFHPNCRCAFEHYEKVRRNNRILEKFYDSRYIDIRTGEIATGKELFNGRINRNHKKDSENLHKYRGKRIRKGYRALTRKKVNLNPGDLVSLNGEVLIVHGTHTKKNGAVNVEFKTPAKSGQKSTSLKKLKIVKAADSIHPAWEKVS

SEQ ID NO: 5759 - protein, 421 aa, unidentified
  REGION 1..421: note = Human oral metagenome
MFVYVLDKNGQPLMPTQRFGKVRRLLRDKKAKVVKRCPFTIRLLYEPETKIVHDIVLGVDTGSKYVGVSCVGNNKVLYQAQVELRDDIKKKMDSRRVYRRSRRNRKTRYRKPRFLNRGNSIKKDRYCPTIVSKFYGHEREIEFCKKILPIKDIVLEAGKFDTQLMEKPWLQEHKWAYQKGVNYGYANAREHALVRDSYTCQCCGKKNCRLEVHHIKFRSEGGSDTLENLITLCEDCHKAVHLGKITLKLKGKHKSNLRHATQMSIIRSMLLKKYSDAIETFGFVTKANRENLSLKKDHYLDACVIASGGLEFELSDVLYRKRCVPVQNRVLTRGIRSERKIPTGKVHGFKRYDKVEYLGKVCFVKARRTKGDFVLMDIGNNSIDFRVIGGCQNPSHKKIKRLNTRRGVICIIQKVQNREER

SEQ ID NO: 5760 - protein, 422 aa, unidentified; identical to SEQ ID NO: 4055
  REGION 1..422: note = Human gut metagenome

SEQ ID NO: 5761 - protein, 422 aa, Turicibacter sp.
LRVFVLNKRGKPLMPCSPAKARLLLKEKKAIVVRRTPFTIQLTIATGESKQPVSLDVDAGYKHVGLSASTEKAELYASEVELRQDVSDLLSARRTLRRARRNRKTRYRAPRFDNRIRTKRKGWLAPSVENRINAHLSRIETVLRLLPVTKITVETPSFDMQLLKNSDISGKKYQEGEQLGFWNVREYVLFRDGHVCQHCHGRSKDPVLNVHHLESRRTGGDSPGNLITLCETCHKALHRGEITLKAKRGQSFRAETFMGIMRWEVLDRLKASHSKLEVQNTYGYRTKHARISNGIAKSHCADAFCIAGNLGAERLGEFFFQKQTRRNNRQIHKLSILKGGIRKRNQAPYEIKGFRLFDKVACQGEEGFIFGRRSSGYFDVRKLNGTHISAGISCKKLRLLEKRQTYLTEIRKEEALPPLPEG

SEQ ID NO: 5762 - protein, 427 aa, Moorena sp.
MSNFVFLIDSNKTPMNPIHPAHAKKLLNSNKAAVFRYYPFTLIMNRVVENIVTYPITLKIDPGSKVTGIALVNNRDEVIWGMELHHRGLAINDCLETRKGVRRGRRTRHTRYRQARFLNRKRPDGRLNAPSLRHRVLTVETWVKRLCKFAPITAIVQELVRFDLQQLENPEISGIEYQQGELQGYEVREYLLNKWERKCAYCGAENVPLQVEHIKPKAKGGTNRISNLCLACQKCNQKKETQDIEKFLAKKPEVIKTILAQAKRPLKDAAAVNSTRWGLLNTLKKLELPVTTGSGGKTKFNRTRLQLPKSHWIDAACVGIVEKLQVLTSKVLEVKATGHGCRRFCRIDKYGFPCTLPKQTFNHVSTGDFVKVLITKDRKNVPSGIYTGRVKTPTGKGCEVVINGFRIGFSNMTNVKTIHRNDGFSYT

SEQ ID NO: 5763 - protein, 471 aa, Caldicellulosiruptor sp.; identical to SEQ ID NO: 3268

SEQ ID NO: 5764 - protein, 427 aa, Moorena sp.
MRVFVLDKNRKPLDPTHPAKARKLLKLGRAKVLRRYPFTIIIKDLEVENCLTHDHQLKIDPGAKTTGLAIVEGERVVWGAELTHRGFQIREALTSRRQLRRSRRNRKTRYRKPRFLNRTRPKGWLPPSLMSRVHNVLTWVNKLIRFCPVTGISQELVRFDTQKMLNPEVSGIEYQQGTLYGYELREYLLEKWDRTCAYCGAKNTRLEIEHIKPRSKGGSNRVSNLTIACHDCNQAKGNQEIEQFLSRKPSILKRILSQAKKPLADAAAVNATRWKLHNQLKLIGLPVEVGSGGLTKYNRCRQNLPKTHWMDAANVGKVETLYIEDYQPLLIAAKGHGKRQICGTNKYGFPIRHNSRKKIHKGFQTGDIVRAVVTKGKKIGTYMGRIATRKTGSFDIATAQGKVSGISYKYCQAIHRKDGYSYQFHGG

SEQ ID NO: 5765 - protein, 442 aa, unidentified; identical to SEQ ID NO: 3161
  REGION 1..442: note = Human gut metagenome

SEQ ID NO: 5766 - protein, 518 aa, unidentified
  REGION 1..518: note = Human gut metagenome
LANLKLIDKLLEKTEYIYVIGIDGKPQMPTNRKVRVRKLFKLGMAKIVDTVPFTMQLLYKNEPVLQPITIAEDQGRTNIGAAVLTQLGNLVFSAVVETRNKSIKKLMADRKAHRQASRRGERKARQRLAKRHGSMIKAGMIMRKLPQYAADKFVTCKIIKNTEARFCNRKRIPDWLTPTVNHLVQTHINLIKKIEKYLPITDVAIEVNRFAFMQMENPNISGLDFQNGPLKGFDDVKTAIREQQHGKCLMCKNDIEHFHHIIPRSKGGSNTIQNQAGLCKKCHAKVHTDAEFQAKFKDKKDGLIKKYGALSALNQAVPFICKELIKTYGLEHVHFCTGKDTSLIRSSLGYEKTKNNQMHEVDAYCIGLAAIGADKAKHPGFNNVFKIKQFRRQDRQRIHYQKERTYYLDGKKIATNRKPRFEQKGDALSEWYQEQIKTYGLREAEKMRSRLTVKKSKRSYNTAKRLMPGCIFYYDGQRHVMTGQSSYGRYLRAYNCGTKDFPALKCQIIQFNTGLVFV

SEQ ID NO: 5767 - protein, 413 aa, unidentified; identical to SEQ ID NO: 2636
  REGION 1..413: note = Human gut metagenome

SEQ ID NO: 5768 - protein, 402 aa, unidentified
  REGION 1..402: note = Human gut metagenome
MPKVYVLNRHGRPLMPCTPAKARHLLDAGKAKVRHRTPFTIQLLYGSTGYTQEVILGVDAGSKTIGLSAATETEELFSAEVKPRNDVVELMSARRQFRRARRNRTTRYRKPRFDNRVRSKHKGWLAPSVEVKIQEHMTAIRRACAILPVSKVVVETAEFDLQLLKAVAEGKPVPQGEDYQKGEMYGHYNVRQYVLWRDSYTCCICGVRGSVRKGVPLHVHHLESRRVGGDAPDNLVTLCTACHDKLHKGIIMAADIKKRKRRSTRDATFMGIMRMTLLRRLREQLPVPVVETRGYITKATRENLLVLPKSHTNDALAIAHGPQGFRAEYLPNIRQADRLYTICPVRHHNRQLHKATILKGGVRKANQAEKYICGFRLYDKVLYNGIECFVWGRRTSGSFLLR

SEQ ID NO: 5769 - protein, 411 aa, unidentified; identical to SEQ ID NO: 3917
  REGION 1..411: note = Human gut metagenome

SEQ ID NO: 5770 - protein, 297 aa, unidentified
  REGION 1..297: note = Human gut metagenome
GSEMCIRDRIDTLSSLVPNPILHIEVGKFDVAKMINPEIHGVDYQHGQTYGFFDERYFVFARDNYTCQCCGKSKNKILNTHHIIYRSNGGTNRVDNLITVCTDCHTSQNHRKGGIFYQWQEQHKKVKQYKEPPFMNTLRKRIFVAYPDAEITYGSETTPKRKAMKLDKTHYNDAIVISGINEIKENPEEWLLIKQFRKKKRSLHEATARKGRKKPNRNQTRNSKNTPYYKGFYLNDKVSVFGKSGYITGFTSNAAYIKDENNDYITLPNKTYKQVSINKMKLECHNNNWQYIIKNAV

SEQ ID NO: 5771 - protein, 557 aa, unidentified
  REGION 1..557: note = Human gut metagenome
MIYNLVSIRERSFMKQKKQKVMVYILNKKGKPLMPTTRCGHVRKLLDSKKAVVVSSNPFTIRLKYDTPNGVQDVFAGIDSGRENIGSGASNEDGDCLYLGELKTSNKSIKMKITERAGFRKERRRRDRQNKQRKARKDHTEIQNGNADICRTTISCKSVQISYPAAEKSVTHKIIRGKEGKFANRHRDEGWITPSARQLVQMHMNDLKSMCKILPISHVTLERVAFDFQKLENENIKAWEYGKGKLYGYDSPEEYIHDVQGGKCIICGKPHIDYLHHIIPRSKGGSNKVSNLAGLCYDCHYGPMGVHNCQDTQDRLPELKNEANKQYKVSLLNSVMPVLIEEMDKFCKANSIIFSICEGHDTAKVRDIYDLQKDHCVDGFAISLVGRNVKSVDVMPDRIHQKQRYKKKSKNIIKKRNCREYYDGKKLVAVNRHKGTDQKADSLEEYMNTYAETHTADECKKHFESLTVKPARRTYTFHKEGRICPFHIGDKVRYEKKNKIKGNTKVETFICEGIRFPKDENKAKVEHNKTKSKKMKFCRVLEPGCTPYIDYRKLVLI

SEQ ID NO: 5772 - protein, 408 aa, unidentified
  REGION 1..408: note = Human gut metagenome
MVYVQDIDGKPMMPTTRHGKVRRLLKDNKAVVVNTCPFTIKLTYKTSDYKQEIVLGVDSGTKHVGLSATTKSKELYASEVILRSDVVELLSTRRELRRTRRNRLRYRKPRFDNRVKNKYHGWVAPSVRYRIDAHIRIIDSICSILPISRIIVEVAQFDTQKIKNPDIYGNEYQEGDRLGFWNVREYVLARDGHKCQHCKGKSKDPILNVHHIESRKTGGDSPSNLITLCETCHKEYHKGNIDLKVKRGKSLRDAAVMGIMKWKLYDELKSRCDNVSMTFGYITKYNRIKYGIEKSHISDAFVISKNFNALMLEYHYKVKLVRRHNRQIHKQKVLKGGVKKPNQSPFEVFGFRLFDRVMFEGNCYFIFGRRKSGSFNIRDIDGGNQRDVTYKKLKLLRCKRFMIQKETN

SEQ ID NO: 5773 - protein, 421 aa, Moorena sp.
MNVVYVLSPDREPLMPCSCAIARLLLKDGKAKVVRRTPFTIKLYAQPEDAHMQPLTLGVDTGSATIGSAVSDECGNVLYLSEVEIRNDIAKTMKERATSRRNRRNRKTRYRLARWLNRKNSIKTGRFSPTMRSKIEAHLREIRFVKSLLPITSVVVETGTFDPHALKNPDVLQNKKLYQKGINYGYANTKAYVLTRDGYACQHCQGKSKDNRLEVHHIIFRREQGSDEETNLLTLCKTCHDGLHAGTITLKRTGKRKGNLLHATQMNSIRVQLFKCIEAEETFGFITKEHRLLAGLPKEHVFDATMIATRGITPIFRTSMVLSKRCVADGDYQQTKGVRSEQRINTGKIRGFRKFDKVHYEGQDYFIKGRMSTGYAILMDVSGNKVDLKPIPKFDKMKRVSARSSWIMTHKTMASFSSSTT

SEQ ID NO: 5774 - protein, 576 aa, unidentified
  REGION 1..576: note = Human gut metagenome
MDFVLIVDKNNKPCIPIKNGKAGYLLREHKAEIINHEPLVIKRTDDYNSDLENRDIFELKVDSGYLNIGFSVSDNDHEYIAGQVKMLNGMSNRLLERKSMRSSRRNRLRYRKNKNIDYKTVHNPTYKNGNEDGWFAPSIVHKMETHIRIIEQLKQWVPIDKVIVEVANFDIAAMDAYLKDGTILNGKDYQNGEMKGYENVVSYVRARDNYSCYFCNKKKKKDGTLKEKPKRIEVHHKIPRSWGGTNNPGNLICVCQGCHQKIHSNNNNNKYFKELLEQALQENTFKDSTYMNIVRWELLNRLTEKYPELDIEAEYGYNTKINRKEAGLRKFHYNDAVCVKEFKNTTLSKKVFIVEQKRCNDRKMENFADAKYIDSRDGKKKSGNDLKVIRHSTKSKRSTNKEHIDNERVFRKEKVSKGKIQFECHSYCVKPGDLIYIKEGKHKGKIAEVSTIQIVGGKIPNPIIDINEINNKKIDFNRELKKRKTISNMTDYQKSFAKYQIRFTYKESDADGPSITLTQKEYEKLKENKSDRVKIIRTRRGLVWREYDRLTYEAENMDQEEKKLEVKNKKQELKAA

SEQ ID NO: 5775 - protein, 493 aa, unidentified
  REGION 1..493: note = Human gut metagenome
MAVVYVISASGKPLMPTTRCGHVRGLLNEGKARVVEREPFTIQLKYETPDVTQPLYLGIDPGRTNVGSAVVREDGECVFTAQLTTRNKDVPKLMKARKQFRMAHRRLKRRCKRQRRAKAAGTLSQKGEFQRLLPGYEKPILCKGIRNKEARFNNRQRPVGWLTPTANHLLLTHLNMVKKLQKLLPITDVVLEVNRFAFMAMENPSIRRWQYQRGPLYGKDCVEDAVYAQQDGHCLFCGRPIAHYHHVVPQHKNGSDTLENRVGLCNEHHDLVHKDRAWEAKMKETKAGLNKKYHALSVLNQIIPALTEQLTAMFPQHAFVTTGKDTADFREDYGIAKEHHLDAYCIACSVLAEPTKVAAPTGKPHRLMQFRRHDRQVCHKENIKRVYLSEGKAVATNRHKAIEQKDDSLEEFRKTHTQQEVSALTVKDHQPVYKDMRRFMPGGVFLFNGKVHTLQRSHGRYKGMPFYYIDTDGSKNHAKGCIFLQQNCGLRWV

SEQ ID NO: 5776 - protein, 518 aa, Actinomadura sp.
VTLLATFRAGRKTHPCVPPQQMALEFGSADNPGNRDETGTEHRSRAVSGAGHVREETTAVSPDGGGVTPNPSRVGEKPRERHPAVFVLDKHGTPLQPCHAARARELLNKGRAVVHRHTPFVIRLKDRAAATSQVEGVEVGIDPGSKHTGIAVFTARGGQRRGRYSIQLNHRGALIGKKMAQRAAYRRGRRSRNLRYRAPRFDNRARPQGWLAPSLKHRVDTTVSWMDRLARWAPVQAVHVERVAFDTHLLSAGRPLEGVEYQQGTLHGYEAREYLLAKWRRACAYCGAQNVPLNIDHIHPRSNGGSDRVSNLTLACIPCNQAKSNRPVAEFLAAKPKVLARVLAQAKAPLRDAAAVNTTRWVLWRALDQRLPTHTTSGGRTKWNRTLAGLPKSHTLDALCVGKLDTIGQVVGRVLVAGCAGRGTHARTRTDTHGFPRLRMPRTKTFFGYQTGDLVRAVVPMGKNKGTHTGRVAVRATGKFDITTGHGTAQGIHHRHLRLLQRADGYAYTTHTERTPTP

SEQ ID NO: 5777 - protein, 431 aa, unidentified
  REGION 1..431: note = Human gut metagenome
MPNKVYVINKHGRPLMPCSPAKARHLLDEGKAKIKKRTPFTIQLLFGSTGYTQEVILGVDAGSKTIGLSASAETEELLSAEVKPRNDVVDLLSTHREFRRARRNRKTRYRKPRFDNRVRSKHKGWLAPSVEVKIQEHITSIKRVCRILPVSKVVVETAEFDLQLLKAIADGKPVPQGEDYQKGEMYGHYNVRQYVLWRDDYTCQCCGAHATKKKEVRLHVHHLESRKVGGDAPDNQVTLCESCHEKLHKGLIAEKDFKKRKRRSTRDATFMGIMRKTLMQRLCSELPIPVVKTRGYITKATREKLLVLPKSHTNDALAIAQGKRGFNVGYLPEIAQIDKIYTIRPVRHHNRQLHKATILKGGIRKSNQTEKYVFGYRLFDKVQFNGQDCFIWGRRTTGIFTIKTINGKMIKDGISFKKLKLVEKSTSYLIA

SEQ ID NO: 5778 - protein, 413 aa, Moorena sp.
MVFVINNDGKPLMPCSNVIARLLLKQNKARVERVTPFIIKLLYQLKIVYLQKLNLGLDSGSRIIGSAVSDIDGNIQYISQIEVRNDITNRMNRRRNYRQLRRNRKCRYRKCRFLNRKNSRRKLRFSPTINSKINTHLREIKFAEKILPINDLIIENGTFDLHAIRNPSVLNNPILYQKGLKYGFNNTKAFVLHRDNYRCQYCKGKSKDRKLHCHHIIFREQGGSDNPENLIVLCKTCHLALHEGKITLKKSGSRKRGLMHATQMNIIIKQLFKRTNAKETFGFITKTHRQAFNLPKYHFIDAAVISTKGKQPDFKTDKILYKKCIPRGDYQQTRGKRSQQHITTMKICGFRKYDKVRYNGKNYFIKGRMAIGYAILMDIEGRSQQLKPIPKFIKMKRIIARKSWIMTENLILI

SEQ ID NO: 5779 - protein, 375 aa, unidentified
  REGION 1..375: note = Human gut metagenome
MVKSSERQERCCRLETPSNIGEGSQPGERPRRQNLRVVVLNKRGKPLMPCSPAKARLLPKERNAIVVRRTPFTVQLTIATGETKQPVSLGVDAGYKHVGLSASTEKAELYASEIELRQDITDLLSARRELRRARRNRKTRYRGPRFDNRIRTKRKEWFAPSVENRINAHLSRIEKVLRLLPVTTITVETASFDTQLLKNPDISGKEYQEGEQLGFWNIREYVLCRDGHVCQHCYGRSKDPVLNVHHLESRRTGGDSPGNLITLCETCHKALHRGEITLKAKRGQSFRAEAFMGIMRWEVLDRLKASHPELEVQNTYGYRTKHVRIANGIAKSHCADAFCIGGNLGAERLGEFFFQKQTRRNNRQIHKLSILKGAL

SEQ ID NO: 5780 - protein, 434 aa, Escherichia sp.
LAVFVLDHHKKPLMPCSEKRARLLLERGRARVHRRVPFVIRLVDRKQPDCALQPLRLKIDAGSKVTGMALVQDKENSTVSAINLFELAHRGHAIRDALTARRAMRRRRRGNLRYRSPRFLNRKKDNGWLAPSLRHRIDTTMSWVNRFRRWTPLAAISSELVRFDMQSMTDSDIQGAEYQQGTLFGYEVREYLLEKWQRKCAYCDAVNTPLNIDHMEPRSRGGSNRVSNLVLSCIPCNQNKGVQSVTEFVKDKARLTRILAQIKRPLQDAAAVNATRWALANALKATGLPVELASGAKTKYNRTRLGLPKTHALDASCVGQVGYITRWERPVLRIKCTGRGSYQRTRLDKFGFPRGYLLRQKQVNGFQTGDMVRATVPESSKKAGCYTRRVAVRASGSFNIQTGDSVIQGISHKYCQLLQRADGFGYQLTKIAIN

SEQ ID NO: 5781 - protein, 461 aa, unidentified
  REGION 1..461: note = Human gut metagenome
MVKSSERQERCCRLETPSNIGEGSQPVERPRRQNLRVVVLNKRGKPLMPCSPAKARLLLKEKKAIVVRRTPFTIQLTIATGEAKQPVSLGVDAGYKHVGLSASTEKAELYASEVELRQDVSDLLSARHALRQSRRNRKTRYRAPRFDNRIRTKRKGWLAPSVENRINAHLSRIEAVLRLLPVTKITVETASFDMQLLKNPDIAEKEYQEGEQLGFWNVREYVLFRDGHVCQYCHGRSKDPVLNVHHLESRRTGGDSPGNLITLCETCHKALHRGDITLKAKRGKSFRAEAFMGIMRWEVLNRLKASHPELEVHNTYGYRTKHARIVNGIAKSHCADAFCIAGNLGAERLGEFFFQKQTRRNHRQIHKLSILKGGIRKRNQAPFEVKGFRLFDKVACKGEEGFIFGRRSSGFFDVRKLDGTCISAGISYKKLHLREKRRTYLTEIRKEEALPPLPEGRDLRA

SEQ ID NO: 5782 - protein, 431 aa, unidentified
  REGION 1..431: note = Human gut metagenome
MPNKVYVINKHGRPLMPCSPAKARHLLDAGKAKVKKRTPFTIQLVYGSSGYTQEVILGVDAGSKTIGMSASTTKEELLSAEVKPRNDVVDLLSTRREFRRARRNRKTRYRKPRFDNRVRSKHKGWLAPSVEVKIQEHITSIKRVCRILPVSKVVVETAEFDLQLLKAIADGKPVPQGEDYQQGEMYGHYNVRQYVLWRDGYTCKCCGAHTTKKKEVRLHVHHLESRKVGGDAPDNQVTLCESCHEKLHKGLIAEKDFKKRKRKSTRDATFMGIMRKTLMQRLCSELPIPVIETRGYITKATREKLLVLPKSHTNDALAIAQGKRGFNVGYLPEIAQIDKIYTIRPVRHHNRQLHKATILKGGIRKSNQTEKYVFGYRLFDKVQFNGQDCFIWGRRTTGIFTIKTINGKMIKDGISFKKLKPVEKSTGYLIA

SEQ ID NO: 5783 - protein, 471 aa, Caldicellulosiruptor sp.; identical to SEQ ID NO: 3268

SEQ ID NO: 5784 - protein, 442 aa, unidentified
  REGION 1..442: note = Human gut metagenome
MGEGLQPTERSRSQNLRVFVLNKRGQPLMPCSPAKARLLLKEKKAVVRHRTPFTIQLTQATGETVQPVTLGVDAGSKFIGLSASTEKAEHYASEAELRTEVVDLLSSRREMRRARRNRKTRYRAPRFDNRIHSKNKGWLTPSVENKINTHLSCVDNVRKCLPVTKIVVETAAFDIQKIKNPDIEGTDYQQGDQLGFWNVREYVLCRDGHQCCHCHGKSKDPILNVHHLESRKTGGNAPNNLITLCETCHKAYHDGKITLKQKRGQVFRDAAFMGIMRWTFFNRLKAQCPEIEVRNTYGYLTKNTRIRHGLEKSHHTDAFCIAGNLEAKRLGVYFFQKQTRKHNRQIHKMSILKGGVRKLQQAPYEVKGFRLFDKVRYDGREAFIFGRRSSGYFDIRLLTGEKVSAGVSYKKLVLLEKRKTFLTQLIKENAIPPATEVAGFLA

SEQ ID NO: 5785 - protein, 448 aa, unidentified
  REGION 1..448: note = Human gut metagenome
MSTGLRAVQAEPAGIRKGDALKVFVLNMRGRPLMPCSPAKARHLLKAGKAVVRRRTPFTIQLRIATGETKQSVTLGVDAGAKHVGLSAATEKEEVFASEVELRQDITGLLAARLSLRRDRRHRKTRYRPPRFLNRVRSKHKGWLAPSVENRIQAHMSRIDAVCRLLPVTRIVIETASFDVQKIRNPEVEGTGYQQGDQLGFWNVREYVLFRDGHVCQHCHGYSKDKILNVHHLESRQTGGDAPNNLITLCETCHKACHAGKIKLKVKRAQSFRAEAFMGIMRWTLLDRMRKAHSGLPVENTYGYLTKNTRITLGLPKTHCVDAYCIAGNLKAVRRGVCLHQRQVRKHNRQIHKCTVLSKTLKDGTKIGYRKLNQTPHLVKSFRLFDKVRCLGQTGFIFGRRSSGYFDVRRLDGVKISSCINYRKLTLLEKRGTCLTELRKEDGASSPV

SEQ ID NO: 5786 - protein, 392 aa, unidentified
  REGION 1..392: note = Human gut metagenome
FTIQLVYGSSGYTQEVILGVDAGSKTIGVSASTKKEELFAANVIPRNDVVDLLSTRREFRRARRNRKTRYRKPRFDNRVRSKHKGWLAPSVEVKIQDHITAIRRVCGILPVSKVVVETAEFDLQLLKAVAEGKPVPQGEDYQHGEMYGHYNVRQYVLWRDGYTCQCCGAHATQKKEVRLHVHHLESRKVGGDAPDNQVTLCESCHKKLHKGLIEAKDFKKRKRRPTRDATFMGIMRATLLQRLRSELPIPVIETRGYITKATREKLLVLPKSHTNDALAITQGKHGFNVGYLPGIVQSDKTYTIRPVRHHNRQLHKATILTGGIRKANQAEKYVCGFRLYDKVLYNGIECFVWGRRTSGSFLLRALDGTKVKDGAGHRILTLLERSSNYLIA

SEQ ID NO: 5787 - protein, 420 aa, unidentified; identical to SEQ ID NO: 3504
  REGION 1..420: note = Human gut metagenome

SEQ ID NO: 5788 - protein, 402 aa, unidentified
  REGION 1..402: note = Deferribacterales bacterium UBA4806
MVYVINKNGNPLMPCKEAKARKLLRDGKAKVIRKNPFTIKLLWDCEENVQEVVAGMDTGSKKIGCSAIANGKVVYQSEIEIRQDVSKKMKQRKMYRRNRRYMKTRYRKPRWQNRASMKKEDRLAPSIKSKLDSHLREKKFVESILPVTRWKVETGNFDIYKITNPDVKGKEYQEGNQKGFYNLKAYILHRDGYQCQKCKTKGKKLHVHHIIFKSKGGTNTPDNLTTLCETCHDKLHNGEFSIKGVKSKTKHATETNIIKSQLKKRFGEFEETFGYETKFKREQILGLPKSHYNDAIAICCEEGEFVKPDNVVYYKKHVSKGDYKQTFGSHSEKKIPTGKLFGLRKFDLIKTIKGTGFVKGKSSEGYFTLMDIEGNTTISQVNIKKYCIRLQARSTTLIERKM

SEQ ID NO: 5789 - protein, 493 aa, unidentified; identical to SEQ ID NO: 2644
  REGION 1..493: note = gut metagenome

SEQ ID NO: 5790 - protein, 443 aa, Caldicellulosiruptor sp.; identical to SEQ ID NO: 2385

SEQ ID NO: 5791 - protein, 504 aa, unidentified; identical to SEQ ID NO: 3854
  REGION 1..504: note = Human gut metagenome

SEQ ID NO: 5792 - protein, 406 aa, unidentified; identical to SEQ ID NO: 2967
  REGION 1..406: note = Human gut metagenome

SEQ ID NO: 5793 - protein, 404 aa, unidentified
  REGION 1..404: note = metagenome
LLKEKKAIVKRRTPFTIQLTIATGETKQPVSLGVDAGYKHVGLSASTEKAELYASEVELRQDITDLLSARRALRQSRRNRKTRYRAPRFDNRIRTKRKGWLAPSVENRINAHLSRIEAVLRLLPVTKITVETASFDLQLLKNPDISGKEYQEGEQLGFWNIREYVLCRDGHVCQHCYGRSKDPVLNVHHLESRRTGGDSPGNLITLCETCHKALHRGEITLKAKRGQSFRAEAFMGIMRSEVLNRLKASHPELEVNNTYGYRTKHARIANDIAKSHCADAFCIAGNLGAERLGEFFFQKQTRRNNRQIHKLSILKGGIRKRNQAPFEVNGFRLFDKVACKGEEGFIFGRRSSGFFDVRKLDGTRISAGISCKKLHLLEKRRTYLTEIRKEEALPALPEGRGPRA

SEQ ID NO: 5794 - protein, 408 aa, unidentified; identical to SEQ ID NO: 4079
  REGION 1..408: note = gut metagenome

SEQ ID NO: 5795 - protein, 455 aa, Halomonas sp.
MAVFVLDKQKRPLMPCSEKRARLLLARGRAVVHKRYPFTIRLKDRVAGDTQPLRLGIDPGSKTAGLALVREDAEDRHILCLFDLVHRGFQIKKALVQRASFRRRRRSANLRYRAPRFDNRTRPNGWLAPSLKHRVDTVTAWVNRLTRLAPTTAISQELVRFDTQKLENPEISGVEYQQGSLLGYEVREYLLEKWGRECAYCGDQDTPLEVEHVVPRAHGGSHRVSNLTLACHACNQGKGNGTLDAFFTTDKGLKKRLKANSLSADARLARVQRELKRPLRDASAVNATRWALFNALKDTGLPVTAGSGGRTRYNRQRLGIPKTHALDAACVGPFGRLHGENCPTLVIKGTGRGSYERTRLTRHGFPRGYLMRQKQVRGFQTGDMVRAIITTGKKAGTHTGRVAVRKTGSFNIQTEQGVVQGISHKHCLLIQRGDGYGYHLTSSIQPKGGAGQAVV

SEQ ID NO: 5796 - protein, 480 aa, unidentified
  REGION 1..480: note = Human gut metagenome
LYTKPLDNIGEGSLPPSGEINLKGMTFMVYVKSIDGKALMPTSNAKARKLLKQKKAKVVSLRPFVVKLTYKTKTEYIQKLNLGVDSGYSNIGFSVIDAKQEYIAGEVKLLEGMKKRLLEKASYRRIRRSRLRYRKARWNNRVKSKKKGWLVPSLKHKLDTHIKFIDYLKNILPIEKITIEVANFDIQKMKDDLISGIDYQNGDMFGFWNVREFVLHRDGHKCQNPNCKHKDKKEQILKVHHIRYRSEGGSDRPENLITLCSKCHTPANHKKGKFLYDWCVNGKKVRGFRDATFMSMIRWYLVNELKSKHNNVSITYGYITKNHRIQNGIEKSHLNDAFAIAKGTNQARTKDRFLVIQDRLKNRSLEKFYDSKIIDIRTEKKVSGGDLNCGRSTRNKNLNTEDLRKYRGVKISKGQRRIRKQKYFYQPNDLVKYDGKVYTVKGTQNEGKYIALKEIKKVPKVELLIPYVFKKGLNWSYGLC

SEQ ID NO: 5797 - protein, 413 aa, unidentified
  REGION 1..413: note = Human gut metagenome
MRGQPLMPCSPAKARHLLKANKAIVKRRTPFTIQLSIATGETKQNVTLGVDAGAKHVGLSAITDKAEVFASEVELRQDISGLLADRLAFRRGRRHRKTRYRASRFLNRVHSKRKGWLAPSVENRIQAHISRIDVVCKLLPVNKIVIETASFDIQKIKNPDVEGKGYQQGDQLGFWNVREYVLFRDGHVCQYCRGRSKDKVLNVHHLESRKTGGDAPNNLITLCETCHKAYHAGKIKLKVKRGQSFKAETFMGIMRWTLLEIVRQTHPHLLVENTFGYLTKHKRIALGLPKTHCTDAFCIAGNLKAQRSGVYLYQKQTRKHNRQIHKCSILKGGVRKLNQSPYLVKGFRLFDKVKCLEQVGFIFGRRALGYFDVRTLRGKKLSPAIHVKKLMLLEKRKTFLTELRMENCASSPV

SEQ ID NO: 5798 - protein, 512 aa, unidentified
  REGION 1..512: note = Human gut metagenome
MSTIYVLNKDGKPLMPTTRGGHVRHLLKEQKARVARTKPFTIQLLYETDDAVQPLYLGIDPGRTNIGIAVVKADGTAAFTAHLETRNKEIPKLMQDRKKARRARRTNGRRCRRQRRAKANGTISKKCVKQTTAQNGSVSKRAKDIGVIKRRLPGCEKDVLCIGIKNKETKFTNRTRPEGWLTPTANQLLQTHINLVKKIQKFLPISDVVLEVNKFAFMRLDNPNIQKWQYQQGPLYKKESLESAVSEIQEHHCLFCKKPIDHYHHVVPQHKNGSSTIGNIVGLCAKHHDLVHKDSAWEKKLAKKSTGLYKKYGALGVLNQIIPTLTNELSSLFPKHSFVTNGKSTYDYRAAHGVSKDHWLDAYCIACSVLPSNVCDSNINNHMPYELKQFRRHDRRVLNNENMNRVYTLDNKAVAINRHKAKDQKTVSLEEFRKEHPDDVCKLKVKEHHPTYRNMNRNFPGSVFLVGKQIHVMQGIASSKGGKATKYNDTSATAIAAGKCKFVAKNTGILFV

SEQ ID NO: 5799 - protein, 419 aa, Moorella sp.; identical to SEQ ID NO: 4784

SEQ ID NO: 5800 - protein, 424 aa, Moorena sp.
MSNYVFVIDPDKQPCNPVHPAKAQLLLNQKKAAVFRRYPFTIILNEKQKDVEANPLTLKIDLGSQTTGIAILNGENVVWGAELAHRGQQIKSDLESRRAIRRNRRNRKTRYRPARFLNRKREKGWLAPSLQHRVDTTLTWIKKLIRYCPVTNIVQELVRFDLQKMENPEISGIEYQQGELQGYEVREYLLEKWNRQCAYCGAKNIPLQIEHIHPKSKGGTNRISNLCITCEPCNLAKGTQDIKDFLSGKPSILKRVLSQAKSPLKDAAAVNSTRWALLNALKSIGLPISTGSGGQTKFNRTRLNLPKTHWIDAACVGTIESLRIITKQPLLIKATGHGCRQMCRTDKFGFPSRYVPRLKFIKGFQTGDIVKAIVTSGKKIGTYVGRVAVRCSGSFNISTPQLIQGIGHKYCRAIHRKDGYSYSF

SEQ ID NO: 5801 - protein, 431 aa, Acidithiobacillus sp.; identical to SEQ ID NO: 4478

SEQ ID NO: 5802 - protein, 411 aa, unidentified; identical to SEQ ID NO: 3917
  REGION 1..411: note = Human gut metagenome

SEQ ID NO: 5803 - protein, 456 aa, Halomonas sp.
MAVFVWDKHKQPLMPCSEKRARLLLDRGRAVVHKRYPFTIRLKDRVGGETQPLRLGLDPGSKTTGLALMRESAGEQRHVLCLFDLVHRGYQIKKALQQRAAFRRRRRTANLRYRAPRFDNRTRKAGWLPPSLQHRVDTVMAWVQRLSKLAPITGISQELVRFDTQQLDNPEISGVEYQQGTLLGYEVREYLLEKWGRECAYCGTADTPLEMEHVVPRSRGGCNRVSNLTIACHDCNQAKDSLPLATFFATDKGLKKRLKANGLSAGARLERVQRQLKQPLRDANAVNATRWALFNALNATGLPVAVTSGGRTKYNRQRLDIPKTHALDAACVGAFDLLHDWTVPTLTIKCTGRGSYQRTRLTKHGFPRGYLMRQKQVHGFQTGDMVKAIVPTGKKAGTHAGRVAVRKTGSFNIQTEQGAVQGISHKYCTVIQRGDGYGYHLTPPVNHKGGAGKAVA

SEQ ID NO: 5804 - protein, 427 aa, Enterococcus sp.
MVYVLSIDNEPLMPCSNVIARLLLKQGKAKVKYREPFTIKLTYETTTYTQPLTLGVDTGSQTFATAVADEKGNILYTSEVTLREDKNNSIKKKMDQRRMYRRNRRSCKTRYRKARFNNRKNSKRKERFSPTMTSKLHSHQKEIEFIKSILPIAKLIFETGTFDPHLMKNPSLANPKVKPWGYQQGPNYGFENTKARVLVRDNHTCQICNKKPKNERLEVHHIVFRSQGGSDEENNLVTLCHSCHVELHKGLIHPNFEGSLKSALKYATQMNSIRIQLLKLYSDAIETFGYVTKANRLNLGLPKEHYVDAAVIATAGNQVKFACNLMIKRCIPKGDFQRTKGVRSEKTIPKGKIDGFKKYDKVRYFGNEYFIKGRRTSGYFTLMDIYGQTISFNHMSKGQKTPKAKNCHRISARKSWIVTTKKLENIA

SEQ ID NO: 5805 - protein, 416 aa, unidentified
  REGION 1..416: note = Human gut metagenome
MVYVLDKNGQPLMPTDRHRKVRLMLQSGQAKVIKRCPFTIQLNYDSGHQTQEISLGIDAGSKHIGVSTTTKIKVLYEVDVELRNDIVDLLSSRRELRRGRRNRKTRYRQAKFNNRRRGNGWLAPSIRQKIGTHLTVVENICKMLPISRIMVETASFDIQKIKNTDIQGAEYQQGDQLGFWNNREYVLFRDNHTCQCCKGKSKDKILNVHHIESRKTGGNAPNNLITLCEICHTGYHKGAIQLPKTVKRGMRFKDAAFMGIMRWAFYEALKQQYEPVGTPVHNTYGYITKHTRIAYNLPKEHYVDARCISGNPEASSNGEYYYQKKVRCHNRQIHKLTVLKGGIRKQNQATYLVKGYRLFDKVSYQGKGYFVFGRRQSGFFDIRTLSGEKVNKGSLSCKKLKFIATRTYYLTERRAV

SEQ ID NO: 5806 - protein, 431 aa, unidentified
  REGION 1..431: note = Human gut metagenome
MPNKVYVINKHGRPLMPCSPAKARHLLDAGKAKVKKRTPFTIQLVYGSSGYTQEVILGVDAGSKTIGVSASTKKEELFAANVIPRNDVVDLLSTRRESRRARRNRKTRYRKPRFDNRVRSKHKGWLAPSVEVKIQEHITSIKRACRILPVSKVVVETAEFDLQLLKAIADGKPVPQGEDYQKGEMYGHYNVRQYVLWRDDYTCQCCGAHATKKKEVRLHVHHLESRKTGGDAPGNLVTLCDSCHEKLHKGLITAKDLKKRKRRSTRDATFMGIMRKTLMQRLCSELPIPVIETRGYITKATREKLLVLPKSHTNDALAIAQGKQGFNVGYLPEILQIDKIYTIRPVRHHNRQLHKAAILKGGIRKSNQAGKYVFGYRLFDKVQFNGQDCFVWRRRTTGIFTIKTINGKMIKDGISFKKLKLVEKSTGYLIA

SEQ ID NO: 5807 - protein, 478 aa, Geobacillus sp.
LFVYIINKHGKPLMPCSPRKARLLLKQKKAKVVRRTPFTIQLLYGSSGYKQPVSLGVDMGTRHVGISATTKKDVLFEAEAQLRTDIVELLAIRRQFRRSRRNRKTRYREARFLNRRKPEGWLPPSIQHKINSHIKLIDLVHNILPVTSVTIEVAAFDTQKLKNLNIRGVEYQQGEQMGFWNVREYVLYRDNHTCQYCKGKKKDPVLQVHHIESRKTGGDSPDNLITLCKTCHHEIHEKGLEHIFQRKRPPMRDASQMTAMRWAMFSRIREKYSHANITYGYITKCIRIANGLSKSHMVDARCISGDPLAKPSGTVYLLKFVRKNNRQLHKATILKGGKRKSNKAPRFVKGFQLFDKVVYERKECFIFGRRSSGYFDLRLLDGTKVHASASWKKLKRVEHASTLLIERSIPVRSFSGDLIKKSPLGMMQGCQTHHSPYQGGLQMNCTQNYKIDQVTEQTLVVGIDIAKRTHYACFVDDR

SEQ ID NO: 5808 - protein, 419 aa, Flavobacterium thermophilum; identical to SEQ ID NO: 5596

SEQ ID NO: 5809 - protein, 420 aa, unidentified
  REGION 1..420: note = Human gut metagenome
MVYILNKHNEPLMPCSERKARLLLKQGRAVIYRKDVFTIKLINGSYGYKQHITMGIDCGSKHIGISATTNKKELFSANAELRNDIVKLLSDRKSLRRNRRYRKARYRKPRFDNRRIKEGWLAPSIRQKIDSHVRIVSLIHKLLPVKQVNVEVAAFDIQKIKNTDIKSSEYQMGEQLDSYNVREYVLFRDNHICQHCKGKSKDDVLQVHHIESRKTGGNAPNNLVTLCKTCHEKYHSGEITLNVNRGKSFRDASAMSTMRWLLYEELKSRFSNVNITYGYITKYKRIKLGLSKEHYNDAYCIAGNLNTSRLCNHHLIRFIPRHSRILHMQKFSKGGVRRSASASYWLNCGKPSKSGAMFTMFDKVKFNGIVCFISGSSNGYAALRDINWNKVHGCKTTVTVNKLALVSRRRGSMLFGELCG

SEQ ID NO: 5810 - protein, 451 aa, unidentified
  REGION 1..451: note = Human gut metagenome
VTTILKTCFAAFNLAKVVVLMDAWDIIVVLNKRGKPLMPCSPAKARLLLKEKKAIVKRRTPFTIQLTIATGESKQPVTLGVDAGYKHVGLSASTEKAELYASEVELRQDVSDLLSARRALRQSRRNRKTRYRAPRFDNRIRTKRKGWLAPSVENRINAHLSRIEAVLRLLPITKITVETASFDTQLLKNSDIAGKEYQEGEQLGFWNVREYVLFRDGHVCQHCHGRSKDPVLNVHHLESRRTGGNSPGNLITLCETCHKALHRGEIKLKAKRGHSFRAQAFMGIMRWEVLNRLKASHPELEVNNTYGYRTKHVRIRNGIAKSHCADAFCIAGNLGAERLGEFFFQKQTRRNNRQIHKLSILKGALRKRNQAPFEVKGFRLFDKVACQGEEGFIFGRRSSGFFDVRKLDGTRISAGISYKKLHLLEKRQTYLMEIRKEEAFPPLPEGRGLRA

SEQ ID NO: 5811 - protein, 512 aa, unidentified
  REGION 1..512: note = Human gut metagenome
MSTVYVLNKDGKPLMPTTRCGHVRYLLKEKKARVVASKPFTIQLLYETDDVVQPLYLGIDPGRSNIGVAVVKTDGMAVFTAHLETRNKEIPKLMKKRKDSRRARRTNGRRCRRQRRAKANGTISKKCVKQTTAQNGSVSKRAKEIGVIKRHLPGCEKDVLCIGIKNKEAKFNNRTRPTGWLTPTANQLLQTHINLVKKIQKFLPISDVVLEVNKFAFMQLDNPNIQKWQYQKGPLYQKESLKSAVSEMQEHHCLFCKKKIDHYHHVVPQHKNGSNTIDNIVGLCTQHHDLVHKDATWQKRLAKKKTGLNKKYGALSVLNQIIPALTKELSSLFPKHFFVTNGKSTYDYRAAHGVSKDHWLDAYCIACSVLPNDTCDKTINSRVPYELKQFRRHDRRALNNENMSRVYTFNGKMVATNRHKATEQTTDSLEEFRQRQPNDVCNLKVKEHHPTYRNMSRNYPGSIFLVEKQVHIMQGIAGSKDGKATTYKDTNANSIAAGKCKFVAKNSGILFV

SEQ ID NO: 5812 - protein, 431 aa, Moorena sp.
MSKVFVLDTEKRPLDPINPAQARQLLRNKKAAIFRQFPFTIILKKSCPDSPVSSLRLKIDPGAKFTGMALINDSTGEVVFAAELKHRGFAIRDALTSRSQLRRSRRARKTRYRQPRFLNRTRPERWLAPSLQSRVENIKTWVERLRKLAPIRAISQELVRFDMQLMANPDIQGKEYQQGTLAGYESREYLLEKWGRQCAYCGVKDVPFQVEHIHPRAKGGSKSITNLTLSCEKCNTKKGTKDIKDFLKKDRSKLEKILEQAKRPLADAAAVNTTRLALLFVVKATGLPVETGSGGLTKFNRSQQNLEKTHWIDAACVGQSTPILNIKGVKPLLITANGHGTRQSCRTDKYGFPSRYVPRFKFVNGFQTGDIVKAVVTKGKKIGAYIGRVAVRTSGSFNISTTSGLIQGISYKCCKSIHKKDGYEYGKSKIC

SEQ ID NO: 5813 - protein, 428 aa, Moorena sp.; identical to SEQ ID NO: 3528
  REGION 29..30: note = misc_feature - Xaa can be any naturally occurring amino acid

SEQ ID NO: 5814 - protein, 424 aa, unidentified; identical to SEQ ID NO: 3351
  REGION 1..424: note = Human gut metagenome

SEQ ID NO: 5815 - protein, 443 aa, Oligella sp.; identical to SEQ ID NO: 3678

SEQ ID NO: 5816 - protein, 279 aa, unidentified
  REGION 1..279: note = Human gut metagenome
VVVETAEFDLQLLKAIADGKPVPQGEDYQQGEMYGHYNVRQYVLWRDGYTCQCCGAHATKKKEVRLHVHHLESRKVGGDAPDNQVTLCESCHEKLHKGLIAEKDFKKRKRKSTRDATFMGIMRKTLMQRLCSELPIPVVKTRGYITKATREKLLVLPKSHTNDALAIAQGKQGFNVGYLPGIVQINKIYTIRPVRHHNRQLHKATILKGGIRKSNQTEKYVFGYCLFDKVQFNGQDCFIWGRRTTGIFTIKTINGKMIKDGISFKKLKLAEKSTSYLIA

SEQ ID NO: 5817 - protein, 395 aa, unidentified
  REGION 1..395: note = Human gut metagenome
MVTVQQSTHHLPFGRVFIRRNLFMVYVISQDGKPLMPCSDPIARLLLKQGKAKVKKREPFTIKLTYETTNYTQGLTLGVDTGSGTIGTAVSKDNGDIVYMSEVVVRNDITDKMTQRAKYRRNRRNRKTRYRKARWLNRASSIKKDRFSPTMQSKLHSHVREIEYIQSILPVTEMVFETGQFDMQLMKNPSLANPKVRPWGYQKGANYGFENTKAMVLNRDNYTCQCCKGKHKDSKLEVHHIVFRSQGGSDEESNLLTLCHTCHKDLHSGKINPKLSGKLKGNLKYATQMNSIRKQLFRFYPNAIETFGYVTKANRLHLGVDKEHYYDACTIATQGNAFNVKSNLYKKKCVSDGDFQKTKGIRSEQPIVTDKICGFRKFDKVRYFGNDYFIKGRVK

SEQ ID NO: 5818 - protein, 443 aa, Anoxybacillus sp.
MVEENMTCFMQRKGENSMVFVLDTNKRPLAPCHEAVARKLLKQGRAAIYRRFPFTIILKKSVDESEIKATYRLKIDYGSRHTGLAILRGQEVVWLGQLDHRTDIKERMDKRRAFRRARRNRKTRYRKPRFLNRRRKDGWLPPSLESRVQNIQTWVNRLKKLCPIGYISYENAKFDTQLMRNPEINGVEYQQGTLQGYEVREYLLEKFGRKCCYCGKENVPLEVEHIIPKSRGGTDRVDNLCLACHDCNQRKGSKTAEEFGYPHIQKQVKESLKDTSAINSTRWKAYEVLKQTGLDVECGTGARTKMNRICLDLPKTHYFDACCVGESTTNHLYFKTKEVLFIKAKGRGSRSRTNLDRYGFPRGYLARQKFFFGFQTGDMVKAVVPRGKYQGVWFGEVACRKTGSFDIKGKDGKRIAQGINYRYVQVIQRFDGYAYGKGVAELA

SEQ ID NO: 5819 - protein, 427 aa, Enterococcus sp.; identical to SEQ ID NO: 5630

SEQ ID NO: 5820 - protein, 442 aa, unidentified; identical to SEQ ID NO: 2834
  REGION 1..442: note = Human gut metagenome

SEQ ID NO: 5821 - protein, 415 aa, unidentified
  REGION 1..415: note = Human gut metagenome
MENKIEYCFVVDKNNRPLAPTKVNKGWYLIRKGRAKLKSKYPMVIQLKKEVESDDEDKSHMVCGIDDGSSHVGIAIVQKCPSKNKVVFKGTIEQRQDVKHLMDVRRGYRRYRRYHKRYRKPRFNNRASSKRTNRLAPSIKQKKDSILRVLYQLNKWINIKEYYLEDVAIDIRAMTDGYKPYNWQYQKSSRLDENLRKATILRDDCKCQECGKTNTVLEVHHIRAKRFGGANTIGNLITLCSSCHQKTEGKEQEFEERYFTKIKNKPKRFDYAMHVMQGKNYLRENIKQLGILHLTTGGDTANKRIEWNIEKSHSNDAICITNCFPNTCNIKEWIIKPMRGKSKAKTNDVLGIKHRDLVEYTYRNGETHKGYVTALYPHLNALNFQSPTKHCKKVNARKCRLLWKYNKIYWIDSVT

SEQ ID NO: 5822 - protein, 446 aa, unidentified
  REGION 1..446: note = Human gut metagenome
LQFYRKEHSIMQYAYVLNKRGEPLMPCSPRKARLLLKQKKACVVKRTPFTIKLLYGSTGYKQPITLGVDAGSKHIGISATTEKYELYREEATPRNDVVDLLSARRAFRRNRRNRKTRYRAPRFNNRVHSKHKGWLAPSVEVKIQEHITLIKRVCRILPVTLVRVETAEFDTQRLKAMLEGKPLPVGTDYQLGEMYDEYNVRQYVLKRDNYTCQCCGAHPTKTKAVKLHVHHIETRKAGGNAPNNLITLCTACHKTLHAGKVTLDGRKRGKPLKDAAFMGIMRKTLMERLLKELKIPVQGTYGYITKYLREKHSIPKSHTNDARCISKNPLAIPCDTCYYTKAIRHHNRQLHKATILKGGIRKANQALYTVKGYRLWDKVSYNGSECFITGRRTSGYFALKKLDGTVVSNSASYKKMRLLEVATNYITERPANESQVGISRFQVRKK

SEQ ID NO: 5823 - protein, 458 aa, Lactobacillus sp.
LKGVGMMSEIKKVDYIYIVDSNGTPLMPTSRLGMVRRWLKTGQAKWFGNSRNTIQFVRPVTTNTQELTLGVDAGFHLGLSVVGNNREYYVSESLRKSEKDRITSRRELRRTRRNRLRYRKARFNNRRRKDGWLAPSIQHRLDFTIKEIKRLYKFLPITNLVVEVTPFDNQKLLNPDIQGWQYQKGKMYGFKTIKDYLLARDNYRDALDGKQYPASQLRVHHLVQRKDGGSNQPDNLVLLSDINHNQSNHNNGILAKLRENRQKTLDYRGAYFMSILATRLSNYFEHYTITQGYLTANLRQKYEIKKSHLNDAFIIAGGTDTTLRTNNVYSRQKLRNNNRVLQKFYDAKYIDSRDGKKKTGKELSSGRTRRSRELNYTNLRQFRKEKVKKGRVSIRRGHYQLRPHDVVLNTRTNRIETVKGVQNSGTVIKFQTGKTCSIKSVVSLYHVNGILEKKMKNI

SEQ ID NO: 5824 - protein, 512 aa, unidentified
  REGION 1..512: note = Human gut metagenome
MSTVYVLNKDGKPLMPTTRGGHVRHLLKEQKARVVRTNPFTIQLLYETDNLVQPLYLGIDPGRTNIGVAVVKTDGTAVFTAHLETRNKEIPKLMQGRKKARRARRTNGRRCRRQRRAKANGTISKKCVKQATAQNGSVSKRANEIGVIKRHLPGCEKEVLCIGIKNKEAKFSNRTRPEGWLTPTANQLLQTHINLVKKIQKFLPISDVVLEINKFAFMRLDNPNVQKWQYQQGPLYQKASLEEAVSEMQEHHCLFCKNTIDHYHHVVPQHKNGSNTIGNIVGLCAKHHDLVHKDTSWQEKLAKKKTGLNKRYGALSVLNQIIPALTKELSSLFPKHFFATNGKSTYDYRAAHGVSKDHWLDAYCIAGSVLPNDACDNNINNRVPYELKQFRRHDRRALHKENMSRVYTLNGKKVATNRHKAVEQATDSLEEFCQNHPDDVCKLKVKEHHPEYRNPKRNFPGCVFLVGKHTHVMQGTSGSHNGKADGYYDTNGNSYSSGKCKFVVKNEGIVFT

SEQ ID NO: 5825 - protein, 423 aa, Arthrospira sp.
  SITE 22: note = misc_feature - Xaa can be any naturally occurring amino acid
  SITE 29: note = misc_feature - Xaa can be any naturally occurring amino acid
  SITE 151: note = misc_feature - Xaa can be any naturally occurring amino acid
  SITE 153: note = misc_feature - Xaa can be any naturally occurring amino acid
  SITE 178: note = misc_feature - Xaa can be any naturally occurring amino acid
  SITE 210: note = misc_feature - Xaa can be any naturally occurring amino acid
MSNHVFVLDTNRKPLRPCKPGXARSLLKXGKASVFRRYPFTIILNKEVDANPEPLELKLDPGSKVTGIALKQGNHIIFAAELQHRGQQIKEALLSRRQLRRSRRNRKTRYRPARFLNRTRSKGWLAPSWQHRVDTLMTWVHRFRRLAPVGXIXQELVRFDLQLMENPEISGVEYQQGXLQGYEVREYLLEKWGRTCAYCGAQNVPLEVEXIQPRSKGGSDRVSNLTMACHSCNQAKGNGDIRDFLSGQPDVLSRLLRQAKSPLKDAAAVNSTRWALFKALKATGLPVTTGTGGQTKFNRLRLNLPKAHWLDAACVGPVESLEVLTSKPLLILAKGHGTRQMCGTNKYGFPTRHRSRRQIHKGFQTGDMVTALVTAGKKIGSYLGRVLCRASGSFDITTASVRVAGISHKYCQPIHRKDGYAYA

SEQ ID NO: 5826 - protein, 540 aa, unidentified
  REGION 1..540: note = Human gut metagenome
NHAKASSSQGKHNLLLRQERFIVKEVANMSTVYVLNKDGKPLMPTTRGGHVRHLLKEQKARVARTKPFTIQLLYETDDAVQPLYLGIDPGRTNIGIAVVKADGTAVFTAHLETRNKEVPKLMQDRKKARRARRTNGRRCRRQRRAKANGTISKKCVKQTTAQNGSVSKRAKDIGVIKRRLPGCEKDVLCIGIKNKEAKFNNRTRPEGWLTPTANQLLQSHINLVKKIQKFLPISDVVLEINKFAFMRLDNPNIQKWQYQQGPLYQKANLEEAVSEMQEHHCLFCKKPIEHYHHVVPQHKNGSNTIDNIVGLCTKHHDLVHKETAWQEKLAKKKTGLNKKYGALSVLNQIIPALTKELSSLFPKHFFATNGKSTYDYRAAHGVSKDHWLDAYCIACSVLPSNVCDSNINNHMPYELKQFRRHDRRVLNNENMNRVYTLNNKAVAINRHKAKDQKTVSLEEFRKEHPDDVCKLKVKEHHPTYRNMNRNFPGSVFLVGKQIHIMQGIASSKDGKATKYNDTSATAIAAGKCKFVAKNTGILFV

SEQ ID NO: 5827 - protein, 470 aa, unidentified
  REGION 1..470: note = Human gut metagenome
MSVFVVGLNGCRLMPVSERKARLLLKGGKASVYRKVPFTIKLNYKTGSTVQPGYLGIDTGSQHIGVSVVQKDGTVLHKEEIGLRDSMSKRKLLESRASSRRGRRYRKTRYRHPKWKPKTKRIYNEKADRKGRHWKKQKNTFTSKRQAGWLPPSLQSKTDHHIQWIRKLLDLLPEGYRLSIELGRFDPARMKDPGIHGELYQKGPQYDYENVRAYVLARDGYTCRVCKKNGGKLHVHHILYRSRGASDDPKYMAAVCSNCHTTENHLPGGILYQWMQDQKKFTRGLRDATFMNILKKRLRKAFPDAVFTYGNITKADREKLELPKSHGNDATAIALVKTEVPSVKDEEPVIHIQQVRRKKRSLHEEPPRKGRKEPNRTASRIDKNTKSVTVTKGSGEKKAFMTACLFDRVELDGKKGWITGFTGTSCYVKDKEDSYICTSPKYKQVSISRLRILHHCGNWAIGAEKPLGKG

SEQ ID NO: 5828 - protein, 451 aa, unidentified
  REGION 1..451: note = Bioreactor metagenome
MWTYHYFVVSYYSLRRVNVVFVISKEGKPLMPTKNHAKVRILLKHKKAKVIRRKPFTIQLLYETTTYTQPITLGIDSGYSYIGFSAITEKEELICGEVKLLQGISERLKERAMYRRQRRSRLRYRKPRFDNRKKCSDWLPPSIQHKFNSHIRFINFLKKILPVTDVVIEVANFDTHKLKNLDVEGIGYQQGEQEGFYNLREYILYRDNYKCQLCGREDLPLEVHHIGFWKQDRTDRPSNLITLCIKCHTPKNHQENGKLWGLEPIQKPFKEATFMSTVRWELVNTLGCKHTYGYITKSKRISLNLEKTHYNDAFCIAGGINQARTKPIIFEQIRRNNRSLEKFYDAKYIDIRTGKVATGQELFCGRRTRNKNYNTENLRKYRGQKISKGQRRIRTQRYFYQPKDIVIYNGKKYVVKGVQNKGNYIKLEKLNKPVKLSLVKPYEFRKGFCVV

SEQ ID NO: 5829 - protein, 451 aa, unidentified
  REGION 1..451: note = Human gut metagenome
MPVAVISKTGERLMPTSEYRARKLLKSGKAIKYSYRPFTIQLTERETGDIQPIELCMDTGYIHIGISVKSEKHEYLADQIDTLTDEKARHDACRMYRRQRRSRKRYRQPRFNNRKRNDRWIAPSLEHKKSIHIQAILRICKVMPVTDITLEMGNFDTQVLKAREEGKSLPQGVDYQHGERYGITTLREAVFSRDGYTCQCCGRTIKDGAILHVHHIVYRSQGGTNRMSNLITVCDKCHTPANHKQGGKLYNWKPKIASFKGATYMTTIRWKLYNEVKALFPDIDIHVTYGAETKERRRALDIDKSHVNDAFVMGQFHPKHRSKPICYKKKRRNNRCLEKFYDAKYIDSRDGKKRSGQELFNGRISRNHKKDSENLHQYRLQKVTPGRRAIRRQHYPIQPHDIIVYNGNKIEVSGCQHKGTRVVFSKTKKSVQISKIKLFKYAGGYSKSVFN

SEQ ID NO: 5830 - protein, 471 aa, Caldicellulosiruptor sp.; identical to SEQ ID NO: 3268

SEQ ID NO: 5831 - protein, 438 aa, Moorena sp.
LEKEVAVFVLDKTGKALMPCTEKRARLLLVRGRARVHRVVPFVIRLKDRQAVSSQFQPIKIKLDPGSRITGIAVVRETGNNGVAVLNLFELVHRGRRISEALTARRAMRRRRRGNLRYRAPRFLNRSKPQGWLAPSLQHRVNTTMSWVARLRKWVPATSVAQELVRFDMQKITNPEISGAEYQQGTLAGYEVREYLLEKWGRKCAYCGAEHTPLNLDHIHPKAKGGSNRVSNLTLACVPCNTRKGAQPVEAFLVKQPDRLKRIQAQAKRPLKDAAAVNSTRWALFNSLKTTGLPAEVASGGQTKWNRSRLGIPKTHALDAACVGQVESVTNWQKPTLTIKATGRGSYQRTRLDAFGFPRGYLMRQKSIHGFQTGDMVGADVPKGKRKGFYVGRVQVRANGNFNIQGVVKDISHRYCKIIQRADGYGYSRVLQRSCVVR

SEQ ID NO: 5832 - protein, 512 aa, Selenomonas sp.
MAIQLHDVFHEALSLKGDLEMYVVYVLNKDGSPLMPTKRFGHVRRMLKSGQAKAVSTKPFVIQLLYDSTEYTQPLYGGTDPGRINIGEAVINEKGEVVYEAHIITRNKRIPRLMAKRKAYRQASRRGERLRRKRRARKCGTTTMFPEGRKLPGYKDGVLAVKDIINTEAKFNNRKRPAGWLTPTARQCVQTHINGVRQICKILPVKYWTLEYNRFAFKRMDDGSIRGIDYQNNKTKQFDNVNDYIDYLQEGRCILCGCNSIKHHHHIIPKHKGGSDGPENIVGLCDDCHTKVHTNKAELDRVGKRKKYVGASIVNIAMPHIYDGLKNIFGNNLCVCKGRNTAKLRSEYGIGKEHGFDAVCVASIGGRIPLINVNDSSAFTIIQFRNHDRAIIKTQYERTYKLDGVVIAKNRKPRFEQDKKTPALSDWYKKLCDTIGESEARGVLSKLKVAKSRRGYNDTKRIMDGAIFLYEGKRYVLKAYKSKRKYLEAYGQEKLFPAKDCVFVQRKSLVYV

SEQ ID NO: 5833 - protein, 457 aa, unidentified; identical to SEQ ID NO: 3236
  REGION 1..457: note = metagenome

SEQ ID NO: 5834 - protein, 471 aa, Caldicellulosiruptor sp.; identical to SEQ ID NO: 3375

SEQ ID NO: 5835 - protein, 442 aa, unidentified; identical to SEQ ID NO: 2892
  REGION 1..442: note = Human gut metagenome

SEQ ID NO: 5836 - protein, 240 aa, unidentified
  REGION 1..240: note = Human gut metagenome
MVYVVANDGQPLMPTERHGKVCRMLKSGMAKVVKKCPFTIQLQYESERNVQPVSLGVDAGSKHIGISATTKTKVLYESDVELRDDIVKLLATRRQLRRSRRSRKTRYRPVRFDNRKRKEGWLAPSIRQKIGSHLTVVANACKILPINQIIVETASFDIQKIKDPEIQGIEYQQGEQMDFWNIREYVLFRDGHICQCCKGRSKDKILNVHHIESRKTGGNAPNNLITLCETCHKGYHNGTV

SEQ ID NO: 5837 - protein, 442 aa, unidentified; identical to SEQ ID NO: 2903
  REGION 1..442: note = Human gut metagenome

SEQ ID NO: 5838 - protein, 465 aa, Burkholderia sp.
LAVFVLDRLGKPLMPCSEKRARLLLARRRARVHRLMPFAIRLVDRELLSSAAQPLRIKLDPGSKATGLALVRDIEQVDASTGEIHRGAVVLNLFELVHRGRQISEALTARRAMRRRRRGALRYRAPRFLNRTRPTRWLAPSLQHRVDTTLAWVKRLQRWAPITAASTELVRFDMQVPDNPEVTGIEYQQGTLFGYELREYLLEKWTRKCCYCDVQNVPLNIEHLVSRARGGSNRVSNLAIACVPCNIRKAAQPLDVFVKDKARLTAQVRRPLKDASAVNATRWALVNALRATGLPVETASGGRTKYNRSQLGIPKTHALDAVCVGEVSAVVAWRKPTLRVKCTGRGSYQRTLLDRYGFPRGYLMRARRVRGFGTGDHVRADVPSGRKAGTHRGRVAVRATGSFNIQTHDQVVQGVAHRYCRVLQRADGYGYSRMAIDKGEAGGGAATQPGPSLPGLKAEVSRAEG

SEQ ID NO: 5839 - protein, 407 aa, Fervidobacterium sp.
MHPFTIRLKDRTVQQSELQPLRLKLDQGAKVTGLSVLREDGDVAETVFLCEIHHKTDIKQKLDARCAVRRSRRNRKTRYRKPRFLNRRRPEGWLPPSFKARVNQLINAVRKLTKLLPISAISIEDAKFDTQKLQNPEISGIEYQRGTLFGYEVREYLLEKWGRKCAYCGRSDVPLEIDHIVPRSRGGTDRVSNLTLACRECNQKKGNKTAAEFGYPHVEEQARQTYKQPAFMNSIRSYLSKSLSGFGIPAEYETGALTKANRIRLGFPKEHYFDACCVGESTPSEIRITQSYVQIWRAVGRGTRQMCNTDKFGFPRGHRQRRKKHFGFQTGDIVKAIVPRGKYAGIWVGAVAVRGSGFFDIKDTNGKRICQGISYKYCKLIQIADGWQYSKRKANYSKSHTTEVACL

SEQ ID NO: 5840 - protein, 419 aa, Anoxybacillus sp.
LFVYIINKHGKPLMPCSSRKARLLLKQKKAKVVRRTPFTIQLLYGSSGYKQPVSLGVDMGTRYVGISATTEKDVLFEAEVKLRTDIVDLLAIRRQFRRSRRNRKTRYREARFLNRRKPEGWLPPSIQHKINSHIKLIDLVHNILPVTSVTIEVATFDTQKLKNPNIQGVEYQQGEQMGFWNVREYVLYRDNHTCQYCKGKKKDPVLQVHHIESRKTGGDSPDNLITLCKTCHHEIHEKGLEHILQRKRPPMRDASQMTAIRWAMFSRIREKYSHANITYGYITKCIRIANGLPKSHMVDARCISGNPLAKPSGTVYLLKFVRKNNRQLHKATILKGGKRKSNKAPRFVKGFQLFDKVVYEGKECFIFGRRSSGYFDLRLLDGTKVHASASWKKLKRVEYASTLLIERRKGDSSPTFANA

SEQ ID NO: 5841 - protein, 456 aa, unidentified
  REGION 1..456: note = Human gut metagenome
MSTCVCVLSNSGERLMPTFRLGKVRRLLKDGKAKIVKHHPFTIQLLYDSKTNKQPIEICEDVGYNYIGISVKSKSCEYVSAQYDTLQDEKEHHDDCRKYRRTRRNRLRYRKPRFDNRKRSEGWLAPSLEHKKQLNISLVERYVSVIPITHATVEVGSFDTMLLQAIQKGETKPEGADYQEGPRYNLATLREAVFYRDNYTCQVCGRKITDGAILHMHHMFYWKGRHGYKLDELVTACEKCHTPANHQKGGKLFGFGEDKEFADLSGAAFMNAVRWQIVNALHTTYSKEFVTITYGAMTKEKRIALQLEKSHNNDAYAMGDFHPVHRCGFRHYQKRRRNNRVLEKFYDATYIDARTGNKAKGKELFNGRISRNHKKDSENLHKYRSEKVSKGRRSIRKRRYAIQPYDTVRLKGKTYITSGCHNKGTRLLIPVNGKSKSVTISKVQVVCHAGPWIQII

SEQ ID NO: 5842 - protein, 544 aa, unidentified
  REGION 1..544: note = Human gut metagenome
MKQKKQKVIIYILNKKGKPLMPTTRCRHVRILLDNKKAVVVSSNPFTIRLKYDTPNGVQNVFAGIDSGRENIGSGASNEGGDCLYLGELKTSNKSIKMKMTERAGFRRERRRHDRQNKQRKARKDHTEIQNGNIDICRTTISCKSVQISYPTAEESVTHKIIRGKEGKFANRHRDEGWITPSARQLIQMHMNDLKSMCRILPISHVTLERVAFDFQKLENENIKAWEYGKGKLYGYNSPEEYIRDVQDGKCLVCGKPHIDYLHHIIPRSKGGSDKVSNLVGLCYDCHYGPTGVHKCQDTQDRLPELKNKANKQYKVSLLNSVMPVLIEEMDKFCKANSIIFSICEGHDTAKVRDMYDLQKDHCLDGFAISLVGRDVESVDVMPDRIYQKQRYKKKSKNIIQKRNHREYYAGKKLVAVNRHKGTDQKADSLEEYMNTYAESHTADECKKHFESLTVKPARRTYTFHKEGRICPFHTGDKIRYEKKNKIKGNTKVETFICESIYFSKDENKAKVEHNKTKSKKMKFCRVLESGCIPYIDYRKLALI

SEQ ID NO: 5843 - protein, 415 aa, Bacillus sp.
MVSYCFVLDGKGRKLSPTNENRGWVLIRKNKAALINKFPMVIQLFKEVADEKIDQTLIHFNIDDGSKFTGIALVQECQTKNKPVFKGTIEHRTDVKDKMDTRRSYRRYKRSHKKNRPKRFHNRSSSTREGRTPPSIKQKKEATLRLLNKLMKWTRVNHIHLENVMIDIRKLEKGSQPYQWDYQKSNRLDENLRKAALMRDHFTCQDCGNTHCRLEVHHIIPRRLQGSDSIHNFITLCSSCHEQVTGEESDHAERFFKKIRGKKIAFHDAMHVMQGKTYFQQELKKIGPLTLTTGGDTANRRIDWAIGKSHSNDAIVLSQLHVSSKQCHIKDWCIKPMRRRSKKKIDKVNDFHHRDFVRYTKRNGDVYEGYITALYPKKKQCNLTTTEGKVLKRYGINRLKLLWRFNHIYFLNKHE

SEQ ID NO: 5844 - protein, 471 aa, Caldicellulosiruptor sp.; identical to SEQ ID NO: 3268

SEQ ID NO: 5845 - protein, 460 aa, unidentified
  REGION 1..460: note = Human gut metagenome
MVAVVDLFGKPLMPTNEYRARKLLKQKKAKIFGYRPFTIQLTERKSAEIQPIELCMDTGYIHIGISAKSERHEYLGMQIDTLTDEKLKRDDKRQYRRQRRNRKRYRAPRFDNRRRKEGWIAPSLEHKKEIHIDAIQRICKVMPITDITLEIGNFDTHVLKAVEEGKPLPQGSDYQHGERYGIATLREAVFLRDGYKCQCCEKSVKDGAILHVHHIKYRSQGGTNRMSNLITVCDKCHTPKNHKPGGKLWNWKPKLAEFKGASYMTSIRWTLYNEVTALLPNSSVHITYGAKTKESRRKLDIKKSHVNDAYVMGLFCPKHRTKPVYFKKKRRNNRVLEKFYDAKYIDSRDGKKQSGQELFNGRINRNHRKDSENLHLYRKQKVTKGKRSIRNKHYPIQPHDILLYQKKKYENAGCHNNGSRVILLPEKKSVALKQLTIYQYAGGYYRVPYESNKKEERTGS

SEQ ID NO: 5846 - protein, 552 aa, unidentified
  REGION 1..552: note = Candidatus Poribacteria bacterium
MSKVAVLDTNKNVLEPCHPAVARRLLKRGEAAVLKRYPFTIILQKAVPADEIVTQAYTLSVDPGSKVTGLAITTEDAEIVYAAELHHRGAQVKKALSDRAGFRRGRRTRNLRYRPARWANRARKVPVLTDAGWTYQRAAKEEGNDASKTQNTFNRVSWSQFRDKRYRWERLPPTKTNRRQKQRWKRVRVEHQKRADNGWVAPSLMSRVFNLETWTRRLCAVYPITRLAIETVKFDLQLMEDPDIHGIQYQQGTLHGREIREYLLELTKRKCAYCGKNKVRLEVEHIIPKARGGSSRPDNLTMACRPCNEKKGNLVGEALAAKCGEDFAKKVEAAKRKSTKRLTDATAVNTIRWKIYETLEATGLDVRPGTGGKTAYHRNLAGLPKTHYYDAASVACIPKHPAQLSVQVIQAIGYGRRDNIGKKFSMKAPGFVLPSEKRAASAGFRKFSHVELTKANGTKWRGVLNCFDKTPKGKPRKVRVKYFAPDVKDPRKSGHTGELRLLQHRDGYSYGNLVANMEFREPKTPAPETAQPCTDTGDAMMGAQLDFLSHLL

SEQ ID NO: 5847 - protein, 470 aa, Blautia sp.; identical to SEQ ID NO: 2925

SEQ ID NO: 5848 - protein, 410 aa, Desulfobacterium sp.
MLVYVINKNGNPLMPCKPAKARKLLKSGKATIVNHTPFTIQLTWNCEEHTQPVTIGIDKGAKRTGFCAVSKDRVLISGIIEHRSDVKDKMSTRAANRRQRRSRLWYRAPRFFNRSASTRSGRLPPSIKTNVEEVLRVVKKLPLPIDHVIVEDVLVDIAKLNDPDLTAKDYQASNRLHENLRLACLLRDGFTCRYCKKKNGKLEAHHIIPRSKGGKDTILNLVTLCSTHHKALHKGKIKMELNGVGNLKDVIAQRTMQGKQSLYKLLSRFGEVKTIFGYQTAEYRKALGLAKDHDVDAFCIANYFSMYDLSYHKENCFRVSFRPRQTRRCYHDLPKPGKGRVRYKVNELLEGFRKGDIVMVKDHFIKQINSIYSNGRLAFKRIKGEPASALPKNCRLLLKQKTIVFDAIKF

SEQ ID NO: 5849 - protein, 414 aa, unidentified; identical to SEQ ID NO: 2588
  REGION 1..414: note = Human gut metagenome

SEQ ID NO: 5850 - protein, 471 aa, Caldicellulosiruptor sp.; identical to SEQ ID NO: 4560

SEQ ID NO: 5851 - protein, 431 aa, Escherichia sp.; identical to SEQ ID NO: 3801

SEQ ID NO: 5852 - protein, 339 aa, unidentified
  REGION 1..339: note = Human gut metagenome
LLSARRALRQSRRSRNTRYRAPRFDNRIRTKRKGWLAPTVENRINVHLSRIETVLRLLPVTKITVETASFDTQLLKNPDIAGKEYQEGEQLGFWNVREYVLFRDGHVCQHCHGRSKDPVLNVHHLESRRTGGDSPGNLITLCETCHKALHRGEIKLKAKRGRSFRAETFMGIMRWGVLNRLKASHPKLEVHNTYGYRTKHARIANGIAKSHCADAFCIAGNFGAKRLGEFFFQKQTRRNNRQIHKLSILKGGIRKRNQAPFEVNGFRLFDKVACKGEEGFIFGRRSSGYFDVRKLDGTCISAGISYKKLHLLEKRRTYLTEIRKEEALPPPPEGRGLRA

SEQ ID NO: 5853 - protein, 442 aa, unidentified; identical to SEQ ID NO: 2637
  REGION 1..442: note = Human gut metagenome

SEQ ID NO: 5854 - protein, 410 aa, Methanobrevibacter sp.
MFVYVLNMHGEPLMPCRPRKARILLKDKKAKVVNRTPFTIQLLHRSSDYRQPVNLGVDAGSKYIGLSATTSKKELFKATVELRQDISKLLESRRSQRRNRRSKLRYRPARFNNRSKKGKLAPSIQHKIECHLTMIKRVCSILPVDNIIVETAEFDTYKLKNPEINGVEYQHGDAEGFYNVKSAVLSRDKYTCQICGKKHTKLEVHHIIFKSQGGSNRMDNLVTLCSDCHSKIHKKQLTFNKKVKTFKHASHMNIMRKRILESLKREFNNVYETFGYLTKYLRENLGIVKSHCNDAFVISHNLEAEQSDVEYLFKKVRRHNRQIHKAKPSKGGQRRKNQSPYIINGFRRYDKVMYKSIECFITGKRSSGYFQLKSFNGTVISQGVSSKKLKLLEPIKGWLIDWRIAIPSST

SEQ ID NO: 5855 - protein, 423 aa, Moorena sp.; identical to SEQ ID NO: 5218

SEQ ID NO: 5856 - protein, 428 aa, Enterococcus sp.; identical to SEQ ID NO: 4335

SEQ ID NO: 5857 - protein, 419 aa, Anoxybacillus sp.; identical to SEQ ID NO: 5840

SEQ ID NO: 5858 - protein, 512 aa, unidentified
  REGION 1..512: note = Human gut metagenome
MSTVYVLNKDGKPLMPTTRGGHVRHLLKEQKARVVRTKPFTIQLLYETDDVVQLLYLSIDPGRTNIGVAVVKTDGTAVFTAHLETRNKEIPKLMKKRKNSRRARRTNGRRCRRQRRGKANGTISKKCVKQDTAQNGSVSKRAKKIGVIKRHLPGCEKEVLCIGIKNKEAKFSNRVRPEGWLTPTANQLLQTHINLVKKIQKFLPISDVVLEVNKFAFMQLDNPNIQKWQYQQGPLYQKASLEEAVSEMQEHHCLFCKKPIAHYHHVVPQSENGSDTIGNIVGLCTKHHDLVHKDTEWQKKLAKKKTGLNKKYGALSVLNQIIPALTKELSSLFPKHFFATNGKSTYDYRAAHGVSKDHWLDAYCIACSVLADDVCDNNINSHVPYELKQFRRHDRRALHKENMSRVYTLNGKSVATNRHKATEQTTDSLEEFRQCQPDDVCKLKVKEHYPEYRNPKRNFPGCVFLVGKHTHVMQGTSGSHNGKADGYYDTNGNSYSSGECKFVANNEGIVFA

SEQ ID NO: 5859 - protein, 435 aa, unidentified
  REGION 1..435: note = Human gut metagenome
LGRTTGLRAEQAEPAGIRKGDTLKVFVLNMRGKPLMPCSPAKARHMLKAGKAVVVRRTPFTIKLTIATGETKQDVTLGVDAGARHVGISATTEKEEVFASEVALRQDITGLLADRLAFRRARRNRKTRYRAPRFNNRVRSKHKGWLAPSVENRIQAHISRIEAVCRLLPVTKIVIETASFDIQKIRNPEVEGTGYQQGDQLGFWNVREYVLFRDGHICQHCRGRSKDPILNVHHLESRKTGGDAPNNLITLCETCHKAYHAGKIKLKVKRGHSFRAEAFMGIMRWTLLNRMRKAHPSLPVENTYGYLTKHKRIALGLPKTHCADAFCIAGNLKALRRGDFLFQQQTRKHNRQIHKCSILKGGVRKLNQAPFLVKGFRLFDKVRIGGQIGFVFGRRVRGIFNIRRLDKTVIGTDINCKKLSLLETRKTFLTELRKE

SEQ ID NO: 5860 - protein, 465 aa, unidentified
  REGION 1..465: note = Human gut metagenome
MSTCVCVLSNSGKRLMPTIRLGKVRHLLKDGKAKIVKHHPFTIQLLYDSKTNTQPIEICEDVGYNYIGISVKSQSHEYVSAQYDTLQDEKACHDSCRKLRRSRRNRLRYRKPRFDNRKRSEGWLAPSLEHKKQLNIRLIERYVSVIPITHATVEVGSFDTMLLQAIQKGKSKPEGVDYQKGPRYNLATLREAVFYRDNYTCQVCGRKIADGAILHMHHMFYWKGRHGNSLDELLTVCEKCHTPANHQKSGKLYGFGENVKFADLSGAAFMNTVRWQIVNELYAAFGKDFVTITYGAMTKEKRIALQLEKTHSNDAYAMGEFHPNHRCTFEHYEKVRRNSRTLEKFYDSRYIDIRTGEIATGKELFNGRINRNHKKDSENLHKCRGKRTYAGHRALLRKKVNLNPGDLVSLNGEVLIVHGTHTNKKGAVNVEFKVPAKNGQKSANLKKLKIVKAAGSIHPAWEKVS

SEQ ID NO: 5861 - protein, 447 aa, Marinobacter sp.
MAVFVLDRQKNPLMPCSEKRARLLLTRKRAVVVRVYPFSIRLKDRTGGTVQKVVLKIDPGSKETGLAVSRVSAQGEHVLCLIELIHRGRQIRKALDQRRGCRRRRRSQLRYRAPRFNNRTKPKGWLAPSLQHRVDTTTSVIKRLCALVPVTSISQELVRFDLQQMENPEISGVEYQQGTLLGYEVREYLLEKWGRECAYCTVTDTPLEIEHIVSKANGGSNRISNLTIACHDCNQEKGSQTLADFFQTSKRLKDKQPRLSQVLSQCKRPLRDAAAVNSTRWALFQSLKNTELPVNVGTGGQTKFNRQRLGIPKTHALDAACVGVVEQVFDWQKTTLRIKATGRGSYKRTRLTKHGFPRGYLMREKSVHGFQTGDMVRAIVPTCKKEGTWLGRVAIRKTGSFNIQTSDGAVQGIHHRHCRLMQKADGYGYHLQPTPQKGEGKQESLSC

SEQ ID NO: 5862 - protein, 289 aa, unidentified
  REGION 1..289: note = Human gut metagenome
LSRIEAVLRLLPVTKITVETASFDLQLLKNPDISGKEYQEGEQLGFWNVREYVLFRDGHVCQHCHGGSKDPVLNVHHLESRRTGGDSPGNLITLCETCHKALHRGEITLKAKRGQSFRAEAFMGIMRWEVHSRLRALHPGIEVSNTYGYRTKHARIANGIAKSHCADAFAGNLGAERLCEFFFQKQTRRNNRQIHKLSILKGGRRKRNQASFEVKGFRLFDKVACKGEEIFIFSRRSSGYFDVRKLDGTRISAGISYKKLRLLEKRRTYLTEIRKEAFPPLPEGRSLRA

SEQ ID NO: 5863 - protein, 245 aa, unidentified
  REGION 1..245: note = Human gut metagenome
INNPNISGKEYQEGDQLGFWNVREYVLARDGHKCQYCKGKSKSKILNVHHLESRKTGGDSPSNLITLCETCHKEYHKGNIDLKIKRGSSLRDAAVMGIMKWRLYEELKSRYDRVFMTFGYITKHNRIKYGIEKSHTSDAFVISKNINAKRIGCQYLKRLIRRHNRQIHKMKILKGGKKKNNQAPFEVFGFRLFDKVLYNNKICFVYGRRKSGSFNIRDFNGENSKDVSRKKLKLIRGKRHPIILK

SEQ ID NO: 5864 - protein, 499 aa, unidentified; identical to SEQ ID NO: 3843
  REGION 1..499: note = Human gut metagenome

SEQ ID NO: 5865 - protein, 504 aa, unidentified
  REGION 1..504: note = Human gut metagenome
MAWEAIQTRRIKPHDIGEGTLRRHAAGTVSFPVLCKNRKETLMSVLVIGRNGRALMPTNPRKARLLLKKKTASVVCRHPFTIQLLYKTGCATQEGCIGIDTGSQHIGVGITCGDRVILKDEHALRSSMEKRSLLATRTVMRRGRRYRKVRYRKPKWRHHTKRMYFEKANRRGQHWRKVKTTTQSPRLKGWLPPSLQSKCDHHFRIIDRYLKYLPDPITRNLVIEAGRFDMARMNDPTIHGEMYQRGPMYDAENLRAYIFARDNYQCACCKAKAGTTRKADGTTVKLVAHHILFRSRGATDNPKYIISVCDHCHTTKAHQPGGILYSWMENNKKVARGLRDATFMNILRKRLFARYPQAAFTYGNITAADRKQLRLPKSHANDAVAISLFGKEASTVKNICQTMHYKQIRKSKRSLHEAIPRKGRKNPNTKAVRNKKNTTQVNGFKLWDSVLADGKKLFICSFTGTSAYLIDKNGCYISQPGKTYKQWPLSKLKRLHPNGNWLMA

SEQ ID NO: 5866 - protein, 420 aa, unidentified
  REGION 1..420: note = Human gut metagenome
MQYVYVLNKHGEPLMPCSPGKARLLLKQQKACVVRRTPFTIKLLYGSAGYKQPITLGVDAGSKHVGLSASTEKRELYSEEFTPRSDVVKLLSTRKQNRRSRRYRKTRYRAPRFDNRVHSKHKGWLAPSVEVKIQERITVIKRICKILPISLVRVETAEFDTQRLKAMLAGKPLPVGTDYQLGEMYDEYNVRQYVLKRDHYTCQCCGAHNTAKKVVKLHVHHLESRKTGGNAPSNLVTLCTTCHKNLHKGKVTLDGKERGKPLRDAAFMGIMRKTLMARLKEELPIPVQGTYGYITKMCREQNDIKKSHTNDARCISKHPLAEPCSVCYRTKAIRHHNRQTHKANFSKKGIRKRSQMPYLVEGFRLWDKVLYKGQECFVSGRRSSGSFALKKLDGTSISKGVTFKKLRLLEPATNYLIERM

SEQ ID NO: 5867 - protein, 424 aa, unidentified
  REGION 1..424: note = Human gut metagenome
MVFVLSSTKKKLMPTNEYRARKLLKSGKATIYKHRPFTIILTGRDDGDTQPVEYCCDTGYQHIGISIKSQKHEYVNEERILLKDEVEHHNDQRKYRRTRRNKLRYRKPRWNNRKDNLICKDGFAPSIRNKRDIHINLLKMYYNICPITSATFEMGQFDTQLLKAIEEGNDVPQGKDYQHGEQYGYSTLREAVFARDDYKCICCGKSAIKDNAFLRIHHLGYLIGDRTNRMNNLATVCSNCHTSKNHQKGGKLYDLKPKLKSFKGTTFMTMVRYDMFSKLKELYCMGELHPKQRTDFKCYQKLRRNNRILSKFYDAKYIDIRDGSIKSGKQLSCNKTNRNEKRNSNKNERIYRGKQISKGKIVVRRQHYQYRPYDFVWYENIKYVVKGVQDKGKRIALQNHLPVALSKIKKSIHTNGWRLVASIS

SEQ ID NO: 5868 - protein, 443 aa, Caldicellulosiruptor sp.; identical to SEQ ID NO: 5367

SEQ ID NO: 5869 - protein, 454 aa, unidentified
  REGION 1..454: note = Human gut metagenome
LDTVAVISASGRKLMPTNSYRARRLLKSKRAVIYRYRPVFTIKLVDRTNGYTQPIEYKCDTGYQNIGISICSDTKEFVNEQRDLLKDEVKRHSDSRKYRRTRRNRLRYRKARWNNRRGMISKDGFAPSIRNKRDVHVRLYEEYYKVFPITKAVFEMGQFDTQVLKAVEAGLPVPAGTDYQRGEQYGYATLREAVFARDSYTCICCGKSAIKDGVKLRIHHIGYLSGDRSNRMANLGSVRESCHTSKNHKPGGKLYNLKPKLKTFKGATFMTTVRYSMVKQLKAATPDVDIRVTYGAATKLARKALSVKKTHSNDAYCMGEFHPKHRSNFKYYRKCRRNSRVLSRFYDAKYRDLRDGSVKTGSQLSCGRTNRKISRHTKLDERIYRAHKISRGHVSIRRQHYSLRPGDKVLYDGKVYFVTGMQNSGTHVKLTNGKVCSLKKVHVLQHCNAWTAVI

SEQ ID NO: 5870 - protein, 470 aa, unidentified; identical to SEQ ID NO: 2925
  REGION 1..470: note = Human gut metagenome

SEQ ID NO: 5871 - protein, 512 aa, unidentified; identical to SEQ ID NO: 4031
  REGION 1..512: note = gut metagenome

SEQ ID NO: 5872 - protein, 443 aa, unidentified
  REGION 1..443: note = metagenome
LTKDENRPSGRTTGLRAEQAEPAGIRKGDTLKVFVLNMRSKPLMPCSPAKARHMLKAGKAVVVRRTPFTIKLTIATGETKQDVTLGVDAGARHVGISATTEKEEVFASEVALRQDITGLLADRLAFRRARRNRKTRYRAPRFNNRVRSKHKGWLAPSVENRIQAHISRIEAVCRLLPVTKIVIETASFDIQKIRNPEVEGTGYQQGDQLGFWNVREYVLFRDGHICQHCRGRSKDPILNVHHLESRKTGGDAPNNLITLCETCHKAYHAGKIKLKVKRGQSFRAEAFMGIMRWTLLDRVRKTHPKLPVENTYGYLTKHKRIALGLPKTHCADAFCIAGNLKALRRGDFLFQQQTRKHNRQIHKCSILKGGVRKLNQAPFLVKGFRLFDKVRIGGQIGFVFGRRVRGTFNIRRLDKTVIGTDINCKKLSLLETRKTFLTELRKE

SEQ ID NO: 5873 - protein, 443 aa, Caldicellulosiruptor sp.; identical to SEQ ID NO: 2385

SEQ ID NO: 5874 - protein, 412 aa, Photobacterium sp.
MFVFVLNKNSEPLMPCKPQKARVLLKHGDAKVVKLTPFTIKLIGGSSGYKQTLVAGMDTGSKTIGCAVVGLGKVIYQSQVALRQDVSKKMEQRAMYRRNRRGRKYRYRPARWANRASMRTKGRVAPSLKSKLESHLRERNFVESILPISEWKVETASFDIHKITNPEVTDVGYQNGAQKDFYNVKAYVLHRDGYKCKSGHKGKHSSQLHVHHIQFRSNGGTDAPSNLITLCESCHADLHAGKFEFKTKKSRTKHATEIGIIKSRLKQVWLFTETFGYETKFKREQILGLSKEHYYDAVAICLEDGELAKQNDFIFFKRHVSKGDYQLTKGSRSEKKVPVGKIFGLRKHDFISTPQGDGFVKGKRSTGYFALETIIGEKVHASANVKKNAVRVSARTTTLIQKMERASNSSSR

SEQ ID NO: 5875 - protein, 451 aa, unidentified
  REGION 1..451: note = Human gut metagenome
MSVAVMSKTSMRLMPTSEYRARKLLKSKKATVYGYHPFTIQLTERETGDVQPVELCMDTGYLHIGMSVKSEKHEYLGVQIDTLTDEKQKHDACRMYRRQRSSRKRYRQSRFNNRKRSDGWIAPSLEHKKDIHIQTISRICNAMPITNITLEMGNFDTQVLKALEKNRPLPQGTDYQHGERYGIATLREAVFARDKYTCQCCRRTIADGAILHVHHIIYRSRGGTNRMSNLATVCDRCHTPANHKPGGKLYNWKPKLASFKGATFMTAVRWKMYNEVKSKFSDINIHITYGAETKGQRRAFDITKSHVNDAFVMGQFYPKHRSRPVCYKKKRRNNRCLEKFYDAKYIDSRDGKKRSGQELFNGRINRNHKKDSENLHQYRQQKVSAGRRTIRKQHYSIQPHDIVVFNRQQFETSGCHCNGARAILLPQKKSVAIKKLSIHKYAGGYFKSDFT

SEQ ID NO: 5876 - protein, 456 aa, unidentified
  REGION 1..456: note = Human gut metagenome
MSTCVCVLSNSGERLMPTFRLGKVRHLLKDGKAKIVKHHPFTIQLLYDSKTNTQPIETCEDVGYNYIGISVKSESHEYVSAQYDTLQDEKEHHDDCRKYRRTRRNRLRYRKSRFDNRKRDKGWLAPSLEHKKQLNISLIERYVSVIPITHVTVEVGSFDTMLVKAIQEGKVIPEGADYQKGPRYNLATLREAVFYRDNYVCKVCGRKATEGAILHMHHMFYWKGRHGYQLDELVTVCEKCHTPANHQKGGKLYGFGKDKKFANLSGAAFMNAVRWQIVNALYATYGKEFVTITYGAMTKEKRIALQLEKTHNNDAYAMGDYHPARRCKFRHYQKRRRNNRVLEKFYDATYVDTRTGNKAKGKELFNGRISRNHKKDCENLHKYRSKKVSKGRRSIRRQHYAIQPYDTVRLEGKTYITSGCHNKGTRLLIPVNGKSESVAISKVQVVCHAGAWIQII

SEQ ID NO: 5877 - protein, 525 aa, unidentified
  REGION 1..525: note = Human gut metagenome
VSLPVKQVNRDKTSTGNSFKAPQRARRRTCRSAGAEQGRNCHLERNFIMIIALDKNKRPLGFLTERRCRILMERKRAVLYRVFPTVVILMDMDVRKLRDLPSYRIKIDPGSKYTGIAIVRNDTDELVYAMQIEHRGDAVRAGLQKRKMARRNRRSRETGYRRAKWGNRCLSDGDKKSYNSSRKDGWLPPSILSVADNVLTWVQRLSRWINITDCSLEAVRFDTQLLENPNIKGEEYQHGTLFGYEIREYLLEKFGHTCQYCGGKSGDSVLEWEHIHPKSRGGSDRVKNAILSCSSCNRDKDNQTLEEWIGQIRSRVSREKGKRKELDSGRIERIQKVIDGKPEGQPMRYATWVSSSRRYLEKHLFQIFRDVECSSGGRTKYNRIRLGYSKEHHYDALCVGTVPEKGYHDRTNGYYLYAKATGRGTRLRGAVNQCGVIITKWTSRKKNFFGFQTGDIVVAEVPHKIPRPYKYEGRFVGRVMVRASGSFDIRTTDGKLATVKAGFCRLLQANSGCAYSMERTIPLDH

SEQ ID NO: 5878 - protein, 429 aa, Parasutterella sp.; identical to SEQ ID NO: 3656

SEQ ID NO: 5879 - protein, 456 aa, Halomonas sp.; identical to SEQ ID NO: 4656

SEQ ID NO: 5880 - protein, 466 aa, unidentified; identical to SEQ ID NO: 2459
  REGION 1..466: note = Human gut metagenome

SEQ ID NO: 5881 - protein, 421 aa, Lactobacillus sp.
VCTLRQCYRFGNSRNTIQFVRPVTTNTQELTLGVDAGFHLGLSVVGNNREYYVSESLRKSEKDRITSRRELRRTRRNRLRYRKARFNNRRRKDGWLAPSIQHRLDFTIKEIKRLYKFLPITNLVVEVTPFDNQKLLNPDIQGWQYQKGKMYGFKTIKDYLLARDNYRDALDGKQYPASQLRVHHLVQRKDGGSNQPDNLVLLSDINHNQANHNNGILAKLRENRQKTLDYRGAYFMSILATRLSNYFEHYTTTQGYLTANLRQKYEIEKSHLNDAFVIAGGTDTTLRTNNVYSRQKLRNNNRVLQKFYDAKYIDSRDGKQKAGKELSSGRTRRSQELNYDNLRQLRKEKVKKGRVSIRRGHYQLRPHDVVLNTRTNRIETVKGVQNSGTVIKFQTGKTCSIKSVVSLYHVNGILEKKMKNI

SEQ ID NO: 5882 - protein, 413 aa, unidentified; identical to SEQ ID NO: 2636
  REGION 1..413: note = Human gut metagenome

SEQ ID NO: 5883 - protein, 418 aa, unidentified
  REGION 1..418: note = Human oral metagenome
MLNNQKEYAFVLDAEGKKLDPTIIQNAWRLVRQKKATLIAKRPMTIQLKKVIDSPNDDEIRMGIDDGAKHVGLALVQKCKTKNKVIFVATMEHRNDVHKKMEQRKNYRRYRRYWKRYRKARFSNRASARRNGRVAPSILQKRQAVVRIFDRLSKYIRIDSIYLEDVAVDVRVLTDEKKLYSWQYQQSNRLDENLRKAAILRDKCQCQMCGKKNCRLEAHHITPKRMSGTDTIGNLITLCSDCHSKVTGREMEFAEQFYTKIKRKKNNYNLQDATHSMVGKTWLREKLSLRKPVLLTTGGDTANKRIDWNLEKSHEIDAVCITDLRPESINVKHWKVKPLRHQRNKMKVEELCGFRHRDIVCYTFQNGEYHEGYVTALLLADKTHADSLSFMSATKHCCRINPKKCKKLGHANKFLWLL

SEQ ID NO: 5884 - protein, 431 aa, unidentified; identical to SEQ ID NO: 3235
  REGION 1..431: note = Human gut metagenome

SEQ ID NO: 5885 - protein, 433 aa, Fervidobacterium sp.; identical to SEQ ID NO: 5708

SEQ ID NO: 5886 - protein, 396 aa, unidentified
  REGION 1..396: note = Human gut metagenome
VVRRTPFTIQLTIATGESKQPVSLGVDAGYKHVGLSASTEKAELYASEVELRKDITDLLSARRALRQSRRNRKTRYRAPRFDNRIRTKRKGWLAPSVENRINAHLSRIEAVLRLLPITKITVETASFDMQRLKNPDISGKEYQEGEQLGFWNVREYVLFRDGHVCRHCHGRSKDPVLNVHHLESRRPGSDSPDNLITLCVTCHKALHRGEITLKAKRGQSFRAQAFMGIMRREVLNRLKASYPELKVHETYGYLTKHARIANGIVKSHGADAFCIAGNLGAERLGEFFFQKQTRRNNRQIHKLSILKGGIRKRNQAPFEAKGFRLFDKVACQGEEGFIFGRRSSGSFDVRKLDGTRISAGISCKKLRLLEKRRTYLTEIRKEEALPPLPEGRGLRA

SEQ ID NO: 5887 - protein, 420 aa, unidentified
  REGION 1..420: note = Human gut metagenome
MQYVYVLNKHGESLMPCSPGKARILLKQQKACVVKRTPFTIKLLHGSAGYKQPVTLGVDAGSKHVGLSASTETHELYCEEFTPRNDVVNLLSTRRELRRSRRYRKTRYRAPRFNNRVHSKHKGWLAPSVEVKIQEHITVIKRICRILPVTLVRVETAEFDTQRLKAMLTGKPLPVGTDYRLGEMYDEYNVRQYVLKRDNYTCQCCGAHTTAKKVVKLHVHHLESRKVGGNAPNNLITLCTACHDNLHKGRVTLDGKKRGKTLRDAAFMGIMRNTLLIRLRNELNIPVQNTYGYITKLLREQNNIKKSHINDARCISKHPLAEPCSVCYRTKAIRHHNRQIHKAKILKGGIRKANQAPYIVKGFRLWDKVLYNGQECFISGRRSSGYFALRKLDNTTITDSISFKKLRLLEPATNYLIERK

SEQ ID NO: 5888 - protein, 465 aa, unidentified
  REGION 1..465: note = Human gut metagenome
MNTCVCVLSYNGERLMPTFRLGKVRRLLKDGKAKIVKHHPFTIQLLYDSKTNTQPIEICEDVGYNYIGISVKSESHEYVSAQYDTLQDEKKRHDDCRRMRHSRRNRLRYRKPRFDNRKRSEGWLAPSLKHKKELNVNIVMMYCAVMPITHATVEVGSFDTMLVKAIQEGKVIPEGADYQKGPRYNLATLREAIFYRDNYVCKVCGRKATEGAILHMHHMFYWKGRHGNSLNELLTVCEKCHTPANHQKSGKLYGFGEDVKFADLSGAAFMNTVRWQIVNELYAAFGKLFVTITYGAMTKEKRIALQLEKTHNNDAYAMGGFHPNFRCTFEHYEKVRRNNRILEKFYDSRYIDIRTGEIATGKELFNGRINRNHKKDSESLHKYRGKRTYAGHRALLRKKVNLNPGDLVSLNGEVLIVYGTHTDKKGAINVEFKTPAKNGRKSASLKKLKIVKTAGSIHPAWEKVS

SEQ ID NO: 5889 - protein, 427 aa, Parasutterella sp.; identical to SEQ ID NO: 3787

SEQ ID NO: 5890 - protein, 420 aa, unidentified
  REGION 1..420: note = Human gut metagenome
MQYVYVLNKHSEPLMPCSPGKARLLLKRQKACVVKRTPFTIKLLHGSAGYKQPITLGVDAGSKHVGLSASTEKRELYSEEFTPRNDVVELLSTRRQNRRSRRNRKTRYRAPRFNNRVHSKHKGWFAPSVEVKIQEHITVIKRICRILPVTLVRVETAEFDTQRLKAMLAGKPLPVGTDYQLGEMYDEYNVRQYVLKRDNYTCQCCGAHTTAKKAVKLHVHHLESRKVGGNAPSNLITLCVTCHNNLHKGKITLDGKKRGKTLRDAAFMGIMRNTLLTRLRNELNIPVQNTYGYITKLLREQNDIKKSHVNDARCISKHPLAEPCSVCYRTKAIRHHNRQIHKAKILKGGIRKANQAPYIVKGFHLWDKVLYNRQECFISGRRSSGYFALRKLDGTAITNSISFKKLWLLEPATNYLIERM

SEQ ID NO: 5891 - protein, 424 aa, Tolypothrix sp.
MSNYVLVIDTNKSPCNPIHPAQARKLLDLKLAAIFRRYPFTIILKSVSTDVVSPIQLKLDPGSKVTGIALVQEDKVIFGAELTHRGSAIKASLESRKSLRRGRRARHTRYRQARFLNRTRLKGWLAPSLQHRVLTINTWVKRLCKFAPITRISQELVRFDLQQLENPEISGIEYQQGQLAGYEVREYLLNKWDRKCTYCEAENIPLQVEHIKPKAKGGTNRISNLCLACDKCNKKKGTQDVEKFLAKKPELLKKILSHAKRPLKDATAVNSTRWALFTSLKQMGLPVSTGSGGLTKFNRTTLKLPKTHWIDAACVGKVETLEILTTKPLNIKATGHGTRQMCGTNKFGFPVRHRTNKQIHYGFQTGDIVKAVVKTGKKIGVYIGRIATRASGSFNISTTNGLVQGISYKHCSTSHKKDGYSYSA

SEQ ID NO: 5892 - protein, 443 aa, Caldicellulosiruptor sp.; identical to SEQ ID NO: 2385

SEQ ID NO: 5893 - protein, 406 aa, unidentified
  REGION 1..406: note = Human gut metagenome
MVYVQDIDGKPMMPTTRHGKVRRLLKANKATVVNLCPFTIQLTYKSTDHKQPVTLGIDAGAKHIGFSATTEKEELFACETTLRTDIVDLLSTRLQNRRTRRSRLRYRKPRFNNRGSSKKKGWVAPSVKQRIDSHLNEVNEIHKILPITKIVIEVAQFDTQKMKNHDISGADYQNGEQLGFWNVREYVLFRDGHKCSHCKGKSKDPVLNVHHLESRKTGGDSPSNLVTLCESCHKAFHKGEIELKKKRGKSLRDAAVMGIMKWKLYEELKSRYDNVSMTFGYITKHNRIKYGIEKNHTSDAFVISRNFNAKRIERQYLKRLVRRHNRQIHKMKILKGGKKKNNQAPFEVFGFRLFDKVLYNNEIFFVYGRRKSGNFNIRDFNGENPKDVSHKKFKLIRGKRHPIILK

SEQ ID NO: 5894 - protein, 227 aa, unidentified
  REGION 1..227: note = Human gut metagenome
MPCSPAKARHLLDAGKAKVKKRTPFTIQLVYGSSGYIQEVILGVDAGSKTIGISASTKKEEVFAADVTPRNDVVDLLSTRREFRRARRNRKTRYRKPRFNNRVRSKHKGWLAPSVEVKIQEHITSIKMVCRILPVSKVVVETAEFDLQLLKAIEEGKPVPQGEDYQQGEMYGHYNVRQYVLWRDNYTCQCCGAHPTKKKEVRLHVHHLESRKVGGNAPGNLVTLWRC

SEQ ID NO: 5895 - protein, 466 aa, Tolypothrix sp.; identical to SEQ ID NO: 2968

SEQ ID NO: 5896 - protein, 297 aa, unidentified
  REGION 1..297: note = Human gut metagenome
WLAPSVEVKIQEHITVIKRICRILPITLVRVETAEFDTQRLKAMLAGKPLPVGTDYQLGEMYDEYNARQYVLKRDHYTCQCCGAHTTTMKSVKLHVHHLESRKVGGNAPSNLITLCTTCHDNLHKRKVTLDGKKRGKTLRDAAFMGIMRKALMARLKEELSIPVQETYGYITKMRREQNDIKKSHVNDARCISKHPLAEPCSVCYRTKAIRHHNRQIHKANFSKGGYRKRSQMSYIVEGYRLWDKVLYKGQECFISGRRASGRFALKKLDGTSISKSVTFKKLRLLEPATNYLIERM

SEQ ID NO: 5897 - protein, 494 aa, unidentified
  REGION 1..494: note = Human gut metagenome
MTMVYVQNKDGKPLMPTTRYCYVRLLLKEKKARVVCTTPFTIQLNYDTPDITQDLILGIDPGRTNIGVAVVKEDGQCVFSAHLETRNKDVPLLMKKRAAFRRNHRTLDRRRKRQRRAKAAGTTIADGSAERLLPGYEKPIVCHYIRNKKARFNNRCRPAGWLTPTANHLLQTHINLIAKVAKFLPITKVVVELNRFAFMAMDNPNIRRWEYQQGPLYGLGSVEDAVYAQQDGHCLFCEKPIDHYHHVVPRHKGGSETLANRCGLCVKHHDLVHKDKAWADKLVTRKEGMNKKYHALSVLNQIIPFLMKYLGDETLYDVYATDGRSTKGFRIAKNVPKEHYTDAYCIACSILDTDIKVSAPVEPFELKQFRRHDRQACIRQMVDRKYLLDGKVVATNRNKAFEQESDSLQEFREVYGDAAVSQLTVKPHPPQYKDMTRIMPGAVMDFNGVVDVFQRSEGFHNGKPDYYKSTKGARVLTKRCVLLTQNAGTVFIPA

SEQ ID NO: 5898 - protein, 445 aa, Acetohalobium sp.
MVFVLNKDKTPLNPCHNGKAKWLLDNNYAVVHKIQPFTIRLKKKVTNPNLKDYTLKIDPGSKTTGLAINNGSQVAFLANLHHRADTIKQNLQTRREHRRFRRSQLKYREKRFDNRKRGDNWLPPSVDSIVNNIKTWVQRLKKLCPISKVVVEMVRFDTQKMQNPEIEGIEYQQGTLQGYNVREYLLYKHNHTCQYCGGESGDPVLEVEHKIPSSRGGTDSIKNLTLSCKTCNQDKDNRTLKEWLQDLKEQDFRKKLPKVRYKNVKQILESKVDISLKDAGRVNSYRYKLLDQLKSICSNIETSTGAKTKYNRNQVAELEKTHYFDALCVGTAKQEYSFQKGFKVLSIKATGRGTRQRTLLDKYGFPRAYRSRNKYVDNFKTGDLVKAVIPKGKNKGVYFARVSTRKSGYFRLDCFNGSKVDGVNSKYLNLLQRGAGYSYSFEDIA

SEQ ID NO: 5899 - protein, 424 aa, unidentified
  REGION 1..424: note = Human gut metagenome
LSGLIFSRTQRKEASTYAKGLCSQPARASADALHTGEGPSSSGCGQGKSETQNTVYHPAGVSASTKKEELFAANVIPRNDVVDLLSTRREFRRARRNRKTRYRKPRFDNRVRSKHKGWLAPSVEVKIQEHITAIKTVCRILPVSKVVVETAEFDLQLLKAIANGKPVPQGEDYQHGEMYGHYNVRQYVLWRDGYTCQYCGAHSTKKKEIRLHVHHLESRKTGGDAPGNQINLCESCHKKFHKGLILDGTLKKRKRKPNRDAAFMGIMRKTLIVRLRAELPIPIIETRGYITKAAREKLLVLPKSQTNDALAIAQGKHGFNVGYLPGIVQTDRIYTIRPVRHHNRQLHKATILKGGVRKANQAEKYICGFRLYDKVLYNGIECFVWGRRTSGSFLLRQLNGEKVKDGVSYKHLKLLERSQSYLVA

SEQ ID NO: 5900 - protein, 440 aa, Lactobacillus sp.
MKGVQAMQNRVFVINKHGKALMPCKPRKARILLRDGKAKVLKKEPFTIQLLYGSTGYKQDISIGIDSGQRHIGLAVTSQDKVLFQGEVELRQDVKKLIDTRRIYRRSRRNRKTRYRKARFLNRIAKKKDNWLPPSVASKVNHNINWIKRLLSVLPKADLHIEVGKFDIQKMKNPAINGESYQQGDLYGYQTVKQFVLARDNYTCQVCKKKGDKLKIHHIIYRSLGGTNTIDNLITVCSNCHTTKNHQTGILAKWCKDKKKVNKSYKGATFMNILRRRLFLAFPQAKFQYGAWTTLQRADLELTKSHYNDAVAISGIRKIKAKPTSIMMFKQFRKKKRSLHEATARKGRKTPNVTSKRNAKNTKYAKGFWLNDYVKIKDSNKKGYISGFMSKGTNVRLRDIFGEYVSNSDKSYTSTKNISLINHSNNWQRQVITEKQYIMG

SEQ ID NO: 5901 - protein, 425 aa, Caldicellulosiruptor sp.; identical to SEQ ID NO: 5366

SEQ ID NO: 5902 - protein, 427 aa, Moorena sp.
MRVFVLDKNRKPLDPCHPAKARKLLKLGRARVLRRYPFTIIIKDLEVENCVTHDHQLKIDPGAKTTGLAIVQGDRVIWGAELTHRGEHIREALTSRRQLRRSRRNRKTRYRKPRFLNRTRPKGWLPPSLMSRVHNILTWVKKLIKLCPVTGISQELVRFDTQKMLNPEISGIEYQQGTLYGYELREYLLEKWKRTCAYCGAKNTRLEIEHIKPRSKGGSNRVSNLTIACHDCNQAKGNLEIEEFLSSKPNILKRILSQAKKPLADAAAVNVTRWKLQDELKLIGLPVEVGSGGLTKYNRCRQNLPKTHWLDAANVGKVETLYIEDYQPLLITAKGHGTRQICRTDKFGFPRLHCSPKKIHKGFQTGDIVRAVVTKGKKIGTYMGRIATRKTGSFDITTAKGRVSGISYKYCQAIHRKDGYNYQFYGG

SEQ ID NO: 5903 - protein, 509 aa, unidentified; identical to SEQ ID NO: 5057
  REGION 1..509: note = Human gut metagenome

SEQ ID NO: 5904 - protein, 442 aa, Lactobacillus sp.; identical to SEQ ID NO: 5193

SEQ ID NO: 5905 - protein, 512 aa, unidentified; identical to SEQ ID NO: 3493
  REGION 1..512: note = Human gut metagenome

SEQ ID NO: 5906 - protein, 410 aa, Bacillus sp.
MTHCFVLDAQGRRLSPTKEKRAWYLIRKQKAILKNKFPMVIQLKKEIPVDKIDSTPVHLGIDDGSKSVGIALVQECKGKNKPLFKGTIELRTDVKDKMTVRRGYRRYRRYHKKYRPARFNNRSSSKKEGRLAPSIRQKKDSILRVVNKLHKWIRINHISLEDVLIDIRALEKGHKAYKWEYQQSNRLDENIRKAVVLRDHNYCQDCGMTNTRMEVHHIIPRRLNGGNSIHNLITLCSTCHGNVTGDELNHSGRFLKKIKGRNIHYNDAMHVMQGKSYLQNELKKIAPLSLTTGGDTANKRIDWGIDKSHANDGIVICYLKVEPDQCELKNWTIKTMRKRSSKKVESVNGFHHRDFVKYTKRNGETYLGYITAFYLKKNQCNMTTIEGKILKRYGISRLSLIWRFSKIYWL

SEQ ID NO: 5907 - protein, 424 aa, unidentified
  REGION 1..424: note = Human gut metagenome
MRVFVFNMRGRPLMPCSQRKARLLLRENKAKIYKYHPFTIQLTYTTGETKQDCHIGIDTGSKYIGAAVRSEDKVFWKGEIELRQDIRSNLDTKRIYRRSRRNRKTRYRKPRFLNRKRRDEWLPPSLQSRINHTFHWIDTLSSLVPNPILHIEVGKFDVAKMINPEIHGVDYQHGQTYGFFDGRYFVFARDNYTCQCCGKSKNKILNTHHIIYRSNGGTNRVDNLITVCTDCLTSQNHRKGGIFYQWQEQHKKVKQYKEPPFMNTLRKRIFVAYPDAEITYGSETTPKRKAMKLDKTHYNDAIVISGINEIKENPEEWLLIKQFRKKKRSLHEATARKGRKKPNRNQTRNSKNTPYYKGFYLNDKVSVFGKSGYITGFTSNAAYIKDENNDYITLPNKTYKQVSINKMKLECHNNNWQYIIKNAV

SEQ ID NO: 5908 - protein, 424 aa, unidentified
  REGION 1..424: note = Human gut metagenome
MVYVLSKEGTPLMPTNRHGRVRHLLDAGEAKAVKRCPFTIQLLYQSTTYTQEITLGVDAGSKTIGLSASTEKKELYASETRLRMDITDLLSVRRQFRRTRRNRKTRYRKARFNNRVHAKHKGWLAPGIEAKIGTHFRAVRDVCRILPVTEIIVETASFNLQKIKALEKGEPVPEGTDYQKGDQLGFWNVREYVLWRDGYKCRCCNGKSKDQVLNVHHIESRKTGGDAPNNLATLCGYCHKQYHKGTILLPKSVRRGNSFRDAAFMGIMRRTFYNRLKEQYPRVAMTCGYITKNTRIRNSLPKTHYADARCIAGHPQAEPLEVYYFQKKVRCHNRQIHKSNILKGGKKKRNQAEYLVKGYRLYDRVRYQNREYYVFGRRASGFFDIRTLGGNKGNKGSVSCKKLRFLEPRKTMLIERRMQEREAV

SEQ ID NO: 5909 - protein, 443 aa, Anoxybacillus sp.
MVEENMTCFMQRKGENPMVFVLDTNKRPLAPCHEAVARKLLKQGKAAIYRRFPFTIILKKSVDESEIKATYRLKIDYGSRHTGLAILRGQEVVWLGQLDHRTDIKERIDKRRAFRRARRNRKTRYRKPRFLNRKRKEGWLPSSLESRVQNIQTWVNRLKKLCPIGYISYENAKFDTQLMRNPEINGVEYQQGTLQGYEVREYLLEKFGRKCCYCGKENVPLEVEHIIPKSRGGTDRVDNLCLACHDCNQRKGSKTAEEFGYPHIQKQVKESLKDASAINSTRWKAYEVLKQTGLDVECGTGARTKMNRIRLDLPKTHYFDACCVGESTTNHLYFKTKEVLFIKAKGRGSRSRTNLDRYGFPRGYLARQKFFFGFQTGDMVKAVVPRGKYQGVWFGEVACRKTGSFDIKGKDGKRIAQGINYRYVQVIQRFDGYAYGKGVAELA

SEQ ID NO: 5910 - protein, 416 aa, unidentified
  REGION 1..416: note = Human gut metagenome
MVYVLDKNGQPLMPTDRHRKVRLMLQSGQAKVIKRCPFTIQLNYDSGHQTQEISLGIDAGSKHIGVSTTTKIKVLYEVDVELRNDIVDLLSSRRELRRGRRNRKTRYRQAKFNNRRRGNGWLAPSIRQKIGTHLTVVENICKMLPISRIMVETASFDIQKIKNPDIQGAEYQQGDQLGFWNIREYVLFRDNHTCQCCKGKSKDKILNVHHIESRKTGGNAPNNLITLCETCHTGYHKGTVQLPKAIKRGMRFKDAAFMGIMRWAFYEALKQQYEPVGTPVHNTYGYITKHTRIEHNLPKEHYVDARCISGNPDAFPSGEYYYQKKVRCHNRQIHKLTVLKGGIRKQNQATYLVKGYRLFDKVSYQGKGYFVFGRRQSGFFDIRTLSGEKVNKGSLNCKKLKFIATRTYYLTERRAV

SEQ ID NO: 5911 - protein, 453 aa, Anaerotruncus sp.; identical to SEQ ID NO: 4664

SEQ ID NO: 5912 - protein, 458 aa, Lactobacillus sp.
LKGVGMMSEIKKVDYIYVVDSNGTPLMPTSRLGMVRRWLKTGQAKWFGNSRKTIQFVRPVTTNTQELTLGVDAGFHLGLSVVGNNREYYAAESLRKSEKDRITSRRELRRTRRNRLRYRKARFDNRRRKDSWLAPSIQHRLDFTIKEIKRLYMFLPITNLVVEVTPFDNQKLLNPDIQGWQYQKGKMYGFKTIKDYLLARDNYRDALDGKQYPASQLRVHHLVQRKDGGSNQPDNLVLLSDINHNQANHNNGILAKLRENRQKTLDYRGAYFMSILATRLSNYFDNYTITQGYLTANLRQKYEIEKSHLNDAFVIAGGTDITLRTNNVYSRQKLRNNNRVLQKFYDAKYIDSRDGKQKAGKELSSGRTRRSQELNYDNLRQFRKEKVKKGRVSIRKGHYQLRPHDVVLNTRTNRIETVKGVQNSGTVIKFQTGKTCSIKSVISLYHVNGILEKKMESI

SEQ ID NO: 5913 - protein, 420 aa, unidentified
  REGION 1..420: note = Human gut metagenome
MQYVYVLNRHGEPMMPCSPGKARLLLKQQKACVVKRTPFTIKLLYGSAGYKQPITLGVDAGSKHVGLSASTEKRELYREEFSPRNDVVKLLSTRKQNRRSRRYRKTRYRPPRFDNRVHSKHKGRLAPSVEVKIQEHITVIKHICKNLPITLVRVETAEFDTQRLKAMLAGKPLPVGTDYQLGEMYDEYNVRQYVLKRDHYTCQCCGAQNTAEKVVKLHVHHLESRKTGGNTPGNLITLCTTCHENLHKGKVTLDGKERGKPLRDAAFMGVMRKTLMARLKEELPIPVQGTYGYITKMRREKNDIKKSHTNDARCISKHPLAEPCSVCYRTKAIRHHNRQTHKANFSKKGIRKRSQIPYLVEGFRLWDKVLYKGQECFVSGRRSSGSFALKKLDGTSISKGVTFKKLRLLEPATNYLIERM

SEQ ID NO: 5914 - protein, 465 aa, unidentified
  REGION 1..465: note = Human gut metagenome
MSTCVCVLSNSGERLMPTFRLGKVRHLLKDGKAKIVKHHPFTIQLLYDSKTNTQPIEICEDVGYNYIGISVKSQSHEYVSAQYDTLQDEKACHDSCRKLRRTRRNRLRYRKPRFDNRKRGEGWLAPSLRHKKELNVNVVKMYCAVMPITHATVEVGSFDTMLVKAIQEGKAIPEGADYQKGPRYNLATSREAVFYRDNYTCQVCGRKVADGAILHMHHMFYWKGRHGDSLNELLTVCEKCHTPANHQKGGKLYGFGENVKFADLSGAAFMNTVRWQIVNELYAAFGKDFVTVTYGAMTKEKRIALRLEKSHNNDAYAMGEFHPNCRCTFEHYEKVRRNNRILEKFYDSRYIDIRTGEIATGKELFNGRINRNHKKDSENLHRYRGKRTYAGHRALLRKKVNLNPGDLVSLNGEVLVVHSTHTNKKGAVNVEFKTPGKSGQKSASLKKLKIVKAADSMHSAWEKIS

SEQ ID NO: 5915 - protein, 413 aa, unidentified; identical to SEQ ID NO: 3587
  REGION 1..413: note = Human gut metagenome

SEQ ID NO: 5916 - protein, 236 aa, unidentified
  REGION 1..236: note = Human gut metagenome
MSTIYVLSKDGKPLMPNFVHKETAWQEKLAKKKTGLNKRYGALSVLNQIIPALTKELSSLFLVTTGKSTYDYRAAHGVSKDHWLDAYCIAGSILPNDVCDNNINNRVPYELKQFRRHDRRALHKENMSRVYTLNGKKVATNRHKAIEQTTDSLEEFRQNHPDDVCKLKVKEHHQEYRNPGRNFPGCVFLVGKHTHVMQGTSGSHNGKADGYYDTNGNSYSSGKCKFVAKNEGIVFT

SEQ ID NO: 5917 - protein, 494 aa, unidentified; identical to SEQ ID NO: 5675
  REGION 1..494: note = Human gut metagenome

SEQ ID NO: 5918 - protein, 420 aa, unidentified
  REGION 1..420: note = Human gut metagenome
MIYVRSKDGKALMPSERGGRIGYLLRHGKAHVVSRVPFVVQLDYESTTYTQEVSLGIDAGSKHIGVSASSEKKELLAAQVELRSDVVNLLSARMELRRTRRNRKTRYRKSRFDNRKRMDGWLAPSVKQKVESHLKVIRLVHKLLPITKTTIEVAQFDAQKIKNPDIKCDKYQQGEQMGFWNVREYVLARDGHRCVHCKGKSKDPILNVHHLESRKVGGNSPSNLVVLCETCHKAYHRGEFDLKIKRGTTLRDAAVMNIMRWSVYERAKAEFGNVYLTYGYITKHTRIENGIAKTHAADAFCIAKNVNAMRLSFFFMCRCIPRHTRVLHVANPKKDGIRRSTIASHKIGKSRFQRFDMVRWRGKECFIFGSTKGRPVLRDIKGIKMHENNSVNIKTISFLKRLRNDILVEEKTSESFHNYK

SEQ ID NO: 5919 - protein, 431 aa, Escherichia sp.; identical to SEQ ID NO: 3801

SEQ ID NO: 5920 - protein, 418 aa, unidentified; identical to SEQ ID NO: 4950
  REGION 1..418: note = Human gut metagenome

SEQ ID NO: 5921 - protein, 420 aa, unidentified; identical to SEQ ID NO: 3089
  REGION 1..420: note = Human gut metagenome

SEQ ID NO: 5922 - protein, 427 aa, unidentified
  REGION 1..427: note = Plant metagenome
VSKILVIDQNKRPLDLIHPAQARQLLRNKKAAIYRQFPFTLILKEPRPKSPVSPLRLKIDPGAKTTGIALVNDTTGEVVFAAELKHRGFAIRDALISRRQLRRSRRSRKTRYRKPWFLNRTRPSGWLPPSLQSRIENIKTWVEKLCRFAPITAISQELVCFDMQLVRKPDIQGKEYQQGTLAGYETRQYLLEKWNRQCSYCGIKDVPLQIEHIHPRAKGGSNSITNLTLSCEKCNTKKGTKDIKEFIKKDPSKLEKILKQAKKPLADAAAVNTTRFALLEVLKTSGLPVETGSGGLTKFNRSQQKLEKTHWLDAACVGKSTPTLNTQGVKPLLITANGHGSRQSCRTDKFGFPNRHVPREKIHFGFQTGDIVRAVVTTGKKIGNYLGKVAIRSSGSFNISTKNGLVQGISHKFCKRIHAKDGYSYAY

SEQ ID NO: 5923 - protein, 515 aa, unidentified; identical to SEQ ID NO: 5111
  REGION 1..515: note = Human gut metagenome

SEQ ID NO: 5924 - protein, 416 aa, unidentified
  REGION 1..416: note = Human gut metagenome
MVYVLDKNGQPLMPTDRHRKVRLMLQSGQAKVIKRCPFTIQLNYDSGHQTQEISLGIDAGSKHIGVSTTTKIKVLYEVDVELRNDIVDLLSSRRELRRGRRNRKTRYRPARFDNRRREDGWLAPSIRQKIGTHLTVVENICKMLPISRIMVETASFDIQKIKNPDIQGAEYQQGDQLEFWNVREYVLFRDGHTCQCCKGKSKDKILNVHHIESRKTGGNAPNNLITLCETCHTGYHKGTVQLPKAIKRGMRFKDAAFMGIMRWAFYEALKQQYEPVGTPVHNTYGYITKHTRIAYNLPKEHYVDARCISGNPEASSNGEYYYQKKVRCHNRQIHKLTVLKGGIRKQNQATYLVKGYRLFDKVSYQGKGYFVFGRRQSGFFDIRTLSGEKVNKGSLSCKKLKFIATRTYYLTERRAV

SEQ ID NO: 5925 - protein, 456 aa, unidentified
  REGION 1..456: note = Human gut metagenome
MSTCVCVLSNNGERLMPTIRLGKVRHLLKDGKAKIIKHHPFTIQLLYDSETNIQPIEICEDVGYNYIGISVKSQSHEYVSAQYDTLQDEKSCHDACRRMRRTRRNRLRYRQKRFDNRKRDKGWLAPSLKHKKELNVNVIKMYCEVVPITHATVEVGSFDTMLVKAIEEGKATPEGADYQKGPRYNLATLREAVFYRDNYTCQVCGREASEGAILHVHHMFYWKGRHDNSLSELITVCEKCHTPANHQKGGKLYGFGENVKFADLSGAAFMNTVRWQIVNELYAAFGKDFVTVTYGAMTKEKRIALHLEKSHNNDAYAMGNCHPAHRCEFGHYQKRCRNNRVLEKFYDATYIDTRTGDKAKGKELFNGRISRNHKKDSEDLHKYRSKKVSKGRRSIRRQRYAIQPYDTVRLESKSYITSGCHNKGTRLLIPANGKSKSVAISKVQVVCHAGAWIQII

SEQ ID NO: 5926 - protein, 471 aa, Caldicellulosiruptor sp.; identical to SEQ ID NO: 4560

SEQ ID NO: 5927 - protein, 415 aa, Bacillus sp.; identical to SEQ ID NO: 2431

SEQ ID NO: 5928 - protein, 431 aa, Petrotoga sp.
MEKRSVQRVFVLDKNKQPLMPCHPARARELLKKGKAAVFRYHPFTIILKDREGGDTQPIQVKIDPGSKYTGVALVADFKRGKKVIWASVIYHRGHVIKKNLDTRRGVRRSRRNRKTRYRKPRFLNRKRKEGWLPPSLISRAENILTWVKRIRRFSPVTSISMELVRFDTQKLQNPEIKGVEYQRGTLYGYEVKEYLLEKWGRKCVYCGKENVPLEIEHIVPKSKGGSDRISNLTLACHECNQKKNNQSIDEFLANNPKKLNQIKARAKGPLKDVASVNATRWYLFNQLKKEGLPIEVGTGGQTKYNREMQNYSKKHWIDAACVGESGYNVQLEPDMQVLEITAMGHGMRRICFVDKYGFPKSYRPKERTYMGYKTGDIVLANVPKGKNKGIHIGRIAIRHRPSFLLNGVGDVHPKYLTLLQKNDGYGYQIF

SEQ ID NO: 5929 - protein, 473 aa, Calothrix sp.; identical to SEQ ID NO: 3997

SEQ ID NO: 5930 - protein, 413 aa, unidentified; identical to SEQ ID NO: 2636
  REGION 1..413: note = Human gut metagenome

SEQ ID NO: 5931 - protein, 417 aa, unidentified
  REGION 1..417: note = Human gut metagenome
MPCSPAKARLLLKEKKAIVKRRTPFTIQLTIATGEARQPVTLGVDSGYKHIGLSATTEKDELYASQVELRQDITDLLSARLALRRSRRSRKTRYRAPRFDNRVASKRKGWLAPSVENRIAAHMSRVEAVMRVLPVTAITVETAAFDTQLLKNPDIAGEAYQQGEQLGFWNVREYVLFRDGHVCQHCRGKSKDPILNVHHIESRRTGGDAPNNLITLCETCHKAFQRGEIKLKVKRGKSFKAETFMGIMRWTLFERLKKAHPELRVRNTYGYLTKHKRISHGIAKSHCADAYCIADNLGAKRLEGFFFQKQTRKHNRQIHKLSILKGGLRKKNQAPYEVKGFRLFDKVICKGEEAFIFGRRTSGSFDVRRLDGTRISAGISCKKLRLLEPRTTYLTEFRKEAALPPLHKCRSFRAEFL

SEQ ID NO: 5932 - protein, 419 aa, Anoxybacillus sp.; identical to SEQ ID NO: 5328

SEQ ID NO: 5933 - protein, 221 aa, unidentified
  REGION 1..221: note = Human gut metagenome
YTCQCCGAHTTAKKLVKLHVHHLESRKTGGNAPSNLITLCTTCHKNLHKGKVTLDGKERGKPLRDAAFMGIMRKTLMARLKKELPIPVQGTYGYITKMRREQNDIKKSHTNDARCISKHPLAEPCSVCYRTKAIRHHNRQTHKANFSKKGIRKRSQMPYLVEGYRLWDKVLYKEQECFVSGRRSSGSFTLKKLDGTSVSKGVTFKKLRLLEPATNYLIERM

SEQ ID NO: 5934 - protein, 432 aa, Calothrix sp.
MEGHMSKIFVIDTNKKPLNPIHPAQARQFLKNGKAAIFRRFPFTIILKSAATPETTVKPLRIKIDPGAKQTGISIINDTTGEVTFASELKHRGFAIRDALTSRKQLRRSRRNRKTRYRKPRFLNRKRSKGLLAPSLQSRIDNIITWVERYRKFAPIQAISLELVRFDMQLMRNPDIEGKEYQQGTLAGYETREYLLEKWNRQCAYCGAKDIPLQIEHIKPRAKGGSNSITNLTLSCEKCNIKKGTKDIKEFLKKKPDVLAKILKQVKQPLADAAAVNTTRFALLEALKKTGLPVETGSGGLTKFNRNQQQLEKTHWLDAACVGVSTPKLIIKGIKPLIITATGHGSRQACGTDKYGFPSRYVPRFKFVKGFQTGDIVKAEVKTGKKVGIYTGRIAVRSTGSFNISTAKGLVQGINFKFCKAIHKKDGYGYSY

SEQ ID NO: 5935 - protein, 504 aa, unidentified
  REGION 1..504: note = Human gut metagenome
MGGNSELVILTYLIKTLYNIGDGNHPQMWRNLVCCTIYLVHCSIQKEDVNHFIRKEATIMVAVLSSIGTKLMPTSNYRARKLLKKERAKIYKYRPFTIQLLDREEGDTQPIEYKCDTGYQHIGISICSQKHEYVNLQVDMLKDETERHNDQRKYRRTRRNRLRHRAPRFKNRVSSKKKGWLAPSVRHKKEIHIQWFKKYYEVMPITDATFEVGEFDTQLLKALQTGSPIPTGNMYQQGPRYKISTLRNAIFTRDNYTCCICGNGIPQNTILCVHHIGYWCGDRTDRLDNLLTVCTKCHVPANHQPGGILYGLKPKLKNFKGATFMTIIRWQLLDELKTNFPDIDFHATYGSETKERRRILKVKKSHSNDAYVMGDFHPKHRTDFVLLTKKRCNNRILEKFYDAKYIDSRDGSKKSGKDLSSGRTRRGIYSTNLRCYRQQKVSKGRRSIRRNHYLLQPHDVVIWNNQKYTVKGVHNNGTRVILKKNNKSVKISDIKIIRHCNGYY

SEQ ID NO: 5936 - protein, 468 aa, unidentified
  REGION 1..468: note = Freshwater metagenome
MQKLDVELKNAPIDAPQVYSTATYPLNRVEKLSVGNGKLASNNLDVDQPQHREGQNLRVSAIVYVLNQRGSPLMPTSPRKAKQLLKTGKAKVIKRFPFVIQLNYSTGETKQAVKCGVDTGYQHVGISVVSNKKELFSAELVLDGKTSDRLTERRMYRRNRRNKLWYRKPRFINRVKKSSWLSPSVQRRLDAQVNLICKVHSILPISELTIEVANFDIQKLNNPDIKGKEYQQGSLHEYENVKFYLLSREHGKCQLCGKDFEVGNGSHVHHIIPRSKGGTDKPDNLSILHKKCHDKLHKNKLFDKLKKNKQYKPSTFMSTIQHRFGEIFEGCKITFGYETKIKRNRLNIEKSHINDAFVISDGTDEIRCKPFGIIQKHRNNRGVQLNRNGFKPSIRKQRYAIQPNDLLTVDNKIYISNGTHKYGKAVVCHNQQGEKFDFHIKKVQKCFHFGSLVWNIQQSKEERERKCG

SEQ ID NO: 5937 - protein, 447 aa, unidentified
  REGION 1..447: note = Human gut metagenome
LKGLSRTCGSLRFKEKTLKVFVINKRGKPLMPCKPAKARHLLRDGKARVVRRTPFTIQLTIATGENVQPIHLGVDAGSKHIGLSATTEKEELFSSEVELRKDITDLLSSRREMRRARRNRKTRYRAPRFDNRVHAKNKGWLAPTLENKISAHLSRIKAIRAILPVSRITIEVASFDIQKIKNPEIEGEQYQQGEQLGFWNVREYVLFRDGHKCCHCHGKSKDPILNVHHIESRKTGGDAPNNLITLCETCHKAYHAGKIQLTSKRGKKFTDATHMGIMRWELLKRAKEANLGIPVKATFGYITKARRIQFGIAKTHCADAFCIAGNLNAKRLGEYLYQKQTRKHNRQIHKMAILKGGYRKRNQAPFEVFNFRLFDKVRFGGNVGFVFGRRTSGSFAVRTLFGEKLSEGVSYKKLSLLERRTTFLTQLVKEGAIPPVSKDTGFLARFL

SEQ ID NO: 5938 - protein, 468 aa, unidentified
  REGION 1..468: note = Ga0373625_0035836
MRGQFLALSLPIMSAGVRHEGWWPSKLLSPSEANLYPRKGGFRLVFVLSADRQPLDPCTHRRATILLNKRRAAVLRRYPFTIILKDRILAESVTQGHRIKIDPGSKTTGIALLQEATNRVVWAAELAHRGQAIRGALLVRRQIRRSRRNRKTRYREIRFLNRQRPKGWLPPSLESRIANILTWVRRLTTFCPVESLSMELVKFDTQVMQTPEISGVEYQQGTLAGYEVRDYLLEKWGRKCAYCGDTGPLQIEHIILKARGGSNRVSNLALACDSCNRAKGNKTAAEFGHPEVEAQATKPLKDAAAVNASRWALYGRLQQTGLPIEVGTGGRTKFNRTRLGLPKAHWTDAACVGESTPDNLRVDGVSSLTIKATGHGRRQRCGTDKYGFPIRHAPRAKSFMGFRTGDMVKATIPAGKYQGIHVGRIVIRFRPSFRLNGFDVHPKRLKMLCHCDGYDYKMKGEIGHSSPD

SEQ ID NO: 5939 - protein, 456 aa, unidentified
  REGION 1..456: note = Human gut metagenome
MSTCVCVLSNSGERLMPTFRLGKVRRLLKDGKAKIVKHHPFTIQLLYDSKTNTQPIEICEDVGYNYIGISVKSQSHEYVSAQYDTLQDEKACHDSCRKLRRSRRNRLRYRQKRFNNRKHDKGWLAPSLEHKKELNVNVIKMYCEVMPITHATVEVGSFDTMLLQAIQKGKSKPEGVDYQKGPRYNLATLREAVFYRDNYTCQVCGRKIADGAILHMHHMFYWKGRHGYQLDELVTACEKCHTPANHQKGGKLFGFGEDKEFANLSGAAFMNAVRWQIVDALHATYGKEFVTITYGAMTKEKRIILGIEKTHNNDAYAMGDYHPVHRCVFRHYQKRCRNNRVLEKFYDATYIDTRTGNKAKGKELFNGRISRNHKKDSENFHKYRSKKVSKGRRSIRRQRYAIQPYDTVRLESKTYITSGCHNKGTRLLIPANGKSKSVAVSKVQVVCHAGAWIQII

SEQ ID NO: 5940 - protein, 384 aa, Halomonas sp.
MAVFVLDKGKQPLMPCREKRARLLLERGRAVVHKQRRAFRRRRRSKNLRYRAPRFDNRTRKAGWLPPSLQHRVDTAMAWLERLSKLAPITATSQELVRFDTQQLDNPEISGVEYQQGTLLGYEVREHLLEKWGRECAYCGTGDTPLEIEHVVPRSRGGSNRVSNLTLSCHDCNQAKDALLLADFFATDKGLKKRLKANGLSASARLERVQHELKHPLRDASAVNATRWALLTALKATGLPVTVGTGGRTKYNRQRLDIPKTHALDAACVGVFGSLHTWAVPTLTIKATGRGSYQRTRLTKHGFPRGVLMRQKQVHGFQTGDMVCACVPTGKKAGTHTGRVAVRKTGSFNIQTEQGAVQGISHQHCTLIQRGDGYGYHLTASINL

SEQ ID NO: 5941 - protein, 540 aa, unidentified
  REGION 1..540: note = Human gut metagenome
MVPKKRKEASRMSDYIYVLGMDENPQMPTRRKRHVEKLLQTGRARIFRHVPYTIQLTYENDPVLQPITLAEDPGRSNIGMAVVSLSGELLSAAVVQTRNKEIVKLMEKRKQHRRASRNGERKARQRLAKKCHTMLKVGSLMRKLPMYGKDKRVKCLVIRNTKARFCNRKRKDGWLTPSAEHLVRTHINLIHKMQKFLPITDVAIEINRFAFLSLEDPSVSGVDFQKGPLKGYDNLNAAVEDLQDGHCLMCDRPIEHRHHIVPRSMQGSNTIENIAGLCCKCHEKVHKNAAFEKRLKKKKAGLDKRYTAVSVLNQAIPFICKRLEQEFGKEHVHYCSGKDTAMVRRSFGYHKTKEEQLHEVDAWCIAVLSLQQIQEKAPEFDHVYKIMQFRRQDRSRIKAQTSRTYYYEGKKVAKNRKKAEGQKEDSLQEWRECQVTLYGENQARKMVCHLKVRKSIRRYNRLDRLMPGAVFYYKGSRYVMRGQHCEGRYLQAAGMGTKDFPVKDCKIVAHNQGLVFVYRGNERINETFNKDHARKRVNEK

SEQ ID NO: 5942 - protein, 493 aa, unidentified
  REGION 1..493: note = Human gut metagenome
MAAVYVISASGKTLMPTTRCGHIRGLLNAGKARVVEREPFTIQLKYETPDVTQPLYLGIDPGRTNVGSAVVREDGECVFTAQLTTRNKDVPKLMKARKQFRMAHRRLKRRCKRQRRAKAAETLSQKGEFQRLLPGYEEPILCKGIRNKEARFNNRQRPAGWLTPTANHLLLTHLNMVKKLQKLLPITDVVLEVNRFAFMAMENPSIRRWQYQQGPLYGKGSVEDAVYAQQDGHCLFCGKPIAHYHHVVPQHKNGSETLENRVGLCNEHHDLVHKDRAWDAKMKETKAGLNKKYHALSVLNQIIPALTEQLTAMFPQHAFVTTGKDTADFREDYGIAKEHHLDAYCIACSVLAEPTKVAAPTGKPHRLMQFRRHDRQVCHKENIKRVYLSEGKAVATNRHKAIEQKDDSLEEFRKTHTQQEVSALTVKDHQPVYKDMRRFMPGGVFLFNGKVHTLQRSHGRYKGMPFYYIDTDGSKNHAKGCIFLQQNCGLRWV

SEQ ID NO: 5943 - protein, 488 aa, Moorena sp.
MQKLLVEFENTSGDAPQVPCSVSEALNREETLSVPYKVLANNSSAQDQHSGKSGQVLSVPVINMHGKPLMPTTPRKARVLLQQGKSRVVQRSPFTIQLCYLTGKYTQNIKLGIDAGYSTIGFSVISDKSELLSGELTLRKRISKLIEQKSNYRKTRRSRLWHRKPRFNNRSISTGWFAPSIQHKLETHLRLIEKLKKILPITKMTVEVASFDQQKLHNPEIKGIEYQQGELQGYEVREYLLEKWKHKCAYCGKKNIPLEIEHIIPKIRGGTDRVSNLTIACHKCNQKKGNKTAAEFGHPEIQNKAKRALKSTAFMNIVRWRLVNTLKCDRTSDCVKTLYFVNFLPPFVISWTYITYFSCKHEFSHNLTYGYITKHDRIKLDIEKSHVNDAFVIAGGTTQNRAKSYELTQTRRNNRSIQTNRKGFKPAIRRQRYKLQPNDLVKYIKSLYKVKGVHSYGKYAIVVDKISKLFDINIKKIELVKYGKGIQF

SEQ ID NO: 5944 - protein, 428 aa, unidentified
  REGION 1..428: note = Human metagenome
LKVFVLNMRGRPLMPCSPARARHLLKAGKAVVRRRTPFTIQLRIATGETKQSVTLGVDAGAKHVGLSAATEKEEVFASEVELRQDITGLLAARLSLRRDRRHRKTRYRAPRFLNRVRSKHKGWLAPSVENRIQAHMSRIDAVCRLLPVTKIVIETASFDIQKIKDPSVEGTDYQQGDQLGFWNVREYVLFRDGHVCQHCHGYSKDKILNVHHLESRQTGGDAPNNLITLCERCHKACHAGKIKLKVKRGQSFREEAFIGIMRWTLLDRVRKAHPGLPVENTYGYLTKNTRITLGLPKAHCVDAYCIAGNLKAVRRGVYLHQRQVRKHNRQIHKCTVLSKTLKDGTKIGYRKLNQTPHLVKNFRLFDKVRCLGQTGFIFGRRSSGYFDVRRLDGVKLSSGISYRKLTLLEKRSTYLTELRKEDGASSPV

SEQ ID NO: 5945 - protein, 426 aa, unidentified
  REGION 1..426: note = Human gut metagenome
MPKVYVLNRHGRPLMPCTPAKARHLLDAGKAKVRHRTPFTIQLLYGSTGYTQEVILGVDAGSKTIGLSAATETEELFSAEVKPRNDVVELMSARRQFRRARRNRTTRYRKPRFDNRVRSKHKGWLAPSVEVKIQEHMTAIRRACAILPVSKVVVETAEFDLQLLKAVAEGKPVPQGEDYQKGEMYGHYNVRQYVLWRDSYTCCICGVHGSVRKGVPLHVHHLESRRVGGDAPDNLVTLCTACHDKLHKGIIMAADIKKRKRRSTRDATFMGIMRMTLLRRLREQLPVPVVETRGYITKATRENLLVLPKSHANDALAIAHGPQGFRAEHLPNIRQADRLYTIRPVRHHNRQLHKATILKGGVRKTNQAEKYICGFRLYDKVLYNGIECFVWGRRTSGSFLLRQLNGEKVKDGVSYKHLKLLERSQS

SEQ ID NO: 5946 - protein, 406 aa, unidentified; identical to SEQ ID NO: 2752
  REGION 1..406: note = Human gut metagenome

SEQ ID NO: 5947 - protein, 512 aa, unidentified
  REGION 1..512: note = Human gut metagenome
MSTVYVLNKDGKPLMPTTRCGHVRYLLKEKKARVVASKPFTIQLLYETDDVVQPLYLGIDPGRSNIGVAVVKTDGMAVFTAHLETRNKEIPKLMKKRKDSRRARRTNGRRCRRQRRAKANGTISKKCVKQTTAQNGSVSKRAKEIGVIKRHLPGCEKDILCIGIKNKEAKFNNRTRPTGWLTPTANQLLQTHINLVKKIQKFLPISDVVLEVNKFAFMQLDNPNIQKWQYQKGPLYQKESLKSAVSEMQEHHCLFCKKKIDHYHHVVPQHKNGSNTIDNIVGLCTQHHDLVHKDATWQKRLAKKKTGLNKKYGALSVLNQIIPALTKELSSLFPKHFFVTNGKSTYDYRAAHGVSKDHWLDAYCIACSVLPNDTCDKTINSRVPYELKQFRRHDRRALNNENMSRVYTFNGKIVATNRHKATEQTTDSLEEFRQRQPNDVCNLKVKEHHPTYRNMSRNYPGSIFLVEKQVHIMQGIAGSKDGKATTYKDTNANSIAAGKCKFVAKNSGILFV

SEQ ID NO: 5948 - protein, 416 aa, unidentified
  REGION 1..416: note = Human gut metagenome
MVYVLSQHGQPLMPTENHAKVRALLKHGKAKVIQRCPFTIQLLYESTTHTQKINLGIDAGSKTIGVSATTDSKVLYESEVVLRNDIVELLSGRRALRNSRRSRKTRYRKPRFDNRKKPDGWLAPSIRQKIETHVTVVGNVMKILPVTKIIVETASFDIQKIKNPEIEGEGYQHGEQLDFWNVREYVLFRDGHTCQCCKGKSKDNILNVHHIESRKTGGNAPNNLITLCETCHKAYHKGIITLPNEIHRGMRFRDAAFMGIMRWAFYDRLKELYNPLGAEVINTYGYITKNTRIEHGLPKEHYVDARCISDNPAAKPLDHYYFQKKVRCHNRQIHKNTILKGGIRKRNQASYEVKGFRLYDQVLWKGQKCFIFGRRSTGRMDLRLLDETHINASVGHKNLKLLSMRKNYLIEQRKAG

SEQ ID NO: 5949 - protein, 431 aa, unidentified; identical to SEQ ID NO: 3801
  REGION 1..431: note = Human gut metagenome

SEQ ID NO: 5950 - protein, 349 aa, Akkermansia sp.
  SITE 349: note = misc_feature - Xaa can be any naturally occurring amino acid
MPCSPAKARLLLKEKKAIVVRRTPFTIQLTIATGESKQPVSLGVDAGYKHVGLSASTEKAELYESEVELRQDVSDLLSARRALRQSRRNRKTRYRAPRFDNRIRTKRKGWLAPSVENRINAHLSRIETVLRLLPVTKITVETASFDMQLLKDPDISGKEYQEGEQLGFWNVREYVLFRDGHVCQHCHGRLKDPVLNVHHLKSRRTGGDSPGNLITLCETCHKALHRGEITLKAKRGQSFRAETFMGIMRREVLDRLKASHPKLEVQNTYGYRTKHARISNGIAKSHCADAFCIAGNLGAKRLGEFLFQKQTRRNNRQIHKLSILKGSLRKRNQAPFEVKGFRLFDKVAX

SEQ ID NO: 5951 - protein, 431 aa, unidentified
  REGION 1..431: note = Human gut metagenome
MDAWDIIVILNKRGKPLMPCSPAKARLLLKEKKAIVKRRTPFTIQLTIATGEAKQPVSLGIDAGYKHVGLPASTEKAELYASEVELRQDITDLLSARRALRQSRRNRKTRYRAPRFDNRISTKRKGWLAPSVENRINAHLSRIEAVLRLLPVTKITVETASFDLQLLKNPDISGKEYQEGEQLGFGNIREYVLCRDGHVCQHCYGGSKDPVLNVHHLESRRTGGDSPDNLLTLCETCHKALHRGEITLKTKRGQSFRAETFMGIMRWEVLNRLKASHSELKVHNTYGYLTKHARIENGIAKSHGADAFCIAGNLGAERLGEFFFQKQTRRNNRQIHKLSILKGALRKRNQAPFEVKGFRLFDKVACQGEEGFIFGRRSSGFFDVRKLDGTRISAGISYKKLHLLEKRQTYLIEIRKEEAFPPLPEGRGLRA

SEQ ID NO: 5952 - protein, 427 aa, Enterococcus sp.; identical to SEQ ID NO: 5630

SEQ ID NO: 5953 - protein, 420 aa, unidentified
  REGION 1..420: note = Human gut metagenome
MQYVYVLNKHDEPLMPCSPRKARLLLKQKKAHVVKRTPFTIKLLYGSAGYKQPITLGVDAGSKHVGLSASTEKRELYREEFTPRNDVVELLSTRKKYRHSRRYRKTRYRAPRFDNRVHSKHKGWLAPSVEVKIQEHITVIKRICRILPIALVRVETAEFDTQRLKAMLEGKPLPVGTDYQLGEMYDEYNVRQYVLKRDYYTCQCCGAHTTTKKTVKLHEHHLESRKVGGNAPSNLITLCTTCHDALHKGKVSLDSKKRGKPMRDAAFMGIMRKTLMARLRDELPIPVQGTYGYITKMRREQNGIKKSHVNDARCISKHPLAEPCSVCYRTKAIRHHNRQTHKANFSKGGTRQRSQMPYVVEGYRLWDKVLYKGQECFVSGRRASGSFTLKKLDGTRISKGVTFKKLRLLEPATNYLIERM

SEQ ID NO: 5954 - protein, 427 aa, Enterococcus sp.; identical to SEQ ID NO: 2410

SEQ ID NO: 5955 - protein, 429 aa, Moorena sp.
MCNYVFVLDANHKPLNPCRPVTARKLLTAGKAAVYRRYPFTIILKKQVEAEPKPMSLKIDPGSKMTGLAIVYGNQVVWSAEIEHRGSKIKSALDSRRAVRRSRRNRKCRYRKPRFNNRKRPEGWLAPSLQHRVATTMTWVLRLIKLTPIGSISQELVRFDTQKLQNPEISGIEYQQGELMGYEVREYLYQKWDRQCVYCGAHSVKLEIEHIVPKSKGGTNRVSNLTLACHRCNQAKGNLNAQDFLLGKPDVLKRILARAKQPLLDAAAVNSTRWKLYQSLKKTGLSVEVGTGGRTKYNRIKLGLPKSHWIDAACVGEVATLEIVTRQPLLIKAMGHGCRQVIQMDKYGFPRKGYKPKHPVKGWKTGDIVNVVAGKNAGLKGVRIKTVRAKGNFDLIGADQDSSNKVLSASRNYIQCVHRQDGYYYSFAK

SEQ ID NO: 5956 - protein, 456 aa, unidentified
  REGION 1..456: note = Human gut metagenome
MSTCVCVLSNSGERLMPTFRLGKVRHLLKDGKAKIVKHHPFTIQLLYDSKTNTQPIETCEDVGYNYIGISVKSESHEYVSAQYDTLQDEKEHHDDCRKYRRTRRNRLRYRKSRFDNRKRDKGWLAPSLEHKKQLNISLIERYVSVIPITHVTVEVGSFDTMLVKAIQEGKVIPEGADYQKGPRYNLATLREAVFYRDNYVCKVCGRKATEGAILHMHHMFYWKGRHGYQLDELVTVCEKCHTPANHQKGGKLYGFGKDKKFANLSGAAFMNAVRWQIVNALYATYGKEFVTITYGAMAKEKRIALQLEKTHNNDAYAMGDYHPARRCKFRHYQKRRRNNRVLEKFYDATYVDTRTGNKAKGKELFNGRISRNHKKDCENLHKYRSKKVSKGRRSIRRQHYAIQPYDTVRLEGKTYITSGCHNKGTRLLIPVNGKSKSVAISKVQVVCHAGAWIQII

SEQ ID NO: 5957 - protein, 442 aa, unidentified
  REGION 1..442: note = Human gut metagenome
MVTVQQSTHHLPFGRVFIRRNLFMVYVISQDGKPLMPCSDPIARLLLKQGKAKVKKREPFTIKLTYETTNYTQGLTLGVDTGSGTIGTAVSKDNGDIVYMSEVVVRNDITDKMTQRAKYRRNRRNRKTRYRKARWLNRASSIKKDRFSPTMQSKLHSHVREIEYIQSILPVTEMVFETGQFDMHLMKNPSLANPKVRPWGYQKGANYGFENTKAMVLNRDNYTCQCCKGKHKDSKLEVHHIVFRSQGGSDEESNLLTLCHTCHKDLHSGKINPKLSGKVKGNLKYATQMNSTRKQLFRFYPNAIETFGYVTKVNRLHLGVAKEHYYDACTIATQGNAFNVKSNLYKKKCVSDGDFQKTKGIRSEQPIVTDKICGFRKFDKVRYFGNDYFIKGRMSTGYAILMDIDGNKIDFSTMPRGYKTPKLSNCKRITARSTVMTQVKVV

SEQ ID NO: 5958 - protein, 267 aa, unidentified
  REGION 1..267: note = Human gut metagenome
VDGCDAGKPVPQGEDYQKGEMYGHYNVRQYVLWRDDYTCQCCGAHATKKKEVRLHVHHLESRKVGGDAPDNQVTLCESCHEKLHKGLIAEKDFKKRKRRSTRDATFMGIMRKTLMQRLYSELPIPVVKTRGYITKATREKLLVLPKSHTNDALAIAQGKRGFNVGYLPEIAQIDKICTIRPVRHHNRQLHKAAILKGGIRKSNQAEKYVFGYRLFDKVQFNGQDCFIWGRRTTGIFTIKTINGKMIKDGISFKKLKPVEKSTSYLIA

SEQ ID NO: 5959 - protein, 528 aa, Caldicellulosiruptor sp.
VGDAVAVPDVPGQHSPFRETAVKSRSPTQGATARLRETYHLYKRCPDHRAPFTGGRKMLLFTIDRNGKPGHPTRRFDMVRKLVKRRRAKIIGGGASGKPPVVMFLDREFDYSKTVSRKLIIVLDPGYHCIGFVVCELKGGKLIVYCTGILVSRIPEIKELITERKAHRRNRRYYSRCKKKRLSARQNRVLLKFKVPRTVRDRDRLNATLRHGIETHLNLYKKLLKFFPFPAEQVVFVMEDNIFDVRTMTWGKTDGTGYQKSPRVPAEKKCIICGSKEKLQKHHLIQRKYGGTDIRENVVYLCRDCHEDVHAGRVYIPVEGVRQWRALGTVNAIIGRLREIPWLKFVPASDVAQMRKRLGLEKGHANDALATAAVFCNCTETDRTHMIELTLVKFRRHNRARIHAVRDRLYKVNGKIVAKNRRKRTDQKEPSFADISPLSPEIQRKLKVYPGTKILNPLRKETPTIAGDVWIYEPTGKRFVATGVVSQKYLYSPQLEKIVGKTYVKPEECKRVLRNEGIVVMYNSLYHN

SEQ ID NO: 5960 - protein, 412 aa, unidentified; identical to SEQ ID NO: 3155
  REGION 1..412: note = Human gut metagenome

SEQ ID NO: 5961 - protein, 473 aa, unidentified
  REGION 1..473: note = IscB polypeptide
MAVLVLDRRKKPLMPCTEKRARLLLERGRARVHRMVPFTIRLVDRAMEQSAMQPLHLKLDPGSKVTGIALVRDCENMDAKTGEVRKAAHALVLIELTHRGHAIRDALTARRAFRRRRRGANLRHRAPRFDNRKRPAGWLAPSLQHRVDTTMTWVRRLQRWAPVTAISQELVRFDTQALQNPEISGVEYQQGTLAGYEVREYLLEKWHRTCAYCQVTNVPLQVEHIVPRAKGGGNRISNLTLSCGPCNAAKGAQDVREFLAHDPQRLARILAQAEAPLKDAAAVNSTRWALFEALKATGLPVETGTGGRTKFNRTRFDLPKTHAIDAACVGEVERVTGWQVPTLAVKATGRGSYQRTRLTKHGFARGFLTRRKRHFGFQTGDLVRAEVPTGQKAGTYTGRVAVRASGSFNVQTASGVVQGIGHRHCRRMQRGDGYGYHHQPTVAQPSKGEREQGRASHAALSIPGVNAEVSRAN

SEQ ID NO: 5962 - protein, 443 aa, unidentified
  REGION 1..443: note = Human gut metagenome
VVKANGTAVFTAHLETRNKEIPKLMQDRKKARRARRTNGRRCRRQRRAKANGTISKKCVKQTTAQNGSVSKRAKDIGVIKRRLPGCEKDVLCIGIKNKETKFTNRTRPEGWLTPTANQLLQTHINLVKKIQKFLPISDVVLEVNKFAFMRLDNPNIQKWQYQQGPLYKKESLESAVSEIQEHHCLFCKKPIDHYHHVVPQHKNGSNTIGNIVGLCAKHHDLVHKDSAWEKKLAQKSTGLNKKYGALGVLNQIIPTLTNELSSLFPKHSFVTNGKSTYDYRAAHGVSKDHWLDAYCIACSVLPSNVCDSNINNHMPYVLKQFRRHDRRVLNNENMTRVYTLNNKAVAINRHKAKDQKTVSLEEFRKEHPDDVCKLKVKEHHPTYRNMNRNFPGSVFLVGKQIHVMQGIASSKDGKATKYNDTSATAIAAGKCKFVAKNTGILFV

SEQ ID NO: 5963 - protein, 414 aa, unidentified
  REGION 1..414: note = Human gut metagenome
MPCSPAKARLLLKEKKAIVKRRTPFTIQLTIATGETKQPVSLGVDAGYEHVGLSASTEKAELYASEVELRQDITDLLSARRALRQSRRNRKTRYRAPRFNNRLCTKRKGWLAPSVENRINAHLSRIKAVLRLLPVTKITVETASFDLQLLKNPDISGKEYQEGEQLGFWNIREYVLCRDGHVCQHCYGRSKDPVLNVHHLESRRTGGDSPGNLITLCETCHKALHRGEITLKAKRGQSFRAEAFMGIMRWEVLNRLKASHPELEVNNTYGYRTKHARISNGIAKSHCADAFCIAGNLGAERLGEFFFQKQTRRNNRQIHKLSILKGGIRKRNQAPFEIKGFRLFDKVACKGEEGFIFGRRSSGFFDVRKLDGTRISAGISCKKLHLLEKRRTYLTEIRKEEALPPLPEGRGLRA

SEQ ID NO: 5964 - protein, 427 aa, Scytonema sp.; identical to SEQ ID NO: 3717

SEQ ID NO: 5965 - protein, 413 aa, unidentified
  REGION 1..413: note = Human gut metagenome
MTSYVFVLDANGKKLAPTKKQKAWFLIRKKRATLVSKYPMVIQLKKKIPDKEICKDEIRCGIDDGSLHVGIALVQKYQTRNKVVFKGIIEQRNDVKHLMDVRRGYRRYHRYHKRYRPARFNNRFSSKREGRIAPSILQKRQAIIRVINRLNKWINITNYWLEDVAIDIRALTDGYKSYSWQYQRSNRLDENIRKAVILRDNCRCKECGKSNCRLEVHHIKPRRLNGPNTLDNLITLCENCHQKTEGKEELYMSRYFGLLKSSDSKRLNYAQHAMIGKKWLREELSNLGMLYLTNGGNTANKRIDWSIEKSHSNDAICITDLQPDTCNIKEWTIKPMRRQSKAKTDNVLGIKHRDLVEYTFRNGETYKGYVTALYPEQKAINFQSSTKHCKKVNARKCKLLWKYSKIYWLENAG

SEQ ID NO: 5966 - protein, 429 aa, unidentified
  REGION 1..429: note = Wastewater metagenome
MVFVKSINNTSLMPCSARKARLLLSSNKAIIIDYKNFTIKLNYNTTNFCQTTTIAVDTGAKFLGIILRNGNNILLARQVKLRTDISSLLTTRRILRRARRNKLRYRQPRFLNRTKSKKAGWLPPSILSRINNTINIIDNLIEKLHSYELILEVGNFDVQKMKNPAIKGKEYQQGEMAGFNEVKEFVLARDNYKCQHKLCKSKNKKLHVHHIIFRSQGGTNLPNNLITLCETCHQDLHKGLIDSKFKKVAIYKEPPFMNTLKLRLQNYYTDATFCYGYNTKEKRQEMQLPKSHINDAIAISFYNCDKITNLKYPEVNEYVIQVRIKKRSLHEQTSRKGIKEKNITQKRNCKNVFQVNQFKIGTKVSFVNQVGFISGFTGKSAYIKDINDNYITEDNKSYKQISLIKLNLICYNNGWIKFYDNLSHQLVKP

SEQ ID NO: 5967 - protein, 453 aa, unidentified
  REGION 1..453: note = Human gut metagenome
MLMAVAVVSRTGVPLMPTSPYRARKLLASGKAEKYGYDPFTIRLTERETGDTQPVELCMDTGYIHIGVSVKSEKHEYLALQIDTLTDEKKKHEKCREKRRNRRSRKRYRKPRFDNRKRDKGWLAPSLEHKKEIHVRAAERICRVVPVTDITMEMGNFDTQVLKAREEGRPLPQGTDYQQGERYGTATLREAVFSRDNYTCLCCGRTMKDGAYFHVHHIRYRSQGGTDRMANLATVCEKCHTPANHQPGGKLYNWKPEIKSFKGATFMTAVRWQMYREIKEKIPDVSIHLTYGAATKERRRALDIEKSHVNDAFVMGRFHPGHRARPELYLKKRRNNRVLESFYDARYIDSRDGKRKSGKELFNGRISRNHKKDSENLHKYRLRKVSKGKRSIRKKHYPIQPHDILVYCGRKYETAGCHNLGTGAILLPERKSIAVSKLKIYRYSGGYYKAEFN

SEQ ID NO: 5968 - protein, 512 aa, unidentified; identical to SEQ ID NO: 4031
  REGION 1..512: note = Human gut metagenome

SEQ ID NO: 5969 - protein, 431 aa, unidentified
  REGION 1..431: note = Human gut metagenome
MPNKVYVINKHGRPLMPCSPAKARHLLDEGKAKVKKRTPFTIQLVYGSSGYTQEVILGVDAGSKTIGMSASTTKEELLSAEVKPRNDVVDLLSTRREFRRARRNRKTRYRKPRFDNRVRSKHKGWLAPSVEVKIQEHITAIRRVCGILPVSKVVVETAEFDLQLLKAIADGKPVPQGEDYQQGEMYGHYNVRQYVLWRDGYTCQCCGAHATKKKEVRLHVHHLESRKVGGDAPDNQVTLCESCHEKLHKGLIAEKDFKKRKRRSTRDATFMGIMRKTLMQRLCSELPIPVIETRGYITKATREKLLVLPKSHTNDALAIAQGKHGFNVGYLPGILQIDKIYTIRPVRHHNRQLHKATILKGGIRKSNQAEKYVFGYRLFDKVQFNGQDCFIWGRRTTGIFTIKTINGKMIKDGISFKKLKPVEKSTSYLIA

SEQ ID NO: 5970 - protein, 306 aa, unidentified
  REGION 1..306: note = metagenome
LAPSVEVKIQEHITSIKRVCRILPVSKVVIETAEFDLQLLKAIEEGKPVPQGEDYQQGEMYGHYNVRQYVLWRDDYTCQCCGAHATKKKEVRLHVHHLESRKTGGDAPRNLITLCDSCHKKHHDGLITEDDFKKRKRRSTRDATFMGIMRKTLIQRLRAELTIPVAETRGYITKATREKLLVLPKSHTNDALAIAQGKQGFNVGYLPGILQIDKIYTIRPVRHHNRQLHKATILKGGIRKSNQAEKYVFGYRLFDKVQFNGQDCFIWGRRTSGYFVVKTIDGKVIHNSASFKKLRLVERASNYLIA

SEQ ID NO: 5971 - protein, 424 aa, unidentified
  REGION 1..424: note = Human oral metagenome
MLVYVLKQNGQPFMPTERFGKVRRLLKEGKAKVVRREPFTIRLLYEPETDVVQECYCGVDTGSRHIGVAVVGNDRVLYQSQTELRSDIKKKMDARRQLRKFRRSRKTRYRKHRFLNRHGSIREDRLPPSVKHKVQAHIDEIEFCKKILPVSDLILEVSQFNTALMKSPCLMNEKIKHWGYQKGFNYGYASRRSAILHRDNYTCQCCGKKNCRLEVHHIKFRRDGGTDDEENLITLCEECHKGVHAGIVVLNKKPKKSKNLKHATHMSIIRSRLLKVYPDAVETFGFVTSENRNHLNLPKDHYIDACVIASGGLEFKPSDIIYYKCRVSKGDYQVTRGVRGEQKIPTGKICGFRRYDKVEYFGKEYFIKGRMSSGFALLMDIFGKKADFSSMPNGLKTPKLSNCKRTSARRSYLCIRKIERSRVI

SEQ ID NO: 5972 - protein, 553 aa, Streptomyces sp.
MTTFPAGEQTHQVVLPQQPALESVGADNPGSRDETAHGHPATVRGTGREHGRGETGGQGTRARRRHAKSAATVAQAAENGSSDAPPQSNPSYEGGVGASRVFVLSKEGNPLMPCHPARARELLGKGRAVVTRQVPFTIRLKDRTLAESEVDGVQLRIDPGSKGTGFVLTDEKKEANEHGTTVTIRRGLVSVELQHRADQIRLCMQQRAGYRNRRRSANCRYRAPRSRNRGHPAGWLPPSLRHRVDTTFSVAKRLCRYAPVTEIHVELVAFDTHSMSAGRPLKGAEYQQGPLVGTSARAYLHAKWDNACAYCDATGVPLNIDYLQPRSRGGSNRITNLVLACVPCNQAKGNSPVEVFLAHRPDRLAKILQQVRTPLHDAAAMNATRWQLMDALSSLGKPLHTWPGAQTRENRSAMGLAKTHTLDALSVGSLDHEGGDAIVRFPAQVLVAKATGRGSYARTTPDRFGFPRLRRSRSKQHFGYVTGDLVRANVPSGQWTGTWTGRISVRARGQHSLRTPMGRFNVSHWNLRILQRGDGYGYSTQPESAPSTSRKIA

SEQ ID NO: 5973 - protein, 471 aa, Caldicellulosiruptor sp.; identical to SEQ ID NO: 3268

SEQ ID NO: 5974 - protein, 431 aa, unidentified
  REGION 1..431: note = Human gut metagenome
MPNKVYVINKHGRPLMPCSPAKARHLLDDGKAKVKKRTPFTIQLVYGSSGYTQEVILGVDAGSKTIGMSASTTKEELLSAEVKPRNDVVDLLSTRREFRRARRNRKTRYRKPRFDNRVRSKHKGWLAPSVEVKIQEHITSIKRVCRILPVSKVVIETAEFDLQLLKAIEEGKPVPQGEDYQQGEMYGHYNVRQYVLWRDDYTCQCCGAHATKKKEVRLHVHHLESRKVGGDAPDNQVTLCESCHEKLHKGLIAEKDFKKRKRRSTRDATFMGIMRKTLMQRLCSELPIPVVKTRGYITKATREKLLVLPKSHTNDALAIAQGKQGFNVGYLPGILQIDKIYTIRPVRHHNRQLHKATILKGGIRKSNQAEKYVFGYRLFDKVQFNGQDCFIWGRRTTGIFTIKTINGKMIKDGISFKKLKLVEKSTSYLIA

SEQ ID NO: 5975 - protein, 456 aa, unidentified
  REGION 1..456: note = Marine metagenome
MAVFVLDKKKQPLMPCSEKRARLLLARGRAVVHKRYPFTIRLKNRVGGEAQPLRLGIDPGSKTTGLALMHEPDSQQRHVLCLFELIHRGYQIKKALQQRAAFRRRRRSANLRYRAPRFNNRIKPKGWLAPSLQHRVDTVMAWVNRLSKSAPITGISQELVRFDTQKLESPEISGVEYQQGTLLGYEVREYLLEKWGRECAYCGTADTPLEIEHVVPRSRGGSNRVSNLTLSCHPCNAEKDSQTLTDFFATNKGLKKRLKANGLSADAQLERVQRQLKQPMRDASAVNATRWALFSALKTTDLPVAVSSGGRTKYNRQRLNIPKTHALDAACVGAFEKLHDWTVPTLTIKAMGRGSYQRTRLTKHGFPRGYLMRQKQVHGFQTGDMVRAIVPTGKKAGTHTGRVAIRKTGSFNIQAEYGAVQGISHKYCTLIQRGDGYGYHFTLFSNLTGGAGQAVA

SEQ ID NO: 5976 - protein, 381 aa, unidentified
  REGION 1..381: note = gut metagenome
FTIQLDYSSEEVVQEVSLGVDADSKHIGVSATTEERELLAMQVEERDDIVELIAIRRETRRTRRSRKLRYRASRFDNRRRKDGWMTPSTEYRISAHLRMIRLVCSILPITKTTIEVAQFDSQKIKNDKITGVEYQQGEQLGFWNVREYVLARDGHVCQHCKGKSKDKILNVHHIESRKTGGNAPNNLITLCETCHKAYHDGEITLKLRRGTSLRDAAAMSIMRWEVYNRAKQEFKNVHLTYGYVTKHARIHNNIAKTHCADALCISGNVGAERLSWFYGVRLTRRHNRSLHLFKPKKGGVRPGNLASHWIGKSRLQQYDYVEWNGQRAFVSGSSNGRPYLKNFDDKYIMTPKASINAKTVKFIRRKRGSMIIEQLHKSINQ

SEQ ID NO: 5977 - protein, 518 aa, unidentified
  REGION 1..518: note = Human gut metagenome
MTPKKRKEASRMSEYIYVLGIDGNPQMPTKRKRHVEQLLQTGRARIFRQVPFTIQLTYKNEPVLQPVTIAEDPGRSNIGMAVVSRSGELLSAAVVQTRNKEIVKLMEKRKQHRRASRNGERKARQRLAKKCHTMIKTGFLMRKLPMYGKDKRVRCNVIKNTEAKFCNRKREDGWLTPSAEHLVRTHINLIHKMQKFLPITDVAIEINRFAFLSLEDPSISGVDFQNGPLKGYDDLNVAIEDLQDGHCLMCNSPIEHRHHIVPRSMQGSNTIGNIAGLCCKCHERVHKDARFEDRLKKKKAGLNKRYAAVSVLNQAIPFICKRLEQEFGKEHVHYCSGRDTSMVRRSLGYHKTKEEQLHEVDAWCIAVLALQHVPEKAPEFDHVHEILQFRRQDRSRIKAQTSRAYYHEGKKIAKNRKKAEGQKDDSLQGWRKRQVERYGEEQTRKMISQLKVKKSIRRYNRLDRLMPGAVFYYQGVRYVMRGQHSNGQYLQAVGMRDKDFPAKKCKIVVHNQGLVFVS

SEQ ID NO: 5978 - protein, 477 aa, Acidithiobacillus sp.; identical to SEQ ID NO: 5650

SEQ ID NO: 5979 - protein, 412 aa, Moorena sp.; identical to SEQ ID NO: 4051

SEQ ID NO: 5980 - protein, 412 aa, unidentified
  REGION 1..412: note = Human oral metagenome
MENNIEYCFVIDEDNQPLVPTKVNRGWYLIRKGRAKLKSKYPMVIQLNKKVEPNENDKSYIVCGIDDGSAHVGLAVVQKCPTKNKVVFKGTIEQRQDVKHLIDVRRGYRRYHRYHKRYRPERFNNRSSSKRIGRLAPSIKQKKDAILRILYQLNKWVGIQEYYLEDVCIDIRAMTDGYKPYKWQYQKSNRLDENLRKATLIRDNYRCQECGKTDCRLEAHHIQARKCSGADTIGNLITLCSKCHQKTEGKEQDFEDKYFKIINSKPKRFDYAMYVMQGKNYLRNKISELGLLHLTSGGETANKRIEWNIEKSHSNDAICITDSIPDSCNIKEWIIKPMRRKSKAKTDNVLGFKHRDLVSYTYKNGETYKGYVTSLCQKRLALSFQSRDKRCDKVNARKCRLLWRFNKIYWLE

SEQ ID NO: 5981 - protein, 420 aa, unidentified
  REGION 1..420: note = Human gut metagenome
MQYVYVLNKHGEPLMPCSPCKARLLLKQKKACVVKRTPFTIKLLYGSTGYKQPITLGVDAGSKHIGISATTEKCELYRVEATPRNDAVDLLSARRAFRRNRRNRKIRYRAPRFNNRVHSKHKGWLAPSVEVKIQEHITLIKRVCRILPVTLVRVETAEFDTQRLKAMLEGKPLPVGTDYQHGEMYDEYNVRQYVLKRDNYTCQCCGAHPTKTKAVKLHVHHIETRRTGGNAPNNLITLCTACHKALHAGKATLNGKKRGKPLKDAAFMGIMRKTLMERLLKELKIPVQETYGYITKYLREKHSIPKSHTNDARCISKNPLAIPCDTCYYTKAIRHHNRQLHKATILKGGIRKANQAPYTVKGYRLWDKVFYHGSECFITGRRTSGYFALKKMDGTVVSNSASYKKLRLLEVATNYIAERR

SEQ ID NO: 5982 - protein, 470 aa, unidentified; identical to SEQ ID NO: 2825
  REGION 1..470: note = Human gut metagenome

SEQ ID NO: 5983 - protein, 447 aa, Exiguobacterium sp.; identical to SEQ ID NO: 5458

SEQ ID NO: 5984 - protein, 544 aa, Streptomyces sp.
MTTFPAGEQTHQAVLCQQPALESVGADTPGSRDETAHGHPAIARGTGREHGRGETDGPGTEARRRHAKAENGSGDAPAQDESYTGGVGASRVFVLSKDGQPLMPCHPARARELLGKGRAVVARQVPFTIRLKDRTFAESEVDGVQLRIDPGSKGTGLALTDEKKEVDGQGAVITVRRGLISVELQHRGDQIHLCMQQRAGYRHRRRSANCRYRAPRSNNRTRPTGWLPPSLRHRVDTTASWTARLCRYAPIAEIHLESVAFDTHAMSAGRALTAVEYQQGTLAGTETRAYLHAKWNSACAYCGATGVPLNIDHVRPRSRGGSNRISNLVLACVPCNKVKGNTPVEAFLAHQPDRLTKILQQAKTPLHDAAAMNATRWQLTEALSGLGRPVHTWSGGRTKWNRSAMGLAKTHTLDALSVGRLDHESGDTIVRFPAQILLAKAAGRGSYSRTTPDRFGFPRLRRARVKQHFGYVTGDLVRATMPTGKWAGTWTGRISVRARGQHSLTTPEGRINVSYWNLRLLQRGDGYGYSVRAEGTPSTSRKIG

SEQ ID NO: 5985 - protein, 430 aa, Moorena sp.
LRVFVLNKRGKPLMPCSPAKARILLKEKKAVVTRRMPFTIRLTIATGETKQPVTLGVDAGYKHVGLSACAEKAELYASEVELRQDITELLSARLALRRARRNRQTRYRAPRFDNRVRSKHKGWLAPSVENRINAHLSRIDAVLRILPISKIVIETAAFDTQLLKDTNIEGATYQQGEQFGFWNVREYVLFRDGHVCQHCHGKSKDPVLNVHHLESRRTGGDAPNNLITLCETCHKALHQGKLTLKVKRGFTYKAETFMGIMRWTVQDRLKTAYPDIEIRNTYGYLTKHSRISHGIAKSHCADAYCIAGHLKAKRLAGYYFQKQTRRHNRQIHKLTILKGGLRKRNQAAYEIKGFRLFDKVKVLGEEGFIFGRRASGYFDVRKLDGTRISAGISSKKLTLLEKRKTYLTEYRKEAALPPLNEFRGFLADVL

SEQ ID NO: 5986 - protein, 408 aa, unidentified; identical to SEQ ID NO: 4142
  REGION 1..408: note = Human gut metagenome

SEQ ID NO: 5987 - protein, 443 aa, Caldicellulosiruptor sp.; identical to SEQ ID NO: 2385

SEQ ID NO: 5988 - protein, 420 aa, unidentified
  REGION 1..420: note = Human gut metagenome
MQYVYVLNKHGEPLMPCSPGKARILLKQQKACVVKRTPFTIKLLYGSAGYKQPITLGVDAGSKHVGLSASTEKRELYSEEFTPRNDVVELLSTRRQNRRSRRNRKTRYRAPRFNNRIHSKHKGWLAPSVEVKIQEHITVIKRICRILPITLVRVETAEFDTQRLKAMLSGKPLPVGTDYQLGEMYDEYNARQYVLRRDNYTCQCCGAHTTKKKTVKLHVHHLESRKTGGNAPSNLITLCVDCHKAFHAGKVKLDGKKRGKSLKDAAFMGAMRNTLLTRLRNELNIPVQNTYGYITKLLREQNDIKKSHVNDARCISKHPLAEPCSVCYRTKAIRHHNRQTHKANFSKKGIRKRSQMPYLVEGFRLWDKVLYKGQECFVSGRRSSGSFALKKLDGTSISKGVTFKKLRLLEPATNYLIERM

SEQ ID NO: 5989 - protein, 457 aa, unidentified
  REGION 1..457: note = Human gut metagenome
MDAVAVISASGKPLMPTNPMRARKLIKKGKAVIYKYRPLFTIRLTERTDGDIQTIEYCCDTGYQHIGLSIKSRKHEYVNEQRDLLPNETERHNDSRKYRKARRRRKLRHRACRRDNRHDNQICKDGYAPSIRNKRDQHISLYRSYTEILPVERAVFEMGQFDTQVLKAIEKGEPLPQGKDYQHGERYGYATLREAVFARDDYTCICCGKNSFKDKRILCVHHLGFRIGDRTNRLANLATVCTKCHTPKNHQPKGKLYNLKPELKDFKGATFMTMVRWDMLDKLKVVSKDIQVDVTYGAATKEARRDLKIKKSHANDAYCMGSFHPSHRTDLKRYEKCRRNNRVLSKFYDATYIDIRDGKKKKANALGCNRTKRRESRRSEKNERIYRGKKVSKGRIVLRTKRAVIRPGDIVYVGKKKYIVASSKNLGAQLKLADGSLLTTSKVTKIIHCGGWKTVTM

SEQ ID NO: 5990 - protein, 421 aa, unidentified; identical to SEQ ID NO: 4195
  REGION 1..421: note = Human gut metagenome

SEQ ID NO: 5991 - protein, 423 aa, Arthrospira sp.
MSNHIFVLDTNRKPLTPCKPGVARSLLKAGKASVFRRYPFTIILNKEVDANPEPLELKLDPGSKVTGIALKQGNHIIFAAELQHRGQQIKEALLSRRQLRRSRRNRKTRYRPARFLNRTRPEGWLAPSWQHRVDTLMTWVHRFRRLAPVGRITQELVRFDLQLMENPEISGVEYQQGELQGYEVREYLLFKWGRTCAYCGAQNVPLEVEQIQPRSKGGSDRVSNLTMACHSCNQAKGNGDIRDFLSGQPDVLSRLLRQAKSPLKDAAAVNSTRWALFKALKATGLPVTTGTGGQTKFNRLRLNLPKAHWLDAACVGPVESLEVLTSKPLLILAKGHGTRQMCGTNKYGFPTRHRSRRQIHKGFQTGDMVTVLVTAGKKIGSYLGRVLCRASGSFDITTASVRVAGISHKYCQPIHSTDGYAYA

SEQ ID NO: 5992 - protein, 439 aa, unidentified
  REGION 1..439: note = Human gut metagenome
MNYVYVLDKKGKPLMPTTRYGKVRRMLKSGQAKPVQNLPFTIQLTYIPKTTVCQPVIVGFDPGRTNIGISAVREDGTCLNLTHCETRNREIPKLMQKRKEHRQTSRRGERLVRKRLAKRHGTVSSKPLERILPGCEKPLKVKDIINTESRFNNRLRSEGWLTPTATQLLRTHVNLLKRMCQILPATDVVMEVNRFAFMQLDQPNVKKCGIDFQHGPLFGTDGIKEAVSIQQDGRCLLCEKRTIEHYHHIVPRAYRGSDTAENIAGLCAGCHKLVHTSREASNKLKHKKDGINKKYGGISVLNQVIPFLFMEFEQMFPGHTYATNGWNTKQFREKYRLAKDHSVDAYCIAASILPEPKVELPEDTHEIVQYRRHDRARIKRQTERTYCLGKKGVCKNRHKRFEQKTDSLEEYVEKYPNFLSNLTVKKSQRSYNDLKRVLP

SEQ ID NO: 5993 - protein, 419 aa, unidentified; identical to SEQ ID NO: 4877
  REGION 1..419: note = Human gut metagenome

SEQ ID NO: 5994 - protein, 412 aa, unidentified; identical to SEQ ID NO: 4932
  REGION 1..412: note = Human gut metagenome

SEQ ID NO: 5995 - protein, 442 aa, Lactobacillus sp.; identical to SEQ ID NO: 3826

SEQ ID NO: 5996 - protein, 468 aa, Moorena sp.
LAVFVLDRSGKPLMPCSEKRARLLLARGRARIHRLMPFAIRLVDRELHSSAAQPLRIKLDPGSKATGLALVRDTEHVDASTGEIRRGAVALNLFELVHRGRQISEALTARRAMRRRRRGTLRYRAPRFLNRTRPAGWLAPSLQHRVDTTLAWVKRLQRWAPITAASTEFVRFDMQALDNPEVSGIEYQHGTLFGYELREYLLEKWKRKCCYCDVHNVPLNIEHLVPRARGGSNRVSNLAIACVPCNIRKAAQPLNVFVKDKARLGRITAQVRRPLKDASAVNATRWALVNALRATGLPVETASGGRTKYNRSKLCIPKTHALDAVCVGEVSAVVAWRKPTVQVKCTGRGSYQRTRQDRYGFPRGYLMRAKRVHGFGTGDHVQADVPWGRKAGTHNGRVAVRATGSFNIQTHGQVVQGVAHRYCRVLQRADGYGYSRMATDKGEAGVGAATQPGLSLPGPKAEVSRAEG

SEQ ID NO: 5997 - protein, 421 aa, Aphanothece sp.
VLVIDSNKQPLNPCHPSVARKLLKSKNAAIFRQYPFTIVLKKEILDVVIEPIEIKIDPGSQTTGIALVQGDKVIFGAELSHRGSTIKDSLESRRSLRRGRRSRKTRYRQARFLNRKKPSCWLAPSLQHRVDTTLTWIKKLIKFAPIVGISQELVRFDLQQLENPEISGVEYQQGELVGYEVREYLLNKWDRKCSYCSIENVPLQVEHIHPKAKGGTNRISNLCLACESCNLKKGTKDINVFLAKKPDVLKRILSQAKRPLKDAAAVNSTRWTLFNALKNTGLPITTGSGGKTKFNRTRLNLPKQHWIDAACVGIVDTLKVLTNKPLLIKATGHGTRQSCRTDKYGFPSRYVPRFKFIKGFQTGDIVKAVVTKGKKIGTYVGRVAVRSIGSFNISSPNGLIQGISYKNCTHIHKKDGYSYAT

SEQ ID NO: 5998 - protein, 445 aa, Burkholderia sp.; identical to SEQ ID NO: 4102

SEQ ID NO: 5999 - protein, 470 aa, unidentified; identical to SEQ ID NO: 2825
  REGION 1..470: note = Human gut metagenome

SEQ ID NO: 6000 - protein, 421 aa, unidentified
  REGION 1..421: note = Human gut metagenome
MRGRPLMPCSPAKARHLLKAGKAVVRRRTPFTIQLRIATGETKQSVTLGVDAGAKHVGLSAATEKEEVFASEVELRQDITGLLAARLSLRRERRQRKTRYRAPRFLNRVRSKHKGWLAPSVENRIQAHMSRIDAICGLLPVTKIVIETVSFDIQKIKHPDVEGTDYQQGDQLGFWNVREYVLFRDGHVCQHCHGHAKDKILNVHHLESRQTGGDAPNNLITLCETCHKAYHAGKIKLKVKRAQSFRAEAFMGIMRWTLLDRMRKAHSGLPVENTYGYLTKNTRITLGLPKTHCVDAYCIAGNLKAVRRGVCLHQRQVRKHNRQIHKCTVLSKTLKDGTKIGYRKLNQTPHLVKNFRLFDKVRCLGQTGFIFGRRSSGYFDVRRLDGVKISSCISYKKLTLLEKRSTCLTELRKEDGASSPV

SEQ ID NO: 6001 - protein, 420 aa, unidentified
  REGION 1..420: note = Human gut metagenome
MQYVYVLSKHGEPMMPCSPGKARLLLKQQKACVVRRTPFTIKLLYGSAGYKQPITLGVDAGSKHVGLSASTEKRELYREEFTPRNDVVELLSTRRQNRRSRRNRKTRYRAPRFDNRVHSKHKGWLAPSVEVKIQEHITIIKRICKILPISLVRVETAEFDTQRLKAMLAGKPLPVGTDYQLGEMYDEYNVRQYVLKRDNYTCQCCGAHTTAKKLVKLHVHHLESRKTGGNAPSNLVTLCTTCHKNLHKGRVTLDGKERGKPLRDAAFMGIMRKTLMARLKEELPIPVQGTYGYITKMRREQNDIKKGHTNDARCISKHPLAEPCSVCYRTKAIRHHNRQTHKANFSKKGIRKRSQMPYLVEGYRLWDKVLYKEQECFVSGRRSSGSFTLKKLDGTSVSKGVTFKKLRLLEPATNYLIERM

SEQ ID NO: 6002 - protein, 408 aa, Bacillus sp.
MFVYTINQHGEPLMPCSPRKARILLKEKKAKVVKQTPFTIQLLYGSSGYKQPISLGVDAGTKHIGISATTEANVLLEGEVQLRTDIQELLATRLQFRRSRRSRTTRYRKPRFLNRKRDKGWLAPSVQNKVDSHIKMVHQLHSILPITAITVEVAQFDTQLLQNPLIEGEGYQHGVQMGFWNVREYVLYRDNHTCQRCKGKKKDPILNVHHIESRKTGGDSPSNLITLCETCHDEIHGKGLEHTITPLRKSLRDASHMTVMRWFIYEALKKIYPHIHLTYGYITKNTRIGNGLVKSHGVDARCISGNPLATPTDSIYLWKFVRKNNRQLHKATISKGGKRKSNKAVRLVKGYKLFDKVTYKGQDCFVFGRRSSGYFDLRLLDGTKIHASASYKKLTLKECASTLLCERR

SEQ ID NO: 6003 - protein, 420 aa, unidentified
  REGION 1..420: note = Human gut metagenome
MQYVYVLNKHGEPLMPCSPRKARLLLKQKKACVVKRTSFTIKLLYGSTGYKQPITLGVDAGSKHIGISATTEKHELYREEATPRNDVVDLLSARRAFRRSRRNRKTRYRAPRFNNRVHSKHKGWLAPSVEVKIQEHITLIKRVCRILPVTLVRVETAEFDTQRLKAMLEGKPLPVGTDYQLGEMYDEYNVRQYVLKRDNYTCQCCGAHSTKTKDVKLHVHHIETRRTGGNAPNNLITLCTACHKALHAGKVTLDGKKRGKPLKDAAFMGVMRKTLMERLLKELKIPVQGTYGYITKYLREKHSIPKSHTNDARCISKNPLAIPCDTCYYTKAVRHHNRQLHKATILKGGIRKANQAPYIVKGYRLWDKVSCNGTECFITGRRTSGYFALKKLDGTVISNSISYKKLRLLEVATNYITERR

SEQ ID NO: 6004 - protein, 415 aa, unidentified; identical to SEQ ID NO: 3582
  REGION 1..415: note = Human gut metagenome

SEQ ID NO: 6005 - protein, 442 aa, unidentified; identical to SEQ ID NO: 4418
  REGION 1..442: note = Human gut metagenome

SEQ ID NO: 6006 - protein, 406 aa, unidentified
  REGION 1..406: note = Human gut metagenome
MRGKPLMPCSPAKARHMLKAGKAVVVRRTPFTIKLTIATGETKQDVTLGVDAGARHVGISATTEKEEVFASEVALRQDITGLLADRLAFRRARRNRKTRYRSPRFNNRVRSKHKGWLASSVENRIQAHMSRIDAVCRLLPVTKIVIEAASFDVQKIKNPTIEGTDYQQGDQLGFWNVREYVLFRDGHICQHCRGRSKDPILNVHHLESRKTGGDAPNNLITLCETCHKAYHAGKIKLKVKRGQSFRAEAFMGIMRWTLLDRVRKTHPKLPVENTYGYLTKHKRIALGLPKTHCADAFCIAGNLKALRRGDFLFQQQTRKHNRQIHKCSILKGGVRTLNQAPFLVKGFRLFDKVRIGGQIGFVFGRRVRGTFNIRRLDKTVIGTDINCKKLSLLETRKTFLTELRKE

SEQ ID NO: 6007 - protein, 471 aa, Caldicellulosiruptor sp.; identical to SEQ ID NO: 3268

SEQ ID NO: 6008 - protein, 480 aa, unidentified
  REGION 1..480: note = Human gut metagenome
LYTKPLDNIGEGSLPPSGEINLKGMTFMVYVKSIDGKALMPTSNAKARKLLKQKKAKVVSLRPFVVKLTYKTKTEYTQKLNLGVDSGYSNIGFSVIDAKQEYIAGEVKLLEGMKKRLLEKASYRRIRRSRLRYRKARWNNRVKSKKKGWLAPSLKHKLDTHIKFIDYLKNILPIEKITIEVANFDIQKMKDDLISGIDYQNGDMFGFWNVREFVLHRDGHKCQNPNCKHKDKKEQILKVHHIRYRSEGGSDRPENLITLCSKCHTPANHKKGKFLYDWCVNGKKVRGFKDATFMSMIRWYLVNELKSKHNNVSITYGYITKNHRIQNGIEKSHLNDAFAIAKGTNQARTKDRFLVIQDRLKNRSLEKFYDSKIIDIRTEKKVSGGDLNCGRSTRNKNLNTENLRKYRGVKISKGQRRIRKQKYFYQPNDLVKYDGKVYTVKGTQNEGKYIALKEIKKVPKVELLIPYVFKKGLNWSYGLC

SEQ ID NO: 6009 - protein, 465 aa, unidentified
  REGION 1..465: note = Human gut metagenome
MSTCVCVLSNSGERLMPTFCLGKVRHLLKDGKAKIVKHHPFTIQLLYSSKTNIQPIEICEDVGYNYIGISVKGESHEYVSAQYDTLQDEKEHHDDCRKMRRTRRNKLRYRKPRFDNRKRNKGWLAPSLEHKKQLNISLIERYVSVIPITHATVEVGSFDTMLLQAIQKGEAKPEGADYQEGPRYNLATLREAVFYRDNYTCHVCGHKITNGAVLHMHHMFYWKGRHGYQLDELVTVCEKCHTPANHQKNGKLYGFGENVKFADLSGAAFMNTVRWQIVNELYAAFGKPFVTITYGAMTKEKRIALRLEKSHNNDAYAMGEFHPNLRCTFEHYEKVRRNNRILEKFYDSRYIDIRTGEIATGKALFNGRINRNHKKDSENLHKYRGKRTYAGHRALLRKKVNLNPGDLVSLNGETLIVHSTHTNKKGAVNVEFKTPAKNGRKSASLKKLKIVKAASSMHSAWEKVS

SEQ ID NO: 6010 - protein, 427 aa, Enterococcus sp.; identical to SEQ ID NO: 5630

SEQ ID NO: 6011 - protein, 432 aa, Moorena sp.
MKGVQTMQSRVFVINKHGKALMPCKPRKARILLRDGKAKVLKKEPFTIQLLYGSTGYKQDVSLGIDSGQRHIGLAVTSQDKVLFQSEVELRQDVKKLLDARRTYRRSRRNRKTRYRKARFLNRIAKKKDNWLPPSVLSKVNHNINWIKRLLSVLPKADLHIEVGKFDLQKMKNPAINGEGYQTVKQFVLARDNYTCQVCKKKGGKLKIHHIIYRSLGGTNTVDNLITVCSNCHTTKNHQTGILAKWCKDKKKVNKSYKGAAFMNILRRRLFTAFPQAKFQYGAWTTLQRADLDLTKSHYNDAVAISGIRKIKEKPTSIMMFKQFRKKKRSLHEATARKGRKTPNITSKRNAKNTKYAKGFWLNDYVKIKDSNKKGYISGFMSKGTNVRLRDIFGEYVSNNDKSYTSTKNISLINHSNNWQKQAIAEKQYIMG

SEQ ID NO: 6012 - protein, 377 aa, unidentified
  REGION 1..377: note = Marine metagenome
MQALELKLDPGSKVTGVALVLHGAKTTKAVWCANLHHRGSTIRDALLSRRGIRRGRRTRHTRYRAPRFLNRTRPAGWLAPSLQSRVDNVDNWTRKLNFLAPISRIASEDVRFDMQKLKNPEIDGAEYQRGTLFSYELKEYLLLKWKHQCAYCDAKDMPLEIEHIVPKSKGGSNSVTNLAIACRPCNEKKSNKSLSEFLKSKPEKITKINKQLKSPLKDAAINTIRKAIAECLKGYSLPIIFGTGGQTKYNRTTQSYERDHWIDAVCVGHNGEQVLIPQGIKPLIIKATSRGSRQMCRVNKFGFPRTKAKASKVVRGFATGDLVKAVVASGKKVGNYVGKVAVRTSGSFNITTKEEVIQGINWKYCTLIQFRDGYAYN

SEQ ID NO: 6013 - protein, 442 aa, unidentified; identical to SEQ ID NO: 4418
  REGION 1..442: note = Human gut metagenome

SEQ ID NO: 6014 - protein, 408 aa, unidentified; identical to SEQ ID NO: 3064
  REGION 1..408: note = Human gut metagenome

SEQ ID NO: 6015 - protein, 381 aa, Moorena sp.
MQNYVFVIDTNKQPLNPISPKKARRLLDKGKAAVFRMYPFTIILKTAIRQSRRCANANPTISPCQIKIDPGSKVTGFALVQDDQVIWGMELEHRGGLIKKKLESRSAVRRGRRNRNTRYRKPRFLNRKRPEGWIAPSLEHRVLTIETWVKRLIKFCPINEISVERVKFDTQKMQNPEINGIEYQQGDLAGYEVREYLLEKWGRECAYCGKQNIPLQIEHIHPKSKGGSDSAKPTLRERVNNLCLACEKCNQRKGNRPIEEFLKKKPGLLQKIKNKAKQPLSDAAAVNTTRNRIVKVLKEVKPVVTGTGAQTKYNRTKLGLSKQHWIDAACVGDIKTLVLRTSQPLLVTCKGQGGRQKAALNKYGYPIRHNPLKPIKGWKAW

SEQ ID NO: 6016 - protein, 458 aa, Lactobacillus sp.
LKGVGMMSEIKKVDYIYVVDSNGTPLMPTSRLGMVRRWLKTGQAKWFGNSRNTIQFVRPVTTNTQELTLGVEAGFHLGLSVVGNNREYYVSESLRKSEKDRITSRRELRRTRRNRLRYRKARFNNRRRKDGWLAPSIQHRLDFTIKEIKRLYKFLPITNLVVEVTPFDNQKLLNPDIQGWQYQKGKMYGFKTIKDYLLARDNYRDALDGKQYPASQLRVHHLVQRKDGGSNQPDNLVLLSDINHNQANHNNVILAKLRENRQKTLDYRGAYFMSILATRLSNYFEHYTTTQGYLTANLRQKYEIEKSHLNDAFVIAGGTDTTLRTNNVYSRQKLRNNNRVLQKFYDAKYIDSRDGKQKAGKELSSGRTRRSQELNYDNLRQLRKEKVKKGRVSIRRGHYQLRPHDVVLNTRTNRIETVKGVQNSGTVIKFQTGKTCSIKSVVSLYHVNGILEKKMKNI

SEQ ID NO: 6017 - protein, 420 aa, unidentified
  REGION 1..420: note = Human gut metagenome
MQYAYVLNKRGEPLMPCSPGKARILLKQQKACVVKRTPFTIKLLHGSAGYKQPITLGVDAGSKHVGLSASTEKRELYSEEFTPRNDVVELLSTRRQNRRSRRNRKTRYRAPRFNNRVHSKHKGWLAPSVEVKIQEHITVIKRICRILPITLVRVETAEFDTQRLKAMLAGKPLPVGTDYQLGEMYDEYNVRQYVLKRDNYTCQCCGAHTTAKKTVKLHVHHLESRKVGGNAPSNLITLCTTCHNNLHKGKITLDGKKRGKTLRDAAFMGIMRNTLLTRLRNELNIPVQNTYGYITKLLREQNDIKKSHVNDARCISKHPLAKPCSVCYRTKAIRHHNRQIHKAKILKGGIRKANQAPYIVKGFRLWDKVLYNEQECFISGRRSSGYFALRKFDGTTITNSISFKKLRLLEPATNYLIERK

SEQ ID NO: 6018 - protein, 418 aa, unidentified
  REGION 1..418: note = Human gut metagenome
MVYVLGQDGHPLMPTCRHGKVRRMLKSGMAKVVQRCPFTIQLQYESTTHTQKINLGIDAGSKTIGVSATTESKVLYESEVVLRNDIVELLSGRRALRRSRRNRKTRYRKPRLDNRRRPDGWLAPSIRQKIKTHVTVVENVMKILPVTKIIVETASFDIQKIKNPEIEGAEYQYGEQLDFWNVREYVLFRDGHTCQCCKGKSKDNILNVHHIESRKTGGNAPNNLITLCETCHKAYHKGVITLPKEIHRGMRFRDAAFMGIMRWAFYDRLKELYTPFGVEVINTYGYITKNTRIEHGLPKEHYVDARCISGNPAAKPLGHYYFQKKVRCHNRQIHKNTILKGGIKKRNQAAYLVKGYRLFDKVKYQNQEYFIFGRRSSGFFDIRTLDGTKVNKGSISCKKLQLVEKSKHYLTEQRKVTT

SEQ ID NO: 6019 - protein, 429 aa, Parasutterella sp.; identical to SEQ ID NO: 4241

SEQ ID NO: 6020 - protein, 441 aa, unidentified
  REGION 1..441: note = Human metagenome
VGVPQQCEIFLKRIYMVFVLNKSKKPLNMISHAEARILLRKKLAVIHKIYPFTIRLRDNSCGSQNRAYTVKIDPGSRHTGIAIVDNKDQVVMLAEIKHRGHIIKKSLYNRRVVRHNRRNRKTRYREARFLNRTRPEGWLAPSVKSRADNVINFIKKYKKLINISKVMIENVSFDVAQMSSNTKLWGNSYQQGNLYQNKLRSFIFSRSNGKCVYCGAKATEIDHIIPRANSGTNSTYNLAASCRVCNQKKSNKTLKEFGKIMNKDYSHLEPKKLPKDAAIVQSARNYMIKEITKLISNTTTHEAWMTTYNRDELGLPKEHYYDALSVGETPNSFNFLTNKVLTISAKGRGSRQMCRVNKYGFPRASAKASKFVEGFQTGDIVKAVVTKGLKIGEYLGRVAVKSDGYFNIQTKTKTIEGIGHKYCHLIQRGDGYSYNYERRAI

SEQ ID NO: 6021 - protein, 461 aa, Parasutterella sp.; identical to SEQ ID NO: 3646

SEQ ID NO: 6022 - protein, 431 aa, Escherichia coli; identical to SEQ ID NO: 4170

SEQ ID NO: 6023 - protein, 442 aa, unidentified; identical to SEQ ID NO: 2903
  REGION 1..442: note = Human gut metagenome

SEQ ID NO: 6024 - protein, 430 aa, unidentified
  REGION 1..430: note = Spirochaetales bacterium UBA772
MVYVFNIHGQPLMPTTRYGKVRRMLKEKQAKVIKRCPFTIQLLYENPNFVQEVSLGVDAGSKTIGISATTPTSELYAAEVKLRTDVVTNLSSRHECRRSRRNRKTRYRQKRFDNRKVNKQNGWLAPSICNKIVTHLTTVDKITKILPVSEIHVEVASFDIQKIKNPDITGIEYQQGEQLDFWNVREYVLFRDQYTCMCCKGRSKDKILNVHHIESRKTGGDAPNNLITLCETCHNDYHNGTIQLPKTIKRGMSFRDATFMGVMRWAFYNKVKEIYEAKGIPVSLTYGYITKNLRIKNNLPKTHYVDARCISGHSNVEPLGYYFLQKKVRCHNRQIHKLKFMKGHYRKRNKADYEILGFKLFDKVLFQNIECFIFGRRSTGRMDLRKLDGTHINASANYKNLKLLENSKHILTERRTGRFLPAAINRVSTS

SEQ ID NO: 6025 - protein, 428 aa, unidentified; identical to SEQ ID NO: 4606
  REGION 1..428: note = Human gut metagenome

SEQ ID NO: 6026 - protein, 456 aa, unidentified
  REGION 1..456: note = Human gut metagenome
LGKDSHSLRRGQFCQSLTVTTTRKETTSMYVYVLNQHGEPLMPCSPRKARTMLRDHKATVVRRTPFTIRLLHGCSGYTQRITLGVDAGSKFIGLSACTESKELFAAEVKPRNDVVDLLSTRRELRRSRRNRKTRYRVARFDNRVHSKHKGWLAPSVEVKIQEHITAIKRTCAILPISMVIVETAEFDTQRLKAMLEGKPLPVGTDYQLGEMYDEYNVRQYVLKRDNYTCQCCGVQSTDKAPVKFAVHHKESRHVGGNAPNNLITLCEKCHRLLHAGVITLDEDKRKRGKSFRDAAFMGIMRKTLIQRLRSELSVPAKETYGYITKLLRETHSIQKSHVNDARCIARVPDAKPSDTLYRIRAVRHHNRQLHKTNPIKGGIRKRNQAPYEVFGFHLWDKVLFNGQECFITGRRASGYFALKDFDGKKIHASASYKVLSVVETATSYLIERKTAVSSRD

SEQ ID NO: 6027 - protein, 431 aa, unidentified
  REGION 1..431: note = Human gut metagenome
MPNKVYVINKHGRPLMPCSPAKARHLLDAGKAKVKKRTPFTIQLVYGSSGYTQEVILGVDAGSKTIGMSASTTKEELLSAEVKPRNDVVDLLSTRREFRRARRNRKTRYRKPRFDNRVRSKHKGWLAPSVEVKIQEHITSIKRVCRILPVSKVVIETAEFDLQLLKAIADGKPVPQGEDYQQGEMYGHYNVRQYVLWRDGYTCQCCGAHTTKKKEVRLHVHHLESRKVGGDAPDNQVTLCESCHEKLHKGLIAEKDFKKRKRKSTRDATFMGIMRKTLMQRLCSELPIPVVKTRGYITKATREKLLVLPKSHTNDALAIAQGKQGFNVGYLPGIVQINKIYTIRPVRHHNRQLHKATILKGGIRKSNQTEKYVFGYCLFDKVQFNGQDCFIWGRRTTGIFTIKTINGKMIKDGISFKKLKPVEKSTGYLIA

SEQ ID NO: 6028 - protein, 406 aa, unidentified
  REGION 1..406: note = Human gut metagenome
MVYVQDIDGKPMMPTTRHGKVRRLLKAKKATVVNLCPFTIQLTYKSTDHKQPVTLGIDAGAKHIGFSATTEKEELFACETTLRTDIVDLLSMRLQNRRTRRSRLRYRKSRFNNRGSSKKKGWVAPSVKQRIDSHLNEVNEIHKILPITKIVIEVAQFDTQKMKNHDISGADYQNGEQLGFWNVREYVLFRDGHKCSHCKGKSKDPVLNVHHLESRKTGGDSPSNLITLCESCHKAFHKGEIELKKKRGKSLRDAAVMGIMKWKLYEELKSRYDNVSMTFGYITKHNRIKYGIEKNHTSDAFVISRNFNAKRIEYQYLKRLVRRHNRQIHKMKILKGGKKKNNQAPFEVFGFRLFDKVLYNNEIFFVYGRRKSGNFNIRDFNGENPKDVSHKKFKLIRGKRHPIILK

SEQ ID NO: 6029 - protein, 452 aa, unidentified; identical to SEQ ID NO: 3325
  REGION 1..452: note = Ga0315273_10005511

SEQ ID NO: 6030 - protein, 427 aa, Parasutterella sp.
LRVFVLNKRGKPLMPCSPAKARHLLKEKKAIVVRRTPFTIQLTIATGESKQPVSLGVDAGYKYVGLSASTEKAELYASEVELRQGITDLLSARRALRRARRNRKTRYRAPRFDNRIRTKRKGWLAPSVENRINAHLSRIETVLRMLPVTKITVETASFDMQLLKDPDISGKEYQEGEQLGFWNVREYVLFRDGHVCQHCHGRLKDPVLNVHHLKSRRTGGDSPGNLITLCETCHKALHRGEITLKAKRGQSFRAETFMGIMRREVLDRLKASHPKLEVQNTYGYRTKHARISNGIAKSHCADAFCIAGNLGAKRLGEFLFQKQTRRNNRQIHKLSILKGSLRKRNQAPFEVKGFRLFDKVAYQGEEGFIFGRRSSGFFDIRRLDGTRISAGINYKKLRLLEKRRTYLTEIRKEEARRPLPEGRGLRA

SEQ ID NO: 6031 - protein, 406 aa, unidentified
  REGION 1..406: note = Human gut metagenome
MVYVQDIDGKPMMPTTRHGKVRRLLKANKATVVNLCPFTIQLTYKSTDHKQPVTLGIDAGAKHIGFSATTEKEELFACETILRTDIVDLLSTRSQNRRTRRSRLRYRKPKFNNRVFSKKKGWVAPSVKQRIDSHLNEVNEIHKILPITKIVIEAAQFDTHKMKNPNISGIDYQNGEQLGFWNVREYVLFRDGHKCSYCKGKSKDLILNIHHIESRKTGGDSPSNLITLCETCHKEYHKGNIDLKVRRGKSLCGAAIMGIMKWRLYDELKSRYSNVSMTFGYITKYNRIKYGIEKSHTSDAFVISKNFNAKRIEYQYLKRLVRRHNRQIHKMKILKGGKKKNNQAPFEVFGFRLFDKVLYNNEINFIYRRRKSGNFNIRDFNGENPKDVSYKKLKLIRGKRHPIILK

SEQ ID NO: 6032 - protein, 414 aa, unidentified; identical to SEQ ID NO: 2588
  REGION 1..414: note = Human gut metagenome

SEQ ID NO: 6033 - protein, 470 aa, unidentified
  REGION 1..470: note = Human gut metagenome
MSVFVVGQSGYRLMPVSERKARLLLDGGKASVYRKVPFTIKLSYKTGSTTQPGYLGIDTGSQHIGGSVVREDGTVLHKEEISLRDSMTKRKLLEARASLRRGRRYRKTRYRHPKWKPKTRRVYCEVPDKKGRHWKKQKSTFTSGWPEGWLPPSLQSKTDHHIRWIRKLQGLLPEGYRLSIELGRFDPARMKDPGIHGDLYQKGPQYDYENVRAYVLDRDRYTCQVCKKKGGKLHVHHVLYKSHGASDNPQYLVTVCNACHTTANHLPGGILYQWMQEQKKFTRGLRDTTFMNILRKRLMKAFPDAVFTYGNITKVDRERFGLPKSHGNDATAIALVKTGILSVKDKEPVLYIQQVRRKKRSLHEETPRKGRKEPNRKAARNSKNTKAVTVTKRRSGKKVSVTACLFDRVELDGRKGWISGFTGTSCYVKDADDNYITASRKYNQVSLSKLRILHHCGNWVIGAKKSLGKG

SEQ ID NO: 6034 - protein, 442 aa, Lactobacillus sp.
MKHENANRVFLLNKDGKPLMPCCPRKARLLLKSGKAFVVKKYPFTIQLKYGSYGYKQKVSLGVDTGQRHIGFAIVSQNKVLHQSEVELRQDVHKNLYTRKIYRRSKRNRKTRYRQARFLNRVHGKRDGLWLPPSVKSKVSHNIAWIKRYLAVLPNPDLHIEVGKFDMAKMVNPDISGKQYQEGSLKDWKNYEYYVLARDEYTCQLCHKHGEGVKLVVHHIVYRSQGGTDRVDNLITLCTNCHTTKNHQPGGKLYKWMKAKKKVTKQLKGETFMNILRKRIMTTFPEASFQYGSQTYVDRKNLLLPKGHFMDAIAISGIKPVGQMPETVTMISQFRKKKRSLHEATARKGRKQPNMSSKRNEKNTKYACGLWLNDYVRVIGNHVKGYVKGFKSNGYYVYLTDGLGNYVLNNGKNYINGQQCRLIMHNGNWQKAEQKLSLYEFK

SEQ ID NO: 6035 - protein, 457 aa, Moorena sp.
LKGVGMMSEIKKVDYIYVVDSNGTPLMPTSRLGMVRRWLKTGQARWYGNSRHTIQFVRSVTTNTQELTLGVNPFHLGLSVIGNQREYYAAESLRKSEKDRITSRRELRRTRRNRLRYRKARFNNRRHKDGWLAPSIQYRLDFTIKEIKRLYKFLPITNLVIEVTPFDNQKLANPNIQGWQYQKGKMYGFKTIKDYLLARDNYRDALDGKQYPASQLRVHHLVQRKDGGSNQPDNLVLLSDINHNQANHNNGILARLKENRQKTIDYRGAYFMSVLATKLSNYFEHYTTTQGYLTANLRQKYEIEKSHLNDAFVIAGGTDTTLRTNNVYLRQKLRNNNRVLQKFYDAKYIDSRDDKKKTGKELSSGRTRRSRELNYTNLRQFRKEKVKKGRVSIRRGHYQLRPHDVVLNTRTNRIETVKGVQNSGTVIKFQTGKTCSIKSVVSLYHVNGILEKKMENI

SEQ ID NO: 6036 - protein, 417 aa, unidentified
  REGION 1..417: note = Human gut metagenome
MPCSPAKARLLLKERKAIVKRRTPFTIQLTIATGEAKQPVALGVDSGYKHIGLSATTEKAELYASEVELRQDITDLLSARLALRRSRRSRKTRYRAPRFDNRVASKREGWLAPSVENRIAAHMSRVEAVMRVLPVTAITVETAAFDTQLLKNPDITGAAYQQGEQLGFWNVREYVLFRDGHVCQHCRGKSKDPILNVHHIESRRTGGDAPNNLITLCETCHKAFHRGEIKLKVRRGKSFKAETFMGIMRRTLFERLKKAHPELNVRNTYGYLTKHKRISYGIAKSHCADAYCIADNLGAKRLEGFFFQKQTRKHNRQIHKLLILKGGLKKKNQAPYEVKGFRLFDKVICKGEEAFIFGRRTSGSFDVRRLDGTRISAGINYKKLRLLEPRTTYLTEFRKEAALPPLHKCRGVCAEFL

SEQ ID NO: 6037 - protein, 406 aa, unidentified; identical to SEQ ID NO: 2752
  REGION 1..406: note = Human gut metagenome

SEQ ID NO: 6038 - protein, 292 aa, Parasutterella sp.
LSRIEAVLRLLPVTKITVETASFDLQLLKNPDISGKEYQEGEQLGFWNIREYVLCRDGHVCQHCYGRSKDPVLNVHHLESRRTGGDSPGNLITLCETCHKALHRGEITLKAKRGQSFRTEAFMGIMRWEVLNRLKASHPELEVNNTYGYRTKHARIANDIAKSHCADAFCIAGNLGAERLGEFFFQKQTRRNNRQIHKLSILKGGIRKRNQAPFEVNGFRLFDKVACQGEEGFIFGRRSSGFFDVRKLDGTRISAGISYKKLHLLEKRRTYLTEIRKEEVLPPLPEGRGLRA

SEQ ID NO: 6039 - protein, 422 aa, unidentified; identical to SEQ ID NO: 5333
  REGION 1..422: note = Human gut metagenome

SEQ ID NO: 6040 - protein, 424 aa, Mastigocoleus sp.
MQNYVFVVDTNKKPVNPVTPRRARKLLEKGKAAVWRNYPFTIILKHAVTETVLKPLTVKIDPGSRFTGIAVSEGENVIWGAEVEHRGYQIKQTLESRRSLRRSRRNRKTRYRKARFDNRKRSPGWIPPSLMHRVLTTQTWVKRLIIFAPVAEIWIEKVKFDMHKMQNPEISGVEYQQGDLQGYEVREYLLEKWGRECSYCRKKDVPLQIEHIHPRSKGGSNRVSNLCLACEKCNQKKGNKPVEDFLRKKPELLKKIKSNANKPLKDASAVNSTRNKVVEVLFGLLPVKTATGAQTKYNRIRLKLEKQHWIDAACVGDVEKLVLKTNQPLRIKCNGHGTRQMCGTNKFGFPTRHRGRKQIHFGFTTGDIVKAVVTKGKKIGTYFGRLLCRKSGSFDIATKAGRVAGISYKFCTPIHKKDGYSYSF

SEQ ID NO: 6041 - protein, 492 aa, unidentified; identical to SEQ ID NO: 4486
  REGION 1..492: note = Human gut metagenome

SEQ ID NO: 6042 - protein, 431 aa, Moorena sp.; identical to SEQ ID NO: 2933

SEQ ID NO: 6043 - protein, 433 aa, unidentified
  REGION 1..433: note = Human gut metagenome
MPCHPARARELLKKGRARVHKVFPFTIRLTDRELENSSVQPMLIKIDPGSKETGIALVREEKNKEHHALYFINLQHRGQQIRNALYKRRCLRRSRRSRNLRYRSPRFLNRRRAEGWLAPSPQHRADSILSWVSRLRKITPVERISQELVKFDTQLTQNSKIEGIEYQQGELAGYELREYLLEKFGRKCIYCGADNVPLNIDHVIPKSKGGSNRASNLVLACVQCNQKKGSRSIEEFLKDKPEVLRQIKNQLKQPLKDAASVNATRWKLFNKLKSTDFPFEVGSGALTKFNRKKFGIPKAHWLDALCVGNVPSVTNWRNLNIKCCGRGAYQRTRTDKYGFPRGICMRQKKVYGFSTGDMVKAIIPKGKKKGVYVGKVAVRKTGSFNLQTSGQTIQGISYRYCRLITHSDGYSYSWKSCPLPPRVETRGILGEVR

SEQ ID NO: 6044 - protein, 415 aa, unidentified
  REGION 1..415: note = Human gut metagenome
MENKIEYCFVVDKNNRPLAPTKVNKGWYLIRKGRAKLKSKYPMVIQLEKEVEPDDEDESHMVCGIDDGSSHVGIAIVQKCPSKNKVVFKGTIEQRQDVKHLMDVRRGYRQYRRYHKRYRKPRFNNRASSKKTNRLAPSIKQKKDSILRVLYQLNKWINIKEYYLEDVAIDIRAMADGYKPYNWQYQKNNRLDENLRKATILRDSCKCQECGKTNTVLEVHHIRAKRFGGANTIGNLITLCSSCHQKTEGKEREFEERYFTKIKSKPKRFDYAMHVMQGKNYLRENIKQLGILHLTTGGDTANKRIEWNIEKSHSNDAICITNCFPDTCNIKEWMIKPMRRKSKAKTDNVLGIKHRDLVEYTYRNGETHKGYVTALYPHLNALNFQSPTKHCKKVNVRKCRLLWKYNKIYWLDSVI

SEQ ID NO: 6045 - protein, 424 aa, Enterococcus sp.
MRVFVRNMQGKPLMPCSNRKARLLLKEGKAKIYQYNPFTIQLCYASREYVQECHIGIDTGTKHIGMAVTSEDKVLFKGETELRQDVKSNLDTRRSYRRDRRNRKTRYRKARFLNRKKKESWLPPSIENRINHTFKWINKLVALLPNPKLHIEVGKFDVAKMINLDVQGVDYQHGQTYGFYNVRYFVFARDNYTCQCCKKSKNKILQTHHIIYRSNGGSNRADNLITVCTDCHTYENHQKGGILYQWQENRKKTKQYKEPPFMNVLRKRIFTQYPNSIITYGSETTPKRKELGLEKTHYNDAIVISGITKIKENPNEWLLIKQFRKKKRSLHEATARKGRKEPNRLQKRNSKNTPYYKGFYLNDKVRVFNQVGHITGFTSSGAYIKNSENEYITLPNKSYKQIGISNIRLLHHNNNWQYIHKHIA

SEQ ID NO: 6046 - protein, 419 aa, unidentified
  REGION 1..419: note = Human gut metagenome
MIYIRSKDGKALMPSERGGRIGYLLRHAKAHVVSRVPFTVQLDYESTTYTQEVSLGVDAGSKHIGVSASSEKKELLVAQVELRNDVVNLLSTRRELRRTRRNRKTRYRKARFDNRKKKDDWLAPSVEQKVDSHLKVIRLVHGLLPITNTTIEVAQFDAQKIKRPDIKGEEYQQGEQMCFWNVREYVFARDGHRCVHCKGKSKDPILNVHHLESRKTGGNSPSNLVTLCETCHKAYHRGEFELKIKRGNSLRDAAVMNNMRWAVYKRANEEFGNVHLTYGYVTKHTRIENGIAKTHAADAFCIAKNINAMRLRTFYLCRCVPRHSRALHVANPKKGGIRRSTIASHKIGKSRFLRFDMVRWKGKESFIFGSTNGRPVLRDIEGYKMHENASVNIKTIKFLKRLRNNILVEEKDFRKLNML

SEQ ID NO: 6047 - protein, 417 aa, unidentified
  REGION 1..417: note = Human oral metagenome
MFVYVISKDGQPLMPTTRFGKVRRLLKNKKAKVIRSCPFTIKLLYEPESLVVQEVVLGQDTGSKHVGTACVANDKVLYQSEVALRNDIKKKMDNRRSSRKNRRQRKTRYRKPRFLNRANSTKKGRLPPSVRNKVQSHVDEIEFCKKILPVSKIVFEVSQFDTHLMKNPELIDKKVKRWGYQQGFNYEYSSRREAALVRDNYTCQCCGKKHVRLEVHHIIFRCMGGSDDERNLITLCEKCHKAVHDGILILTKKLKRMKLKYATQMSIIRSQLLKFYPDAIETFGFVTKENRNNLNLQKGHFIDACVIASGGKKFEQSNWLFKKRRVAKQNRKLCKGVRGEIKLSTGKILGFKRFDKVKYLGEVCFIKSRRNSGFFTLMDIDNNIIDFRDSGGRKEPSYKLLERLNIQRSALCISQII

SEQ ID NO: 6048 - protein, 431 aa, Moorena sp.
MSKVFVLDTKKRPLDPINPAQARQLLRNKKAAIFRQFPFTIILKKSCPDSPVSSLRLKIDPGAKFTGMALVNDSTGEVVFAAELKHRGFAIRDALTSRRQLRGSRRARKTRYRQPRFLNRNLPEGWLAPSLQSRVENIKTWVERLRKLAPIEDISQELVRFDMQLMANPDIQGKEYQQGTLAGYESREYLLEKWGRQCAYCGVKDVPFQVEHIHPRAKGGSNSITNLTLSCEKCNTKKGTKDIKDFLKKDPLKLEKILKQAKRPLADAAAVNATRLVLLFVFKATGLPVETGSGGLTKFNRSQQNLEKTHWIDAACVGQSTPILNIKGVKPLLITANGHGTRQSCRTDKYGFPSRYVPRFKFVNGFQTGDIVKAVVTKGKKIGAYIGRVAVRTSGSFNISTISGLIQGISYKYCKSIHKKDGYEYGKSKIC

SEQ ID NO: 6049 - protein, 502 aa, unidentified
  REGION 1..502: note = Human gut metagenome
MSIIYVQDRHGKPLAPTTRGGHVRRLLDSKQARVVCGNPFTIRLMYGVDPCTQGFILGIDPGRTNIGVTVAAADGTCVFSAKAETNNKDVPKRMKERKAHRQASRQGERKRRQRRARKNGTCFGERKRILPGCKEPITNHYITNTEARFMNRARTKGWLTPTANQLLQSTISLVRKVCKFLPVTDVVLELNEFAFMAMDDPGIQRWEYQKGPLYGYGSVEAAVYTQQDGHCIFCEQAIAHCHHVIPASKGGSDTLENRAGLCGGHHDLVHKEQSWTDKLAELKAGMNKRYAALSVVNQIIPRLADELGKMFPGHAFATNGWSTKQFRDAHGIPKDHNTDADCIACSILENPTIKLPEKVYELRKFRRHDRAQISRMEDRNYYLPGADPKTGKPKKVLAAKNRHKRTEQKTDSLEEFRAAHPNDVGRLMVARGGPKHKDPNRVLPGAIFQVETRSGNVEQLVLQGSHGRDKNGQPLYLEFVGQGNFRPNRCKYVARGRGWQFV

SEQ ID NO: 6050 - protein, 512 aa, unidentified
  REGION 1..512: note = Clostridia bacterium
MSTVYVLNKDGKPLMPTTRCGHVRHLLKEQKARVVTSKPFTIQLLYEADDVVQSLYLGIDPGRTNIGVAVVKADGTAVFTAHLETRNKEIPKLMKKRKESRRARRTNGRRCRRQRRAKANGTISKKCVKHDTAQNGSVSKRAKEIGVIKRHLPGCEKDVLCIGIKNKEAKFSNRTRPEGWLTPTANQLLQTHINLVKKIRKFLPISDAVLEINKFAFMQLDNPNIQKWQYQQGPLYQKANLEEAVSEMQEHHCLFCKKPIAHYHHVVPQSENGSDTIGNIVGLCTKHHDLVHKDTAWQKKLAKKKTGLNKKYGALSVLNQIIPALTKELSSLFPKHFFATNGKSTYDYRSAHGVSKDHWLDAYCIACSVLPNDVCDSGINNRVPYELKQFRRHDRRALNNENMSRVYTLNDNVVATNRHKATKQTTDSLEEFRQNHPDDVCKLKVKEHHPTYRNMNRNYPGSVFLVGNQVHVMQGIAGSKDGEATTYKDTNANSIAAGKCKFVAKNSGILFV

SEQ ID NO: 6051 - protein, 440 aa, unidentified
  REGION 1..440: note = Human gut metagenome
QPVARPRRQILRVFVLNKRGQPLMPCSPAKARLLLKERKAIVKRRTPFTIQLTIATGEAKQPVTLGVDSGYKHIGLSATTEKAELYASQVELRQDITDLLSARLALRRSRRSRKTRYRAPRFDNRVANKREGRLAPSVENRIAAHMSRVEAVMQVLPVTAITVETAAFDTQLLKNPDITGAAYQQGEQLRFWNVREYVLFRDGHVCQHCRGKSKDPILNVHHIESRRTGGDAPNNLITLCETCHKAFHRGEIKLKVRRGKSFKAETFMGIMRRTLFERLKKAHPELNVRNTYGYLTKHKRISYGIAKSHCADAYCIADNLGAKRLEGFFFQKQTRKHNQQIHKLLILKGGLKKKNQAPYEVKGFRLFDKVICKGEEAFIFGRRTSGSFDVRRLDGTRISAGINYKKLRLLEPRTTYLTEFRKEAALPPLHKCRGVCAEFL

SEQ ID NO: 6052 - protein, 424 aa, unidentified; identical to SEQ ID NO: 3434
  REGION 1..424: note = Human gut metagenome

SEQ ID NO: 6053 - protein, 401 aa, Methanohalobium sp.
MRVFVISKNKKPLMPTRPAKARRLLKSGKAKVVRRTPFTIKLLYETTEYTQPVVAGMDSGSKHIGCAAVVNDEVLYQSEVELRDDVSRKMKDRADYRRNRRSRKTRYRKPRFDNRGNSKKENRIAPSIKNKVQSHDRERRFVESILPVKKWIVETASFDIHKITNPNVSGTGYQNGDLKGYYNIRTYVLHRDNYTCQKCKNRSKDPKLECHHIVFRSNGGTDRPDNLITLCETCHGKLHDGEFTINKKPSNTKHPTEMGIVRSQIRKLNWKFQETFGYITKYKREQKLNLEKTHYNDAVAICCDENNPNIQLSDVVYYKKHVSKGDYQQTKGVRSEKKIPTGKLHGLRKFDFIQTPDISGFVKGKRTSGNFSIMDIFGNTFKKNCRRISARCTTLTQQIQI

SEQ ID NO: 6054 - protein, 468 aa, Moorena sp.; identical to SEQ ID NO: 4274

SEQ ID NO: 6055 - protein, 431 aa, unidentified
  REGION 1..431: note = Human gut metagenome
MVYVLNKNGQPLMPTNRHGKVRRLLKINKAKVIKRCPFTIQLLYNTTNCIQNITLGVDAGSKHIGLSATTKDKVLFEADVELRNDITKLLEARRKFRHSRRNRKTRYRKRRFNNRVSSKHKGWLTPSIEHKIQTHFAMVEKVHKMLPITKIVVETASFDMQLLKAQMEGEPIPKGMDYQKGELTGWNIREYIFHRDNYTCQWCKGKSKDSILVTHHHAYWKGDHTNKPSSLITLCNTCNDSKYHKKEANRLWGWEPKITNSYKHAAFMNVMRWVFYNRLKEIYANVSMTYGYITKNTRIKNNLPKTHYLDARCISGNPKAKSSGEYFYYKKVRCHNRQLYKANTLKGGIRKRNQAEYTVKGFRLFDRVEYQNYEYFIFGRRASGFFDIRNLNGQKVNKGSVSFKKLKLKETNKTYLIERCTVDTRDDLAPL

SEQ ID NO: 6056 - protein, 433 aa, unidentified
  REGION 1..433: note = Human gut metagenome
FDMRDKVYVISRLGHPLMPCSPAKARHLLDDGKAKVAKRTPFTIKLLYGSTEYTQPVILGLDAGSKTIGLSASTTKEELFTAEVLPRNDVVENLSTRREFRRARRNRTTRYRKPRFDNRIHSKSKGWLAPSVEVKIQDHITSIKRVCAILPISKIVVETAEFDLQLLKAVQAGKPVPEGEDYQKGEMYGSYNVRQYVLWRDNYTCTCCGVKGTDKKPIKLHVHHFESRKRGGNAPDNYGTLCEGCHKKFHLGIITDISLKTRRRPSTRDAAFMGIMRKTLMQRLKAELSIPVAETKGYITKATRVEFLKLPKTHTNDALAIAQGRHGFGIREQAYVKSTNRIYTVRPVRHHNRQLHRATILKGGIRKLNQASKYIFGFRLYDKVLYQGRECFVWGRRTSGSLLLRSIDGTKVKDGVGYRNLTLLERSTNYLIA

SEQ ID NO: 6057 - protein, 424 aa, Fervidobacterium sp.
VISKDGKPLMPTKRHGKVRRLLKQGLAKVVNREPFTIQLLYETTNYTQPVTVGIDIGSKVVGVCAVTDKEEMFSAEIQLRQDISKLLLERRQHRRFRRYRKTRYRKPRFLNRRKEDGWLPPSLQWKVDAHVRIVNKLSKIIPITKVVVEVAPFDIQKVQNPDIEGEDYQNGPQKGFADVREYCLWRAGYKSELSGKTGVLEVHHIIPRSEGGADTPSNLIVLTTQEHKMLHEGKIKIPKSRLEQVKVLKDAAHVSAIGWYIVNKLKQNYQVAITYGSITKARRATYGLEKSHRDDAFVIAGGNIQERANEWYFGKLLRRQNRSLHKANPIKGGKRPLNTIKQVKGFRRFDRVECEGKIGIVSGLRSSGYFSISSLNGEKISDSVKYTKLRLLERAKTLMFERRERATCSWLKPRVSVARRYEIP

SEQ ID NO: 6058 - protein, 406 aa, unidentified
  REGION 1..406: note = Human gut metagenome
MVYVQDIDGKPMMPTTRHGKVRRLLKANKATVVNLCPFTIQLTYKSTDHKQPVTLGIDAGAKHIGFSATTEKEELFACETILRTDIVDLLSTRSQNRRTRRSRLRYRKPKFNNRVFSKKKGWVAPSVKQRIDSHLNEVNEIHKILPITKIVIEAAQFDTHKMKNPNISGIDYQNGEQLGFWNVREYVLFRDGHKCSYCKGKSKDLILNIHHIESRKTGGDSPSNLITLCETCHKEYHKGNIGLKVRRGKSLCGAAIMGIMKWRLYDELKSRYSNVSMTFGYITKYNRIKYGIEKSHTSDAFVISKNFNAKRIEYQYLKRLVRRHNRQIHKMKILKGGKKKNNQAPFEVFGFRLFDKVLYNNEINFIYGRRKSGNFNIRDFNGENPKDVSYKKLKLIRGKRHPIILK

SEQ ID NO: 6059 - protein, 429 aa, Ktedonobacter sp.
LSNVFVIDSDCKPLNPVHPGHARRLLKQGKAAVYRRYPFTILLRRVVEQPEVQPLRLKLDPGSKTTGIALVNDANGHVVFAAELEHRGHAMKDSLDSRRASRQGRRQRKTRYRKSRFQNRRRKKGWLPPSLESRLANILTWVARLCRYAPITAISQELVRFDLQLMENPDIAGVEYQQGTLQGYEVREFLLEKWERTCAYCGKQNVPLQVEHIHPRANGGTSRMSNLTLACEPCNTAKGTQEIEVFLKKKPDVLKRLLAQVKKPLKDASAVNSTRCALLERLKALGLPVECGSGGLTKWNRTTRGLPKTHWLDAACVGKSTPDVLSQKGVIPLRIKATGHGRRQMCVPDKYGFPKQHKERKKTFLGYQTGDLVKAITPKGTFEGRIAIRHRPSFRLEKVDIHPKYMRCVQRSDGYEYTQKGVRHAPPHS

SEQ ID NO: 6060 - protein, 428 aa, Moorena sp.; identical to SEQ ID NO: 4440

SEQ ID NO: 6061 - protein, 441 aa, Moorena sp.
MRVFVLDKNKKPLDPCKPARARILLKQGRAKVFRRYPFTIIMRDLEESECVTHNHQIKLDPGSQTTGLAIVQEKVIVWGAELTHRGLQIRDGLTSRRQLRRSRRNRKTRYRQPRFLNRKRPDGWLAPSLMSRVYNIITCGATPVGFPDLGNAHQERVKKLTRFCPITGISQELVRFDTQKMENPEISGTEYQQGTLYGYEVREYLLSKWNRKCAYCGVTDTPLEVEHIKPKSKGGSDRVSNLAIACRKCNQTKGNQEIEQFLSGKPDVIKRILSQAKRPLVDGAAVNSTRWKLYNELKALGLPIETGSGGLTKYNRCRQNLPKTHWLDAANVGKVDTLYIEVYQPLLISAKGHGTRQMCRTNKFGFPTRYVPRLKFVKGFQTGDIAKAVVTKGKKVGTYTGRIATRKTGSFNISTKHGLVQGISHQYCSIVHRKDGYAYSF

SEQ ID NO: 6062 - protein, 415 aa, Methylovulum sp.
MTTNAVFVLDTTKKPLTPCSPARARALLRDGKAAVYRTVPFTLILKVTLPDAVVKPITVKIDPGSKTTGLALVDADGRVLFGAELEHRDQAIKADLASRRALRRGRRGRKTRYRAVRFNNRVRPKGGLPPSLQHRVDACAVERVKFDMQLMKNPEISGVEYQQGTLAGYFVRKYLLEKWQRQCAYCGAKHVPLQIEHVQARANGGTNNNISNLALACKPCNTRKGTRPIQDFLNNKPEALTKILIQLKRLLADAAAVNATRNKLFAELLKTGLPVETGTGAQTQFNRTRLDYPKAHWIDAACVGESGATVTLNPDLKPLHIKATGHGTRQTVRTNKHGFPCAKAKTSKRVLGIKTGDFVRLLQTKGKYKGAFRSRVTAIKNASNFLSISLNGKQTWFSAKLATLIQLADGYSYGY

SEQ ID NO: 6063 - protein, 442 aa, unidentified; identical to SEQ ID NO: 3161
  REGION 1..442: note = Human gut metagenome

SEQ ID NO: 6064 - protein, 392 aa, unidentified
  REGION 1..392: note = Human gut metagenome
MRGQPLMPCSPTKARHLLRDKKAVVNRRTPFTIQLTIATGETKQDVTLGVDAGAKHIGLSASTEKEEVFASEVELRQDITKLLSARLAFRRSRRHRKTRYRAPRFLNRVHSKHKGWLAPSVENRIQAHMSRIDAICGLLPVTKIVIETASFDIQKIKNPDIEGTDYQQGDQLGFWNVREYVLFRDSHVCQHCRGRSKDKVLNVHHLESRQTGGDAPNNLITLCETCHKAYHAGKIKLKVKRGQSFRAEAFMGIMRWTLLDRVRKAHPGLPVENTYGYLTKHTRITHGLPKTHCVDAYCIAGNLKAVRRGVYLHQRQMRKHNRQIHKFTVLSKRLEDGTKIGYRKLNQSPYLVHGFRLFDKVREMSWANRLHLRAKIVRLLRCTEAGRRKAFP

SEQ ID NO: 6065 - protein, 431 aa, unidentified
  REGION 1..431: note = Human gut metagenome
MPNKVYVINKHGRPLMPCSPAKARHLLDAGKAKVKKRTPFTIQLVYGSSGYTQEVILGVDAGSKTIGMSASTTKEELLSAEVKPRNDVVDLLSTRREFRRARRNRKTRYRKPRFDNRVRSKHKGWLAPSVEVKIQEHITSIKMVCRILPVSKVVIETAEFDLQLLKAIADGKPVPQGEDYQKGEMYGHYNVRQYVLWRDDYTCQCCGAHATKKKEVRLHVHHLESRKVGGDAPDNQVTLCESCHEKLHKGLITAKDFKKRKRRSTRDATFMGIMRKTLMQRLCSELPIPVVKTRGYITKATREKLLVLPKSHTNDALAIAQGKQGFNVGYLPGIVQINKIYTIRPVRHHNRQLHKATILKGGIRKSNQTEKYVFGYCLFDKVQFNGQDCFIWGRRTTGIFTIKTINGKMIKDGISFKKLKLVEKSTGYLIA

SEQ ID NO: 6066 - protein, 512 aa, unidentified
  REGION 1..512: note = Human gut metagenome
MSTVYVLNKDGKPLMPTTRCGHVRHLLKEQKARVVASKPFTIQLLYETDDVVQLLYLGIDPGRTNIGVAVVKADGTAVFTAHLETRNKEIPKLMKKRKDSRRARRTNGRRCRRQRRAKANGTISKKCVKHDTAQNGSVSKHAKEIGVIKRHLPGCEKDVLCICIKNKEAKFSNRTRPEGWLTPTANQLLQTHINLVKKIQKFLPISDVVLEVNKFAFMRLDNPNIQKWQYQQGPLYQKASLEEAVSEMQEHHCLFCKNTIDHYHHVVPQHKNGRNTIDNIVGLCTKHHDLVHKETAWQEKLAKKKTGLNKKYGALSVLNQIIPALTKELSSIFPKHFFVTTGKSTYDYRAAHGVSKDNWLDAYCIACSVLPNDVCNSSINNRVPYELKQFRRHDRRALHKENMSRVYTLNGKKVATNRHKATEQTADSLEEFRQNHPDDVCKLKVKENHSEYRNPKRNFPGCVFLVGKRTHVMQGTSGSHNGKADGYYDTNGNSYSSGKCKFVAKNEGIVFA

SEQ ID NO: 6067 - protein, 420 aa, unidentified
  REGION 1..420: note = Human gut metagenome
MVYVISKRGKPLMPCTNVIARLLLKQDKAKVKRRCPFMIQLTYDATQYIQDCTLGVDTGSAHIGAAVVDADKRVLYMSETKIRNDITQKMDRRRAYRKVRRYRKARYRKTRWMNRKNSKRENRFSPTMVSKLHSHQKEIEFVKSILPITRLVIETGTFDCHLMKNPMLYNQKYRHWGYQQGPDYGFANTKAKVLNRDSYTCQCCRGKRKDSKLEVHHIVYRSKGGSNEEDNLITLCHTCHSALHHGMMKLKVNGKQKGNLRYATQMNSIRTQLLKLYPEAIETFGYVTKENLQLSGLPKTHCNDAVMIASGGNTVNFKTHSLCRKKCIPKGDYQQTKGIRSEQPLITKKIYGFRKFDKVQYLGKEYFIKGRMSTGYTVLMDIDGNKVDFSYMPKGYKTPKLKKCKRITARNGWMIQEIAI

SEQ ID NO: 6068 - protein, 458 aa, unidentified
  REGION 1..458: note = Human gut metagenome
VSYTARYVPAYRIKHITKKEVPYMVYVLDIDGQPLMPTSRHRKVRKLLNSHLAKVAKRCPFTIQLLYQSTKETQPVSLGVDAGSRHIGLAATTEQKVVYQEELVPRNDVVKLLSARRALRSSRRSRKTRYRKPRFNNRVHSKHKGWLAPSVEVKIQEHITAIKRICQILPISDIHVETAEFDLQRLKAMEEGRPLPVGTDYQLGEQYDFYNTRQYVLHRDEYTCQCCGTHDNNVKLHVHHIESRQTGGDAPNNLITLCEHCHKLLHAGKTILPKGKKRGKSYRDATFMGIMRKTLLERLRKEVDVPVSWTYGYITKYWRERAGLEKSHINDAICISKYPYAKPLDIYYLTKTVRHHNRQIHKSNFSKGGIRKRNQAPYLVKGFRLFDKVLYQGKSYFIFGRRATGYFDIRTLDGTKINKSSIGYRKLRIQDTAKAYLTETKKEARAIPHMNEFTCVLT

SEQ ID NO: 6069 - protein, 512 aa, unidentified
  REGION 1..512: note = Human gut metagenome
MSTVYVLNKDGKPLMPTTRGGHVRYLLKEKKARVVTSKPFTIQLLYETDDVVQPLYLGIDPGRTNIGVAVVKTDGTAVFTAHLETRNKEIPKLMQGRKKARRARRTNGRRCRRQRRAKANGTISKKCVKQTTAQNGSVSKRAKKIGVIKRHLPGCEKKVLCIGIKNKEAKFSNRTRPEGWLTPTANQLLQTHINLIKKIRKFLPVNDVVLEINKFAFMQLDNPNIQKWQYQQGPLYQKASLEEAVSEMQEHHCLFCKQSIVHYHHVVPQSENGSNTIGNIVGLCTKHHDLVHKDTAWQKKLAKKKTGLNKKYGALSILNQIIPALTKELSSLFPKHFFATNGKSTHDYRAAHDVSKDHWLDAYCIACSILPNDTCDKNINGRVPYKLKQFRRHDRRALHKENMSRVYTLDGKKVATNRHKAIKQTTDSLEEFRQRQPNDVCKLKVKEHHPEYRNPERNFPGCVFLVGKHTHVMQGTSGSHNGKADGYYDTNGNSYPSGKCKFVAKNKGIVFA

SEQ ID NO: 6070 - protein, 432 aa, unidentified
  REGION 1..432: note = Human gut metagenome
MLTGLLAEQVDPAGIRKGDTLKVFVLNMRGKPLMPCSPAKARHMLKAGKAVVARRTPFTIKLTIATGETKQDVTLGVDAGAKHVGISATTEKEEVFASEVELRQDITGLLADRLAFRRSRRNRKTRYRAPRFNNRVRSKHKGWLAPSVENRTQAHISRIEAICRVLPITKIVIETASFDIQKIKNPEVEGTDYQQGDQLGFWNVREYVLFRDGHVCQHCRGRSKDPILNVHHLESRKTGGDAPNNLITLCETCHKAYHAGKIKLKTRRGTSFRAEAFMGIMRRTLLDRVRKAHPELSVENTYGYLTKHKRIALGLPKTHCADAFCIAGNLNALRRGDFLYQRQTRKHNRQIHKCSILKGGVRKLHQAPFLVKGFCLFDKVKCTGRIGIIFGRRSTGSFDVRTLDGTRLSAGISSKKLTLLEKRTTFLTQLRK

SEQ ID NO: 6071 - protein, 512 aa, unidentified
  REGION 1..512: note = Human gut metagenome
MSTVYVLNSDGKPLMPTTRCGHVRYLLKKQKARVVTSNPFTIQLLYETDDVVQPLYLGIDPGRTNIGVAVVKADGTAVFTAHLETRNEEIPKLMQGRKKARRARRTNGRRCRRQRRAKANGTISKKCVKQTTAQNGSVSKRAKEIGVIKRHLPGCEKDVLCIGIKNKEAKFSNRTRPEGWLTPTANQLLKTHINLVKKIRKFLPISDVVLEINKFAFMRLDNPNIQKWQYQQGPLYQKASLEEAVSEMQEHHCLFCKKPIDHYHHVVPQHKNGSDTIGNIVGLCTKHHDFVHKDTAWQKKLAKKKTGLNKKYGALSVLNQIIPALTKELSSLFPKHFFATNGKSTHDYRIAHDVSKDHWLDAYCIACSVLPNDTCDRTINSRVPYELKQFRRHDRRALHKENMSRVYTLNGKSVATNRHKATEQTTDSLKEFRQRQPNDVCKLKVKEHHPTYRNMNRNYPGSVFLIGKQVHVMQGIAGSKNGEATTYKDTNANSIAAGKCKFVAKNSGILFV

SEQ ID NO: 6072 - protein, 406 aa, unidentified
  REGION 1..406: note = Human gut metagenome
VVYIQDIDGNPLMPTTRHGKVRRLLKSNKAIVINLCPFTIQLTYATSGYKQEVVLGVDAGTKHVGLSATTKSKELYASEIILRSDIVELLSSRRESRRRRRNRLRYRKPRFMNRIKTKKEEWVAPSVRQKIDSHLKIIGFVYSILPISKLIIEVAQFDTQKIKNPEISGKEYQEGEQLGFWNVREYVLARDGHKCQHCRGKSKDPILNVHHIESRKTGGNSPSNLITLCETCHKEFHKGKIKLKVKRSASIRDAAVMGIMKWRLYNKLKSLYPNVKMTFGYITKHDRINHGIEKSHVSDAFVISRNFNSCRLGYYYKRKLVRRHNRKIHKMKILKGGIRKRNQAPFKVFGFRLFDKVMFQGEEYFIYARRLSGQFNIRDINGENKKDVSCKKLRYIIHGLISIETG

SEQ ID NO: 6073 - protein, 414 aa, unidentified; identical to SEQ ID NO: 2588
  REGION 1..414: note = Human gut metagenome

SEQ ID NO: 6074 - protein, 415 aa, Moorena sp.; identical to SEQ ID NO: 5616

SEQ ID NO: 6075 - protein, 442 aa, Lactobacillus sp.; identical to SEQ ID NO: 2796

SEQ ID NO: 6076 - protein, 405 aa, unidentified
  REGION 1..405: note = Human gut metagenome
LDANNKQLTPTKEQKAWFLIRKKRATLVSKYPMVIQLKKKIPDKEICKDEVRCGIDDGGLHVGVALVQKCQTRNKVVFKGVIEQRNDVKHLIDVRCGYRRYHRYHKRYRSARFNNRNSSKREERIAPSILQKRQATIRVINQLNKWINITNYWLEDVAIDIRALTDGYKPYRWQYQKSNRLDENIRKAVILRDGCKCMECGKSNCRLEVHHIKSRRLKGSSTLDNLITLCTKCHQKTESVEELYMDRYFALLNSSDNKNLNYAQHVMIGKKWLREQLSNLGMLYLTNGGDTANKRIDWDIAKSHSNDAICITDLRPDTCEIKEWVIKPMRKQSKAKTDNVLGIKHRDLVEYTFRNETHRGYVTALYPEQNAINFRSPTKHCKKVNAKKCKVLWKYSKIYWLDNVG

SEQ ID NO: 6077 - protein, 413 aa, unidentified; identical to SEQ ID NO: 3014
  REGION 1..413: note = Human gut metagenome

SEQ ID NO: 6078 - protein, 415 aa, unidentified; identical to SEQ ID NO: 2674
  REGION 1..415: note = Human gut metagenome

SEQ ID NO: 6079 - protein, 406 aa, unidentified
  REGION 1..406: note = Human gut metagenome
MVYVQDIDGKPMMPTTRHGKVRRLLKDSKAVVVNTCPFTIKLMYKTSGYKQEIVLGVDAGTKHVGLSATTKSKELYSSEVILRSDIVELLSTRRESRRTRRNRLRYRKPRFNNRIKSKRTGWVAPSVRHRIDAHIRVIDNICSILPVSRVIVEVAQFDTQKIKNPDISGDEYQEGDQLGFWNVREYILARDGHKCQHCKGKSKDPILNVHHIESRKTGGDSPSNLITLCETCHKEFHKGNIKLKVSRGKSLRDAAVMGIMKWKLYEELKSRCDNVSMTFGYITKHNRIKYGIEKSHTSDAFVISRNFNAKRIERQYLKRLIRRHNRQIHKMKILKGGKKKNNQAPFEIFRFRLFDKVLYNNEILFVYGRRKSGNFNIRDFNGENPKDVSHKKLKLIRGKRHLIILK

SEQ ID NO: 6080 - protein, 414 aa, unidentified; identical to SEQ ID NO: 2588
  REGION 1..414: note = Human gut metagenome

SEQ ID NO: 6081 - protein, 341 aa, unidentified
  REGION 1..341: note = Human gut metagenome
LLSTRRESRRARRNRKTRYRKSRFNNRVRSKHKGWLAPSVEVKIQEHITSIKMVCRILPVSKVVVETAEFDLQLLKAIEEGKPVPQGEDYQQGEMYGHYNVRQYVLWRDNYTCQCCGAHLTKKKEVRLHVHHLESRKVGGNAPGNLVTLCDRCHEKLHKGLITEKDLKKRKHRSTRDATFMGIMRKTLMQRLCSELPIPVAETRGYITKATREKLLVLPKSHTNDALAIAQGKHGFNVGYLPGIEQIDKIYTIRPVRHHNRQLHKAIILKGGIRKSNQAEKYVFGYRLFDKVQFNGQDCFIWGRRTSGYFVVKTIDGKVIHNSASFKKLRLVERASNYLIA

SEQ ID NO: 6082 - protein, 327 aa, unidentified
  REGION 1..327: note = Human gut metagenome
LRVFVLNKRGKPLMPCSPAKARLLLKEKKAIVKRRTPFTIQLTIATGESKQPVSLGVDAGYKHVGFSASTEKAELYASEVELRQDVSDLLSARRALRQSRRNRKTRYRAPRFDNRIRTKRKGWLAPSVENRINAHLSRIEAVLRLLPVTKITVETASFDMQLLKNPDISGKEYQEGEQLGFWNVREYVLFRDGHVCQHCHGRSKDPVLNVHHLESRRTGGDSPGNLITLCETCHKALHRSEITLKTKRGQSFRAEAYMGLMRWEVLNRLKTSHPGLEVHNTYGYRTKYTRIVNGIDKSHCADAFCIAGNLGAERLGEFFFQKQTRRN

SEQ ID NO: 6083 - protein, 423 aa, Lactobacillus sp.; identical to SEQ ID NO: 5050

SEQ ID NO: 6084 - protein, 420 aa, unidentified; identical to SEQ ID NO: 3089
  REGION 1..420: note = Human gut metagenome

SEQ ID NO: 6085 - protein, 458 aa, Scytonema sp.
MMITNSIFILSKNGKILKPTTPARARILQSQGKARKLRLFPFTLILDKDVDENVEPYLELRCDPGSKFTGISLVDLNKNEVVWAMELEHRGDRIKMELIKRAGVRRSRRSRRLRYRKKRFDRKKPDGWLAPSLRHRLLTTQTWIKRLLKIAPIKSIAIESVKFDLQKLETPDIEGIEYQQGTLWGYTLREALLEHWGRECVYCGQTDVPLQIEHINARSKGGSDRFSNLTLSCEKCNQKKGNKPIEQFLKNKGEILQKIKSHQKKSLSDAAAVNSTRKAIFYQAQQFGLPVISGDGASTKMIRIQSGLPKAHWIDSACVGTSEIVKLRICQPLRLTCKGHGTRQVQRVNAKGFPAIASIKKNPITGKKEVKLVSKNQKYTHATAGDYVICNLLKDRKHIKAGIYRARVKTPTNRGVEVLISGHRIEIGLQHIKLIHRSDGYEYSFTTIDHDLLRFNAI

SEQ ID NO: 6086 - protein, 419 aa, Moorena sp.
MQNYVFVIDANKQPLNPIHPRKARRLLDKGKAAVFRMYPFTIIIKTAIPNPTISPCQIKIDPGSKTTGFAIVKNDQVIWGMELEHRGGLIKKKLESRRAVRRGRRNRNTRYRKPRFLNRRRPQGWLPPSLEHRILTTQTWVKRLIKFCPVNEIWVERVKFDTQKMQNPEISGVEYQQGELAGYEVREYLLEKWGRECTYCGQPNTPLQIEHIHPRSKGGSNRVSNLCLACEKCNIRKGDKSIEDFLKKKPDLLKKIKSLAKQPLKDAAIVNATRNKLVKVLRTLKPVVTGTGAQTKYNRTKLRLPKQHWIDAACVGGIETLVLRTSQPLLVTCIGQGGRQKAALNKYGYPTRHNPLKPIKGWTTGDLAKHQKLGIGKVTPRSKGSFGFTPLGTKGYKSCKPQDISAIHRKDGYIYSFCQ

SEQ ID NO: 6087 - protein, 414 aa, unidentified; identical to SEQ ID NO: 3441
  REGION 1..414: note = metagenome

SEQ ID NO: 6088 - protein, 426 aa, unidentified
  REGION 1..426: note = Cyanobacteria bacterium UBA11368
MSKSNFVFVLDAGLKPLAPCTSGVARSLLKAKKAAVYRRFPFTIVLFKQVASTPESIELKIDPGSKTTGFALVQNRKVIFGAELTHRGQTIKSSLESRRSLRRGRRTRHTRYRQARFLNRTRPKGWLAPSLQHRVDTTMTWVNKFIQLAPIGAVTQELVRFDLQQLENPEISGIEYQQGELAGYEVREYLLNKWDRKCTYCETENMPLQIEHIQPKAKGGTNRISNLCLACEKCNLKKGTQDLEQFLAKKPDLLRKIKHQAKRPLKDATAVNSTRLTLFNQLKETGLPVSTGSGGLTKFNRTRLGLAKTHWLDAACVGQVETLEILIDQPLLIKATGHGTRQMCRTDKFGFPCRYVPRNKFVQGFQTGDIVRAVVVTGKKAGTYVGRVAVRSTGSFNISTSEGLVQGISHKYCKTVHKKDGYNYAF

SEQ ID NO: 6089 - protein, 465 aa, unidentified; identical to SEQ ID NO: 3909
  REGION 1..465: note = Human gut metagenome

SEQ ID NO: 6090 - protein, 461 aa, unidentified
  REGION 1..461: note = Candidatus Anoxychlamydiales bacterium
KLVGRDTYTPTDTPLVRSNCDLSLNREETLSVSDLKTPSNNPEVDNSSIQEAIAAYVYVISFDGKALMPCSKAKARKLLKEGKALIAFHKPFTIKLVFKCENQVQKITLGIDPGYENIGLSAVSEKEELFSAEAKLRNNISKLLAKKKMYRRNRRNKLWYRKPRFLNRKKPKSLPPSLEHKLDSHLRVVKKILSFMPISKIHIEVANFDIQKIKNPQIESSQYQRGDLYGYQNLKAYLVERESAKCQLCSKKSTKGNSFRIHHIIPRKERGTNKANNLSLLHEKCHVKLHSKKLLHILKKNKQFKPETFMSSIRWKLVSELKKLCNDVSLSFGYITKIKRNYLKLEKEHHTDAFVIAKGSYEKRARPSLFLQKRKNNRSLQLTRKGLKLSIRRQRYKIQPKDVVQVKNKKYEVIGIFNKGCWLRVKDRTKIFNFQISRVEKHYYNNGWQFIPSLKERVFLP

SEQ ID NO: 6091 - protein, 423 aa, unidentified
  REGION 1..423: note = Human gut metagenome
VPIMVYVLNINGQPLMPTNRHGKVKCLLKQGKAKVIRRCPFTIKLLYQSTAYTQNLTLGVDTGSGIIGTAVSKDNGNIVYMSETIVRNDITDKMTQRAKYRRNRRNRKTRYRKTRWLNRKNSIKTDRFSPTMQSKLHSHVKEIEYIKSILPVTTMVLETGQFDTHLMKNPSLANPNVKHWGYQKGANYGFENTKAMVLNRDNYTCQCCKGKHKDSKLEVHHIVFRSQGGSDEESNLITLCHTCHKDLHSGKINPKLKGKVKSTLKYATQMNSIRKQLFRVYPDAIETFGYVTKANRLALGIDKKHYYDACTIATQGNIFIVKSNLYKKKCVSDGDFQKTKGIRSEQSIVTDKICGFRKFDKVKYFGKEYFIKGRMSTGYAILMDIDGHKINFSTMPKGYKIPKLSNCKRVTARTSQMLQAVVI

SEQ ID NO: 6092 - protein, 431 aa, unidentified; identical to SEQ ID NO: 4535
  REGION 1..431: note = Human gut metagenome

SEQ ID NO: 6093 - protein, 330 aa, unidentified
  REGION 1..330: note = Human gut metagenome
LRVFVRNKRGKPLMPCSPAKARLLLKEKKAIVKRRTPFTIQLTIATGETKQPVSLGVDAGYKHVGLSASTEKAELYASEVELRQDITDLLSARRALRQSRRNRKTRYRAPRFDNRIRTKRKGWLAPSVENRINAHLSRIEAVLRLLPVTKITVETASFDLQLLKNPDISGKEYQEGEQLGFWNIREYVLCRDGHVCQHCYGRSKDPVLNVHHLESRRTGGDSPGNLITLCETCHKALHRGEITLKAKRGQSFRAEAFMGIMRSEVLNRLKASHPELEVNNTYGYRTKHARIANDIAKSHCADAFCIAGNLGAERLGEFFFQKQTRRNNRQ

SEQ ID NO: 6094 - protein, 367 aa, unidentified
  REGION 1..367: note = Human gut metagenome
GLAATTEKKVIYQEELIPRNDVVKLLSARRTLRRSRRSRKTRYRKPRFNNRVHSKHKGWLAPSVEVKIQEHITAIKNVCKILPVSEIHVETAEFDLQRLKAMEEGKPLPVGTDYQLGEQYDFYNTRQYVLHRDGYTCQCCDAHDKDVKLHVHHIESRQTGGNAPNNLVTLCEHCHKALHEGKIELPKNKKRGKSHRDAAFMGIMRNTLLERLKKEVDVPATMTYGYITKYWREKAGLEKSHINDAICISKHPYAKPLDAYYLTKAVRHHNRQIHKANFSKGGIRKRNQAPYLVKGFRLFDKVSYQSKEYFIFGRRATGFFDIRTLDGTKVNKGSVSYKKLRIQDTAKAYVKEVRAIPHMNEFTCVLA

SEQ ID NO: 6095 - protein, 411 aa, unidentified
  REGION 1..411: note = Human gut metagenome
MVYVQDIDGKPMMPTTRHGKVRRLLKDNKAVVVNTCPFTIKLTYKTSDYKQEIVLGVDAGTKHVGLSATTKSKELYSGEVILRNDIVELLSTRRESRRTRRNRLRYRKPRFENRVKSKRLGWVAPSVRHRIDAHIRIINNVCSILPVSRVIVEVAQFDTQKIKNPEISGKEYQEGDQLGFWNVREYVLARDGHKCQHCKGKSKDPILNIHHIESRKTGGDSPSNLITLCETCHKEFHKGNIKLKVKRGKSLRDAAVMGIMKWRLYDKLKSLYPNVRMTFGYITKYNRINHGIEKSHVSDAFVISRNFDSERLGYYYKRKLVRRHNRQIHKMKIPKGGKKRMNQSPFKVFGFKLFDKVMFQGEERFIYARRLSGQFKIKDIDGNNERNISYKKLRYVSHGLISIKTNLFLSQ

SEQ ID NO: 6096 - protein, 465 aa, unidentified; identical to SEQ ID NO: 3306
  REGION 1..465: note = Human gut metagenome

SEQ ID NO: 6097 - protein, 414 aa, unidentified
  REGION 1..414: note = Human gut metagenome
MPCSPAKARLLLKEKKAIVVRRTPFTIQLTIATGESKQPVSLGVDAGYKHVGLSASTEKAELYASEVELRPDVSDLLSARRTLRQSRRNRKTRYRAPRFDNRIRTKRKGWLAPSVENRINAHLSRIGAILRLLPVTKITVETASFDTQLLKNPDISGKEYQEGEQLGFWNVREYVLFRDGHACQHCYGRSKDPVLNVHHLESRRTGGDSPGNLITLCETCHKALHRGEITLKAKRGKSFRAEAFMGIMRWEVHNRLRALHPGIEVSNTYGYRTKHARIANGIAKSHCADAFCIAGNLGAERLCEFFFQKQTRRNHRQIHKLSILKGGIRKRNQAPFEVKGFRLFDKVACQGEEGFIFGRRSSGFFDVRKLDGTRISAGISCKKLHLLEKRGTYLTEIRKEEALPPLPEGRGLRA

SEQ ID NO: 6098 - protein, 483 aa, Oscillochloris sp.
MTPFWCVCQPEALSSAITPAWGKGGRSQARQARCALSRRTFSRKGLRSNPSMVFVLSHDRKPLDPTSHRRAGLLLKKGRAAVFRRYPFTIILKDRLAAESVTHPHRLKLDPGSKTTGIAVVAEDFGKLSRGTTGRVVWAGELTHRGQAIRDALLSRRASRRSRRQRKTRYRQPRFLNRRRPEGWLAPSLQHRVDTTLTWVRRLLRVVPVAAISTELVRFDTQLRENAEISGVEYQQGTLAGYEVRQYLLEKWGRRCAYCGAKDTPLQVEHILPRARGGSDRISNLSLACEPCNIKKGTQTAEEFGHPDIQAQARRPLKDAAAVNTTRWAMYQHLVATGLPVEVGTGGRTKFNRTCLGLEKAHWHDAACVGASTPEALDVRGVRPLLITATGHGNRQMAGLNTYGFPIRHRQRVKRHFGFQTGDIARATVTTGTKQGVYSGRVAVRASGAFNITTTSAKIQGLNHRFFRTVHRSDGYTYTAALG

SEQ ID NO: 6099 - protein, 414 aa, unidentified; identical to SEQ ID NO: 5166
  REGION 1..414: note = Human gut metagenome

SEQ ID NO: 6100 - protein, 512 aa, unidentified
  REGION 1..512: note = Human gut metagenome
MSTVYVLNKDGKPLMPTTRGGHVRHLLKEQKARVVRAKPFTIQLLYETNDVVQPLYLGIDPGRTNIGVAVVKANGTAVFTAHLETRNKEIPKLMQDRKKARRARRTNGRRCRRQRRAKANGTISKKCVKQTTAQNGSVSKRAKDIGVIKRRLPGCEKDVLCIGIKNKETKFTNRTRPEGWLTPTANQLLQTHINLVKKIQKFLPISDVVLEVNKFAFMRLDNPNIQKWQYQQGPLYKKESLESAVSEIQEHHCLFCKKPIDHYHHVVPQHKNGSNTIANIVGLCAEHHNLVHKDAAWQKKLAEEKVGLNKKYGALSVLNQIIPALTNELSSLFPKHSFVTNGKSTYDYRAAHGVSKDHWLDAYCIACSVLPSNVCDSNINNHMPYVLKQFRRHDRRVLNNENMNRVYTLNNKAVAINRHKAKDQKTVSLEEFRKEHPDDVCKLKVKEHHPTYRNMNRNFPGSVFLVGKQIHVMQGIASSKDGKATKYNDTSATAIAAGKCKFVAKNTGILFV

SEQ ID NO: 6101 - protein, 512 aa, unidentified; identical to SEQ ID NO: 4031
  REGION 1..512: note = Human gut metagenome

SEQ ID NO: 6102 - protein, 512 aa, unidentified; identical to SEQ ID NO: 4090
  REGION 1..512: note = Human gut metagenome

SEQ ID NO: 6103 - protein, 442 aa, unidentified; identical to SEQ ID NO: 2903
  REGION 1..442: note = Human gut metagenome

SEQ ID NO: 6104 - protein, 436 aa, Selenomonas sp.
MNFPLTLARRKILLQGKVTEMSKEYSFVLDANGKRLDPTIMQNAWRLVRQKKAVLVSKYPMTIQLKKVVEDENRDEVRMGIDDGAEHVGIALMQKCQTRNKVLLKATMEHRSDVSKKMTIRREYRRYHRYWKRHRPARFDNRGNSRKAGRLAPSIQQKRQAVLRIADNLLRLIRIDSFYLEDVSIDIRALTDDYQPYRWQYQKSNRLDENLRKAAILRDGGGCRECGKSDCRLEVHHIMPRRENGRNTIGNLITLCSSCHDKTKGREEQFEESYYAMIRSKGNHTGLKYVAHVMAGKTRLRAELSARLPLILTTGGDTANKRMDWGIAKSHSNDAICITGLEPESIDVQEWTLKPIRHQSKAGMEEVLGFRHHDIVAYTFKNGERHEGYVTAMYPADGKRCASLNFRSPTKHCKRANAKKCKLICRPSKIYWLQCA

SEQ ID NO: 6105 - protein, 412 aa, unidentified
  REGION 1..412: note = Microcoleaceae bacterium UBA10368
MKPPWVHPGTARHLLNSREAAVFRRFPFTIILKAARPQTPVQDLELKLDPGSKVTGIAIKQGNNIIFGAQLQHRGQQIKDALLSRRQLRRGRRNRKTRYRQARFLNRTRPDGWLAPSLQHRVLATMTWVRKFIRLAPITCLAQELVRFDLQLMQNPEISGVEYQQGELKGYEVREYLLEKWNRRCAYCSVENVPLEVEHIQPKSKGGSSRVSNLTIACHGCNQGKGHQDIRDFLSGKPDLLNRILKQAKSSLKDAAAVNSTRWVVFNHLKETGLPVTTGTGGQTKFNRTRLELSKSHWLDAACVGRIDGLEVLTSKPLLILAKGHGTRQMCGTDKHGFPTRHRSRTQIHKGFQTGDIVKATVTAGKKIGSHVGRVLCRASGSFDIATTAARVSGISHKYCKPIHKKDGYSYG

SEQ ID NO: 6106 - protein, 442 aa, Lactobacillus sp.; identical to SEQ ID NO: 3826

SEQ ID NO: 6107 - protein, 415 aa, unidentified; identical to SEQ ID NO: 5047
  REGION 1..415: note = Human gut metagenome

SEQ ID NO: 6108 - protein, 440 aa, Fervidobacterium sp.; identical to SEQ ID NO: 2395

SEQ ID NO: 6109 - protein, 465 aa, unidentified; identical to SEQ ID NO: 3070
  REGION 1..465: note = Human gut metagenome

SEQ ID NO: 6110 - protein, 424 aa, Enterococcus sp.; identical to SEQ ID NO: 5552

SEQ ID NO: 6111 - protein, 424 aa, unidentified
  REGION 1..424: note = Human gut metagenome
MASMQYVYVLNKHGEPLMPCSPGKARLLLKQQKACVVKRTPFTVKLLYGSAGYKQPVALGVDAGSKHVGLSASTEKRELYREEFTPRNDVVELLSTRRQNRRSRRNRKTRYRAPRFDNRVHSKHKGWLAPSVEVKIQEHITVIKRICRILPITLVRVETAEFDTQRLKAMLKGKPLPVGTDYQLGEMYDEYNVRQYVLKRDNYTCQCCGAHPTEKKPIRLHVHHIESRHVGGNAPNNLITLCVACHKALHEGKITLDKGKKRGKPLRDAAFMGIMRNTLLARLKDELNIPVKQTYGYITKLLREKNKIPKSHVNDARCIAKAPNAKPCDTMLYTRALRHHNRQIHKAKILKGGIRKKNQAPYLVKGFRLWDKVRYNGEECFITGRRSSGYFALKKYDGTVISNSASYKKLMLLEAATNYITERS

SEQ ID NO: 6112 - protein, 434 aa, Solobacterium sp.
MKVFVLNKHGNPLMPCNPKKARLLLKQQKAVVAKQMPFTIRLLYGSSGYKQPVSLGVDAGSKHIGIAATTEKEVLFAEELTPRNDVVNLMSVRRQNRRSRRNRKTRYRKVRFDNRVHAKRKGWLAPSVEVKIQEHITAIKHVQQILPITEVHVETAEFDTQRMKAVEEGRPLPVGTDYQLGEMYDSYNVRQYVLKRDNYTCQCCGKHGDGVKFHVHHLESRKTGGNAPGNLITLCEDCHKAIHAGTKTLHARKAKRGTKSLRDAAFMGIMRKTMLERLRAEPGIPVNGTYGYITKLYRDLYRIEKSHINDAIVISKHFTAVPDDVWYFAKAVRRHNRQIHKNKILKGGIRKRNQAPHVVKGCRLFDSVKYARNTYFIFGRRTSGQMDIRTLDGAKVSGGSLSFRKFSVQHCNAGALLERRKAIPPTNESVGFLA

SEQ ID NO: 6113 - protein, 536 aa, unidentified; identical to SEQ ID NO: 2718
  REGION 1..536: note = Human gut metagenome

SEQ ID NO: 6114 - protein, 420 aa, unidentified; identical to SEQ ID NO: 2812
  REGION 1..420: note = Human gut metagenome

SEQ ID NO: 6115 - protein, 393 aa, Moorena sp.
MQNSVFVLDTNKKPLNPVHPGQARRLLKEGKAAVFRRYPFTIILKEEVTKSSKNITLKLDPGSKFTGIALVQNNQVIWGAELQHRGQQIKDSLTSRRQLRRGRRGRKTRYRQARFLNRKRPEGWLPPSLQHRVDTTLTWVKRLIRYCPINSISVELVKFDLQKQENPEISGVEYQHGTLYGWEVREYLLAKFNRTCQYCGATDKPFEVDHIHPRSKGGSDRVSNLTLACHDCNQSKGNQDIKDFLKGKTDLVNRILKQAKTPWKDAAAVNSTRWKLFNSLKELGLPVETGSGGLTKFNRKRLKVPKSHWQDAACVGKVPSNLVFKTNQPLLIKATGHGTRQRCRPNKFGFPKSHAPKAKFFQGFQTGDLVSASIPKGKFAGQYVGRIARAISS

SEQ ID NO: 6116 - protein, 535 aa, unidentified
  REGION 1..535: note = gut metagenome
MYRLTTEAGIPLIPERLHDTKKRKEASRMSEYIYVIGVDGDPQMPTKRKRHVEQLLQTGRARVFRQVPFTIQLTYKNEPVLQSVTIAEDPGRSNVGMAVVSLSGELLSAAIVQTRNKEIVKLMEKRKQHRRASRNGERRARQRLAKKYHTMITAGFLMRKLPMYGKDKRVRCNVIKNTESRFCNRKRENGWLTPSAEHLVRTHINLIHKMQKFLPITDVAIEINRFAFLSLEDPSISGVDFQNGPLKGYDDLNAAVEDLQDGHCLMCNSPIEHRHHIVPRSMQGSNTIGNIAGLCCKCHERVHKDTRFEDRLKKKKAGLDKRYAAVSVLNQAIPFICKRLEQEFEKEHVHYCSGRDTGMVRRSFGYHKTREEQLHEVDAWCIAVLALQHVPEKAPEFDHVHEILQFRRQDRSRIKAQTSRAYYHEGKKIAKNRKKAEGQRDDSLQEWRKRQVERYGKEQTRKMISQLEVKESIRRYNRLDRLMPGAVFYYQGVRYVMRGQHSNGQYLQAVGMGSKDFPAKKCKIVANNEGLVFVS

SEQ ID NO: 6117 - protein, 431 aa, unidentified
  REGION 1..431: note = Human gut metagenome
LNRVFVLSKTGKALMPCHPARARQLLHSKKARVKRLYPFTIQLTQRSEGYIQPIELKFDPGSKQTGIGLVLHGKNRLSAIYAAVLTHRGQEIKSNLDSRRMIRRARRNRKTRYRQARFLNRVRSKHKGWLAPSVQSRVDNIVEWSKRFMRYAPVGFITVESVKLDMQKMENAAVEGIEYQRGTLFDYEVKEYLLEKYHYSCVYCEAKNVPFEKEHVIPRSRGGSNRISNLVLSCRSCNEKKDNLLIEEFLKDNPVLLKKIKAQLKSSLKDAAAVNITRKQIVKELSDLNVPVLTGTGAETKYNRVSQGYKKEHYIDALCAGTTGAKVYISKKLKPLLIKKERRNNRQMCLVDKYGFPRGKAKGPKIVRGFKTGDIVKAVVLKGKKKGTYKGKVAVRSSGSFNIKVKQGVVEGIGWKNCIMLYRFDGYSYAY

SEQ ID NO: 6118 - protein, 413 aa, unidentified
  REGION 1..413: note = Ga0315284_10047810
NSEENHRKHKSGSDLRVLNIVYVLNKRGNALMPTCQSRARRLLKSNKAKVVKIYPFTIQLIITTGETRQDIVLGVDMGSKYIGISAISNKQELFVAEVILRTDIVELLSEKRMYRRGRRNKHHWYRKPRFNNKKKSSGWLAPSIQHKVDSHIRVINKISKLLPISKVILETAKFDIQKINDINISGKEYQNGVQKDFWNIREYVLYRDNHTCQHCKKENLILNVHHIVTRKKGGDRPDNLITLCEKCHNKFHKGKIKLDIKIKNNFKSQTCMSIIRKFIIDKLKKNYVVEETYGYLTKAKRIENKIEKSHINDAFVIANGNKQIRINSYLISQKRKNNRCLQTNRKGFAPSIRRKRYNIQPLDVVKIKDVNYIVKGMFNKGEYVRVVNSNIKVFNFKIGLIEKYFNRGTLIWK

SEQ ID NO: 6119 - protein, 419 aa, unidentified
  REGION 1..419: note = gut metagenome
MLVYVLNKNEKPLMPCKPQKARKLLRDGKAKVIRREPFTIQLLYGSSGYQQHITLGVDAGSKHIGLSATTSKKELFAGEVKLRTDIVNLLSTRRQFRRNRRSRKTRYRKSRFLNRVHSKHKGWLAPSIENKIQCHLSIVAKLHKVLPIDKVIVETASFDIQKIKNPNISGVEYQQGEQLGFWNVREYVLFRDGHKCQCCKGKSRDKVLNVHHIESRKTGGNAPNNLITLCETCHKGYHNGTVKLPKTIKRGMIFRDSSFMGIMRWSFYNRLKEIYPNVSMTFGYITKKVRIEAELPKEHYVDARCISGNALAKPLGMCYFIQKVRRNNRQIHKAKILRGGIRKNNQAPFVVKGFRLFDRVLYNNKPYYIFGRRSSGAFDIRTLDGEKVNKGSINCKYLRLINFRKTWLIERRSVVSSHD

SEQ ID NO: 6120 - protein, 428 aa, Enterococcus sp.; identical to SEQ ID NO: 4335

SEQ ID NO: 6121 - protein, 456 aa, unidentified
  REGION 1..456: note = Human gut metagenome
LLMVAVVDLFGKPLMPTNEYRARRLLKQKKAKIFGYRPFTIQLTERKSTEIQPIELCMDTGYIHIGISAKSERHEYLGMQIDTLTDEKLKRDDKRQYRRQRRNRKRYRAPRFDNRRRKEGWIAPSLEHKKEIHIDAIQRICKVMPITDITLEMGNFDTHVLKAVEEGKPLPQGSDYQHGERYGIATLREAVFLRDGYKCQCCEKSVKDGAILHVHHIKYRSQGGTNRMSNLITVCDKCHTPKNHKPGGKLWNWKPKLAEFKGASYMTSIRWTLYNEVTALLPNSSVHITYGAKTKESRRKLDIKKSHVNDAYVMGLFCPKHRTKPVYFKKKRRNNRVLEKFYDAKYIDSRDGKKQSGQELFNGRINRNHRKDSENLHLYRKQKVTKGKRSIRNKHYPIQPHDILLYQKKKYENAGCHNNGSRVILLPEKKSVALKQLTIYQYAGGYYRVPYESNKK

SEQ ID NO: 6122 - protein, 417 aa, unidentified
  REGION 1..417: note = Human gut metagenome
MPCSPAKARLLLKERKAIVKRRTPFTIQLTIATGEAKQPVTLGVDSGYKHIGLSATTEKAELYASEVELRQDITDLLSARLALRLSRRSRKTRYRVPRFDNRVASKRKGWLAPSVENRITAHMSRVEAVMRVLPVTAITVETAAFDTQLLKNPDITGAAYQQGEQLRFWNVREYVLFRDGHVCQHCRGKSKDPILNVHHIESRRTGGDAPNNLITLCETCHKAFHRGEIKLKVRRGKSFKAETFMGIMRRTLFERLKKAHPELNVRNTYGYLTKHKRISYGIAKSHCADAYCIADNLGAKRLEGFFFQKQTRKHNRQIHKLLILKGGLKKKNQAPYEVKGFRLFDKVICKGEEAFIFGRRTSGSFDVRRLDGTRISAGINYKKLRLLEPRTTYLTEFRKEAALPPLHKCRGVCAEFL

SEQ ID NO: 6123 - protein, 525 aa, unidentified
  REGION 1..525: note = Human gut metagenome
LCPSRSRVQATDVSTEKETLTWCRKYSELCRRATTPVWEGRTFAYLPQSQKEEPAMSVFVVGLNGCRLMPVSERKARLILNDGKASVYRKVPFTIKLNYKTGSTTQPGYLGIDTGSQHIGVSVVREGGTVLHKEEIGLRDSMTKRKLLEAKASLRRGRRCRKTRYRHPKWRPKTKRVYCEVPDKKGRHWQKQKNTFISGRPEEWLPPSLQSKTDHHIRWIKKLQGLLPEWYRLSIELGRFDPARMKDPEIHGNLYQKGPQYDYENVRAYVLDRDRYTCQVCRRKGRKLHVHHILYRSQGASDTPQYMATVCSSCHTTENHLPGGILYQWMQEQKKFTRGLRDATFMNILRKRLMKTFPDAVFTYGNITKVDREKLKLPKSHGNDATAIALVRTGVTSVQDEEPVLYIQQVRRKKRSLHEETPRKGRKEPNRTAARNSKNTKAVTVTKRRDGKKVSVTACLFDRVELNGKKGWITGFTGKACRIVDTEGNYVAATDKYTQVNISSIRILHHTGNWVTGLKWNVGKR

SEQ ID NO: 6124 - protein, 465 aa, unidentified
  REGION 1..465: note = Human gut metagenome
MSTCACVLSKNGERLMPTIRLGKVRHLLKDGKAKIIKHHPFTIQLLYDSETNIQPIEICEDVGYNYIGISVKSQSHEYVSAQYDTLQDEKACHDSCRKLRRSRRNRLRYRKPRFDNRKRGEGWLAPSLRHKKELNVNVVKMYCAVMPITHATVEVGSFDTMLVKAIEEGKATPESADYQKGPRYNLATLREAVFYRDNYVCKVCGRKATEGAILHMHHMFYWKGRHGNSLSELITVCEKCHTPANHQKSGKLYGFGENVKFADLSGAAFMNTVRWQIVNELYAAFGKDFVTVTYGAMTKEKRIALRLEKSHNNDAYAMGEFHPNCRCAFEHYEKVRRNNRILERFYDSRYIDIRTGEIATGKELFNGRINRNHKKDSENLHKYRGKRTYAGHRALLRKKVNLNPGDLVSLNGEVLIVYGTHTDKKGAVNVEFKTPAKNGRKSASLKKLKIVKATSSIHPAWEKVS

SEQ ID NO: 6125 - protein, 473 aa, unidentified; identical to SEQ ID NO: 3562
  REGION 1..473: note = uncultured beta proteobacterium

SEQ ID NO: 6126 - protein, 457 aa, unidentified
  REGION 1..457: note = Human gut metagenome
LKGVGMMSEIKKVDYIYVVDSNGTPLMPTSRLGMVRRWLKTGQAKWFGNSRNTIQFVRLVTTNTELTLGVDAGFHLGLSVVGNNREYYVSESLRKSEKDRITSRRELRRTRRNRLRYRKARFNNRRRKDGWLAPSIQHRLDFTIKEIKRLYKFLPITNLVVEVTPFDNQKLLNPDIQGWQYQEGKMYGFKTIKDYLLARDNYRDALDGKQYPASQLRVHHLVQRKDGGSNQPDNLVLLSDINHNQANHNNGILAKLKENRQKTLDYRGAYFMSILATRLSNYFDNYTITQGYLTANLRQKYEIKKSHLNDAFIIAGGTDTTLRTNNVYSRQKLRNNNRVLQKFYDAKYIDSRDGKKKTGKELSSGRTRRSQELNYDNLRQFRKEKVKKGRVSIRRGHYQLRPHDVVLNTRTNRIETVKGVQNSGTVIKFQTGKTCSIKSVVSLYHVNGILEKKMKNI

SEQ ID NO: 6127 - protein, 450 aa, unidentified
  REGION 1..450: note = Human gut metagenome
VGDFGRGAAPQTTACSCLHYLLSQIKNTIERIAYQMVYVLNVNGVPLMPTDRHGKVRRLLKSKQARVVKRTPFTIQLLYDTPTCVQPLTLGVDAGSKHIGLSVSSENKEVYAGQIEPRQDVSKKLDERRQYRRSRRNRLRYRKPRFNNRTASKPKGWIAPSIACKIESHVAVIGQLHQILPITEIVVEVADFDTQKILNPDIQGKEYQTGPLSNSNLRQYTFARDGYTCQWCKGKSKNKILHVHHWNYWRGDHTDKPSSVITLCDVCNDSKNHKKDGFLYGWEPKITNNLKDAAFMNISRWALYNRLKEIYPNVRLTYGYITKVVRSDHGLEKSHVNDALCIANHPNATRLLYCYLIKKNRVHNRQLHKANKLKGGRLKLNQAPHLVKGYRLNDIVKCNGQNYVITARRRTGYFQLKNFITGEKLPSVSYKKLELLEKAKNYTTERIARN

SEQ ID NO: 6128 - protein, 420 aa, unidentified
  REGION 1..420: note = Human gut metagenome
MQYVYVLNKHGEPLMPCSPGKARLLLKQQKACVVKRTPFTIKLLFGSAGYKQPITLGVDAGSKHVGLSASTEKRELYSEEFTPRSDVVELLSTRRQNRRSRRNRKTRYRVPRFDNRVHSKHKGWLAPSVEVKIQEHITVIKHICKILPISLVRVETAEFDTQRLKAMLAGKPLPVGTDYQLGEMYDEYNVRQYVLKRDHYTCQCCGTHNTAKKVVELHVHHLESRKTGGNAPSNLVTLCTTCHKNLHKGRVTLDGKERGKPLRDAAFMGIMRKTLMVRLKEELPIPVQGTYGYITKMRREQNDIKKSHVNDARCISKHPLAEPCSVCYRTKAIRHHNRQTHKANFSKGGIRKRSQMPYVVEGYRLWDKVLYKGQECFVSGRRASGSFTLKKLDGTRISKGVTFKKLRLLEPATNYLIERM

SEQ ID NO: 6129 - protein, 406 aa, unidentified; identical to SEQ ID NO: 5200
  REGION 1..406: note = Human gut metagenome

SEQ ID NO: 6130 - protein, 421 aa, unidentified; identical to SEQ ID NO: 4195
  REGION 1..421: note = Human gut metagenome

SEQ ID NO: 6131 - protein, 414 aa, unidentified
  REGION 1..414: note = Human gut metagenome
MPCSPAKARLLLKEKKAIVVRRTPFTIQLTIATGEAKQPVSLGIDAGYKHVGLSASTEKAELYASEVELRQDITDLLSARRALRQSRRNRKTRYRAPRFDNRIRTKRKGWLAPSVENRINAHLSRIETVIRLLPVTKISVETTSFDMQLLKNSDIAGKEYQESEQLGFWNVREYVLFRDGHVCQHCHGRSKDPVLNVHHLESRRTGGDSPGNLITLCETCHKELHRGEITLKAKRGQSFRAETFMGIMRWEVLDRLKASHPKLEVQNTYGYRTKHARIVNGIAKSHCADAFCIAGNLGAERLGEFLFQKQTRRNNRQIHKLSILKGGIRKRNQVPFEVKGFRLFDKVACKGEEGFVFGRRSSGYFDVRKLDGTRISTGISYKKLRLLEKRQTYLTEIRKEEALPPLPEGRGLRA

SEQ ID NO: 6132 - protein, 414 aa, unidentified; identical to SEQ ID NO: 2588
  REGION 1..414: note = Human gut metagenome

SEQ ID NO: 6133 - protein, 442 aa, unidentified; identical to SEQ ID NO: 3161
  REGION 1..442: note = Human gut metagenome

SEQ ID NO: 6134 - protein, 440 aa, Fervidobacterium sp.
MVFVLDKNKKPLMPCSEKRARLLLSRGRAVVHKMHPFTIRLKDRTVQQSELQPLRLKLDQGAKVTGLSVLREDGDVAETVFLCEIHHKTDIKQKLDARRAVRRSRRNRKTRYRKPRFLNRRRPEGWLPPSFNARADQLINAVRKLTKLLPISAISIEDAKFDTQKLQNPEISGIEYQRGTLFGYEVREYLLEKWGRRCAYCGRSDVPLEIDHIVPRSRGGTDRVSNLTLACHECNQKKSNKTAAEFGCPHIEERARQTYKQAAFMNSIRSYLSKSLSSFGIPVEYGTGALTKANRIRLGFPKEHYFDACCVGESTSSEIRITQSYVQIWCAVGRGTRQMCNTDKFGFPRGHRQRCKKHFGFQTGDIVKAIVPRGKYAGIWMGMVAVRGSGFFDIKDKNGKRVCQGIRYKYCKLIQTADGWQYSKTKTNYSISHTTEVACI

SEQ ID NO: 6135 - protein, 416 aa, unidentified
  REGION 1..416: note = Human gut metagenome
MVYVLDKNGQPLMPTDRHRKVRLMLQSGQAKVIKRCPFTIQLNYDSGHQTQEISLGIDAGSKHIGVSTTTKIKVLYEVDVELRNDIVDLLSSRRELRRGRRNRKTRYRQAKFNNRRRGNGWLAPSIRQKIGTHLTVVENICKMLPISRIMVETASFDIQKIKNPDIQGAEYQQGDQLEFWNVREYVLFRDGHTCQCCKGKSKDKILNVHHIESRKTGGNAPNNLITLCETCHTGYHKGTVQLPKAIKRGMRFKDAAFMGIMRWAFYEALKQQYEPVGTPVHNTYGYITKHTRIAYNLPKEHYVDARCISGNPEASSNGEYYYQKKVRCHNRQIHKLTVLKGGIRKQNQATYLVKGYRLFDKVSYQGKGYFVFGRRQSGFFDIRTLSGEKVNKGSLSCKKLKFIATRTYYLTERRAV

SEQ ID NO: 6136 - protein, 475 aa, unidentified
  REGION 1..475: note = Human gut metagenome
MVAVVTSTGKPLMPTSAYRARKLLKKGRAVIFKYRPYFTIQLVDRADGEVQEVEYKSDTGSVHVGISVCTEKKELLSEQRDLLENEPEHHNDRKKNRRTRRNRKRYRKPRFDNRKKKPQEGHEKWLPPTLLHKMEVQVRLFREFCRVVPVTSACFEMGKFDTQALKAVSKGEPVPEGEGYQNGERYGTDTLRAAVFLRDGHTCRFCGRSVKDGAILHVHHVGYWKGDRTNRPANLASACEQCHTPANHGKNGILYGKEPEFKTLKDASYMTSVRWIMLDEIKKAAPGVQVSVTYGVTTKRKRQELHLPKSHVNDAFSMASFHPKKRSDTEYWKKIPRHDRVLQKFYDAIYLDTRDGSEKKGSELSNGRISRNHKKDSENLHQYRGHKVSKGHNSIRRGASSLKPGSIVMYKGEKMTVHGTHTRYVKGKDGKTAKKVNVQFTCPASDGKKSASLEKCTPVSRVYNTGWKRYWPDKK

SEQ ID NO: 6137 - protein, 387 aa, Ammonifex sp.
MAPTFVGYPKVFVVDAEGKPLLPCHPARARKLLKSGKAEVLRGSPFTIKLKYPVSNPVGSLRAKVDDGSRYVGIALVNEHTGEVVFRGVLVQRGDVVRLLTLRREYRRGRRYRIVRHRPCRNRARQQVVPFPSVRQKKEAIYRVLADLAKIAPISGVDVELVSAGVKNPALPGKSTREKVLNRDGACVLCGSTRRLQRHHLVPRSKGGTDTPENQVLLCAECHRELHAGEAALDRRGKTFAWVAHAVLGKAYLLALLSRFGEVRVAEGWQTKEWRESLGLPKSHTNDALSLFLPGGPLKVFGPEYLIWPLRRRKWKNNPTKTCEEKNGFRHWDVVRAVRAGKVVFGCVRSLKARAMTLRTAKDDNFEVSYSKARLLHRPRGLAYMPA

SEQ ID NO: 6138 - protein, 456 aa, unidentified
  REGION 1..456: note = Human gut metagenome
MSTCVCVLSNSGERLMPTFRLGKVRRLLKDGKAKIVKHHPFTIQLLYDSKTNTQPIEICEDVGYNYIGISVKSKSHEYVSAQYDTLQDEKEHHDDCRKYRRTRRNRLRYRKPRFDNRKRSEGWLAPSLEHKKQLNIRLIERYVSVIPITRATVEVGSFDTMLLQAIQKGESKPEGVDYQKGPRYNLATLREAVFYRDNYTCQVCGRKIADGAILHMHHMFYWKGRHGYQLDELVTACEKCHTPANHQKGGKLFGFGEDKEFANLSGAAFMNAVRWQIVNALYATYGKEFVTITYGAMTKEKRIALQLEKTHSNDAYAMGDYYLAHRCVFRHYQKRRRNNRVLEKFYDATYIDARTGNKAKGKELFNGRINRNHKKDSENFHKYRSKKVSKGRRSIRRQRYAIQPYDTVRLEGKTYITSGCHNKGTRLLIPANGKSKSVAISKVQVVCHAGAWIQII

SEQ ID NO: 6139 - protein, 421 aa, unidentified
  REGION 1..421: note = Human gut metagenome
MRGQPLMPCSPAKARHLLKAGKAVVKRRTPFTIQLRIATGETKQNVTLGVDAGAKHVGLSATTEKEEVFASEVELRQDITGLLAARLSLRRDRRHRKTRYRAPRFLNRVRSKHKGWLAPSVENRIQAHMSRIDAVCRLLPVTKIVIETASFDIQKIKDPSVEGTDYQQGDQLGFWNVREYVLFRDGHVCQHCHDRSKDKILNVHHLESRQTGGDAPNNLITLCETCHKAYHAGKIKLKVKRGQSFRAEAFMGIMRWTLLDRVRKAHPGLPVENTYGYLTKHTRITHGLPKTHCVDAYCIAGNLKAVRRGVYLHQRQMRKHNRQIHKFTVLSKRLEDGTKIGYRKLNQSPYLVHGFRLFDKVRCLGQIGFIFGRRSSGYFDVRRLDGVKLSPSISWRKLTLLEKRSTYLTELRKQDGASSPV

SEQ ID NO: 6140 - protein, 419 aa, unidentified
  REGION 1..419: note = Human gut metagenome
MVYVISQDGKPLMPCSDPIARLLLKQGKAKVKKRDPFTIKLTYETTNYTQGLTLGVDTGSGTIGTAVSKDNGDIVYMSEVVVRNDITDKMTQRAKYRRNRRNRKTRYRKARWLNRASSIKKDRFSPTMQSKLHSHVREIEYIQSILPITEMVFETGQFDMQLMKNPSLANPKVRPWGYQKGANYGFENTKAMVLNRDNYTCQCCKGKHKDSKLEVHHIVFRSQGGSDEESNLLTLCHTCHKDLHSGKINPKLSGKVKGNLKYATQMNSIRKQLFRFYPNAIETFGYVTKANRLHLGVDKEHYYDACTIATQGNAFNVKSNLYKKKCVSDGDFQKTKGIRSEEPIVTDKICGFRKFDKVRYFGNDYFIKGRMSTGYAILMDIDGNKIDFSTMPRGYKTPKLSNCKRITARSTVMTQVKVV

SEQ ID NO: 6141 - protein, 391 aa, unidentified
  REGION 1..391: note = Human metagenome
VVRRTPFTIQLTIATGESKQPVSLGVDAGYKHVGLSASTEKAELYASEVELRKDITDLLSARRALRQSRRNRKTRYRAPRFDNRIRTKRKGWLAPSVENRINAHLSRIEAVLRLLPITKITVETASFDMQRLKNPDISGKEYQEGEQLGFWNVREYVLFRDGHVCRHCHGRSKDPVLNVHHLESRRTGSDSPDNLVTLCETCHKALHRGEITLKAKRGQSFRAQAFMGIMRREVLNRLKASYPELKVHETYGYLTKHARIANGIVKSHGADAFCIAGNLGAERLGEFFFQKQTRRNNRQIHKLSILKGGIRKRNQAPFEAKGFRLFDKVACQGEEGFIFGRRSSGSFDVRKLDGTRISAGISCKKLRLLEKRRTYLTEIRKEEALPPLPEG

SEQ ID NO: 6142 - protein, 392 aa, unidentified
  REGION 1..392: note = Human gut metagenome
LQFYRKEHGIMQYVYVLNKHGEPLMPCFPGKARLLLKQQKACVVKRTPFTIKLLYGSAGYKQPITLGVDAGSKHVGLSASTEKRELYREEFTPRSDVAELLSTRKQNRRSRRNRKTRYRAPRFDNRVHSKHKGWLAPSVEVKIQEHITVIKHICRILPISLVRVETAEFDTQRLKAMLAGKPLPVGTDYQLGEMYDEYNVRQYVLKRDHYTCQCCGAHNTAKKVVKLHVHHLESRKTGGNAPGNLITLCATCHENLHKGKVTLDGKERGKPLRDAAFMGIMRKTLTARLKEELPIPVQGTYGYITKMSREQNDIKKSHTNDARCISKHPLAEPCSVCYRTKAIRHHNRQTHKANFSKGGYRKRSQTPYIVEGYRLWDKVLYKGQECFVSGRR

SEQ ID NO: 6143 - protein, 341 aa, Pseudoalteromonas sp.
VALRTDVSKKMQQRAMYRRTRRNRKLRYRPARWLNRASMRKEGRLAPSLKSKLDSHLREKKQVEAILPISHWKVETASFDIHKITNPTVTGAGYQQGAQLGYYNVKAYVLQRDNYKCQSGRKTKHSAKLHVHHKVFRSQGGTDAPSNLITLCETCHNDLHAGKFELKVKRSKTKHATEIGIVKVQLKQCWDFEETFGYVTKFKREQVLGLPKTHYYDAVSICCENGELVQQAKHVLRKRHVASGDYQQTKGVRSEKWIPVGKLFGLKKHDFVQTPQGTGFVKGKRSSGYFALETILGNKVHACANIKKNTVRISARTTTLTQPMEAARILVTKVPSILAVN

SEQ ID NO: 6144 - protein, 457 aa, Tolypothrix sp.; identical to SEQ ID NO: 3020

SEQ ID NO: 6145 - protein, 412 aa, Sharpea sp.
MVYVLNISGQPLMPTDNCAKVRILLKSGKARVVRRCPFTIQLMYDTTSYTQEIALGVDSGSRHIGLSATTKDKVLFESDVEQRNDIVDLLSTRRQNRRARRSRKTRYRKQRFSNRKRKDGWLAPSVQNKVDTHLTAIRRVHEILPVSRIIVEVASFDIQKIKNPDISGTEYQQGEHMGFWNVPEYILFRDGHECQCCHGRSGAKVLNVHHIESRKTGGNAPNNLITLCETCHTGYHNGTVKLPKTIHRGMTFRDAAFMGIMRWVLYDKLRVIYPDVHLTYGYITKSIRIENGLPKDHYIDARCISGNPNAKSDGTMYCQKKVRCHNRRIHKNGILKGGIRKRNQAPYEVMGFRLFDKVKWKGRECFIFGRRSTGRMDLRLLDGTKVNASVGCKNLHLLEMRKNMLIEKRRNR

SEQ ID NO: 6146 - protein, 450 aa, unidentified
  REGION 1..450: note = Wastewater metagenome
VAVFVLERTGKALMPCSEKRARLLLARGRACVHRLVPFVIRLTDRQLDTCTLQPLRIKLDPGSKTTGLALVRDTEHLNTDTGEIQRGVAVLSLIELVHRGRHISEALTARRQMRRRRRGGLRYRAPRFLNRGNKARGWLAPSLQHRINTTTAWVARFRRWSPVTALSAELVRFDMQRLQNPEISGVEYQQGTLAGYEVREYLLAKWSRKCAYCGVENVPLQIDHVHPKAKGGTNRVSNLTLACGPCNARKSAQSVDAFLAKDPKRLTALLAQAKRPLKDAAAVNATRWALVGALKATGLPVETASGGCTKFNRSRLAIPKTHALDAVCVGAVSVVTNWQKPSLTIKCTGRGSYQRTRLDKYGFPRGYLMREKSVKGFKTGDLVRAIVPTGKKAGRHTGRVAIRKSGSFNIQTLAGVVQGIGYRHCRLLQRADGYGYFFNKAACDTAQKRE

SEQ ID NO: 6147 - protein, 408 aa, unidentified
  REGION 1..408: note = Human gut metagenome
MVYVQDINGKPMMPTTRHGKVRRLLKSNKAVVVNLCPFTIKLMYVTSDYKQEIVLGVDAGTKHVGLSATTKSKELYSSEVILRNDIVDLLSTRRELRRSRRNRLRYRKPRFDNRIKSKRPGWVAPSVKYKVDAHIRVIDNVCSILPISRIVIEVAQFDTQKINNPNISGKEYQEGDQLGFWNVREYVLARDGHKCQHCKGKSKDPVLNVHHIESRKTGGDSPSNLITLCETCHKEYHKGNIDLKIKRGSSLRDAAVMGIMKWRLYEELKSKYDNISMTFGYVTKYNRIKHGIEKSHVSDAFVISKNFDAIRLGYYYKVRLVRRHNRQIHKQKIPKGGIKRPNQSPFEVFGFRLFDRVMFENSYYFIFARRKTGSFNIRDIDGKNQRDITYKKLKLSRCKRFMVQKEMD

SEQ ID NO: 6148 - protein, 512 aa, unidentified; identical to SEQ ID NO: 2906
  REGION 1..512: note = Human gut metagenome

SEQ ID NO: 6149 - protein, 421 aa, Moorena sp.; identical to SEQ ID NO: 5773

SEQ ID NO: 6150 - protein, 361 aa, Anoxybacillus sp.
  SITE 361: note = misc_feature - Xaa can be any naturally occurring amino acid
MVFVLDTNKRPLAPCHEAVARKLLKQGKAAIYKRFPFTIILKKSVDESEIKTTYRLKIDYGSRHTGLAILRGQEVVWLGQLDHRTDIKERIDKRRAFRRARRNRKTRYRKPRFLNRRRKDGWLPPSLESRVQNIQTWVNRLKKLCPIGYISYENTKFDTQLMRNPEINGVEYQQGTLQGYEVREYLLEKFGRKCCYCGKENVPLEVEHIIPKSRGGTDRVDNLCLACHDCNQRKGSKTAEEFGYPHIQKQVKETLKDTSAINSTRWKAYEVLKQTGLDVECGTGARTKMNRIRLDLPKTHYFDACCVGESTTNHLYFKTKEVLFIKAKGRGSRSRTNLDRYGFPRGYLARQKFFFGFQTGX

SEQ ID NO: 6151 - protein, 464 aa, Ktedonobacter sp.
LLDVPPDNIIEATITRAIGGSERSKHMSHVCVVDANKQPLDPVHPGRARLLLSQGKAAVLKRFPFTIILNVAIDAPVVEELRIKIDPGSKTTGIALVNDQSGEVVFAAELHHRGAKIKEALDDRRAVRCSRRRRHTRYRKARWQNRRRREGWLPPSLTSRISNVLTWVKRLRNLCPITAMSIELVKFDMQAMENPDIQGWEYQQGTLAGYELREYLLEKWNRMCAYCGKGNVPLQVEHIVPRANNGTHRVSNLTLACEKCNQAKGTQDIKDFLKKKPAMLKHILAQAKAPLNDAAAVNATRWELFRGVQALGLPIECGSGGLTKYNRTIRELPKTHWIDAACVGQSTPEHLNITGISPLLITATGYGNRQLCGVDKHGFPKRHRQRKKVHHGYQTGDLVRAVVPEGFAAAGRHVGRVLARATGSFDLRTARGRIEGVPVRYCRPLHRNDGYSYHSTRGGNSSPL

SEQ ID NO: 6152 - protein, 431 aa, unidentified; identical to SEQ ID NO: 3235
  REGION 1..431: note = Human gut metagenome

SEQ ID NO: 6153 - protein, 428 aa, unidentified
  REGION 1..428: note = Human gut metagenome
LKVFVLNMRGQPLMPCSPAKARHLLRDKKAVVKRRTPFTIQLTIATGETKQDVTLGVDAGAKHIGLSATTEKEEVFASEVELRQDITGLLAGRLAFRRARRHRKTRYRAPRFLNRVHSKHKGWLAPSVENRIQAHMSRIDAICGLLPVTKIVIETASFDIQKIKNPDVKGTDYQQGDQLGFWNVREYVLLRDGHVCQHCRGRSKDKILNVHHIESRKTGGDAPNNLITLCETCHKAYHAGKIKLKVKRGQSFRAEAFMGIMRWTLLDRVRKAHPDLPVENTYGYLTKNTRITLGLSKTHCVDAYCIAGNLNARRRGVFLYQRQMRKHNRQIHKCKVLSKTLKDGTKVGYRKLNQTPYLVKNFRLFDKVRCFGQTGFIFGRRTSGHFDVRTLNRTRISDCVNSKKLTLLEKRRTYLTELRKEDGASSPV

SEQ ID NO: 6154 - protein, 325 aa, unidentified; identical to SEQ ID NO: 2612
  REGION 1..325: note = metagenome

SEQ ID NO: 6155 - protein, 427 aa, Enterococcus sp.
MQVFVRNIQGKPLMPCSNRKARLLLKEGKAKIYQYNPFTIQLCYPCREYVQECHIGIDTGSKHIGVAVTSEDKVLFKGEVELRQDVKSNLDTRRSYRRDRRNRKTRYRKARFLNRKKSKKKDVWLPPSIENRMNHTFKWIDTFLSLVPNPQLHIEVGKFDIAKMINPEIQGIDYQQGQTYGFYDVRYFVFARDNYTCQCCGKSKGKILQTHHIIYRSNGGSNRADNLITVCTDCHTYKNHQKGGVLYQWQENHKKTKQYKEPPFMNILRKRIFAKYSNAVITYGSETTPKRKELGLEKTHYNDAIVISGISTIKENPDEWLLIKQFRKKKRSLHEATARKGRKEPNCLQKRNAKNKPCYKGFYLNDKVEVFGRIGHITGFASGGVYIKNSENEYITLPNKSYKKVGVSKLKLLHHNNNWQYINKRIA

SEQ ID NO: 6156 - protein, 494 aa, unidentified
  REGION 1..494: note = Human gut metagenome
MTMVYVQNKDGKPLMPTTRYCYVRLLLKEKKARVVCTTPFTIQLNYDTPDITQDLILGIDPGRTNIGVAVVKEDGQCVFSAHLETRNKEVPLLMKKRVAFRRNHRTLDRRRKRQRRAKAAGTTIAEGSVERLLPSYEKPVVCHYIRNKEARFNNRSRHQGWLTPTANHLLQTHINLIAKIAKFLPITKMVVELNRFAFMAMDNPNIRRWEYQQGPLYGLGSVEDAVYAQQDGHCLFCKKPIDHYHHVVPRHKGGSETLANRCGLCERHHALVHKDKAWAEKLVTRKGGMNKKYHALSVLNQIIPFLMEYLGEETPYDVYATDGKSTKGFRVAKYVPKEHYTDAYCIACAILGADTKVSAPVEPFELKQFRRHDRQACIRQMVDRKYLLGGEVVATNRRKAIEQKSDSLQEFRDAYGDAAVSQLTVRPHSPQYKDMARIMPGAMMDFDGAVGVFQGSSGRNNGTPNYYNSTKGARVLTKRCALLAKNVGMVFIPA

SEQ ID NO: 6157 - protein, 426 aa, unidentified
  REGION 1..426: note = Human oral metagenome
MLVYVLKQNGQPFMPTERFGKVRRLLKEKKAKVVRREPFTIKLLYEPDTDVVQACYCGVDTGSKHIGVAVVGNDRVLYQSQIELRTDIKKKMDRRRGFRRLRRSRTTRYRKARFLNRRNSIKKDRLPPSVKHKVQAHIDEIEFCKKILPVSDENVILEVSQFDIALMKNPSLTSEEVKKWGYQQGFDYGYSSRREAIRHRDNYTCQCCGKKNCRLEVHHIKFRRDGGTDDEDNLITLCKECHDGVHAGTIELNKKPKKSKNLKYATHMSIIRSQLLKKYPDAIEIFGFVTAENRNHLKLKKDHYIDACVIASGGLEFEHSNIILYKRRVSKGDYQLCKGIRGEQIIPTGKICGFRKFDKVVYLRKEYFIKGRMSSGFAVLMGIDGNKVDFSYMSKGLKTPKLLNCKRVSSRSSCLCITQKIVLNIV

SEQ ID NO: 6158 - protein, 515 aa, unidentified
  REGION 1..515: note = Human gut metagenome
MATVYVLNKDGKPLMPTTRCGHIRHLLKEKKARVVRTNPFTIKLVYETDDVVQPLYLGIDPGRTNIGVAVVKVDGTAVFTAHLETRNKEIPKLMAKRKEHRQGRRHYRRCKRQRRAAAHGTLSKKCKKQDTAQGGNISKRAQTIGVFERNLPGCEKSVLCIGIKNKEARFNNRVRPARWLTPTANQLLLTHVNFVKKICKFLPISDVVLEINKFAFMALDNPNIQKWQYQQGPLYQKGSLENAVSEQQDHHCLFCEKTIEHYDHVILRSENGSDTIANIVGLCAEHHDLIHKDDKLKEELAKKKQGLNKKYGALSVLNQIIPALTYELGSRFQGHFYVTTGKSTYDYRAAHSVSKDHWLDAYCIACSVLPDGCFDNTINSRVPYELKQFRRHDRQVCQQQNVKRKYYLDKKLVATNRHKAIKQETDSLEEYRNNGGTTDKLVVKEHKPTNKRLNRILPGALMAANGKLNVMVASRGLHNGIPDNYVFDNSSKAKPSKCTLINKNKGIVFVSNSVS

SEQ ID NO: 6159 - protein, 418 aa, Acetohalobium sp.
MAINYAFVLDNEGKMLDPTKAKKAWYLIRQGKAELVEEYPLIIQLNRTVPSSQINDDEIVLGIDDGAKYVGVALVQDCKTKNKVLFKAKMKQRQDVSAKMEERNDYRGYRRSHKRYRPKRFDNRFASKRKGRLPPSIKQRKQAILRVVKHLSKHIRLDKIILEDVSIDIRKLTEGEELYSWQYQESNRLDENLRKATLKRDDYTCQLCEVEDTMLHAHHIIPVRDGGADSIYNLITLCADCHNNKVDNNEYKYKDQLLTKIDGKELNLKPAMHVMQGKSWLREELSTMAKLEITTGGDTANRRIDYNIEKTHSNDAICITGLLPIDRLDIKGYFIKPLRKKRASKIDSLGDFKHRDVIRYIKRDGTTYLGYITALRVKNNKYNSKVCNFTTLDGEKTFRGYGLTNLTLVNRPQGLMII

SEQ ID NO: 6160 - protein, 409 aa, Microcoleus sp.
MSNQPNYVFVLDTNRKPLTPCKPSLARKLLTTGKAKVFKLYPFTIILNKEVVDTPRPLTLKIDPGSRVTGLALLSGSTLLWVAELTHRGQAIKVSLESRRSLRRGRRNRHTRYRQARFLNRTRPKGSLAPSLQHRVETTLTWVRRLSKLAPINAVFQELVRFDLQQLENPEISGVEYQQGELAGYEVREYLLNKWDRKCAYCGAQNLPLQVEHIQPKAQGGSNRISNLCLACEPCNIKKGTKNINIFLAKKPEVLKRIMALTKRPLKDAAAVNSTRGTLFGLLKETGLTISTGSGGLTKFNRTQLNLPKTHFFDAACVGDTPELLVLANQPLLIKATGHGSRQMCRTDKFGFPSRYVPRFKFVKGFQTGDIVKAIVTSGKKMGAYTGRVAVRLAWELQYLNNNWVNSRN

SEQ ID NO: 6161 - protein, 431 aa, unidentified
  REGION 1..431: note = Human gut metagenome
MDAWDIIVVLNKRGKPLMPCSPAKARLLLKEKKAIVKRRTPFTIQLTIATGESKQPVTLGVDAGYKHVGLSASTEKAELYASEVELRQDVSDLLSARRALRQSRRNRKTRYRAPRFNNRLRTKRKGWLAPSVENRINAHLSRIEAVLRLLPVTKITVETASFDMQLLKNPDIAGKEYQEGEQLGFWNVREYVLFRDRHVCQHCYGRSKDPVLNVHHLESRRTGGDSPDNLITLCETCHKALHRGDITLKAKRGKSFRAEAFMGIMRWEVHNRLRALHPGIEVSNTYGYRTKHARIANGIAKSHCADAFCIAGNLGAERLCEFFFQKQTRRNNRQIHKLSILKGGIRKRNQAPFEVKGFRLFDKVACQGEEGFIFGRRSSGFFDVRKLDGTRISAGISCKKLHLLEKRRTYLTEIRKEEALPPLPEGRGLRA

SEQ ID NO: 6162 - protein, 447 aa, unidentified
  REGION 1..447: note = Ga0315294_10071848
MQKLKQRTKKNTPTDTPQVCSNCGLLLNKEETLSVTNLKTCLNNPEVDLPSHTKGLKASVYVISVDGKVLMPCKPAKARKLLKTQRAVVVKLYPFTIKLTFQCENQVQEVELGIDSGYQNIGFSCITAKRELASGTVILDGRTSSRLTERKMYRRGRRNKLWYRKPRFLNRKKSKGWLPPSVQRRYNTHLSLINRLKAILPISKITIEVANFDIQKIENENINGIGYQEGDMYGYQNVRSFLMAREKGKCQLCKKEFEKGSPSHIHHCKQRSEEGSNRVKNLAILHKKCHTKLHEKGLKLSISKQYKTPTFLSIINKRFKTDVSDVNITFGYITFTERIKLSLEKTHYNDAFVITGGNNQERCLPIEVRQKHRNNRAIQLNRKGFAPSIRKQRHAIQPKDLVWIDGKKLVAKSTHCNGTRVITEASKKSFSIKKVEKTYHYGSFTYN

SEQ ID NO: 6163 - protein, 420 aa, unidentified
  REGION 1..420: note = Human gut metagenome
MQYVYVLNKHGEPLMPCSPGKARLLLKQQKAHVVKRTPFTIKLLYGSTGYKQPITLGVDAGSKHVGLSASTEKRELYCEEFTPRNDVVELLSTRRQSRRSRRNRKTRYSAPRFNNRVHGKHKGWLAPSVEVKIQEHITVIKRICRILPVTLVRVETAEFDTQRLKAMLAGKPLPVGTDYQLGEMYDKYNVRQYVLKRDNYTCQCCGAHTTAKKAVKLRVHHLESRKVGGNAPSNLITLCTTCHNALHKGKVSLDGKERGKPLRDTAFMGIMRKTLMTQLREELPIPVQGTYGYITKMRREQNNIKKSHVNDARCISKHPLAEPCSVCYRTKAIRHHNRQTHKANFSKGGIRKRSQMPYVVEGYRLWDKVLYNGQECFVSGRRASGSFTLKKLDGTRVSKGVTFKKLQLLEPATNYLIERM

SEQ ID NO: 6164 - protein, 431 aa, Moorena sp.; identical to SEQ ID NO: 5812

SEQ ID NO: 6165 - protein, 431 aa, unidentified; identical to SEQ ID NO: 3801
  REGION 1..431: note = Human gut metagenome

SEQ ID NO: 6166 - protein, 512 aa, unidentified; identical to SEQ ID NO: 4350
  REGION 1..512: note = metagenome

SEQ ID NO: 6167 - protein, 376 aa, unidentified
  REGION 1..376: note = Microcoleaceae bacterium UBA11344
MSNFVFVLDTQKRSLNLIRPGRARKLLTTGKAAVFKRYPFTIILKVEVTATPEPITLKIDPGSQTTGIALVQGEKVLWGAELNHRVETTLTWAKKLTKFAPINKIVQELVRFDLQQLENPEISGFEYQQGTLFGYEVREYLLNKWDRKCAYCGVENVPLQVEHIHPKTQGGTNRISNLCLACEKCNLKKGAQNIEQFLAKKPEVLKRILSQVKRPLKDATAVNSTRWALFNRLKETGLPVSTGSGGLTKFNRPRLNLPKTHWIDAACVGQITSLKLLTNQPLLIKATGHGTRQMCRTDKFGFPSRYVPRLKFVKGFQTGDIVKAIVTSGKKIGTYIGRVAVRASGSFNISASELVSGISYKYCSIIHRKDGYSYAA

SEQ ID NO: 6168 - protein, 415 aa, unidentified; identical to SEQ ID NO: 2674
  REGION 1..415: note = Human gut metagenome

SEQ ID NO: 6169 - protein, 442 aa, unidentified
  REGION 1..442: note = Human gut metagenome
MSTTVFVLDKKHRPLMPCRPARARRLLRAGRARVVKRFPFVIRLVDRTVEQSEVQPVLIKLDPGSRETGAAVVRDDEKKRHHALAFFVIKHRGGAIRDALKARSAFRRRRRSQNLRCRSPRFLNRVKPKGWLPPSLRHRVETTLSFVRRMCRYLPVSGIATELVKFDSQKLQNPEVSGVDYQQGTLFEYEVREYLLEKFGRKCVYCGAEGVPLNIDHVVPRAKGGSNRVSNLVLACMSCNQKKGARSLEDFLKGKPKVLARVRRELKTPLRDAAAVNATRWVLFNELKATGLPVETGSGALTKLNRHAFGVEKEHWLDALCVGRLNGVVTRKGLNVLEIRCMGRGSRQRTRLTKYGFPRGYLMRQKCVHGFATGDMVEANVPKGKKAGLWRGRVAVRVSGSFNIQTPKGVIQGVGWKHCRLISHNDGYGYAWLGHAPHSSPA

SEQ ID NO: 6170 - protein, 490 aa, unidentified
  REGION 1..490: note = Human gut metagenome
MNYVYVLDKKGKPLMPTTRYGKVRRMLKSGQAKPVQNLPFTIQLTYIPKTTVCQPVIVGFDPGRTNIGISAVREDGTCLNLTHCETRNREIPKLMQKRKEHRQTSRRGERLVRKRLAKRHGTVSSKPLERILPGCEKPLKVKDIINTESRFNNRLRSEGWLTPTATQLLRTHVNLLKRMCQILPATDVVMEVNRFAFMQLDQPNVKKCGIDFQHGPLFGTDGIKEAVSIQQDGRCLLCEKRTIEHYHHIVPRAYRGSDTAENIAGLCAGCHKLVHTSREASNKLKHKKDGINKKYGGISVLNQVIPFLFMEFEQMFPGHTYATNGWNTKQFREKYRLAKDHSVDAYCIAASILPEPKVELPEDTHEIVQYRRHDRARIKRQTERTYCLGKKGVCKNRHKRFEQKTDSLEEYVEKYPNFLSNLTVKKSQRSYNDLKRVLPGAVILYQGKRYILSGRSSGGKQYRMLGYGNQNFTASKCTIVQQNTGLVYVS

SEQ ID NO: 6171 - protein, 427 aa, Fischerella sp.
MSKVFVIDLEKRPLDPVHPAQARQLLRNKKAAVFRRFPFTIILKDSQAYAPVQPIRLKIDPGAKHTGIALVNDSTGEVVFAAELKHRGFAIRDALTSRRQLRRGRRNRKTRYRKPRFLNRTRLEGWLVPSLQSRVENIKTWVERLRKLVPITTISQELVRFDMQLMRNPNIQGKEYQQGTLAGYETREYLLEKWDRQCAYCGVKDVPLQIEHIHPRAKGGSNSITNLTLSCSKCNTNKGTKDIKDFLKKDPLRLQKILKQACIPLADAAVVNTTRFALFEVLKSTGLPVETGSGGLTKFNRSQQNLEKSHWLDAACVGKSTPILDIKSVKPLLITANGHGTRQSCRTDKFGFPNRHCSRTKFHFGFQTGDIVKAVVTSGKKVGEYAGRIATRASGSFNISTKNGLVQGISYKYCKHIHKKDGYSYAT

SEQ ID NO: 6172 - protein, 453 aa, unidentified
  REGION 1..453: note = Human oral metagenome
LDTVAVISASGKKLMPTNSYRARGLLKSKRAVIHKYRPVFTIKLVDRTNGYTQPIEYKCDTGYQNIGISICSDTKEFVNEQRDLLKDEVKKHSDSRRYRRTRRNHLRYRKKRFDNRRGMISRDGFAPSIRNKRDVHVRLYEEYYKIFPIAKAVFEMGQFDTQVLKAIEAGLPVPKGTDYQRGEQYGYATLREAVFARDDYKCICCGKSAIKDGVKLRIHHIGYLSGDRSNRMANLGSVCENCHTPNNHKYGGKLYNLKPKLKELKGATFMTTVRYSMIKNLKAATPNVDIKVTYGAATKLARKDLNVRKTHSNDAYCMGEFHPKHRSDFKHYKKCRRNNRVLSRFYDAKYRDLRDGSTKTGSQLSCGRTNRKISRHTKLDERIYRAHKISKGRISTRRQHYSLRPGDKVLYDGKVYFAKGVQSNGTSIKLANGKACPLKKVSILQHCNAWAIV

SEQ ID NO: 6173 - protein, 428 aa, Enterococcus sp.; identical to SEQ ID NO: 4335

SEQ ID NO: 6174 - protein, 321 aa, unidentified
  REGION 1..321: note = Human gut metagenome
HINLVKKIQKFLPISDVVLEVNKFAFMQLDNPNIQKWQYQQGPLYQKANLEEAVSEMQEHHCLFCKKPIAHYHHVVPQSENGSDTIGNIVGLCTKHHDLVHKDTEWQKKLAKKKTGLNKKYGALSVLNQIIPALTKELSSLFPKHFFATNGKSTYDYRAAHGVSKDHWLDAYCIACSVLADDVCDNNINSHVPYELKQFRRHDRRALHKENMSRVYTLNGKSVATNRHKATEQTTDSLEEFRQRQPNDVCKLKVKEHHPEYRNPKRNFPGCVFLVGKHTHVMQGTSGSHNGKADGYYDTNGNSYSSGECKFVAKNGGIVFA

SEQ ID NO: 6175 - protein, 406 aa, unidentified
  REGION 1..406: note = Human gut metagenome
LLDEGKAKVKKRTPFTIQLIYGSSGYTQEVILGVDAGSKTIGMSVSTTKEELLSAEVKPRNDVVDLLSTRREFRRARRNRKTRYRKPRFDNRVRSKHKGWLAPSVEVKIQEHITSIKRVCRILPVSKVVIETAEFDLQLLKAIEESKPVPQGEDYQQGEMYGHYNVRQYVLWRDGYTCQCCGAHATKKKEVRLHVHHLESRKVDGDAPDNQVTLCESCHEKLHKGLIAEKDFKKRKRKSTRDATFMGIMRKTLMQRLCSELPIPVIETRGYITKATREKLLVLPKSHTNDALAIAQGKQGFNVGYLPEIAQIDKICTIRPVRHHNRQLHKATILKGGIRKSNQTEKYVFGYRLFDKVQFNGQDCFIWGRRTTGIFTIKTINGKMIKDGISFKKLKPVEKSTSYLIA

SEQ ID NO: 6176 - protein, 406 aa, unidentified
  REGION 1..406: note = Human gut metagenome
MVYVQDINGKPMMPTTRHGKVRRLLKDKKAVVVNLCPFTIKLMYVTSDYKQEIVLGVDAGTKHVGLSATTKSKELYSSEVILRNDIVDLLSTRRELRRARRNRLRYRKPRFNNRIKSKRPGWTAPSVKYKIDAHIRVIDNVCSILPIFRIVIEVAQFDTQKIKNPNISGKEYQEGDQLGFWNTREYVLARDGHKCQYCKGKSKDKILNVHHLESRKTGGDSPSNLITLCETCHKEYHKGNIDLKIKRGSSLRDAAVMGIMKWKLYEELRSRYDRVSMTFGYITKHNRIKYGIEKSHTSDAFVISKNINAKRIGCQYLKRLIRRHNRQIHKMKILKGGKKKNNQAPFEVFGFRLFDKVLYNNKICFVYGRRKSGSFNIRDFNGENSKDVSRKKFKLIRGKRHPIILK

SEQ ID NO: 6177 - protein, 442 aa, Lactobacillus sp.
MKHENANRVFLLNKDGKPLMPCRPRKARQLLKSGKAFVVKKYPFTIQLKYGSYGYKQKVSLGVDTGQRHIGFAVVSQDKVLHQSEVELRQDVHTNLYTRKIYRRGRRNRKTRYRQARFLNRVHGKRDGLWLPPSVKSKVSHNIAWIKRYLAVLPNPDLHIEVGKFDMAKMVNPDISGKQYQEGSLKDWKNYEYYVLARDEYTCQLCYKHGEGVKLVVHHIVYRSQGGTDRVDNLITLCTNCHTTKNHQPGGKLYKWMKAKKKVTKQLKGATFMNILRKRIMTTFPEASFQYGSQTYVDRKNLLLPKGHFMDAIAISGIKPVGQMPETVTMISQFRKKKRSLHEATARKGRKQPNTSSKRNEKNTKYARGLWLNDYVRVIGNNAKGYVKGFKSNGYSVYLTDGLGNYVLNDGRNYVNSKQCQLITHNSSWQKAEQMLSLYEFK

SEQ ID NO: 6178 - protein, 424 aa, unidentified; identical to SEQ ID NO: 5750
  REGION 1..424: note = Human gut metagenome

SEQ ID NO: 6179 - protein, 425 aa, Tolypothrix sp.
MQNYVFVIDQNKQPLNPVSPARARELLTKQKAAAYRVYPFVIILKHVVDNPNPKPLTIKLDPGSKITGIAILDQDKVVWAAELEHRGWQIKNALESRRSLRRNRRNRKTRYRQPRFNNRKRKEGWLAPSLMHRVLTIETWVKRLCLYSPITEIAMELVKFDTQKMQNPEISGAEYQQGELAGYEVREYLLEKWGRKCAYCDKEGVPLQVEHIHPRAKGGSNRVSNLTLSCERCNTKKGTKSINEFLKTDGSRLEKIKRQAKQPLKDAAAVNATRWELFRTLKNTLPTTTGTGGQTKYNRTRFELPKQHWIDAACVGDVERIQLLTQQPLRIKCTGWGTRQMCGTDRHGFPTRHRERSSVHFGFKTGDIVKAVVTTGKKVGEYVGRVLCRKTGSFDIATKSGRVAGISHKFCSLIHQKDGYSYASF

SEQ ID NO: 6180 - protein, 406 aa, unidentified; identical to SEQ ID NO: 2874
  REGION 1..406: note = Human gut metagenome

SEQ ID NO: 6181 - protein, 378 aa, Moorena sp.
MRVFVLDKNRKPLDPCHPAKARKLLKSGRAKVLRRYPFTIIIKDLEAENCSTHNHQLKIDPGAKTTGLAIVQGDRVIWGAELTHRGFQIKEALTSRRQLRRSRRNRKTRYRQPRFLNRTRQKGWLAPSLMSRVHNILTWVNKLIKFCPIAGISQELVRFDTQKMLNPEISGIEYQQGTLYGYELREYLLEKWDRTCAYCGAKNTRLEIEHIKPKSKGGSDRVSNLAIACHNCNQAKGNLEIEEFLSSKPDILKRILSQAKKPLADAAAVNATRWRLHDELKLIGLPVEVGSGGLTKYNRCRQNLPKTHWLDAANVGKVETLYISDYQPLLIAAKGHGKRQVCGTNKYGFPIRHHSRKKIHKGFQTGDIVKAVVTKGKK

SEQ ID NO: 6182 - protein, 435 aa, unidentified
  REGION 1..435: note = Human gut metagenome
MVYVLDIDGQPLMPTSRHRKVRKLLNSHLAKVAKRCPFTIQLLYQSTKETQPVSLGVDAGSRHIGLSATTEREVVYQEELVPRNDIVKLLSARRALRRSRRNRKTRYRRVRFNNRVHSKHKGWLAPSVEVKIQEHITATKRICQILPIFDIHVETAEFDLQRLKAMEEGRPLPVGTDYQLGEQYDFYNTRQYVLHRDEYTCQCCGTHDNNVKLHVHHIESRQTGGDAPNNLITLCEHCHKLLHAGKTILPKGKKRGKSYRDATFMGIMRKTLLERLRKEVDVPVSWTYGYITKYWREKTDLEKSHINDAICISKYPYAKPLDTYYLTKAVRHHNRQIHKSNFSKGGIRKRNQAPYLVKGFRLFDKVLYQGKSYFIFGRRATGYFDIRTLDGTKINKGSIGYRKLRIQDTAKAYLTETKKEARAIPHMNEFTCVLA

SEQ ID NO: 6183 - protein, 433 aa, Moorena sp.
MGQSIIYVQNIKGQPLMPTRRHNKVWYWLRKGLAHLVSREPFTIRLRFQTTGHTQLATVGVDTGSQTVGIAAITNEEVVLQAEVRLRDDITERMRQRRQYRRHRRGHKTRYRKPRWLNRRKTDGWLPPTLQSKAEATIKAVRWVTTLLPVHQIKVEVGSFDTQKMQNPEITGVTYQQGELYGYLMREYVLSKWKRQCSYCHTTGVPLQLEHIIPKARGGSDRVSNLCLACEKCNLAKGTQTATEFGYPQVQVQAKIPLKDAAHVSSIKTRIVHDLQAIFGAHQVSITYGYETKYKRIQVLGLCKSHTNDAVAIAYEIGEVPKPLETIHHLRCLARGQYQRFNGQRSEHKCWAPRKVRGFKLYELVKARGQVGYIAGRREKGAFIIKDVTSGKKLAEVTPRKLVRVARPKEGWMVVRLPTLESIRKESGASSPS

SEQ ID NO: 6184 - protein, 422 aa, unidentified
  REGION 1..422: note = Human gut metagenome
MQYVYVVGSNGKPLMPCSPTKARKLLKSKSAAVLQRTPFTIKLLHHAGGYKQPITLGVDAGSKHVGLSACTDTEELYKEELTPRNDVVKLLSARRECRRGRRHRKTRYRAPRFNNRVHSKHKGWLAPSVEVKIQEHITAIHRICRRLPITKIVVETAEFDTQRLKAMLEGKPLPVGIDYKRGEMYDEYNVRQYVLKRDNYTCQHCGARGSAEKGIKLHVHHLETRQTGGNAPNNLITLCKDCHTALHDGKITLKLDKKKRGKPLRDSAFMGIMRKTLLSRIRKEVAIPVVETQGYITKLLREENHIQKSHTNDARCIAGCPKALPCDTTYHTKAIRHHNRKIHKTNILKGGVRKLNQAPYKVFGFRIWDKVKYKGQECFITGRRSSGYFALKKLGGTTISNSANYKKIHFLEPANHYIIERS

SEQ ID NO: 6185 - protein, 429 aa, Ktedonobacter sp.; identical to SEQ ID NO: 6059

SEQ ID NO: 6186 - protein, 496 aa, unidentified; identical to SEQ ID NO: 2063
  REGION 1..496: note = metagenome

SEQ ID NO: 6187 - protein, 512 aa, unidentified
  REGION 1..512: note = Human gut metagenome
MSTIYVLNKDGEPLMPTTRGGHVRHLLKEQKARVVQSNPFTIQLLYETNDVVQPLYLGIDPGRTNIGVAVVKADGTAVFAAHLETRNKKIPKLMQDRKKARRARRTNGRRCRRQRRAKANGTISKKCVKQDTAQSKNPSKRAKEIGVIKRHLPGCKKDVLCVGIKNKEAKYTNRARLEGWLTPTANQLVQTHINLVKKIQKFLPISDVVLEVNKFAFMRLDNPNIQKWQYQRGPLYQKGSLENAVSEMQEHHCLFCEKPIEHYHHVVPKSENGSNTIANIVGLCAEHHNLVHKDVAWQEKLVEEKTGLNKKYGALSVLNQIIPALTKELSFLFPKHSFMTNGKSTHDYRAAHGISKDHWLDAYCIACSVLPIDVCDSTINNCVPYELKQFRRHDRRALNNENMNRVYTLNDKVVATNRHKATEQEAASLEEFRKEHPNDVCKLKVKEHHPTYRNMNRNYPGSVFLVGKQIHVMQGIASSKDGKATKYNDTRATTIAAGKCKFVAKNSGILFV

SEQ ID NO: 6188 - protein, 413 aa, unidentified; identical to SEQ ID NO: 2636
  REGION 1..413: note = Human gut metagenome

SEQ ID NO: 6189 - protein, 406 aa, unidentified; identical to SEQ ID NO: 6079
  REGION 1..406: note = Human gut metagenome

SEQ ID NO: 6190 - protein, 442 aa, Lactobacillus sp.; identical to SEQ ID NO: 5193

SEQ ID NO: 6191 - protein, 515 aa, Streptomyces sp.
VRRPTAPCFLSGALWNPQEQTPLGVGTKRLADPRPPCRARVLNMGEGRSCRRAPIWQDVTPPPLQRGRARPVRVIQRCSFWTDTTNRSCHVRRPVPAKLLSHGRAVVHRHTPFVIRLKDRTAATSEVTGAELGIDPGSRFTGIALFRAVDEADASVRHGLFAIELVHRGGPISVRLTSRATLRRARRQRNLRYRAPRFNNRARPEGWLAPSLRHRVDTITAWVNRMTRWAPVRAVHVELSVFDPHAMSAGTSASVAEYRGGTLQGMEVREYLLMKWNRACAYCGATSTPLNIDHIHPRSRGGSDRVSNLTLACLPCNKRKSNMPVEDFLKKKPAVLSKILQQAKTPLRDAAAMNATRCAVLRALKALHPDVRPSTGGRTRWNRRRTSTPKSHTLDALCVGVLASVVRHPKAIQVVTATGRGTYRRTAPDRYGFPRLALPRTKQYFGYATGDLVRANVPNGKRQGNHTGRVAVRVTGNFNIKTRHGLVQGVNHRHVRLLQRADGYAYTTRAEVAHA

SEQ ID NO: 6192 - protein, 404 aa, unidentified
  REGION 1..404: note = Human gut metagenome
LLKEKKAIVKRRTPFTIQLTIATGETKQPGSLGVDAGYEHVGLSASTEKAELYASEVELRQDITDLLSARRALRQSRRNRKTRYRAPRFDNRIRTKRKGWLAPSVENRINAHLSRIEAVLRLLPVTKITVETASFDLQLLKNPDISGKEYQEGEQLGFWNIREYVLCRDGHVCQHCYGRSKDPVLNVHHLESRRTGGDSPGNLITLCETCHKALHRGEITLKAKRGQSFRAEAFMGIMRWEVLNRLKASHPELEVNNTYGYRTKHARISNGIAKSHCADAFCIAGNLGAKRLGEFFFQKQTRRNNRQIHKLSILKGGIRKRNQAPFEVKGFRLFDKVACQGEEGFIFGRRSSGFFDVRKLDGTRISAGISCKKLHLLEKRRTYLTEIRKEEALPPLPEGRGLRA

SEQ ID NO: 6193 - protein, 417 aa, unidentified
  REGION 1..417: note = Human oral metagenome
MFVYVLDKNGQPLMPTQRFGKVRRLLRDKKAKVIRSCPFTIRLLYEPETKIVQNIVLGVDTGSKYVGIACVGNDKVLYQSQVELRDDIKLKMDSRRMYRRNRRQRKTRYRKCRFLNKRNSIREDRYCPTITSKCFGHIREIEFCKRILPIKHIVFETAKFDTQLMEKPWLQEQKWAYRKGVNYGYANAREHALIRDKYTCKCCGKKNCRIEAHHIVFRSKNGSNDLENYVTLCEDCHKAVHLGKIELKLKGKHRSNLRHATQMSIIRSMLLRKYPNVIETFGFVTKANRENLGLKKSHCIDACVIASGGLKFKELGVLYRKKCVPVQSRILARGNRGEQRLPTGKVHGFKRYDKVKYLGVVCFVKARRVGGSFTLMDINSKVLDFRGVGGKNYPLYKYIERLNTRSSVLCISERMGE

SEQ ID NO: 6194 - protein, 256 aa, unidentified
  REGION 1..256: note = Human gut metagenome
LQFYRKEHGIMQYVYVLSKHGEPMMPCSPGKARLLLKQQKACVVRRTPFTIKLLYGSAGYKQPITLGVDAGSKHVGLSASTEKRELYREEFTPRNDVVELLSTRRQNRRSRRNRKTRYRAPRFDNRVHSKHKGWLAPSVEVKIQEHITIIKRICKILPISLVRVETAEFDTQRLKAMLAGKPLPVGTDYQLGEMYDEYNVRQYVLKRDNYTCQCCGAHTTAKKLVKLHVHHLESRKTGGNAPSNLVTLCTTCHKNL

SEQ ID NO: 6195 - protein, 512 aa, unidentified
  REGION 1..512: note = Human gut metagenome
MSTVYVLNKDGKPLMPTTRGGHVRHLLKEQKARVVRTKPFTIQLLYETKDVVQPLYLGIDPGRTNIGVAVVKENGTTVFTAHLETRNKEIPKLMKKRKESRCARRTNGRRCRRQRRAKANGTLSKKCVKQTTAQNGSVSKRAKEIGVIKRRLPGCEKDVLCIGIKNKEAKFTNRTRPEGWLTPTANQLLQTHINLVKKIRKYLPISDVVLEVNKFAFMALDNPNIQKWQYQQGPLYKKESLESAVSEMQEHHCLFCKKPIDHYHHVVPQHKNGSNTIGNIVGLCTKHHDLVHKEAAWQEKLAKKKTGLNKKYGALSVLNQIIPALTKELSSLFPKHFFATNGKSTYDYRSAHGISKDHWLDAYCIACSVLPNDVCDSGINNRVPYELKQFRRHDRRALNNENMSRVYTLNDNVVATNRHKATKQTTDSLEEFRQNHPDDVCKLKVKEHHPTYRNMNRNYPGNVFLIGKQVHVMQGIAGSKDGEATTYKDTNANSIAAGKCKFVAKNSGILFV

SEQ ID NO: 6196 - protein, 365 aa, unidentified
  REGION 1..365: note = Human gut metagenome
VSEMTSYSFVLDANGKQLAPTKEPKAWFLIRKKRAALVSKYPMVIQLKKKIQENEICKDEIRCGIDDGGLHVGIALVQKCKSKNKVVFKGTIEQRNDVKHLMEVRRNYRRYHRYHKRYRQARFDNRKSSKRKGRIAPSILQKRQATIRVINRLNKWINITNYWLEDVSIDIRVLTDGYKSYSWQYQKSNRLDENIRKATILRDGGKCMECGKSNCRLEVHHIKPRRRNGSNTLDNLITLCESCHQKTEGQEELYMDRYFSLLKSSDNKNLNYAQHVMIGKMWLRKQLSGLGVLYLTSGGDTANKRIDWNIEKSHTNDAVCITDLQPDTCDIKEWAIKPMRRQSKAKTDHVLGIHHRDLVEYTFKN

SEQ ID NO: 6197 - protein, 434 aa, Lactobacillus sp.
MQNRVFVINKHGKALMPCKPRKARILLRDGKAKVLKKEPFTIQLLYGSTGYKQDISVGIDSGQRYIGLAVTSQNKVLFQGEVELRQDVKKLIDTRRTYRRSRRNRKTRYRKSRFLNRIAKKKDNWLPPSVASKVNHNINWIKRLLSVLPKADLHIEVGKFDMQKMKNPEINGEGYQQGDLYGYQTVKQFVLARDNYTCQVCKKKGGKFKIHHIIYRSLGGTNTVDNLITVCSNCHTTKNHQTGILAKWCKDKMKVNKSYKGATFMNILKRRLFLAFPQAKFQYGAWTTLQRVDLDLTKSHYNDAVAISGIRKVKAKPTSIMMFKQFRKKKRSLHEATARKGRKTPNITSKRNAKNTKYAKGFWLNDYVKIKDSNKKGYISGFMSKGTNVRLRDIFGEYVSNSDKSYTSTKNISLINHSNNWQKQVITEKQYIMG

SEQ ID NO: 6198 - protein, 413 aa, unidentified; identical to SEQ ID NO: 2636
  REGION 1..413: note = Human gut metagenome

SEQ ID NO: 6199 - protein, 424 aa, unidentified; identical to SEQ ID NO: 5075
  REGION 1..424: note = Human gut metagenome

SEQ ID NO: 6200 - protein, 423 aa, unidentified; identical to SEQ ID NO: 3951
  REGION 1..423: note = Human gut metagenome

SEQ ID NO: 6201 - protein, 459 aa, Leptospirillum sp.
MAVFVLDRKKKPLMPCSEKRARLLLERKKAVVHRMAPFTIRLKDRIGGETQPIRIKLDPGSKTTGIALVREEEILSPEIGEAETAAHVLFLGEIGHRGGRIRDRLSARRAFRRRRRSKLRHRKPRFDNRTKPEGWLPPSLQHRVDTTASWVERLRRLVPVSSISMELVRFDMQKIENPETSGVEYQQGALAGYEVREYLLEKWDRTCAYCGKKDVPLEIDHIHPRSKGGSDRISNLTLACRPCNEKKGNRPVEAFLVGKPELLKKILSRAKAPLRDAAAVNATRWALFERLNQTGLPVETGSGGRTKWNRTRLGIPKTHALDAACVGKVDRVEGGTRPVLEIKTMGRGSYQRHRLDAFGFPRGFLTRKKSHFGFQTGDRVRAVVRTGKKIGTYVGRVAVRASGSFNLQTGSGLVQGIPHTVCRLLQRADGYGYSLVTTNRKESAFLPAVNGEVSNARRG

SEQ ID NO: 6202 - protein, 421 aa, unidentified
  REGION 1..421: note = Fermentation metagenome
MEVYVISQDGKPLMPTTPARARKKLRDKKAKCIRKTPFTIKLLYKTTTYTQSITLGIDTGSSHIGSAAVDDRGNVLYLSEVEIRNDIADKMKRRAKYRRNRRNRKTRYRQARWLNRKNSIKSDRFSPTMVSKVNSHLKEVKFVKSLLPITHVILETGTFDPHALKNPDVLKNKWLYQRGANYGFANTRAFVLDRDSYICQYCKGKSKDRRLEVHHIIFRSNGGSDEAENLITLCKTCHDKVHANKIKLKGGKVKGQLKHATQMNSIRKRLLRLLPEAEETFGYITKEHRYLMSLPKEHYFDAVAIASLDNIRNEGLVSVNFKTCLLRKKCISKGDYQQTKGIRSEQLIQTGKIMGFRKFDKVRYMNKEYFIKGRMSTGYAVLMDIVGNKVSLKPIPKFCKMERLSARKSWIIQQEIIQNIA

SEQ ID NO: 6203 - protein, 512 aa, unidentified
  REGION 1..512: note = Human gut metagenome
MSTIYVLNKDGKPLMPTTRGGHVRHLLKEQKARVVQSNPFTIQLLYETNDVVQPLYLGIDPGRTNIGVAVVKADGTAVFAAHLETRNKKIPKLMQDRKKARRARRTNGRRCRRQRRAKANGTISKKCVKQDTAQSKNPSKRAKEIGVIKRHLPGCKKDVLCVGIKNKEAKYTNRARLEGWLTPTANQLLQTHINLVKKSQKFLPISDVVLEVNKFAFMRLDNPNIQKWQYQRGPLYQKGSLENAVSEMQEHHCLFCEKPIEHYHHVVPKSENGSNTIANIVGLCAEHHNLVHKDVAWQEKLVEEKTGLNKKYGALSVLNQIIPALTKELSFLFPKHSFMTNGKSTHDYRAAHGISKDHWLDAYCIACSVLPIDVCDSTINNCVPYELKQFRRHDRRALNNENMNRVYTLNDKVVATNRHKATEQEAASLEEFRKEHPNDVCKLKVKEHHPTYRNMNRNYPGSVFLVGKQIHVMQGIASSKDGKATKYNDTRATTIAAGKCKFVAKNSGILFV

SEQ ID NO: 6204 - protein, 453 aa, unidentified
  REGION 1..453: note = Human gut metagenome
MTAVYVISADGQKLMPTLRNGKVRHLLKEGKAKICKYRPFTIQLTYDTPNQVQPIEIGMDSGYQHIGLSVKTEKKEIFSAEFTLLTDEKKRHDDCRKYRRNRRNRLRHRKPRWLNRTKTIPEGWLAPSLLHKAEAHIKLIKDICSVAPINNVTTEVGEFDPALLKAMHEGKEPPQGTDYQQGPLYFADSLRKAVFQRDNYTCKICHKSALKDKDVILKIHHALYWKNRHGNNLSELITVCDRCHTSANHAPNGKLYGLEPKVARLESAAYMNIVRWYIINTLKKELPNIQVNFCYGALTARKRKDLKLEKSHTNDAFCIGNFLPSLRSVATEYFKKKRRNSRILEKFYDAKYIDIRDGKIKKGAELSTGRTNRSIPRNNENNLRKFRSEKKSKGRRQIRKTRYSFQQNDFVFYKKRLYKVIGMQNLGKYISLQGFKPVPISQVQLYKHANAWT

SEQ ID NO: 6205 - protein, 289 aa, unidentified
  REGION 1..289: note = Human gut metagenome
NIQKWQYQQGPLYQKASLEEAVSEMQEHHCLFCKKSIVHYHHVVPQSENGSDTIGNIVGLCTKHHDLVHKDTAWQKKLAKKKTGLNKKYGALSILNQIIPALTKELSSLFPKHFFATNGKSTHDYRAAHDVSKDHWLDAYCIACSILPNDTCDKNINGRVPYKLKQFRRHDRRALHKENMSRVYTLDGKKVATNRHKAIKQTTDSLEEFRQRQPNDVCKLKVKEHHPEYRNPERNFPGCVFLVGKHTHVMQGTSGSHNGKADGYYDTNGNSYPSGKCKFVAKNKGIVFA

SEQ ID NO: 6206 - protein, 406 aa, unidentified; identical to SEQ ID NO: 2703
  REGION 1..406: note = Human gut metagenome

SEQ ID NO: 6207 - protein, 512 aa, unidentified
  REGION 1..512: note = Human gut metagenome
MSTVYVLNKDGKPLMPTTRGGHVRHLLKEQKARVVRAKPFTIQLLYETNDVVQPLYLGIDPGRTNIGVAVVKANGTAVFTAHLETRNKEIPKLMQDRKKARRARRTNGRRCRRQRRAKANGTISKKCVKQDTAQSKNPSKRAKEIGVIKRRLPGYKKDVLCIGIKNKEAKYTNRTRPEGWLTPTANQLLQTHINLVRKIQKFLPISDVVLEVNKFAFMRLDNPDIQKWQYQQGPLYQKGSLENAVSEMQEHHCLFCDKPIDHYHHVVPQSENGSNTIANIVGLCAEHHNLVHKDAAWQKKLAEEKVGLNKKYGALSVLNQIIPALTNKLSVLFPKHFFVTAGKSTHDYRATHGVSKDHWLDAYCIACSVLPSDVCDSNINNHMPYELKQFRRHARRALNNENMNRVYTLNDKAVAINRHKATEQEAASLEEFRKEHPNDVCKLKVKEHHPTYRNMNRNYPGSIFLVGKHVHIMQGIAGSKDGKATTYKDSNANSITASKCKFVAKNSGILFV

SEQ ID NO: 6208 - protein, 442 aa, Moorena sp.; identical to SEQ ID NO: 2637

SEQ ID NO: 6209 - protein, 447 aa, Geobacillus sp.
LFVYIINKHGKPLMPCSPRKARLLLKQKKAKVVRRTPFTIQLLYGSSGYKQPVSLGVDMGTRHVGISATTKKDVLFEAEAQLRTDIVELLAIRRQFRRSRRNRKTRYREARFLNRRKPEGWLPPSIQHKINSHIKLIDLVHNILPVTSVTIEVAAFDTQKLKNLNIRGVEYQQGEQMGFWNVREYVLYRDNHTCQYCKGKKKDPVLQVHHIESRKTGGDSPDNLITLCKTCHHEIHEKGLEHIFQRKRPPMRDASQMTAMRWAMFSRIREKYSHANITYGYITKCIRIANGLSKSHMVDARCISGDPLAKPSGTVYLLKFVRKNNRQLHKATILKGGKRKSNKAPRFVKGFQLFDKVVYERKECFIFGRRSSGYFDLRLLDGTKVHASASWKKLKRVEHASTLLIERSIPVRSFSGDLIKKSPLGMMQGCQTHHSPYQGGLQMNCTQ

SEQ ID NO: 6210 - protein, 424 aa, Enterococcus sp.
MRVFVRNMQGKPLMPCSNRKARLLLKEGKAKIYQYNPFTIQLCYASREYVQECHIGIDTGTKHIGMAVTSEDKVLFKGETELRQDVKSNLDTRRSYRRDRRNRKTRYRKARFLNRKKKESWLPPSIENRINHTFKWINKLVALLPNPKLHIEVGKFDVAKMINLDVQGVDYQHGQTYGFYNVRYFVFARDNYTCQCCKKSKNKILQTHHIIYRSNGGSNRADNLITVCTDCHTYENHQKGGILYQWQENRKKTKQYKEPPFMNVLRKRIFTQYPNAIITYGSETTPKRKELGLEKTHYNDAIVISGITKIKENPNEWLLIKQFRKKKRSLHEATARKGRKEPNRLQKRNAKNTPYYKGFYLNDKVRVFNQVGHITGFTSSGAYIKNSENEYITLPNKSYKQIGISNIRLLHHNNNWQYIHKHIA

SEQ ID NO: 6211 - protein, 406 aa, Moorena sp.
MPTENHAKVRLLLKSGKAMVVRRTPFTIRLLGISKTYTQSVTLGVDAGSKYVGLSATTAKKELLAAELRPRNDVVKLMSDRRELRRSRRSRTTRYRAARFDNRIHSKHNGWLAPSVEVKIWNHIQSVKLISRLLPLTTIRVETTEFDLQRLKAMESGRPLPVSTDYQFGEQYDEYNVRQYVLHRDGYTCQCCGAHGTAEKSVKLHVHHLESRETGGNAPDNLITLCKDCHKAYHAGKIQLPVRGRRRRSTRDAAFMGIMRKTLMQRLREMFLNIEICGTYGYITKYWREKKNIVKTHINDAFVIAKNFEAERLEKCLLIVPRRQHNRQIHKCKIYKGGIRKLNQTPKYVFGFQLFDKVLFKGREGYIFGRRSSGRFVIKDIEGKPIAEPRCSKLRLLEKRGAFLIS

SEQ ID NO: 6212 - protein, 420 aa, unidentified
  REGION 1..420: note = Human gut metagenome
MQYVYVLNKHGEPLMPCSPCKARLLLKQKKACVVKRTPFTIKLLYGSTGYKQPITLGVDAGSKHIGISATTEKYELYREEATPRNDVVDLLSARRAFRRNRRNRKTRYRAPRFDNRVHSKHKGWLAPSVEVKIQEHITLIKRVCRILPVTLVRVETAEFDTQRLKAMLEGKPLPVGTDYQLGEMYDEYNVRQYVLKRDNYTCQCCGAHPTKTKAVKLHVHHIETRRTGGNAPNNLITLCTACHKALHAGKVTLNGKKRGKPLKDAAFMGIMRKTLMERLLKELKIPVQETYGYITKYLREKHSIPKSHTNDARCISKNPLAIPCDTCYYTKAIRHHNRQLHKATILKGGIRKANQAPYTVKGYRLWDKVSYNGSECVITGRRTSGYFALKKLDGTVVSNSASYKKLRLLEVATNYITERR

SEQ ID NO: 6213 - protein, 433 aa, Lactobacillus sp.
MQNRVFVINRQGEPLMPCKQRKCRKLLQFGKAKVVKKEPFTIQLLFGSTGYKQPVSIGVDSGQHHIGLAVTSQDKVLFQGEVSLRQDVKKLLDTRRSYRRGRRDRNTRYRPPRFLNRAKPAGWLPPSVASKVQHNITWIQRIQAVLPKAELHIEVGKFDMAKMVNPGITGLGYQQGDLYGYETAKQYVLDRDNYTCQICHGKTKDPKLKIHHIIYRSNGGTNQVSNLLTVCASCHTQANHQPGGKLYVLQAKQFQSHRSLKGATFMNILRRRLFTAFPAASFQYGAQTTLDRAKLDLPKAHYNDAVTISGIQNIVQQPTAVVMFHQFRKKKRSLHEATARKGRKTPNRVSKRNAKNTKAVSGFHLNDYVQLPNSQRGYISGFSGKTTCYVKAGNHYLTVSPKYKQVSLSKLKVIRHQNNWNVQEISTGNYTMA

SEQ ID NO: 6214 - protein, 442 aa, unidentified
  REGION 1..442: note = Human gut metagenome
MSTSVFVLDKKHRPLMPCRPARARRLLRAGRARVVKRFPFVIRLVDRTVEQSEVQPVLIKLDPGSRETGAAVVRDDGKKRHHALAFFVIEHRGGAIRDALKARSAFRRRRRSQNLRCRSPRFLNRVKPKGWLPPSLRHRVETTLSFVRRMCRYLPVSGIATELVKFDSQKLQTPEVSGIEYQQGTLFEYEVREYLLEKFGRKCVYCGAEGVPLNIDHVVPRAKGGSNRVSNLVLACVSCNQKKGARSLEDFLKGKPEVLARVRRELKTPLRDAAAVNATRWVLFNELKATGLPVETGSGALTKLNRHAFGVEKEHWLDALCVGRLNGVVTRKGLNVLEIRCMGRGSRQRTRLTKYGFPRGYLMRQKCVHGFATGDMVEANVPKGKKAGLWRGRVAVRVSGSFNIQTPKGVIQGVGWKHCRLISHNDGYGYAWLGHAPHSSPA

SEQ ID NO: 6215 - protein, 513 aa, unidentified
  REGION 1..513: note = Human gut metagenome
LKKEAAGHRQGKDCRPVRYGPPYRAGMPDGRRKPERKHMVAVVTSTGKPLMPTSAYRARKLLKKGRAVIFKYRPYFTIQLVDRADGEVQEVEYKSDTGSVHVGISVCTEKKELLSEQRDLLENEPEHHNDRKKNRRTRRNRKRYRKPRFDNRKKKPQEGHEKWLPPTLLHKMEVQVRLFREFCRVVPVTSACFEMGKFDTQALKAVSKGEPVPEGEGYQNGERYGTDTLRAAVFLRDGHTCRFCERSVKDGAILHVHHVGYWKGDRTNRPANLASACEQCHTPANHGKNGILYGKEPEFKTLKDASYMTSVRWIMLDEIIKAAPGVQVSVTYGVTTKRKRQELHLPKSHVNDAFSMASFHPKKRSDTEYWKKIPRHDRVLQKFYDAIYLDTRDGSEKKGSELSNGRISRNHKKDSENLHQYRGHKVSKGHNSIRRGASSLKPGSIVMYKGEKMTVHGTHTRYVKGKDGKTAKKVNVQFTCPASDGKKSASLEKCTPVSRVYNTGWKRYWPDKK

SEQ ID NO: 6216 - protein, 512 aa, unidentified; identical to SEQ ID NO: 4350
  REGION 1..512: note = Human gut metagenome

SEQ ID NO: 6217 - protein, 380 aa, Bacteroides sp.
LFDCENRIQDITLGIDAGSKHLGLSATTEQKELYAADVELRSDIVELLSTRRQYRRTRRGRLRYRAPRFCNRVRSRNKGWLAPSVEQKIKTHLRVVNDVCRILPVSKIIVETAAFDVQKIENPDISGEGYQQGSQLDFWNVREYVLWRDNHECQCCHGKSMDKILNVHHIESRKTGGDSPKNLITLCKNCHDQYHMGKINPNLKCREPLRDAAFMGIMRWSFYNRLKNEYLNVSMTYGYITKNTRIQHDLPKEHYTDARCISGNPQAEPLGYYFCQKKVRCHNRQIHKANIQKGGIRKRNQAAYLVKGFRLFDKVRYDNQAGFVFGRRANGYFDLRKLNGEVIHRSASYKKLELLDTRKTLLTERRQAVPLKAKAMSIPA

SEQ ID NO: 6218 - protein, 424 aa, unidentified; identical to SEQ ID NO: 3351
  REGION 1..424: note = Human gut metagenome

SEQ ID NO: 6219 - protein, 420 aa, unidentified
  REGION 1..420: note = Human gut metagenome
MQYVYVLNRHGEPLMPCSPGKARLLLKQQKACVVKRTPFTIKLLYGSAGYKQPITLGVDAGSKHVGLSASTEKRELYSEEFTPRGDVVELLSTRRQNRRSRRNRKTRYRAPRFDNRVHSKHKGWLAPSVEVKIQEHITIIKRICKILPISLVRVETAEFDTQRLKAMLAGKPLPVGTDYQLGEMYDEYNVRQYVLKRDHYTCQCCGAHNTAEKVVKLHVHHLESRKTGGNAPSNLVTLCTTCHKNLHKGKVTLDGKERGKPLRDAAFMGIMRKTLMARLKEELPIPVQGTYGYITKMRREQNDIKKSHTNDARCISKHPLAEPCSVCYRTKAIRHHNRQTHKANFSKKGIRKRSQMPYLVEGFRLWDKVLYKGQECFVSGRRSSGSFALKKLDGTSISKGVTFKKLRLLEPATNYLIERM

SEQ ID NO: 6220 - protein, 328 aa, unidentified
  REGION 1..328: note = Human gut metagenome
LRVFVLNKRGKPLMPCSPAKARLLLKEKKAIVVRRTPFTIQLTIATGESKQPVSLGVDAGYKHVGLSASTDKAELYASQVELRQDITDLLSARRALRQSRRNRKTRYRAPRFDNRIRTKRKGWLAPSVENRINAHLSRIEAVLRLLPITKITVETASFDMQRLKNPDISGKEYQEGEQLGFWNVREYVLFRDGHVCRHCHGRSKDPVLNVHHLESRRTGSDSPDNLITLCETCHKALHRGEITLKAKRGQSFRAQAFMGNMRREVLNRLKASYPELKVHETYGYLTKHARIANGIVKSHGADAFCIAGNLGAERLGEFFFQKQTRRNN

SEQ ID NO: 6221 - protein, 424 aa, unidentified
  REGION 1..424: note = Human gut metagenome
MRVFVLNMRGEPLMPCTQRKARLLLKESKAVIYKYNPFTIQLTYATGETKQDCHIGIDTGSKYIGVAITSEDKILFKGEIELRQDVKSNLDKRRMYRRDRRNRKTRYRQPRFLNRKRTDKWLPPSLQNRINHTDHWIDAFSCLVPSPELHIEVGKFDTAKMINPEINGVDYQHGQTYGFFDERHFVFARDNYTCQCCGKSKDKILQTHHIIYRSNGGTNRVNNLITVCTECHTSENHKKGGVFYKWQEQHKKVKQYKEPPFMNTLRKQIFAKYPNAVITYGSETTPKRKEMGLNKTHYNDAIVISGIYKINEDSEEWLLIKQFRKKKRSLHEATARKGRKIPNRNQVRNSKNTPCYQGFFLNDKVSVLGKSGYITGFTSNGAYIKDNASNYITLPNKTYKQVSISKLRLKHHNNNWQYVVKTAV

SEQ ID NO: 6222 - protein, 406 aa, unidentified
  REGION 1..406: note = Human gut metagenome
MVYVQDINGKPMMPTTRHGKVRRLLKENKAVVVNLCPFTIKLIYVTSDYKQEIVLGVDAGAKHVGLSATTKSKELYSSEVILRNDIVDLLSTRRESRRVRRNRLRYRKPRFDNRVKSKRPGWVAPSVKYKIDAHIRVIDNVCSILPISRIVIEVAQFDTQKINNPEISGKEYQEGDQLGFWNTREYVLARDGHKCQYCKGKSKSKILNVHHIESRKTGGDSPSNLITLCETCHKEYHKGNIDLKIKRGSSLRDAAVMGIMKWRLYEELKSRYDRVFMTFGYITKHNRIKYGIEKSHTSDAFVISMNINAKRIERQYLKRLIRRHNRQIHKMKILKGGKKKNNQAPFEVFGFRLFDKVFYNNKIFFVYGRRKSGNFNIRDFNGENPKDVSRKKFKLIRGKRHPIILK

SEQ ID NO: 6223 - protein, 175 aa, unidentified
  REGION 1..175: note = Human gut metagenome
MVYVQDIDGKPMMPTTRHGKVRRLLKDNKAVVVNTCPFTIKLTYKTSDYKQEIVLGVDSGTKHVGLSATTKSKELYASEVILRSDVVDLLSTRRGLRRTRRSRLRYRKQRFNNRVKSKKDGWIAPSVRHKIDSHVRIISFVYSILPVSKLIVEVAQFDTQKIKNPEISGKEYQEG

SEQ ID NO: 6224 - protein, 536 aa, unidentified
  REGION 1..536: note = Human gut metagenome
VLRPRYQYPTRWYPSREQGSGNGCLSGEENTDLKQEVSGTLSKGDHSHPGEQDFCVPAITIQGGPAMSVFVVGLNGCRLMPTSERKARLLLKHGKASVYRKVPFTIKLNYKTGSTTQSGYLGIDTGSQHIGVSVVREDGAVLHKEEIGLRDSMSKRKLMQSRASSRRGRRYRKTRYRHPKWRPKAKRVYCEIPDRKRRHWKKKEITFTSKRPKGWLPPSLQSKTDHHIRWIKKLQDLLPEGYRLSIELGRFDPARLKDPEIHGELYQKGPQYDYENVRAYVLNRDRYTCQVCGKKGGKLHVHHILYRSYGATDDPQYMATVCSDCHNTENHHQGGILYQWMQKQKKFTRGLRDATFMNILRKRLIEAFPGATFTYGNITKADRERLRLPKSHGNDATAIAIVKTGIMTVKDKEPVIYIQQVRRKKRSLHEETPRKGRKEPNRKASRYDKNTKAVTVTKRKNKKKISITGCLFDRVELNGKKGWISGFTDKSCYVKDENDQYIRTSPKYKQVSLSKLKILHHCGNWAIGARRSLGKG

SEQ ID NO: 6225 - protein, 419 aa, unidentified; identical to SEQ ID NO: 4877
  REGION 1..419: note = Human gut metagenome

SEQ ID NO: 6226 - protein, 414 aa, unidentified
  REGION 1..414: note = Human gut metagenome
MIYVLNHDGQSLMPTDRCWRARHLLKERKAKVVKRCPFTIQLLYQNTNYTQPISLGVDAGSKYIGMSATTETKEVYASEIELRNDIVKLLSDRRALRRGRRSRKTRYRKPRFQNRKRGEKWLVPSIQHKIQTHLDATEAVCKILPITRITVETASFDIQKIKDPEIKGTGYQQGDQLGFWNVREYVFFRDGHTCQCCKGRSKDKILNVHHIESRKTGGNAPNNLITLCETCHKGYHNGTVKLPKRIHRGMSFKDAAFMGIMRWTFYNELKTIYPDVHMTYGYITKNTRIEHGLPKEHYIDARCISGNPTAAPLGVVYYQKKVRRHNRQIHKLKILKGGIRKQNQADYLVKGFRLFDKVKYQRKEYFIFGRRSSGFFDIRTLDGTKINKGSLGYKKFQFLEAPRGYLIEQRKEMA

SEQ ID NO: 6227 - protein, 425 aa, Aphanothece sp.
MSNYVLVIDSNKQPLNPCHPSVARKLLKSKNAAIFRQYPFTIVLKKEILDVVIEPIEIKIDPGSQTTGIALVQGDKVIFGAELSHRGSTIKDSLESRRSLRRGRRSRKTRYRQARFLNRKKPSCWLAPSLQHRVDTTLTWIKKLIKFAPIVGISQELVRFDLQQLENPEISGVEYQQGELVGYEVREYLLNKWDRKCSYCSIENVPLQVEHIHPKAKGGTNRISNLCLACESCNLKKGTKDINVFLAKKPDVLKRILSQAKRPLKDAAAVNSTRWTLFNALKNTGLPITTGSGGKTKFNRTRLNLPKQHWIDAACVGIVDTLKVLTNKPLLIKATGHGTRQSCRTDKYGFPSRYVPRFKFIKGFQTGDIVKAVVTKGKKIGTYVGRVAVRSIGSFNISSPNGLIQGISYKNCTHIHKKDGYSYAT

SEQ ID NO: 6228 - protein, 431 aa, unidentified; identical to SEQ ID NO: 3235
  REGION 1..431: note = Human gut metagenome

SEQ ID NO: 6229 - protein, 406 aa, unidentified; identical to SEQ ID NO: 2703
  REGION 1..406: note = Human gut metagenome

SEQ ID NO: 6230 - protein, 431 aa, unidentified
  REGION 1..431: note = Human gut metagenome
MPDKVYVISRLGHPLMPCSPAKARHLLDDKKAKVVKRMPFTIRLLYGSTKYIQPIILGVDAGSKTIGLSASTAKEEVFAAEVMPRNDVVENLSTRREFRRARRNRTTRYRKPRSDNRVRSNHERWLAPSVKVKIQEHITSIKRVRTILPISKVVIETAEFDLQLLKAIQEGKPIPEGEDYQKGEMYGSYNVCQYVLWRDNYTCICCGVRGTPKNPVRLHVHHFESRKYGGNAPDNHGTLCDDCHKKFHLGIITDVKLKTRRRQSTRDAAFMGIMRKTLMWRLRTELFIPVAETKGYITKATREKLLVLPKSHTRDALAIAQGRHGFGIKEYAYVEPANHIYTVRPVRHHNRQLHKASILKGGIRKRNQASKYIFGFRLYDKVLYQGKACFVWGRRTSGTFLLRTIDGIKVKDGVSYRNLTLLERSSNYLIA

SEQ ID NO: 6231 - protein, 512 aa, unidentified
  REGION 1..512: note = Human gut metagenome
MSTVYVLNKDGKPLMPTTRGGHVRHLLKEQKARVVRAKPFTIQLLYETNDVVQPLYLGIDPGRTNIGVAVVKANGTAVFTAHLETRNKEIPKLMQDRKKARRARRTNGRRCRRQRRAKANGTISKKCVKQTTAQNGSVSKRAKDIGVIKRRLPGCEKDVLCIGIKNKETKFTNRTRPEGWLTPTANQLLQTHINLVKKIQKFLPISDVVLEVNKFAFMRLDNPNIQKWQYQQGPLYKKESLESAVSEIQEHHCLFCKKPIDHYHHVVPQHKNGSNTIGNIVGLCAKHHDLVHKDSAWEKKLAKKSTGLYKKYGALGVLNQIIPTLTNELSSLFPKHSFVTNGKSTYDYRAAHGVSKDHWLDAYCIACSVLPSNVCDSNINNHMPYVLKQFRRHDRRVLNNENMNRVYTLNNKAVAINRHKAKDQKTVSLEEFRKEHPDDVCKLKVKEHHPTYRNMNRNFPGSVFLVGKQIHVMQGIASSKDGKATKYNNTSATAIAAGKCKFVAKNTGILFV

SEQ ID NO: 6232 - protein, 408 aa, unidentified
  REGION 1..408: note = Human gut metagenome
MVYVQDIDGSPLMPTTRHGKVRRLLKSKKATVVNLCPFTIRLLYDTTGYKQEITLGVDAGTKHVGLSATTKSKELYASEVILRSDVVDLLSTRRELRRARRYRLRYRKPRFNNRVKYKKDKWIAPSIRQKIDSHIRIIGFVYSILPVSKLIIEVAQFDTQKIKNPEISGKEYQEGEQLGFWNIREYILARDGHKCQHCRGKSKDPILNVHHIESRKTGGDSPSNLITLCETCHKEFHKGNIKLKVSRGKSLRDAAVMGIMKWKLYEELRSRYDNVSMTFGYITKYNRIKYGIEKSHISDAFVISKNFNALMLEYHYKVRLIRRHNRQIHKQKVLKGGVKKPNQSSFEVFGFRLFDRVMFEGNYYFIFGRRKSGSFNIRDIDGGNQRDITYKKLKLLRCKRFMIQKETN

SEQ ID NO: 6233 - protein, 413 aa, Moorena sp.; identical to SEQ ID NO: 2636

SEQ ID NO: 6234 - protein, 431 aa, unidentified
  REGION 1..431: note = Human gut metagenome
MPNKVYVINKHGRPLMPCSPAKARHLLDGGKAKVKKRTPFTIQLLFGSTGYTQEVILGVDAGSKTIGLSASAETKELFSAEVKPRNDVVDLLSTRRESRRARRNRKTRYRKPRFDNRVRSKHKGWLALSEEVKIQEHITAIKMVCRILPVSKVVIETAEFDLQLLKAIADGKPVPQGEDYQKGEMYGHYNVRQYVLWRDGYTCQCCGAHTTKKKEVRLHVHHLESRKTGGDAPGNLVTLCDSCHEKLHKGLITEDDFKKRKRRSTRDATFMGIMRKTLMQRLCSELPIPVIETRGYITKATREKLLVLPKSHTNDALAIALGKQGFNVGYLPGIAQIDKIYTIRPVRHHNRQLHKAAILKGGIRKSNQAGKYVFGYRLFDKVQFNGQDCFIWGRRTTGIFTIKTINGKMIKDGISFKKLKLVEKSTGYLIA

SEQ ID NO: 6235 - protein, 420 aa, unidentified
  REGION 1..420: note = Human gut metagenome
MQYVYVLNKHGEPLMPCSPGKARLLLKQQKACVVKRTPFTIKLLFGSAGYKQPITLGVDAGSKHVGLSASTEKRELYSEEFTPRSDVVELLSTRRQNRRSRRNRKTRYRVPRFDNRVHSKHKGWLAPSVEVKIQEHITVIKHICKILPISLVRVETAEFDTQRLKAMLAGKPLPVGTDYQLGEMYDEYNVRQYVLKRDNYTCQCCGAHTTAKKLVKLHVHHLESRKTGGNAPSNLVTLCTTCHKNLHKGKVTLDGKERGKPLRDAAFMGIMRKTLMARLKEELPIPVQGTYGYITKMRREQNDIKKSHTNDARCISKHPLAEPCSVCYRTKAIRHHNRQTHKANFSKKGIRKRSQMPYLVEGYRLWDKVLYKEQECFVSGRRSSGSFTLKKLDGTSVSKGVTFKKLRLLEPATNYLIERM

SEQ ID NO: 6236 - protein, 407 aa, Methanohalobium sp.
MRVFVLSKNKKPLMPTRPAKARRLLESGKAKVVRRSPFTIKLLYDTAEYTQPVIAGMDSGSKHIGCAAVANDEVLYQSEVELRDDVSKKVQQRASYRRNRRSRKTRYRKPRFNNRGNSKKDGRIAPSIKSKVQSHERERRFVESILPVKKWIVETASFDIHKITNPNVSGTDYQNGDLKGYYNIRTYVLHRDNYTCQKCKNRSKDPKLECHHIVFRSKGGTNRPDNLITLCETCHGKLHNGKFTINKKPSNTKHPTEIGIVRSQIRKLNWKFQETFGYITKYKREQILGLEKTHYNDAVAICCDENNPNLQLSNVVYYKKHVSSGDYQQTKGIRSDKKIPTGKLHGLRKFDFIKTPDVSGFVKGKRTSGNFSIMDIFGNTFKKNPNVKKNCRRISARCTTLTQQIQI

SEQ ID NO: 6237 - protein, 472 aa, unidentified
  REGION 1..472: note = Wastewater metagenome
MAVFVLDKRGKPLMQCSEKRARLLLDRGRARIHKMLPFTIRVVDRLVEDSQLQPLEIKLDPGSKTTGVAVVRISVAVDAQTGEVQKRVHVLNLFDLIHRSRQITEALMGRRGHRRLRRSKLRYRAPRFDNRGNQKKGWLPPSLQHLVDTSLEWVKRIEKLAPISGISTELVRFDMQAMENPEIEGAQYQQGTLAGYEVREYLLEKWDRTCAYCGAKDVPLQIEHIHPKSKNGSDRINNLTLACQCCNQKKAALPVEMFLAKKPELLKRILAQAKRPLKDAAAVNSTRWALVNTLKTTGLVVETGTGGQTKFNRSQFDIPKTHALDAACVGEVGSITDWQKPTLSIKAMGRGSYQRTRLDKFGCVRGYLTRSKSIKGFQTGDMVKAEVTTGKKIGSYTGRVAVRATGSFNIQTSAGLVQGVSHRYCTVVQRGNGYGYSLVAKTDVRGTPPQHRDASHPALYLPGLKAEVSRAN

SEQ ID NO: 6238 - protein, 435 aa, unidentified
  REGION 1..435: note = Anaerobic digester metagenome
MVYVLSINGKPLMPTNRHGKVRRLLKQGLAKVVKVKPFTIQLLYDTTTYTQDVILGIDSGYNYIGFSAITEKKELISGEVKLRNDISELIKERRMYRRIRRNRLRYRKPKFNNRVSSKKEGWLAPSIKHKLDSHIRFIEYLKKILPITNIVIEVANFDTHKLKNPNVEGEGYQQGEQQGFWNIREYILYRDNYTCQLCGRKDTVLEVHHIGYYKQDRTDRPSNLITLCTKCHTPKNHKEGGKLYGMKPIQKPLKEATFMSTVRWKLVNTLMCSHTYGYITKSKRISLNLEKTHYNDAFCIAGGNNQERIEPIYFEQIRRNNRSLEKFYDAKYTDIRDNSTKTGQELFCGRRTRNKNLNEENLRKYRGTKKSSGRRSIRKQRYSYQPKDIVIYQGKKYTVKGIQNKGDYIRLVELTKPVKTNLVKPYIFRKGLCVL

SEQ ID NO: 6239 - protein, 465 aa, unidentified
  REGION 1..465: note = Human gut metagenome
MSTCVCVLSNSGKRLMPTFRLGKVRHLLKDGKAKIVKHHPFTIQLLYDGKTNTQPIEICEDVGYNYIGISVKSQSHEYVSAQYDTLQDEKACHDSCRKLRRSRRNRLRYRKPRFDNRKRSEGWLAPSLRHKKELNVNVVKMYCAVMPITHATVEVGSFDTMLVKAIQEGKAIPEGADYQKGPRYNLATLREAVFYRDNYVCKVCGRKATEGAILHVHHMFYWKGRHGNSLSELITVCEKCHTPANHQKGGKLYGFGENVKFADLSGAAFMNTVRWQIVNELYAAFGKDFVTVTYGAMTKEKRIALRLEKSHNNDAYAMGEFHPNCRCTFEHYEKVRRNNRILEKFYDSRYIDIRTGEIATGKELFNGRINRSHKKDSENLHKYRGKRIRKGYRALRRKKVALNPGDLVSLNGEILTVHGTHTKKNGSVNVEFKTPSKSGKKSTSLKKLKIIKTISPMRSAWDKVS

SEQ ID NO: 6240 - protein, 490 aa, unidentified; identical to SEQ ID NO: 3566
  REGION 1..490: note = Human gut metagenome

SEQ ID NO: 6241 - protein, 456 aa, Fervidobacterium sp.
MVFVISKDGKPLMPTKRHGKVRRLLKQGLAKVVNREPFTIQLLYETTNYTQPVTVGIDIGSKVVGVCAVTDKEEMFSAEIQLRQDISKLLLERRQHRRFRRYRKTRYRKPRFLNRRKEDGWLPPSLQWKVDAHVRIVNKLSKIIPITKVVVEVAPFDIQKVLNPDIEGEDYQNGPQKGFSDVRDYCLWRAGYKSELSGKTGILEVHHIIPRSKGGTDAPSNLIVLTTQEHKMLHEGKIKIPKSRLEQIKVFKDAAHVSTIEQHIVNRLKQNYHVEITYGSITKERRDMYGLEKSHRDDAFVIAGGNIQERASEWYFGKFFRRQNRSLHKANPIKGGRRPINTVKQVNGFIRFDKVECEGEIAIITGLRSSGYFSISSLSGEKISDSVKYTKLRLIERAKTLMFERRERATCSWLKPRVSVARFHEIKTAHSRSFKRSTICFTMDNWFSYFYAYTAH

SEQ ID NO: 6242 - protein, 351 aa, unidentified
  REGION 1..351: note = Human gut metagenome
ASEVELRQDVSDLLSARRTLRQSRRNRNTRYRAPRFDNRIRTKRKGWLAPSVENRINAHLSRIETVIRLLPVTKITVETTSFDMQLLKNSDIAGKKYQEGEQLGFWNVREYVLFRDGHVCQHCHGRSKDPVLNVHHLESRRTGGDSPGNLITLCETCHKALHRGEITLKAKRGQSFRAETFMGIMRWEVLDRLKASHSKLEVQNTYGYRTKHARISNGIAKSHCADAFCIAGNLGAERLGEFFFQKQTRRNNRQIHKLSILKGGIRKRNQAPYEIKGFRLFDKVACQGEEGFIFGRRSSGYFDVRKLNGTHISAGISCKKLRLLEKRQTYLTEIRKEKALPPLPEGRGLRA

SEQ ID NO: 6243 - protein, 431 aa, unidentified
  REGION 1..431: note = Human gut metagenome
MPNKVYVINKHGRPLMPCSPAKARHLLDAGKAKVKKRTPFTIQLVYGSSGYTQEVILGVDAGSKTIGMSASTTKEELLSAEVKPRNDVVDLQSTRREFRRARRNRKTRYRKPRFDNRVRSKHKGWLAPSVEVKIQEHITSIKMVCRILPVSKVVIETAEFDLQLLKAIADGKPVPQGEDYQKGEMYGHYNVRQYVLWRDDYTCQCCGTHATKKKEVRLHVHHLESRKVGGDAPDNQVTLCESCHEKLHKGLITAKDFKKRKRRSTRDATFMGIMRKTLMQRLCSELPIPVVETRGYITKATREKLLVLPKSHTNDALAIAQGKRGFNVGYLPGIIQTDKIYTIRPVRHHNRQLHKAAILKGGIRKSNQAGKYVFGYRLFDKVQFNGQDCFIWGRRTTGIFTIKTINGKMIKDGISFKKLKLAEKSTSYLIA

SEQ ID NO: 6244 - protein, 411 aa, unidentified
  REGION 1..411: note = Human gut metagenome
MVYVQDIDGKPMMPTTRHGKVRRLLKDNKAVVVNTCPFTIKLMYKTSDYKQEIVLGVDSGTKHVGLSATTKSKELYASEVILRSDVVDLLSTRRGLRRTRRSRLRYRKQRFNNRVKSKKDGWIAPSVRHKIDSHVRIISFVYSILPVSKLIVEVAQFDTQKIKNPEISGKEYQEGEQLGFWNVREYVLARDGHKCQHCKGKSKDPILNIHHIESRKIGGDSPSNLITLCETCHKEFHKGNIKLKVSRGKSLRDAAVMGIMKWKLYEELKSRYDNVSMTFGYITKYNRINHGIEKSHVSDAFVISRNFNSCRLGYYYKRKLVRRHNRQIHKMKILKGGIRKRNQAPFKVFGFRLFDKVMFQGEEHFIYARRLSGQFNIRDINGENKKDVSCKKLKYVSHGLVSVKTNLFLSQ

SEQ ID NO: 6245 - protein, 442 aa, Lactobacillus sp.; identical to SEQ ID NO: 5571

SEQ ID NO: 6246 - protein, 418 aa, unidentified
  REGION 1..418: note = Human gut metagenome
MVYVLGQDGHPLMPTCRHGKVRRMLKSGMAKVVQRCPFTIQLQYESTTHTKNINLGIDAGSKTIGVSVTTDTKVLYESEVVLRNDIVELLSGRRALRRSRRNRKTRYRKPRFDNRKKHDGWLAPSIRQKIEIHVTVVENVMKILPVTKIIVETASFDIQKIKNPEIEGEEYQHGEKLDFWNVREYVLFRDGHICQCCKGKSKDNILNVHHIESRKTGGNAPNNLITLCETCHQAYHKGIITLPKEIHRGMRFRDASFMGIMRWAFYDRLKELYTPLDVEVVNTYGYITKNTRIEHGLPKVHYVDARCISDNPASKPMDHYYFQKKVHCHNRQIHKNTILKGGIRKRNQAAYLVNGFRLFDKVKYQNQEYFIFGRRSSGFFDIRTLDGTKVNKGSISCKKFQLVEKSKHYLTEQRKVTA

SEQ ID NO: 6247 - protein, 509 aa, unidentified; identical to SEQ ID NO: 4834
  REGION 1..509: note = Human gut metagenome

SEQ ID NO: 6248 - protein, 423 aa, unidentified; identical to SEQ ID NO: 3951
  REGION 1..423: note = Human gut metagenome

SEQ ID NO: 6249 - protein, 1304 aa, Nocardiopsis sp.; identical to SEQ ID NO: 3641

SEQ ID NO: 6250 - protein, 429 aa, Moorena sp.; identical to SEQ ID NO: 3501

SEQ ID NO: 6251 - protein, 425 aa, Nodularia sp.; identical to SEQ ID NO: 3165

SEQ ID NO: 6252 - protein, 417 aa, unidentified
  REGION 1..417: note = Human gut metagenome
MIYVRSKEGSVLMPTERCGKIGYLLRHGKAHVVSRVPFVVQLDYDSTTYTQDVSLGIDAGSKHIGVSASSEKKEMLAAQVELRSDIVNLLSTRRELRQTRRNRKTRYRKARFDNRKKKDGWLAPSVEQKIESHLKVIRLVHKILPITKTTIEVAQFDAQKIKNPYIKGDEYQQGEQMGFWNVREYVLARDGHKCVHCKGKSKDPILNVHHLESRKAGGNSPSNLVTLCETCHKAYHRGEFDLKIKRGSSLRDAAVMNIMRWAVYERAKAEFGNVHLTYGYITKHTRIENGIAKTHAADAFCIAKNVHAMRLSSFFMCRCVPRHTRALHVANPKKCGIRRNTIASHKIGKSNFQRFDMVRWMGKECFIFGSTRGRPVLRDIEGVKMHENASVNIKTIKFLKRLKNNILMEEKNFRRLN

SEQ ID NO: 6253 - protein, 424 aa, Succinatimonas sp.
LQDLAYSKKLHLFKGLNMVYVLNCKGVPIMPTTRHGMVRRLLKEHKAKVVKRCPFTIQLSYECANITQPITLGVDTGYENVGISACTEKKVLLEAKAKIRTDIVKLLSARKEARRTRRNKKTRYRKARFLNRGIEKGWLPPSIRAKVESHLGLVAKAHEILPIGKIVVEIASFDIQKIKNPDIKGAEYQQGDQLGFKNVKAYVLARDGCTCRCCKGRSKDKILRVLHLESRIIGGDAPNNLVTLCNSCHTKFHKGLISLDDIKRGKSFKAETFMGLMRNFFFKELFNKYPCVKSTYGYITKHLREKYYLKKDHHVDARCICGVPQALPSDVYLIKKVRCHNRQIHKFTTLKGARRRLNQAPYTVKGFRLFDKVKVGEQVGFIYGRRQSGSFDVRTVYGERINGSISYKKLQLIETRKSWLIERC

SEQ ID NO: 6254 - protein, 470 aa, unidentified; identical to SEQ ID NO: 2825
  REGION 1..470: note = Human gut metagenome

SEQ ID NO: 6255 - protein, 415 aa, Bacillus sp.
MRVFVKNLRGEPLMPCSNRKARLLLKQGKAKIIGYTPFTIQLQYATGETVQSVAIGVDSGSKYVGIAITTEDKVLAKGTIELRQDVKENLTLRATLRRSRRQRKTRYRKARFLNRKKREGWLPPSIQSRMHNQIHWIEIFRSLLPSPKVIVEVGKFDAQKLKNSDIQGKEYQQGDAFGFWNTRYYVVTRDHYTCQICKKKGGILHTHHIIERCSGGSDMADNLVTVHEECHQKFHQGTIKHIFKKPKQYKETAFMNILRLQIMNRLGCEITYGSYTTPKRKELRLSKTHYNDAIAITTPTKLQEYEQSGEFRIKQFRKKKRSLHESTARKGRKTKNTTAKRNNKNTPKVHGIYLGDKVKVFGQVGFVTGFTGKMMYVQDIDGHYLQNPSKSYKQVKISDIECIHHNNNWLFLQIS

SEQ ID NO: 6256 - protein, 440 aa, Ktedonobacter sp.
LSNVFVLDTNKQALNPVHPGRARRLLSLGQAAVFKRYPFTIILKSAASSPHVWPLRVKLDPGSKTTGLAIVNDASGEVVFAASLIHRGDAIRERLEKRRAARRSRRQRKSRYRQSRFDNRGTKKKGWIAPSVQSRVCNVITWVKRLVRLCPITAISQELVKFDLQQMDHPEISGVNYQQGTLSGYEVREYLLDKWGRQCAYCGAKDVPLEVEHINPRSKSGDDRVCNLTLACEPCNTRKGTQDIRVFLAHQPELLAKLLAQAKSPLKDAAAVNITRWVLHAQLKAFGLPLECGSGGRTKFNRITRGLEKTHWCDAACVGASTPEVLHIGQVRPLSIAAYGHGRRQMCLMNKSGFPRTNPKQKKFKHGFRTGDLVKAVVPPHFKHAGTHVGRMSAKASGAFTIATAGGTVTDIGKKYCRMLQRADGYGYTQKGELAFPPVP

SEQ ID NO: 6257 - protein, 450 aa, Altererythrobacter sp.
MCVFVLDKRKNPLMPCSQRRARLLLERGRAVVHRHHPFTIRLKDRVGGKTQPVEIRVDPGSKGTGLAVVRIAEDTCPETGEVTTIVHVLERIELRHRGAAIRKALLQRSQRRRRRRSKNLRYRAPRFNNRRRPKGWLPPSLQHRVDTTASWVRRLSRMAPVLRARVETVRFDTQALETPEISGIEYQQGTLAGYEVREYLLEKWGRCCAYCDATGVPLQIDHIHPRARGGSNRVSNLTLACGPCNQTKGSTPVEAFLAHAPKRLARILAQARRPLQDAAAVNATRFAVCSAISDQTGLPITRFSGGQTKWNRTRAGLAKTHANDAVCVGPTDQVVGAAGPTLLVTCTGRGTRQRIMPNAHGFARGHRPRTKSVQGFRTGDLVRAEIPSGVNAGVWTGRIAVRSTGWFLLTATGQGADGERGHRKIGGVAARYCALVASGDGYGYAREVQP

SEQ ID NO: 6258 - protein, 442 aa, unidentified; identical to SEQ ID NO: 2637
  REGION 1..442: note = metagenome

SEQ ID NO: 6259 - protein, 414 aa, unidentified
  REGION 1..414: note = Human gut metagenome
MPCSPAKARLLLKEKKAIVKRRTPFTIQLTIATGEAKQPVSLGIDAGYKHVGLSASTEKAELYASEVELRQDITDLLSARRALRQSRRNRKTRYRAPRFDNRISTKRKGWLAPSVENRINAHLSRIEAVLRLLPVTKISVETASFDMQLLKNPDIAGKEYPEGEQLGFWNVREYVLFRDRHVCQHCYGRSKDPVLNVHHLESRRTGGDSPGNLITLCETCHKALHRGDITLKAKRGKSFRAEAFMGIMRWEVHNRLRALHPGIEVSNTYGYRTKHARIANGIAKSHCADAFCIAGNLGAERLCEFFFQKQTRRNHRQIHKLSILKGGIRKRNQAPFEVKGFRLFDKVACQGEEGFIFGRRSSGFFDVRKLDGTRISAGISCKKLHLLEKRRTYLTEIRKEEALPPLPEGRGLRA

SEQ ID NO: 6260 - protein, 457 aa, Scytonema sp.
MITNSVFVLSKNGKILKPTTPVRARILQSQGKAKKLNLFPFTLILESMVDENVEPYLELRIDPGSKITGFSLVDLNKNEVIWAMELEHRGLAIKMEMLTRAGVRRSRRSRRLRYRKKRFERKKPQGWLPPSLRHRLLTTETWIKRLLKVTPIKSIAIESVKFDLQKMETPNIEGIEYQQGTLFGYTLREVLLEHWGRECVYCGKTNVPLQIEHINPRSLGGSDRFSNLTLSCEKCNQKKGNKPVEQFLKNKGEILQKIKAHQKKSLSDAATVNSTRKAIFEMAQQFGLPVMSGDGASTKMIRIKSGLPKLHWIDSACVGTSEIVKLRICQPLRATCTGHGTRLVQRMNAKGFPAIASIKKNPMTGKKEVKLVAKNQKYTHATAGDYVVCTLLKDRKHVRWGIYRARVKTPTPKGVEVLINGHRISLDRRHVKLIHQSDGYEYSFTTIDQDLLRFSAI

SEQ ID NO: 6261 - protein, 453 aa, Fervidobacterium sp.
MVFVISKDGKPLMPTKRHGRVRRLLRQGLAKVVNREPFTIQLLYETTNYTQPVTVGIDIGSKIVGISAVTDKMEIFSAEIQLRQDISKLLPERRQHRRFRRYRKTRYRKPRFLNRRKENGWLPPSLQWKVDAHVRIVNKLSKIIPITKVVVEVAPFDIQKVLNPDIEAKDYQNGPQKGFADVREYCLWRAGYKSELSGKTGVLEVHHIIPRSKGGTDTPSNLIVLTVEEHKMLHEGKIKIPKSRLEQVKVLKDAAHVSAIGWYIVNKLKQNYQVAITYGSITKARRATYGLEKSHRDDAFVIAGGNIQERANEWYFGKLLRRQNRSLHKANPIKGGKRPLNTIKQVKGFRRFDRVECEGKIGIISGLRSSGYFSISSLNGEKISDSVKYTKLRLLERAKTLMFERRERATCSWLKPRVSVARRYEIPQNFAKRSTHGRSTLRRSSARRYRKLF

SEQ ID NO: 6262 - protein, 456 aa, unidentified; identical to SEQ ID NO: 4017
  REGION 1..456: note = Human gut metagenome

SEQ ID NO: 6263 - protein, 423 aa, unidentified
  REGION 1..423: note = Cyanobacteria bacterium UBA9226
MSNYVFLIDSHKTPLNPVHPAQARKLLESGKAAVFRRYPFTLILKRVVENPLIHPLTLKIDPGSKVTGIALVTDRNEAIWAMELEHRGEAIKSALLQRRIVRRGRRNRKTRYRQARFLNRKRPNGWLAPSLQHRILTTSTWVKRIQKFAPVGAIAQELVKFDTQALQNPEIQGTEYQQGTLFGYECREYLLAKWQRKCAYCGVKDVPLEIEHIQPKSRGGSHRISNLSLACHQCNQQKGDQDIKDFLKNKPQVLNRILSQAKTPLKDAAAVNSTRWGLFNVLKSFGLPLTTGTGGQTKFNSMRLNLPKAHWIDAACVGIVETLKLVTSKIFQVKATGFGGRKRCQTDKFGYPIKHRPLRPIHGFSTGDIVRADVPKGKYKGTFTGRVCPMSHGYGEFVINGKRRSIKLAYLTPIHQKDGYSYG

SEQ ID NO: 6264 - protein, 422 aa, unidentified
  REGION 1..422: note = Human gut metagenome
MVYVLNKDGQPLMPTNKHGKVKHLLKDDKAKVVKRCPFTIKLLYETSNYTQHLTLGVDTGSGTIGTAVSDDDGNIVYTSKVTVRNDIKDKMAQRSKYRKNRRSRKTRYRKARFDNRKNSIKKDRFSPTMVSKINSHIKEIEFIKSILPIKTLVLEAGTFDTHLMKKPNLANPKIRPWGYQKGTNYGFENTKAMVLNRDSYTCQCCKGKHKDSKLEVHHIIFRSQGGSDDESNLITLCHTCHQNLHRGIIKPKFEGKKKGTLNYATQMNSIRIQLLKHYPEAIETFGMITKANRQSLNIEKDHHLDACVIASGGNPIKLKTNSLYLKRAIPKGDYQQTKGVRSEQKITTSKICGFKKFDKVRYLDDEYFIKGRISTGYAVLMNIDGKKIDFLSMPIKTPKLSLCERISARKSLMIKETFIPNL

SEQ ID NO: 6265 - protein, 376 aa, unidentified
  REGION 1..376: note = Human gut metagenome
LSKVKTMRVFVFNMRGRPLMPCSQRKARLLLRENKAMIYKYHPFTIQLTYTTGETKQDCHIGIDTGSKYIGAAVRSEDKVFWKGEIELRQDIRSNLDTKRIYRRSRRNRKTRYRKPRFLNRKRRDEWLPPSLQSRINHTFHWIDTLSSLVPNPILHIEVGKFDVAKMINPEIHGVDYQHGQTYGFFDERYFVFARDNYTCQCCGKSKNKILNTHHIIYRSNGGTNRVDNLITVCTDCHTSQNHRKGGIFYQWQEQHKKVKQYKEPPFMNTLRKRIFVAYPDAEITYGSETTPKRKAMKLDKTHYNDAIVISGINEIKENPEEWLLIKQFRKKKRSLHEATARKGRKKPNRNQTRNSKNTPYYKGFYLNDKVSVFGK

SEQ ID NO: 6266 - protein, 456 aa, unidentified
  REGION 1..456: note = Human gut metagenome
MSTCVCVLSNSGERLMPTFRLGKVRRLLKDGKAKIVKHHPFTIQLLYDSKANTQPIEICEDVGYNYIGISVKSQSHEYVSAQYDTLQDEKACHDSCRKLRRTRRNRLRYRKPRFDNRKRGEGWLAPSLRHKKELNVNVVKMYCAVMPITHATIEVGSFDTMLVKAIQKGKAVPEGADYQKGPRYNLATLREAVFYRDNYVCKVCGRKATEGAILHVHHMFYWKGRHGNSLSELITVCEKCHTPANHQKGGKLFGFGEDKEFANLSGAAFMNAVRWQIVNALYATYGKEFVTITYGAMTKEKRIALQLEKTHSNDAYAMGNCHPAHRCEFGHYQKRCRNNRVLEKFYDATYIDTRTGNKAKGKELFNGRISRNHKKDSEDLHKYRSKKVSKGRRSIRRQRYAIQPYDTVRLESKTYITSGCHNKGTRLLIPVNGKSKSVAISKVQVVCHAGAWIQII

SEQ ID NO: 6267 - protein, 430 aa, unidentified
  REGION 1..430: note = Human gut metagenome
MPKVYVLNRHGRPLMPCTPAKARHLLDAGKAKVRQRTPFTIQLLYGSTGYTQEVILGVDAGSKTIGLSASTETEELFSTEVKPRSDVVELMSARRQFRRARRSRKTRHRKPRFNNRVRSKHKGWLAPSVEVKIQEHMTAIRRVCVILPISKVVVETAEFDLQLLKAVAEGKPVPQGEDYQKGEMYGHYNVRQYVLWRDGYTCRVCGAHGSVKKGVPLHVHHLESRKVGGDAPDNLVTLCTACHDKLHKGIITAADLKKRKRRSTRDATFMGIMRMTLLRRLREQLPVPVVETRGYITKATREKLLVLPKSHTNDALAIAHGPQGFRAGYLPNIRQADRLYTIRPVRHHNRQLHKATILKSGVRKANQAETYICGFRLYDKVLYNGIECFVWGRRTSGSFLLRQLNGEKVKDGVSHKHLKLLERSQSYLVA

SEQ ID NO: 6268 - protein, 441 aa, Moorena sp.
MSVLVLDKRGRPLMPCSERRARLLLARGRARVHRVVPFVIRLTDRYAEDSVFQTLRVKLDPGSKATGIALVRETGSGVAVLNLFELMHRGRQISEALTARRYFRKRRRSANLRYRAARFNNRKRPEGWLAPSLQHRVDTTMTWVKRLMHWAPVSALSMELVRFDMQAMQNPEISGVEYQQGELAGYEVREYLLEKWGRQCAYCDDKGVPLQIEHILARARGGSNRVSNLTIACGPCNLLKGALDVREFVKDETRRNRILARAKAPLRDAAAVNSTRWALLAQLRTTELCVETASGGRTKWNRTRFEIPKAHALDAVCVGDVGSVEGWRRPTLEIKCAGRGSYQRTRLTAQGFPRGYLTRQKRVHGFQTGDRVRADVLKGKKAGIYVGRVAVRATGSFNIQTPQCVVQGISHRHCKVVQRADGYGYQLKKQPASPALLSSSS

SEQ ID NO: 6269 - protein, 517 aa, Streptosporangium sp.
MATLNTRQQTHRQVLPQSAALESVGADTPQGRDETAHGHRHTAVPGVQHGRGETERTGTRSARRHPDLASAGEGAGSSAHPVVFVLDKHGQPLQPTSPAYARKLLRSGRAVVHRHTPFVIRLKDRTAAGSTVAGVHVGIDPGSKHTGIAVFTEHGGSRTGRYALQLDHRGAAIGDRLASRAALRRGRRSRNLRYRAPRFNNRTKPKGWLAPSLKHRVDTTMSWVGRLRRWAPVSAVHVERVAFDTHTLSAGRPLAGAEYQRGTLVGYEVREYLLAKWGRACAYCGISGAPLNIDHIHPRSRGGSDRISNLTVACVPCNQTKNATPVEEFLKARPALLATILRQVKAPLRDAAAVNATRWALWRALEATGLPIATASGGRTRWNRSRTGAAKSHALDALHVGHLETVIGWPSTVLVVTATGRGTYARTTPDRYGFPRLLRPRIKLHHGFQTGDLVRANVPTGKKAGVHVGRVLVRSSGSFDVTTRHGRVAGINHRHVRHLQRADGYGYTTQKEADRND

SEQ ID NO: 6270 - protein, 420 aa, unidentified; identical to SEQ ID NO: 6212
  REGION 1..420: note = Human gut metagenome

SEQ ID NO: 6271 - protein, 512 aa, unidentified
  REGION 1..512: note = Human gut metagenome
MSTVYVLNKDGKPLMPTTRGGHVRHLLKEQKARVVRAKPFTIQLLYETNDVVQPLYLGIDPGRTNIGVAVVKANGTAVFTAHLETRNKEVPKLMQDRKKARRARRTNGRRCRRQRRAKANGTISKKCVKQDTAQSKNPSKRAKEIGIIKRRLPGYKKDVLCIGIKNKEAKYTNRTRPEGWLTPTANQLLQTHINLVRKMQKFLPISDVVLEVNKFAFMRLDNPDIQKWQYQQGPLYQKGSLENAVSEMQEHHCLFCDKPIDHYHHVVPQSENGSNTIANIVGLCAEHHNLVHKDAAWQKKLAEEKVGLNKKYGALSVLNQIIPALTNKLSVLFPKHFFVTAGKSTHDYRAAHGVSKDHWLDAYCIACSVLPSNVCDSNINNHMPYELKQFRRHDRRVLNNENMNRVYTLDNKAVAINRHKATEQEAASLEEFRKEHPNDVCKLKVKEHHPTYRNMNRNFPGSVFLVGKQIHVMQGIASSKDGKATKYNDTSATAIAAGKCKFVAKNTGILFV

SEQ ID NO: 6272 - protein, 414 aa, Streptomyces sp.
LKLATFRVGEKTHQAVLHQQLALELDPADNPGNRDETGAERREATGVEHVRGEIPAASPGGGGVTPNQPVGEEPRERHPFVFVLDKHGQPLQPCTPARARKLLKKGRAVVHRHTPFVIRLKDRTIAESEVDGVELGIDPGSRHTGIAAFTARAGERRGRYAVQLDHRGAVIRKRMGQRAAYRRRRRTSNLRYRAPRFNNRARPDGWLAPSLRHRVATAVSWVTRLSRWAPVRAVHVERVAFDTHAISAGRPLEGAEYQHGTLHGTEIREYLLAKFGRACVYCNISGVPLNIDHVHPRSRGGSDRISNLVTACIPCNETKSNRPVEEFVRDKTKLAKMLSRAKAPLRDAAAVQSTRWALWRALDQMLPTHIASGGRTKWNRTRCGLPKSHTLDALNVGKLDTVTETVTPILVAGC

SEQ ID NO: 6273 - protein, 514 aa, Nocardiopsis sp.
MATFRTGQQTHPPVLPQQVALESESADKPRIGYETGLRHHPTVVPGADHVRGETTDISPDVGGVTTRPLAGERPRERHPSVFVLDKNQVPLQPCHPARARKLLSKGRAVVARHTPFTIRLKDRTIDTSVVDGVQVGIDPGSKHTGIAVFTHQAGERRGRYGIQLDHRGAQIRKKMGQRSAYRRGRRSRNLRHRAPRFANRSRPEGWLPPSLRHRVETTTAWVDRLTRWAPVRAVHVERVAFDTHVLSAGRPLEGVEYQRGALHGYEVREYLLAKFDRACVYCGVTDTPLNLDHVHPRSRGGSDRVSNLVLACVPCNRTKGDRPVGEFVTNTRLLARILARAKAPLRDAAAVQSTRWALWRALDQRLPAHVGSGGRTKWNRTRNHLPKTHTLDALAVGEVDTVTETIYTVLVAGCTGRGSYARTRPDKHGFPRLRLPRTKGFFGFTTGDLVRAVVPQGKKAGVHTGRVAVRASGSFNITTTQGTVQGIRYKHVRLLQRADGYGYTWKGEGVSSRP

SEQ ID NO: 6274 - protein, 417 aa, unidentified
  REGION 1..417: note = Human gut metagenome
MPCSPAKARLLLKEKKAIVKRRTPFTIQLTIATGEAKQPVALGVDSGYKHIGLSATTEKAELYASEVELRQDITDLLSARLALRCSRRSRKTRYRAPRFDNRVASKREGWLAPSVENRIAAHMSRVEAVMRVLPVTAITVETAAFDTQLLKNPDIAEAAYQQGEQLGFWNVREYVLFRDGHVCQHCRGKSKDPILNVHHIESRRTGGDAPNNLITLCETCHKAFHRGEIELKVRRGKSFKAATFMGIMRWTLFERLKKAHPELSVRNTYGYLTKHKRISHGIAKSHCADAYCIADNLGAKRLEGFFFQKQTRKHNRQIHKLSILKGGLRKKNQAPYEVKGFRLFDKVICKGEEAFIFGRRTSGSFDVRRLDGTRISAGISCKKLRLLEPRTTYLTEFRKEAALPPLHECSGSRAEFR

SEQ ID NO: 6275 - protein, 465 aa, unidentified; identical to SEQ ID NO: 3856
  REGION 1..465: note = Human gut metagenome

SEQ ID NO: 6276 - protein, 412 aa, unidentified
  REGION 1..412: note = Human gut metagenome
MTNYVFVLDAAGKQLAPTKETKAWFFIRKEHATLVSKYPMVIQLNKEVSDDEICKDEIRCGIDDGGLHVGIALVQKCQTKNKVVFKGTIEQRNDVKHLMDVRRGCRHYHRYHKRYRQSRFNNRSSSKRGRIAPSILQKRQATVRVINQLNRWIHITNYWLEDVSIDIRALTDGYKSYSWQYQKSNRLDENIRKAVILRDECKCMECGKSNCRLEVHHIRPRRLNGSNTLSNLITLCEKCHQKTEGSEELFMDKYFSLLKSSDNKNLNYAQHVMIGKKWLREQLSNLGLLYLTNGGDTANKRIDWNIEKSHSNDAICITDLQPDTCDVKEWTIKPMRRQSKAKTDNVLGIKHRDLVEYTFKNGETHKGYVTALYPKQNAINFQSPTKHCKKVNAKKCRLLWKFNKIYWLDNVS

SEQ ID NO: 6277 - protein, 514 aa, unidentified
  REGION 1..514: note = Human gut metagenome
MSTVYVLNKNGKPLMPTTRCGRVRHLLKEQKARVVTSNPFTIQLLYETDDVVQPLYLGIDPGRTNIGVAVVKTDGTAVFTAHLETRNKEIPKLMQGRKKARRARRTNGRRCRRQRRAKANDTISKKCVKQDTAQSGSASKRAKKIGVIKRHLPGCEKGVLCIGIKNKEAKFSNRTRPEGWLTPTANQLLQTHINLVKKIRKFLPISDVVLEINKFAFMQLDNPNIQKWQYQQGPLYQKASLEEAVSEMQEHHCLFCKKPIAHYHHVVPQSENGSDTIGNIIGLCTKHHDLVHKDTAWQKKLAKKKTGLNKKYGALSVLNQIIPALTKGLGSRFQGYFYVTTGKSTYDYREVHGVSKDHWLDAYCIACSVLPNDVCDSDINNRVPYELKQFRRHDRRALHKANINRVYTLNGKSVATNRHKAIKQTIDSLEEFRQCQPDDVCKLKVKEHHPEYRNPERNFPGCVFLVGKHTHVMQGTSGSHNGQADGYYDTNGNSYSSGKCKFVAKNEGVVFTLN

SEQ ID NO: 6278 - protein, 419 aa, unidentified; identical to SEQ ID NO: 3670
  REGION 1..419: note = Human gut metagenome

SEQ ID NO: 6279 - protein, 450 aa, Moorena sp.
MVYVINFEGKPLMPTTNAKARKLLNQKKATVKRANPFTIQLLYKTDTEYIQTITLGIDSGYLNIGFSAITDSKELIVGEVKLLQGIKDRLLEKSQYRKIRRQRLRYRKPRWNNRKIRQGWLAPSLQHKLDTHVKFIDYLNTILPIRNIVLEVANFDIQKIKNPDISGVEYQQGEQMGFWNIREYILHRDGHKCQNPNCKNKSKEQILEIHHIKYKSKGGSDAPSNLITLCNKCHTYPNHKKGKFLYDWCENGKKVRGFKDATFMSMIRWYLLEQLKEKYTNIKATYGYLTKNHRIEHGIEKSHFNDAFAIAKGVNQVRNSEIFKVEQSRLNNRSLEKFYDAKYIDSRTGEKVSASELNCGRRTRNKNLNSENLRVFRGQKISKGQRRIRKKKSLYQPNDLIKYESKVYTVKGSQNEGKYIALKGIKKVPNVKLIKPYIFKKGLNWSHGLC

SEQ ID NO: 6280 - protein, 334 aa, Anoxybacillus sp.
VVGSASVLHITSIYNMVEENMTCFMQRKGENPMVFVLDTNKRPLAPCHEAVARKLLKQGKAAIYRRFPFTIILKKSVDESEIKATYRLKIDYGSRHTGLAILRGQEVVWLGQLDHRTDIKERIDKRRAFRRVRRNRKTRYRKPRFLNRKRKEGWLPSSLESRVQNIQTWVNRLKKLCPIGYISYENAKFDTQLMRNPEINGVEYQQGTLQGYEVREYLLEKFGRKCCYCGKENVPLEVEHIIPKSRGGTDRVDNLCLACHDCNQRKGSKTAEEFGYPHIQKQVKESLKDASAINSTRWKAYEVLKQTGLDVECGTGARTKMNRIRLDLPKTHYF

SEQ ID NO: 6281 - protein, 419 aa, unidentified
  REGION 1..419: note = Human gut metagenome
MVYVLDINGQPLMPTARHGKVRRLLNSHLAKVVKRCPFTIQLLYQSTKETQSVSLGIDAGSKHIGLAATTEKKDVYQEELIPRNDVVKLLSARRILRRSRRNRKPRYRKPRFNNRVHSKHKGWLAPSVEVKIQEHITAIKRICQILPISEIHVETAEFDLQRLKAMEEGSPLPVGTDYQLGEQYDFYNTRQYVLHRDRYTCQCCGAHDNNVRLHVHHIESRQTGGNAPNDLITLCEHCHKALHEGKLELSKGKKRGKSYRDAAFMGVMRKTLLERLKKEVDVPVTETYGYITKYWREKAGLEKSHINDAICISKHPYAKPLDTYYLTKAVRHHNRQIHKVNFSKGGVRKRNQAPHLVKGFRLFDKVLYQGKECFIFGRRVSGRMDIRLLDGTRINASVGYKNLKLLELRKAYLTERRTC

SEQ ID NO: 6282 - protein, 418 aa, unidentified; identical to SEQ ID NO: 4327
  REGION 1..418: note = Human gut metagenome

SEQ ID NO: 6283 - protein, 414 aa, unidentified
  REGION 1..414: note = Human gut metagenome
MPCSPAKARLLLKEKKAIVVRRTPFTIQLTIATGETKQPVSLGVDAGYKHVGLSASTEKAELYASEVELRQDITDLLSARRALRQSRRNRKTRYRAPRFDNRIRTKRKGWLAPSVENRIDAHLSRIEAVLRLLPVTKITVETASFDLQLLKNPDISGKEYQEGEQLGFWNIREYVLCRDGHVCQHCYGRSKDPVLNVHHLESRRTGGDSPGNLITLCETCHKALHRGEITLKAKRGQSFRAEAFMGIMRSEVLNRLKASHPELEVNNTYGYRTKHARIANDIAKSHCADAFCIAGNLGAERLGEFFFQKQTRRNNRQIHKLSILKGGIRKRNQAPFEVNGFRLFDKVACKGEEGFIFGRRSSGFFDVRKLDGTRISAGISCKKLHLLEKRRTYLTEIRKEEALPALPEGRGLRA

SEQ ID NO: 6284 - protein, 471 aa, Acidiferrobacter sp.
MAVFVLDRRKKPLMPCAERRARLLLARGRARVHRVVPLTIRLVDRLQEDSTLQPLRLKMDPGSQTTGMALVREPDTTDTTREDTIRALTVLMLLEIQHRGPSIHEALTQRSSHRRFRRGRLRHRPARFDNRTKPEGWLAPSLQHRVDTTMAWVDRLCRWAPVAALSQELVRFDTQQMQNPEISGVAYQHGTLAGYEVREYLLEKWARTCAYCGAHNTPLEIDHIHPKSQGGSDRVSNLTIACHDCNQRKGSQDVAVFLAKRPETLQRIRAQAPAPLRDAAAVNSTRWALYQRLKATGLEVEVASGGRTKWNRHRLHLPKTHSLDAVCVGSVDTIHNAQQPVLTIKATGRGSDQRTRLTKHGFPRGYLTRSKSAFGFQTGDLVKAVVTSGKKAGRYFGRVAIRATGSFNIQTATGLVQGIAHRFCILIQRADGYGYALTKRAFDTGEAGTGAAYAAALSLPGMNPGVSRANG

SEQ ID NO: 6285 - protein, 393 aa, Moorena sp.; identical to SEQ ID NO: 6115

SEQ ID NO: 6286 - protein, 507 aa, unidentified; identical to SEQ ID NO: 5548
  REGION 1..507: note = Human gut metagenome

SEQ ID NO: 6287 - protein, 437 aa, unidentified
  REGION 1..437: note = Wastewater metagenome
MPCSEKRARLLLARGRACVHRLVPFVIRLTDRQLDTCTLQPLRIKLDPGSKTTGLALVRDTEHLNTDTGEIQRGVAVLSLIELVHRGRQISEALTARRQMRRRRRGCLRYRAPRFLNRGNKARGWLAPSLQHRINTTTAWVARFRRWSPVTALSAELVRFDMQRLQNPEISGVEYQQGTLAGYEVREYLLAKWSRKCAYCGVENVPLQIDHVHPKAKGGTNRVSNLTLACGPCNARKSAQSVDAFLAKDPKRLTALLAQAKRPLKDAAAVNATRWALVGALKATGLPVETASGGCTKFNRSRLAIPKTHALDAVCVGAVSVVTNWQKPSLTIKCTGRGSYQRTRLDKYGFPRGYLMREKSVKGFKTGDLVRAIVPTGKKAGRHTGRVAIRKSGSFNIQTLAGVVQGIGYRHCRLLQRADGYGYFFNKAACDTAQKRE

SEQ ID NO: 6288 - protein, 414 aa, unidentified
  REGION 1..414: note = gut metagenome
MPCSPAKARLLLKEKKAIVVRRTPFTIQLTIATGESKQPVSLGVDAGYKHVGLSASTEKAELYASEVELRQDITDLLSARRALRQSRRNPKTRYRAPRFDNRIRTKRKGWLAPSVENRINAHLSRIETVIRLLPVTKISVETTSFDMQLLKNSDIAEKEYQESEQLGFWNVREYVLFRDGHVCQHCHGRSKDPVLNVHHLESRRTGGDSPGNLIALCETCHKELHRGEITLKAKRGQSFRAETFMGIMRWEVLDRLKASHPKLEVQNTYGYRTKHARIVNGIAKSHCADAFCIAGNLGAERLGEFLFQKQTRRNNRQIHKLSILKGGIRKRNQVPFEVKGFRLFDKVACKGEEGFIFGRRSSGYFDVRKLDGTRISAGISYKKLRLLEKRQTYLTEIRKEEALPPLPEGRGLRA

SEQ ID NO: 6289 - protein, 368 aa, unidentified
  REGION 1..368: note = Human gut metagenome
VVYIQDIDGNPLMPTTRHGKVRRLLKSNKAIVINLCPFTIQLTYATSGYKQEVVLGVDAGTKHVGLSATTKSKELYASEIILRSDIVELLSSRRESRRRRRNRLRYRKPRFMNRIKTKKEEWVAPSVRQKIDSHLKIIGFVYSILPISKLIIEVAQFDTQKIKNPEISGKEYQEGEQLGFWNVREYVLARDGHKCQHCKGKSKDPILNVHHIESRKTGGNSPSNLITLCETCHKEFHKGKIKLKVKRSASIRDAAVMGIMKWRLYNKLKSLYPNVKMTFGYITKHDRINHGIEKSHVSDAFVISRNFNSCRLGYYYKRKLVRRHNRKIHKMKILKGGIRKRNQAPFKVFGFRLFDKVMFQGEEYFIYA

SEQ ID NO: 6290 - protein, 512 aa, unidentified
  REGION 1..512: note = Human gut metagenome
MSTIYVLNKDGKPLMPTTRGGHVRHLLKEQKARVVRAKPFTIQLLYETNDAVQPLYLGIDPGRTNIGVAVVKANGTAVFTAHLESRNKEILKLMQDRKKARRARRTNGRRHRRQRRAKANGTISKKCVKQDTAQSKNPSKRAKEIGVIKRRLPGHKKDLLCIGIKNKEAKYTNRARPEGWLTPTAIQLLQTHINLVKKIQKFLPISDVVLEVNKFAFMRLDNPDIQKWQYQQGPLYQKGSLENAVSEMQEHHCLFCDKPIDHYHHVVPQSENGSNTIANIVGLCSEHHNLVHKDAAWQKKLAEEKVGLNKKYGALSVLNQIIPALTNKLSVLFPKHFFVTTGKSTHDYRESHSVSKDHWLDAYCIACSVLPSNVCDSNINNHVPYELKQFRRHDRRALHKENMSRVYTLNGKAVATNRHKAIKQTTDSLEEFRQSHPGDVCKLKVKEHHPAYRNLNRNHPGSVFFVGEQAHVMQSIVASKDGKATRYKDTNVNKIAAGQCRFVAKNEGIVFT

SEQ ID NO: 6291 - protein, 454 aa, unidentified
  REGION 1..454: note = Ga0315284_10011788
MQKLQAKLKNVPKDAHQVLCSTNSDLNRVEKLSDQSIVLACNNPDGDQSHSKNEKQDLRVPVVYVLNMRGNPLMPCSCRKAKKLLKEGKAKVVKRIPFTIQLRIPTGEAKQDIILGVDTGYKNIGISAISGIKELLSIDVGLRNDITDKLKERGMYRRGRRNRLWYRKPRWLNRANSRKEGRLMPSVLQKVNTHISIIEKIKKLLPISKVIIETGLFDVAKMKNEEIRNWEYAKGEMFGFENVKAYVLSRDNHKCYFNDRCSDKLHVHHIKFRSKGGSNNPNNLITLCERHHDQLHEGKIVLNIKKHKELKSATIMNIIRKRLVEYFPESIETFGYETKVKRRELGIEKSHVNDAFVIANGKTQERIIPFNIIQKRKNNRCLQLNRKGYKPSIKKERSKIQPLDLFWVKGNKYLCKGMFNYGKYICYGSTKLKEYFKIELVESYYYQGIFVWNI

SEQ ID NO: 6292 - protein, 424 aa, unidentified
  REGION 1..424: note = Human gut metagenome
MVYVISQDGKPLMPCSNPIARLLLKQGKAKVKKREPFTIKLTYEAPNYTQDLTLGVDTGSGTIGTAVSKDNGDIVYMSEVIVRNDITDKMTQRVKYRRNRRNRKIRYRKARWLNRANSIKNDRFSPTMQSKLHSHVKEIEYIKSILPITEMVFETGQFDTHFMKNPSLANPKVKHWGYQKGTNYGFENTKAMVLNRDSYTCQCCKGKHKDSKLEVHHIVFRSQGGSDEESNLITLCHTCHKDLHSGKINPKLSGKVKGNLKYATQMNSIRKQLFRLYPNAIETFGYVTKANRLHLGVNKEHYYDACTIATQGNAFNVKSNLYKKKCVSDGDFQKTKGVCSEQPIVTDKICGFRKFDKVRYFGNDYFIKGRMSTGYAILMDIDGDKVDFSAMPKGYKTPKMVNLKRLEARSTWMITTVEVTPNIA

SEQ ID NO: 6293 - protein, 396 aa, unidentified; identical to SEQ ID NO: 4508
  REGION 1..396: note = Human gut metagenome

SEQ ID NO: 6294 - protein, 416 aa, unidentified
  REGION 1..416: note = Human gut metagenome
MVYVLSKTGQPLMPTENHAKVRVLLKQQKAKIVHRCPFTIQLLYDSTNYTQPVSLGIDAGSRHIGISATTETKVLYEADVTLRNDIVNLLSTRREARRTRRSRKTRYRKPRFNNRTRKDGWLAPSVRQKVDTHLTTVRKVTEILPVNSITVETASFDIQKIKNLNIVSTDYQHGEQFDFWNVREYILFRDGHKCQCCKGKSKDPVLNVHHIESRKTGGNAPNNLITLCETCHKGYHNGTVSLPKNIRRGMKFNDAAFMGIMRLAFFNKVKETYEPLGIMVNMTYGYITKNTRIEHNLPKDHFIDARCISGHPDATSDGTVFYQKKVRCHNRQIHKQKIFKGGIRKRNQAPYEVKGFRLYDEVLWKGQKCFIFGRRSTGRMDLRLLDGTHINASVGYKNLKLLRKRSNYLTEQRKVG

SEQ ID NO: 6295 - protein, 413 aa, unidentified
  REGION 1..413: note = Human gut metagenome
MTNYAFVLDADNKQLTPTKEQKAWFLIRKKRATLVSKYPMVIQLKKKIPDKEICKDEVRCGIDDGGLHVGVALVQKCHTRNKVIFKGVIEQRNDVKHLMDVRRGYRRYHRYHKRYRPARFNNRNSSKREGRITPSILQKRQATIRVVNQLNKWINITNYWLEDVAIDIRALTDGYKPYRWQYQKTNRLDENIRKAVILRDGCKCMECGKSNCRLEVHHIKPKRLKGSNTLGNLITLCAKCHQKTESVEELYMDRYFALLKSSDNKNLNYAQHVMIGKKWLREQLSNLGMLHLTNGGDTANKRIDWDITKSHSNDAICITDLKPDTCEIKEWVIKPMRRQSKAKADNVLGIKHRDLVEYTFRNGETHRGYVTALYPEQNAINFQSPTKHCKKVNARKCKVLWKYSKIYWLDNVS

SEQ ID NO: 6296 - protein, 443 aa, unidentified
  REGION 1..443: note = hot springs metagenome
MVFVLNKDKTPLAPCHETVARKLLKQGKAVIHRIYPFTIRLKEQKDTSTFKPNYRLKIDYGSRHTGIAIIKNDREVIFLMQIHHRTDVKENMDTRRIFRRSRRNRKTRHRAPRFLNRRRDTDWFPPTLLSRIRNIETWVRRLCKLCPITAISYENVKFDMQFMRNPEISGIEYQQGTLQGYEVREYLLEKFGKRCVYCGATNVPLEIEHVIPKSRGGTDMIDNLVIACHECNQKKGNKTAEEFGYPEIQQLVKEPLRDCALVNATRWRIYNILKETGLPVECGSGALTKMNRTRLGLPKNHHFDAVCVGFSTPERIWFKTKNVLHVIAKGRGTRQIAVLDRFGFPRGHRTRKKFFYGFKTGDIVRANVPKGKYKGVWTGIVACRESGYFDIKDRTGRRIVQGISYKYCKVIQRFDGYCYDLKQAEVPGTFPLQPVEVGASMCQ

SEQ ID NO: 6297 - protein, 459 aa, unidentified
  REGION 1..459: note = uncultured beta proteobacterium
VVFVLDKRGKPLMPCTERRARILLERRRARIHRLYPMVIRLVDRFAEDSEFQELNLKLDPGSKTTGMALNRADDSTETVLSLFELMHRGALISKKLEQRRSMRRARRNRHTRYRQARFLNRGNKQKGWLAPSLMHRVNTTMAWIDRIMRWSPVSLLTQELVRFDTQKLENPEISGVEYQQGTLLGYEVREYLLNKWNRACAYCDAQNVPFEVEHIHPKSKGGSNRVSNLALACRSCNNKKDNLPIDVFLAKDQSRLKRILVQAKAPLKDPAAVNSSRWRLFNELKATGIVVKTGTGGQTKFNRVQNKIPKTHALDAACAGHVEFVSDWQKPTLSIKCSGRGTYARTKLDSYGFPRGYCLRQKQVHGFATGDIVRAKVTKGKKSGTYFGKVAIRESGSFNISTNAGVIQGVSHQYCKVVQRADGYGYLFNQDSKQSRVQGIALQSALSLPALKDGVSRAN

SEQ ID NO: 6298 - protein, 412 aa, unidentified; identical to SEQ ID NO: 4932
  REGION 1..412: note = Human gut metagenome

SEQ ID NO: 6299 - protein, 431 aa, unidentified
  REGION 1..431: note = Human gut metagenome
MPDKVYVISRLGHPLMPCSPAKARHLLDDKKAKVVKRMPFTIRLLYGSTKYIQPIILGVDAGSKTIGLSASTAKEEVFAAEVMPRNDVVENLSTRREFRRARRNRTTRYRKPRSDNRVRSNHERWLAPSVKVKIQEHITSIKRVCTILPISKVVIETAEFDLQLLKAIQEGKPIPEGEDYQKGEMYGSYNVCQYVLWRDNYTCICCGVRGTPKNPVRLHIHHFESRKYGGNAPDNHGTLCDDCHKKFHLGIITDVKLKTRRRQSTRDAAFMGIMRKTLMWRLRTELFIPVAETKGYITKATREKLLVLPKSRTRDALAIAQGRHGFGIKEYAYVEPANHIYMVRPVRHHNRQLHKASILKGGIRKRNQASKYVFGFRLYDKVLYQGKACFVWGRRTSGTFLLRTIDGIKVKDGVSYRNLTLLERSSNYLIA

SEQ ID NO: 6300 - protein, 373 aa, Moorena sp.
MQNYVLVIDTDKQPLNPISPKKARRLLDKGKAAVFRMYPFTIILKAAIANPTISPCQIKIDPGSKVTGFALVQDDQVIWGMELEHRGGLIKKKLESRSGVRGGRRNRNTRYRKPRFLNRKRPEGWIPPSLEHRVLTIETWVRRLTKFCPVNEIWIEIVKFDTQKMQDPEINGVEYQQGELAGYEVREYLLEKWGRECAYCGKQNIPLQIEHIHPKSKGGSDSAKPTLRERVSNLCLACEKCNQRKGNRPIEEFLKKKPGLLQKIKNKALSPLRDAAAVNTTRNKVVKVLNEIKPVVTGTGAQTKYNRTKLGLPKQHWIDAACVGDVEALVLRTYQPLVVTCKGQGGRQKAALNKYGYPIRHNPLKPIKGWKAW

SEQ ID NO: 6301 - protein, 442 aa, Lactobacillus sp.; identical to SEQ ID NO: 4549

SEQ ID NO: 6302 - protein, 450 aa, Moorena sp.; identical to SEQ ID NO: 2935

SEQ ID NO: 6303 - protein, 431 aa, unidentified
  REGION 1..431: note = Human gut metagenome
MPDKVYVISRLGHPLMPCSPAKARHLLDDGKAKVVKRTPFTIKLLYGSTEYTQPVILGVDAGSKTIGLSASTTKEELFAAEVMPRNDVVENLSTRREFRRARRNRTTRYRKPRFNNRVHSKNNGWLAPSVEVKIQEHITSIKRVCAILPISKIVVETAEFDLQLLKAVQDGKPVPEGEDYQKGEMYGSYDVRQYVLWRDNYTCICCGVKGTDKKPVKLHVHHFESRKHGGNAPDNYGTLCEDCHKKLHLGIITDISLKTRKRPSTRDAAFMGIMRKTLMQRLITGLSIPVAETKGYITKAAREEILKLPKTHTNDALAIAQGRHGFGIREQAYVKPTNRIYTVRPVRHHNRQLHKATMLKGGIRKLNQASKYIFGFRLYDKVLYQGGECFVWGRRRSGSFLLRTIDGTKVKDGVEYRNLTLLERSTNYLIA

SEQ ID NO: 6304 - protein, 424 aa, Tolypothrix sp.
MQNYVFVIDTNKQPLNPISPARARELLTKKKAAVFKIYPFTLILKHAVDNPNPNPLTIKLDPGSKFTGIAILNDDKVIWAAELEHRGRQIKGSLESRHSLRRSRRTRKTRYRKPRFENRKRPEGWLPPSLMHRVFSVETWVKRLCRYAPIAQISMELVKFDTQKMQNPEVDGVEYQQGELAGYEVREYLLEKWRRKCAYCDKEGVPLQIEHIHPKSIGGSNRVSNLTLSCERCNIKKGTKSVDEFLKKAPTRLADIKRQAKQPLKDAAAVNATRWSLFRTLKNILPITTGTGGQTKHNLIKFDLPKYHWVDAACVGNVEKLKLLTQQPLRIKCTGWGTRQMCGTDRYGFPIRHKERKQVHFGFKTGDIVKAVVSTGKKIGEYVGRVLCRKTGSFDIVTKSGRVAGINYKFCTPIHKKDGYSYAF

SEQ ID NO: 6305 - protein, 431 aa, unidentified
  REGION 1..431: note = Ga0307928_10034124
MTNLFNSREEHLTLTDGGHKDNMLVYVINKNGNRLMPCKPAKARHLLRDGKAHVVKRSPFTIQLDWDCEENVQDVTLGIDKGSKITGLCCVGNGRVLLSGNINHRRDIKKKMDGRRNNRRARRSRKWYRPPRFNNRASSRRSGRLPPSIKANAEEVIRATKKIPLPISHIVVEDVLVDIARLNNPNLRGKQYQQSNRLDENLRLATLMRDNFKCAQCNVGDTRLEAHHIIWSGQGGKDTISNMATLCSSCHAKVHAGVITVSGGVSGFRDRIAQRTMQGKTYLYNSLSAMAPLSKVFGYQTAEYRKALRLPKDHDIDALCIATMLTGEVVPHNRDNFYGIKFRARQTRRQYFDLPRSGKGRVRYQVNKELYGFRKGDIVKVKGKWTKQINSICSRGYLAFQRTGNGPGSASPKYCQLLEKASTIKWSKSNE

SEQ ID NO: 6306 - protein, 426 aa, unidentified
  REGION 1..426: note = Human gut metagenome
MVYVQNRLGQPLMPTKDHRKVRLLLDSGAAVVVKRTPFTIRLTTKAKSYVQPIILGVDAGSKTIGLSASTETEELFAAEVTPRNDVVDNLSTRREFRRSRRNRKTRYREPRFNNRVRSKHKGWLAPSVEVKIQEHITAVKRVCALLPVGKIVVETAEFDLQLLKAVEAGLPVPQGEDYQKGEMLGHYNIRQYVLWRDGYTCRCCGTHGKGVKFHVHHLESRKTGGNAPDNLVTLCDGCHKKFHKGIITPDILKKRKRRSTRDAAFMGIMRKTLMERLRAELAIQVVETKGYITKYTRVELLKLEKTHTNDALAIAQGRRGFGVEELTTIPQSDYIYRIRPVRHHNRQLHKATILPGGIRKSNQAPRYVWGFRLFDKVSYLGEDCFIWGRRSSGSFLLKLLDGTKVKDGVGYKRISLLERSASYLIS

SEQ ID NO: 6307 - protein, 427 aa, unidentified
  REGION 1..427: note = Human gut metagenome
MQYVYVLNKHGEPLMPCSPRKARLLLNQKKACVVKRTPFTIKLLYGSTGYKQPIILGVDAGSKHIGISATTEKCELYREEAIPRNDVVDLLSARRAFRRSRRNRKTRYRAPRFNNRVHSKHKGWLAPSVEVKIQEHITLIKRVCRILPVTLVRVETAEFDTQRLKAMLEGKPLPVGTDYQHGEMYDEYNVRQYVLKRDNYTCQCCGAHPTKTKAVKLHVHHIETRRTGGNAPNNLITLCTVCHKALHVGKVTLDGKKRGKPLKDAAFMGIMRKTLMERLLKELKIPVQETYGYITKCLRERHSIPKNHTNDARCITKNPLAIPCDTCYYMKAIRHHNRQLHKATILKGGIRKANQAPYTVKGYRLWDKVSYNGSECFITGRRTSGYFALKKLDGTIVSNGASYKKLRILEVATNYITEKKVNGQFLP

SEQ ID NO: 6308 - protein, 512 aa, unidentified
  REGION 1..512: note = Human gut metagenome
MSTVYVLNKNGKPLMPTTRCGHIRYLLKEKKARVVASKPFTIQLLYETNDVVQPLYLGIDPGRTNIGVAVVKTDGTAVFTAHLETRNKEIPKLMKKRKDSRRARRTNGRRCRRQRRAKANDTISKKCVKQATAQNGSVSKRAKEIGVIKRHLPGCEKEVLCIGIKNKEAKFSNRTRPEGWLTPTANQLLQTHINLVKKIRKFLPISDVVLEINKFAFMQLDNPNIQKWQYQQGPLYQKASLEEAVSEMQEHHCLFCKKSIVHYHHVVPQSENGSDTIGNIVGLCTKHHDLVHKDTAWQKKLAKKKTGLNKKYGALSILNQIIPALTKELSSLFPKHFFATNGKSTHDYRAAHDVSKDHWLDAYCIACSILPNDTCDKNINGRVPYKLKQFRRHDRRALHKENMSRVYTLDGKKVATNRHKAIKQTTDSLEEFRQRQPNDVCKLKVKEHHPEYRNPERNFPGCVFLVGKHTHVMQGTSGSHNGKADGYYDTNGNSYPSGKCKFVAKNKGIVFA

SEQ ID NO: 6309 - protein, 414 aa, unidentified
  REGION 1..414: note = Human gut metagenome
MVYVINKQGQALMPTERFGKVRRLLKNSLAHVVCRIPFTIQLDYDTTDYTQPVSLGVDAGSKHIGISATTSEKELYAADVELRNDIVDKLSTRREQRRTRRSRLRYRKARFNNRVSSKRKGWLAPSVENKIQTHLTVVEKIHKFLPITNIVVETASFDIQKINNPSISGSEYQQGEQLDFFNVREYVLFRDNHTCQHCKGKSKDKVLNVHHIESRKTGGDSPKNLITLCETCHKAYHRGEFKLNIKRGKSFRDSAFMGIMRWSFYNRLKNIYPNVSMTFGYITKNTLITNNLPKDHYVDARCISGNPTAKPLGYYFYQKKVRCQNRQIHKANFLKGGRKKLNQAPFLVKGFRLFDLVEYQKDLYYIFGRRDSGFFDIRKLDGTKVNKGSINCKYLRLVDTRKSILIEKRMQVNL

SEQ ID NO: 6310 - protein, 327 aa, unidentified
  REGION 1..327: note = Human gut metagenome
LERRNRKTRYRKPKFLNRKRRDEWLPPSLQSRINHTFHWIDTLSSLVPNPILHIEVGKFDVAKMINPEIHGVDYQHGQTYGFFDERYFVFARDNYTCQCCGKSKNKILNTHHIIYRSNGGTNRVDNLITVCTDCHTSQNHRKGGIFYQWQEQHKKVKQYKEPPFMNTLRKRIFVAYPDAEITYGSETTPKRKAMKLDKTHYNDAIVISGINEIKENPEEWLLIKQFRKKKRSLHEATARKGRKKPNRNQTRNSKNTPYYKGFYLNDKVSVFGKSGYITGFTSNAAYIKDENNDYITLPNKTYKQVSINKMKLECHNNNWQYIIKNAV

SEQ ID NO: 6311 - protein, 426 aa, unidentified; identical to SEQ ID NO: 2797
  REGION 1..426: note = Human gut metagenome

SEQ ID NO: 6312 - protein, 414 aa, unidentified
  REGION 1..414: note = Human gut metagenome
MPCSPAKARLLLKEKKAIVVRRTPFTIQLTIATGESKQPVSLGVDAGYKHVGLSASTEKAELYASEVELRQDITDLLSARRALRQSRRNRKTRYRAPRFDNRIRTKRKGWLAPSVENRINAHLSRIETVLRLLPVTKITVETASFDMQLLKNPDIAGKEYQEGEQLGFWNVREYVLFRDGHVCQHCHGRSKDPVLNVHHLESRRTGGDSPGNLITLCETCHKALHRGEITLKAKRGQSFRAEAFMGIMRWEVLNRLKASHPELEVNNTYGYRTKHARIANGIAKSHCADAFCIAGNLGAERLGEFFFQKQTRRNNRQIHKLSILKHGLRKRNQAPFEVKGFRLFDKVACQGEEGFIFGRRSSGFFDVRKLDGTRISAGISYKKLRLLEKRQTYLTEIRKEEALPPLPEGRGLRA

SEQ ID NO: 6313 - protein, 442 aa, Lactobacillus sp.; identical to SEQ ID NO: 4549

SEQ ID NO: 6314 - protein, 406 aa, unidentified
  REGION 1..406: note = Human gut metagenome
MVYVQDINGKPMMPTTRHGKVRRLLKDKKAVVVNLCPFTIKLTYVTSDYKQEIVLGVDAGTKHVGLSATTKSKELYSSEVILRNDIVDLLSTRRELRKTRRNRLRYRKPRFNNRVKNKRPGWIAPSVRYKVDAHIRVIDNICYILPISRIVIEVAQFDTQKINNPEISGKEYQKGDQLGFWNIREYVLARDGHKCQYCKGKSKDKVLNVHHIESRKTGGDSPSNLITLCETCHKEYHKGNIDLKIRRGKSLRDAAVMGIMKWRLYEELKSKYDNVSMTFGYVTKHNRIKHGIEKSHVSDAFVISKNINAKRIGCQYLKRLIRRHNRQIHKMKILKGGKKKNNQAPFEVFGFRLFDKVLYDNKICFVYGRRKSGNFNIRDFSGENPKDVSHKKFKLIRGKRHPIILK

SEQ ID NO: 6315 - protein, 456 aa, Halomonas sp.
MAVFVLDKHKQPLMPCSEKRARLLLQRGRAVVHKRYPFTIRLKDRVGGDTQPLRLGLDPGSKTTGLALMRESDDSQRHVLCLFDLVHRGYQIKKALQQRAAFRRRRRTANLRYRAPRFDNRTRKADWLPPSLQHRVDTVMAWVQRLSKLAPITGISQELVRFDTQQLDNPEISGVEYQQGTLLGYEVREYLLEKWGRECAYCGTADTPLEMEHVVPRSRGGCNRVSNLTIACHDCNQAKDSLPLATFFATDKGLKKRLKANGLSAGARLERVQRQLKQPLRDASAVNSTRWALLTALNATGLPVAVTSGGRTKYNRQRLDIPKTHALDAACVGAFDLLHDWTVPTLTIKCTGRGSYQRTRLTKHGFPRGYLMRQKQVHGFQTGDMVKAIVPTGKKAGTHTGRVAVRKTGSFNIQTEQGAVQGISHKYCTVIQRGDGYGYHLTPFINHKGGAEKAVA

SEQ ID NO: 6316 - protein, 469 aa, Moorena sp.; identical to SEQ ID NO: 3785

SEQ ID NO: 6317 - protein, 455 aa, unidentified
  REGION 1..455: note = Soda lake metagenome
MAALTGFKLHKERKCKMMVRVIAKDGTVLQPTNRHGKVRRLLDNNKAEVVCKSPFTIRLLYKTTKKTQKVKVYFDTGGKYQGFAIISNGKVIQKGTIELRDGIPELLKQRRSYRRGRRHRNKRYRPARFNNRKRKKGWLPPSVRSKYRHIINWIDKLTNYLPKYNLTVEIAKFDIQKLKNLNIEGKEYQQGSLYQYENTKQYLIFRENNKCQLCGKKKGDDTWNLHHLHQSKDCGTDSPDNLALLHSKCHDKLHSNSLDDKLKENDKKLTSQKANVKQFRYTTFMNIIKNRLCNELKNKYSNKVNFTYGYITNINRRKLELEKTHYNDCLAMHKKEVEDNINSIYIKQVRKKKRSLHEAIPRAGRSDKVNTTQKRSSKNTKEVIKNDKKWSLWDKVYISELGTTGFVSGFTGKWVYVQDINNNYLKLPNKSYKQMNRDNVRLVTRNNNWIRKEIA

SEQ ID NO: 6318 - protein, 512 aa, unidentified; identical to SEQ ID NO: 3720
  REGION 1..512: note = Human gut metagenome

SEQ ID NO: 6319 - protein, 521 aa, unidentified
  REGION 1..521: note = Human gut metagenome
MRDYMTQKRKEASRMSEYIYVLGMDGDPEMPTKRKRHVEKMLQTGRARVFRQVPFTIQLTYKNQPVLQPVTIAEDPGRSNIGMAVVSLSGELLSAAVVQTRNKEIVKLMEKRKQHRRASRNGERKARQRLAKKCHTMIKAGFLMRKLPMYGKDKRVQCNVIRNTEARFCNRKREDGWLTPSAEHLVRTHINLIHKMQKFLPITDVAIEVNRFAFLSLEDPSISGVDFQNGPLKGYDDLNAAVEDLQDGHCLMCNSPIEHRHHIVPRSMQGSNTIGNIAGLCCKCHERIHKDARFEDHLKKKKAGLNKRYAAVSVLNQAIPFICKRLEQEFGKERVHYCSGRDTSMVRRSLGYHKTKEEQLHEVDAWCIAVLALRQIPEKAPEFDHVHEILQFRRQDRSIIDAQTSRMYYHEGKKVAKNRKKAEGQKDDSLQEWRERQVERYGKEQTRKMISQLEIKKSSRRYNRLDRLMPGAVFYYQGVRYVMRGQHSNRQYLQAVGMGSKDFPAKKCKIVVHNEGLVFVS

SEQ ID NO: 6320 - protein, 512 aa, unidentified
  REGION 1..512: note = Human gut metagenome
MSTVYVLNKDGKPLMPTTRGGHVRHLIKEQKARVVRAKPFTIQLLYETNDVVQPLYLGIDPGRTNIGVAVVKANGTAVFTAHLETRNKEIPKLMQDRKKARRARRTNGRRCRRQRRAKANGTISKKCVKQTTAQNGSVSKRAKDIGVIKRRLPGCEKDVLCIGIKNKETKFTNRTRPEGWLTPTANQLLQTHINLVKKIQKFLPISDVVLEVNKFAFMRLDNPNIQKWQYQQGPLYKKESLESAVSEIQAHHCLFCKKPIDHYHHVVPQHKNGSNTIGNIVGLCAKHHDLVHKDSAWEKKLAQKSTGLNKKYGALGVLNQIIPTLTNELSSLFPKHSFVTNGKSTYDYRAAHGVSKDHWLDAYCIACSVLPSNVCDSNINNHMPYVLKQFRRHDRRVLNNENMNRVYTLNNKAVAINRHKAKDQKTVSLEEFRKEHPDDVCKLKVKEHHPTYRNMNRNFPGSVFLVGKQIHVMQGIASSKDGKATKYNDTSATAIAAGKCKFVAKNTGILFV

SEQ ID NO: 6321 - protein, 428 aa, unidentified
  REGION 1..428: note = Human gut metagenome
MQYAYVLNKRGEPLMPCSPGKARILLKQQKACVVKRTPFTIKLLHGSAGYKQPITLGVDAGSKHVGLSASTEKRELYSEEFTPRNDVVELLSTRRQNRRSRRNRKTRYRAPRFNNRVHSKHKGWLAPSVEVKIQEHITVIKRICRILPVTLVRVETAEFDTQRLKAMLAGKPLPVGTDYQLGEMYDEYNVRQYVLKRDNYTCQCCGAHTTAKKTVKLHVHHLESRKVGGNAPSNLITLCTTCHNNFHKGKITLDGKKRGKTLRDAAFMGIMRKTLLARLHEELPIPVQGSYGYITKMRREQNDIKKSHVNDARCISKHQLAEPCSVCYRTKAIRHHNRQTHKANFSKDGIRKRSQMPYVVDGYRLWDKVLYEGQECFVSGRRASGSFTLKKLDGTRISKGVTFKKLRLLEPATNYLIERIRTGNSSHD

SEQ ID NO: 6322 - protein, 431 aa, Moorena sp.; identical to SEQ ID NO: 6048

SEQ ID NO: 6323 - protein, 407 aa, unidentified
  REGION 1..407: note = Human gut metagenome
QPLMPTDRHRKVRLMLQSGQAKVIKRCPFTIQLTYNTGHQAQEISLGIDAGSKHIGVSATTKTRVLYEADVELRNDIVDLLSSRRELRRGRRNRKTRYRPARFDNRRREDGWLAPSIRQKIGTHLTVVENICKILPISRITVETASFDIQKIKNPDIQGAEYQQGDQLGFWNIREYVLFRDNHTCQCCKGKSKDKILNVHHIESRKTGGNAPNNLITLCEICHTGYHKGAVQLPKTVKRGMRFKDAAFMGIMRWAFYEALKQQYEPVGTPVHNTYGYITKHTRIEHNLPKEHYVDARCISGNPDAFPNGEYYYQKKVRCHNRQMHKLTILKGGIRKQNQATYLVKGYRLFDKVSYQRKEYFVFGRRKSGFFDIRTLSGKQVNKGSLSCKKLKFIATRMYYLIERRAV

SEQ ID NO: 6324 - protein, 419 aa, Scytonema sp.
MQNYVFIVDVNKQPLNPIRPKRARTLLMRGKAAVLRMYPFTLILKTAVENPVLRPVELKIDPGSKVTGLALVQDGSVVWGANLEHRGSEIKSDLESRSAVRRSRRNRKTRYRKARFLNRKRTLKWLAPSLMHRVLTIETWVKRLCRYVPITGIAMELVRFDTQALQNPEITGQEYQQGELFGYEVKEYLLAKWGRNCVYCGKQDVPLQVEHIHPKSNGGSDRVSNLTISCARCNQNKGSKSIEDFLKKKPDLLRKIKAVRLAPLKDAAAVNSTRWALYQSLKKVSGLNVATSTGGRTKYNRIKNGFDKDHWIDACCVGESGDRVVLKTKQPMIIKSTGVGSGRQMTRTNKFGFPCAKAKQRYQHGWKTGDIARFIDGTIGRIVVQSASRLEIRINKQRIGGLLNLFNKLHSVDGYNYAF

SEQ ID NO: 6325 - protein, 545 aa, unidentified
  REGION 1..545: note = Human gut metagenome
VQFAWWLCHPKPSDNIEDVKHETALMLLQIKAGTETFGTAPCGFGPKAEGVSPERKAMNTVAVVTNTNKPLMPTSPYRARKLLSSGKAKIVKHRPFTILLVNRSDGNVQEIEYKSDTGYLHVGISVCSEKREFVREQRDLLPDEKEKHNDRRKYRRTRRNRKRYRKARFDNRIGKIRKKEKNEHVWLPPSLEHKVDAQVQLFLRLYQVMPIKRAVFEMGQFDPALMKALEKGEAAPQGIDYQMGERYQIATRRAAVFTRDRYACVFCGRSIKDHAILHVHHIGFWKQDRSNRLDNLATCCEQCHTSENHRPGGILYGVEPKLESLASATYMNVVRFELLQRLKEAAPDVEFHISYGAKTSVIRKQRSISKSHTNDAYCLGQYFPKLRAEEIGFQKIRRNDRILQKFYDAEYLDSRDGTTKKGKELTNGRISRNHMKDHKNLHQYRGKKLSKGRVTIRRGRSSLKPGSLVRFDGEVLTVHGTHRSRRKNKAGHIKVSVNVEFERPSKTGRKSAALSKCQIISQSYNTGWKKIQLRKEEQGKIAAVV

SEQ ID NO: 6326 - protein, 431 aa, unidentified; identical to SEQ ID NO: 4377
  REGION 1..431: note = uncultured cyanobacterium

SEQ ID NO: 6327 - protein, 442 aa, Moorena sp.
MSKVLLLDTTKEPLDPVHPGRARLLLKEGKAAVYRRYPFTLILKTQVDSPAVSALRLKLDPGAKTSGLALVDDASGEVVWAAELGHRGASIKKRIDARRGVRRKRRSRFTRYRKPRFHNRRSSRRKGRLPPSLESRVANMLTWVGRLRRLCPIEAISMELVKFDMQAMQNPEITGAQYQQGERMGYETREYLLAKWGRRCAYCGAEDVPLEIEHILCRARGGTHRVSNLTLACEPCNVKKGTQLIEDFLNKKPDVLARILAQAKTPLKAAAAVNATRWHLFERLKATGLPLETGSGGLTKYNRAKRHLPKTHWLDAACVGQSTPKPLETSQVVPLLIEATGHGNRQMCGVDEHGFPIRHRQRKKVHFGYQTGDLVRAVVPTGARAGTHVGRVLARASGSFDLRTKAGRQAGISYRYCRPIHRNDGYRYQKGARHAVPATQST

SEQ ID NO: 6328 - protein, 310 aa, Moorena sp.
MPNYVFVIDTNKQPLNPIPPKKARRLLDKGKAAVFRMYPFTIILKTAIDNPIVSPCQIKIDPGSKTTGFALVQNNQIIWGMELEHRGGKIKKKLESRKAVRHRRRNRHTRYRKPRFFNRKRSEGWLPPSLEHRVSTIETWVKRLTKFCPVNEIWVERVKFDTQKMQNPEINGIQYQQGELAGYEVREYLLEKWGRECTYCGKQSVPLQIEHIHPKSFGGSNRVNNLCLACEKCNQRKGNKPIEEFLKKKPSLLQKIKTKAKQPLKDAAAVNATRNKLVKVLQNIKFVVTGTGAQTKYNRTRLGLPKEHAY

SEQ ID NO: 6329 - protein, 462 aa, Halomonas sp.
MAVFVWDKHKRPLMPCSEKRARLLLARGRAVVHKRYPFTIRLKDRVGGDTQPLRLGIDPGSKTTGLALMRETDSTESDGPQRHVLCLFDLVHRGYQIKKSLEQRRGFRRRRRSKNLRYRAPRFNNRTKPKGWLAPSLQHRVDTVMAWVERLSKLAPVTAISQELVRFDTQKLDNPEISGVEYQQGTLLGYEVREYLLAKWGRECAYCGTGDTPLEIEHVVPRSRGGSNRVSNLTLSCHPCNQAKGSLPLADFFSRDKGLRKRLKANGLSADARLERVQRQLKQPLRDASAVNATRWALFNALKTTGLPVAVASGGRTKYNRQRLGIPKTHALDAACVGAFGWLHDWTASTLTIKCTGRGNYQRTRLTKYGFPRGYLMRQKQVRGFQTGDIVKAVVPSGKKAGTYTGRVAVRKTGSFNIQTDQGAVQGISHKHCTVIQRGDGYGYHLTPTIHQLKGGAGQAVA

SEQ ID NO: 6330 - protein, 464 aa, unidentified
  REGION 1..464: note = Human gut metagenome
MYVFVIGLDGTRLMPCKPRKARKLIEAHKAEIYKKQPFTIRLLYKTGCASQPITLGIDTGSQHIGIAVTSENKVLYQAEIELRSTMDKRSLMETRYSYRRSRRYRKTRYRSPKFRFHTKRTYSETLVKRKTTGIMTHWVKHTNSMSTNRPDGWLAPSMQSKVDHHIRWINRFLDVLPPDTKLRLEIARFDMARMKNPEVHNELYQHGPQYDYENLKAYVFDRDHYKCVVCKRKLGSKQPDGHSLKGMMHHITFRSKGATDNPDQLVTVCEYCHTPQAHKEGGVLWDLKEKHKSVQRGLRDATQMNIIRTRLVKAFPDAELTYGNITAADRKKMHLPKSHAGDAVAIAMKGEDVNICEPTVYIKQIRKKKRSLHEATPRKGRKRPNTQAVRNPKNTKSIGIYHIYDTVRFQNETGFISGFTGKSAYVQDFDGNYITMPGKSYKQINLSSLELVKHNNNWIQKTRN

SEQ ID NO: 6331 - protein, 453 aa, unidentified
  REGION 1..453: note = Ga0315294_10017328
MQKFKAKLKNTPRNAPQVPCSVSTSLNREEILGEASKVRALNNPDVDLRQHKGEQGLRVPVITYVLNQRGNSLMPCPARKARILLKKGEAHVVKTNPFFVIQLNKATGEQVQNCFLGIDSGSKNVGFSVVSDRKEIVSGTLVLDQKTSDRLTERRMYRRGRRNKLWYRKLRFDNRKKKKGWLPPSTQRRFDTHITLINKLKQLLPIKNITIEVGNFDIQKIENPDILGIQYQQGSMFEYQNVRSFLMAREKGKCQLCDKEFSKGNSSHIHHIISRNNGGTDREKNLALIHESCHKKLHKNKSFNLLKKNKTYKDATFMSIISWKFRELLSDCKLTYGNETFVKRNILRLEKTHYNDAFVIAGGNNQIKVQPVILNQKHKNNRVLQLNRKGFKPSIRRQRYSIQPYDVITVSNKKYVAKGCHSYGKSVLCTDGIKNFDFGIKKVEKVFNTQTIY

SEQ ID NO: 6332 - protein, 442 aa, Lactobacillus sp.; identical to SEQ ID NO: 3826

SEQ ID NO: 6333 - protein, 535 aa, Streptomyces sp.
MRHVRSLNSNVTHTTPLSPKSLRAPASGATCPRRPHVRVISPDPCSLGNPRCVASGASREGRSLAPSYRVTSPGHHDLRISRGASMTTFFTGEQTHQAVLPQQPALESAGAYTPGSRDETAHGLPDPKPGTGVGHGRGETGAVRTRTRRRHARRLDPGSKATGIAVTDERDEVGAKGRTALVRRGLVSIELRHRGRQIHSGMVRRAGHRRRRRSANLRYRAPRRDNRTRPDGWLPPSLRHRIDSTMSLVARLCRYAPVLEIHVEQVAFDTALIAAAVSSREQDFSERTHAGSEIRESLLAKWERSCAYCGATGVLLTIEHVRPRSRGGSDRVANLVIACVPCNQAKGTARIDEFLADRPARLERVIAQLRRPLHDVAAMNTTRLLLVKTLATHGVAVHTWSGGRTSWNRLAMGLPKSHTLDALATGVIDLERGDAVVRIPAQILVVRSTGRGSYARTTPDRYGFPRLQRPGGQHRITTLTSHFDVSHRNLRLLQRADGYTYGFADEIRLSEEHGPAYSGRTLKGGDPGNVRTPDA

SEQ ID NO: 6334 - protein, 460 aa, unidentified
  REGION 1..460: note = Human gut metagenome
MVAVVDLFGKPLMPTNEYRARKLLKRKKAKIFGYRPFTIQLTERKDTEIQPIELCMDTGYIHIGISAKSERHEYLGMQIDTLTDEKLKHDDKRQYRRQRRNRKRYRAPRFDNRRRKEGWIAPSLEHKKEIHIDAIQRICKVMPITDLTLEMGNFDTQVLKAVEEGKTLPQGSDYQHGERYGIATLREAVFLRDGYKCQCCEKTVKDGAILHVHHIKYRSQGGTNRMSNLITVCDKCHTPQNHKPGGKLWNWKTKLAEFKGASYMTSIRWMLYNEVTALLPNSSVHITYGAKTKESRRELDIEKSHVNDAYVMGLFHPKHRTQPVYFKKKRRNNRVLEKFYDAKYIDSRDGKKQSGQELFNGRISRNHRKDSENLHLYRKQKVTKGKRSIRNRHYPIQPHDILLYQKKKYETAGCHNNGSRAILLPEKKSVALKQLTMYQYAGGYYRVPYESNKKEERTGS

SEQ ID NO: 6335 - protein, 451 aa, unidentified; identical to SEQ ID NO: 5203
  REGION 1..451: note = Human gut metagenome

SEQ ID NO: 6336 - protein, 442 aa, Lactobacillus sp.; identical to SEQ ID NO: 5193

SEQ ID NO: 6337 - protein, 414 aa, unidentified; identical to SEQ ID NO: 3759
  REGION 1..414: note = Human gut metagenome

SEQ ID NO: 6338 - protein, 427 aa, unidentified
  REGION 1..427: note = Ga0214071_1496828
MVFVVDKNKRPLAMCHSGKVRKLLDTNKATVISQYPFTVKLTTKEITSPIEDNYSLKIDPGAKFTGLAILNSKMELVFCATIKHKTFEIVDKMKLRASLRKGRRQRHTRYRKPRFLNRVSTKKQGWLPPSLHSRIDNIINWIKKIISICPIGEIIFENTSFDTQLMENPDISNLEYQRGELFGFEIQEYLREKTGFKCAYCKKSGTEEKLEIEHIIPKSRGGSNRISNLTLACHKCNQRKGNKTAKEFGFPDIQSNNIKKFLKDTAIMNSSRKLILQELKQFNLPIELASGGRTKYNRVNNNLPKTHYFDAACVGKLAGEIIIKENNVNNLNIKAVGRGKYKRTDTDKYGFPRQYRARLGYFQGFKSGDIVKTDKYGIKSIVSVRAKGSFTLENKKSISPKKCKLVQRCNGYTYNIEKIKIRKEKGV

SEQ ID NO: 6339 - protein, 443 aa, Anoxybacillus sp.
MVEENMTCFMQRKGENPMVFVLDTNKRPLAPCHEAVARKLLKQGKAAIYKRYPFTIILKEIVDNFRPKTPYRLKIDYGSKHTGLAIVRGQEVVWLGQLDHRTDIKERLDKRRAFRRARRKRKTRYRKPRFLNRRRKDGWLPPSLESRVQNIQTWVERLRKICPIEHISYENAKFDTQLMRNPEINGVEYQQGTLQGYEVREYLLEKFGRKCCYCGKEGVPLEIEHTIPKSRGGTDRVDNLCLACHDCNQRKGSKTAEEFGYPHIQEMVKKTLKDASVVNATRWKVYEVLKQSGCEVECGTGARTKMNRIRLGLPKIHYFDACCVGESTLLQLHFKTKEALFIKAKGRGSRSRTNLDKYGFPRGFLARQKYFFCFQTGDIVKANVPKGKYQGVWFGEVACRKNGSFDMKDKDGKRIAQGISYKYFNIIQRFDGYTYRREGMNIA

SEQ ID NO: 6340 - protein, 423 aa, Deinococcus sp.
MSNRVFVLNPDHSPLMPCTPKRARKLLEAGRAAVFRRYPFTIILGAESPSAAQPLALKLDPGSKTTGLALVLSGETGEKCIWGAELAHRGLAIKLKLLTRRAQRASRRNRKLRHRPARFLNRIRPEGWLPPSLMHRVLTTLSWARRLGRFAPLSSIAMELVSFDTHKIINPAVRGQGYQKGTLHGTEVRAYLRHKWNNLCAYCGKKGEEVEHLTPKSRGGTDNVSNLVWSCTACNLKKSTRTAEDFLAKKPALLQNIKMQQQTSLQDAAAVNATKLRLLDELNRLGLPVSTGDGAQTSFNRTSQGFDKAHWIDAACVGDGGAHVQIETHRPLMITAMGRGNRQRCGTDRFGFPNRHRTRQKRFFGFQTGDIVRAVVVGGKKTGTYTGRVSVRATGSFRLPQVDGLHHRFCTTLHKGDGYGYRC

SEQ ID NO: 6341 - protein, 502 aa, unidentified
  REGION 1..502: note = Human gut metagenome
MSIIYVQDRHGKPLAPTTRGGHVRRLLDSKQARVVCGNPFTIRLMYGVDPCTQGFILGIDPGRTNIGVTVAAADGTCVFSAKAETNNKDVPKRMKERKAHRQASRQGERKRRQRRARKNGTCFGERKRILPGCKEPITNHYITNTEARFMNRARTKGWLTPTANQLLQSTISLVRKVCKFLPVTDVVLELNEFAFMAMDDPGIQRWEYQKGPLYGYGSVEAAVYTQQDGHCIFCEQAIAHCHHVIPASKGGSDTLENRAGLCGGHHDLVHKEQSWTDKLAELKAGMNKRYAALSVVNQIIPRLADELGKMFPGHAFATNGWSTKQFRDAHGIPKDHNTDADCIACSILENPTIKLPEKVYELRKFRRHDRAQISRMEDRNYYLPGADPKTGKPKKVLAAKNRHKRTEQKTDSLEEFRAAHPNDVGRLMVARGGPKHKDPNRVLPGAIFQVETSSGNVEQLVLQGSHGRDKNGQPLYLEFVGQGNFRPNRCKYVARGRGWQFV

SEQ ID NO: 6342 - protein, 461 aa, unidentified
  REGION 1..461: note = Human metagenome
LAKALKGVVYTRLPHKINQFKRKDFVKRMTTQKVIQVCVLDQNNIPLMPTQRLGKVYRLLKTKKAHIVNYEPFTIKLDYEPKTHIIQPMTLGVDSGAIHSGYSLANEHREYYNAEVIARDNISKNLSDRRMYRRNRRSRKTRYRKPRFNNRKNKKKGWLPPSLEQKVYVQVNEIGHLHKYFPINNIIIEVAEFDTQKIKNPDISGNEYHQGTLHGYNIRNYLLEKYHHKCFYCDKEVSAFEVEHMIPRARRGSNHIDNLTLSCHNCNQKKGTLTAEEFIRQTLTSQKAAQKLRQLPETKQLLKYMAHMNATRWALYNAVKEKYDSVSITYGYITKYNRINAGLPKAHHIDAKCITGFSTVPSFDVTVVKTKMRRHNRQLHRATFSKGHIRKVATLPRFVHGFQLYDIVLFNKHRYYIKSRRSSGYFTLVSLEGLKNEDRSYKKITFLAHTNTYLTNRYIET

SEQ ID NO: 6343 - protein, 442 aa, unidentified; identical to SEQ ID NO: 2834
  REGION 1..442: note = Human gut metagenome

SEQ ID NO: 6344 - protein, 424 aa, unidentified; identical to SEQ ID NO: 3351
  REGION 1..424: note = Human gut metagenome

SEQ ID NO: 6345 - protein, 442 aa, unidentified; identical to SEQ ID NO: 3658
  REGION 1..442: note = Human gut metagenome

SEQ ID NO: 6346 - protein, 291 aa, unidentified
  REGION 1..291: note = Human gut metagenome
MVYVQDIDGKPMMPTTRHGKVRRLLKDNKAVVVNTCPFTIKLTYKTSDYKQEIVLGVDAGTKHVGLSATTKSKELYSGEVILRNDVVELLSTRRESRRARRNRLRYRKPRFENRVKSKRLGWVAPSVRHKVDAHIRVIDNICSTLPISRIIVEIAQFDTQKIKNPDISGNEYQEGDQLGFWNVREYVLARDGHKCQHCKGKSKDPILNVHHIESRKTGGDSPSNLITLCETCHKEYHKGNIDLKVKRGKSLRDAAVMGIMKWKLYEELKSRYPNVSMTFGYITNTIGLNTE

SEQ ID NO: 6347 - protein, 419 aa, unidentified
  REGION 1..419: note = Human gut metagenome
QYVYVLNKHGEPLIPCSPGKARLLLKQQKACVVKRTPFTIKLLFGSAGYKQPITLGVDAGSKHVGLSASTEKRELYSEEFTPRSDVVELLSTRRQNRRSRRNRKTRYRVPRFDNRVHSKHKGWLAPSVEVKIQEHITVIKHICKILPISLVRVETAEFDTQRLKAMLAGKPLPVGTDYQLGEMYDEYNVRQYVLKRDHYTCQCCGTHNTAKKVVKLHVHHLESRKTGGNAPSNLVTLCTTCHKNLHKGRVTLDGKERGKPLRDAAFMGIMRKTLMVRLKEELPIPVQGTYGYITKMRREQNDIKKSHTNDARCISKHPLAEPCSVCYRTKAIRHHNRQTHKANFSKKGIRKRSQMPYLVEGFRLWDKVLYKGQECFVSGRRSSGSFALKKLDGTSISKGVTFKKLRLLEPATNYLIERM

SEQ ID NO: 6348 - protein, 426 aa, Moorena sp.
MSNYVFVIDQKKTPLKPVHPKRARQLLSSGKAAVFRLFPFTLILKKEVPNPDIHPLTLKIDPGSKVTGFALVTDQGEVVWRMQLEHRGGIIKKRLEQRRALRRKRRSRLRYRQPRFLNRKRQEGWLPPSLMHRVQTTETWVKRLIKFCPIKEIWIERVKFDTQLMENPEISGKEYQQGTLQGYSVREYLLEKWDRKCAYCKKENVPLQVEHIHPKSKGGSNRVSNLCLACERCNQKKGDKSIKDFLKKKPTILESVLKQAKSPLKDASAVNATRNKIVEVMSEYRPIKTATGAQTKMNRVRLGLPKEHCLDAACVGEVETLTILSHQPLIVTATGTGGRQKCQTNKYGYPIKHRPLKPIQGFQTGDIVQVDIPKGKNQGQWTGRLCPYSDGNCEICPKGRKRLGTKLSYVSRVVHQKDGYKYRHLS

SEQ ID NO: 6349 - protein, 465 aa, unidentified
  REGION 1..465: note = Human gut metagenome
MSTCVCVHSNSGERLMPTFRLGKVRRLLKDGKAKIVKHHPFTIQLLYDSKTNTQPIEICEDVGYNYIGISVKSQSHEYVSAQYDTLQDEKACHDSCRKLRRTRRNRLRYRKPRFDNRKRGEGWLAPSLEHKKQLNIRLIERYVSVIPITHATVEVGSFDTMLVKAIEEGKATPESADYQKGPRYNLATLREAVFYRDNYICKVCGRKATEGAILHMHHMFYWKGRHGNSLDELLTVCEKCHTPANHQKSGKLYGFGENVKFADLSGAAFMNTVRWQIVNELYAAFGKDFVTVTYGAMTKEKRIALHLEKSHNNDAYAMGEFHPNCRCTFEHYEKVRRNNRILEKFYDSRYIDIRTGEIATGKELFNGRINRNHKKDSENLHKYRGKRLYKGHRALVRKKVNFNPGDLVSLNGEVLVVHGTHTNKKGAVNVEFKTPAKNGRKSANLKKLKIVKAAGSIHPAWEKVS

SEQ ID NO: 6350 - protein, 512 aa, unidentified; identical to SEQ ID NO: 4350
  REGION 1..512: note = Human gut metagenome

SEQ ID NO: 6351 - protein, 416 aa, unidentified
  REGION 1..416: note = Human gut metagenome
MPCSSAKARILLKEKKAVVVRRTPFTIQLTIATGETKQPVSLGVDAGYKHVGLSASTEKAELYASEVELRQDITDLLSTRLALRRSRRNRKTRYRAPRFDNRVRSKHKGWLAPSVENRINAHLSRIAAVLRILPLTKITVETAAFDTQLLKNPDVSGEAYQQGEQLGFWNVREYVFFRDGHVCQHCHGKSKDPVLNVHHLESRRTGSDSPSNLLTLCETCHKALHRGEIKLKTQRGKSFRAETFMGIMRWTVLNRLKSAYPELDVRNTYGYLTKHARITHGIAKSHCADAFCIAGNFGAKRLGYYYFQKQTRRHNRQIHKLSILKGGLRKRNQAPYEVKGFRLFDKVACKGEDAFIFGRRSSGSFDVRKLDGTRISAGISFKKLRLLEKRRTYLTEIRKEAALPPLPKRRGLRVDF

SEQ ID NO: 6352 - protein, 483 aa, unidentified
  REGION 1..483: note = Synthetic metagenome
VSRCDIAGAGHGHSRGETNRKIRVTRPVRAFIERKTMSVFVLDRCKQPLMPCSEKRSRLLLGRGRALVVRAYPFTIRLKDRAGGITQPVRIKIDPGSKTSGIAVVRESGQKQHVLALMELAHRGRQISKSLEQRRAFRRRRRSQLRYRAPRFLNRTKPRGWLAPSLQHRVDTTKSLVNRLRSLVPVESISQELVRFDTQKMENPEVSGVEYQQGTLLGYEIREYLLEKWGRECAYCADKDTPLQIEHIDPKANGGSNRISNLTLACGPCNREKGRQPLADFFASSKRLKNHQARPDRILEQCKKPLRDASAVNSTRWALHQTLKQMGLSVEVGTGGRTKFNRQRLEIPKTHALDAACVGEVEIVEGWNVPTLAIKATGRGSYQRTRLTRYGFPRGYLMRQKKVQGFQTGDMVRAVVPTGTKAGTWLGRVAVRKTGSFNIQTSSGAIQGISHRHCALTQRADGYGYHIQPNQPKEEGGRKNESR

SEQ ID NO: 6353 - protein, 426 aa, unidentified
  REGION 1..426: note = Human oral metagenome
MLVYVLKQNGQPFMPTERFGKVRRLLKEKKAKVVRREPFTIKLLYEPDTDVVQACYCGVDTGSKHIGVAVVGNDRVLYQSQIELRTDIKKKMDRRRGFRRLRRSRKTRYRKARFLNRRNSIKKDRLPPSVKHKVQAHIDEIEFCKKILPVSDENVILEVSQFDIALMKNPSLTSEEGKKWGYQQGFDYGYSSRREAIRHRDNYTCQCCGKKNCRLEVHHIKFRRDGGTDDEDNLITLCKECHDGVHAGTIELNKKPKKSKNLKYATHMGIIRSQLLKKYPDAIETFGFVTAENRNHLKLKKDHYIDACVIASGGLEFEHSNIILYKRRVSKGDYQLCKGIRGEQIIPTGKICGFRKFDKVVYLRKEYFIKGRMSSGFAVLMGIDGNKVDFSYMSKGLKTPKLLNCKRVSSRSSCLCITQKIVLNIV

SEQ ID NO: 6354 - protein, 470 aa, unidentified
  REGION 1..470: note = Wastewater metagenome
MKQTQTKIVPVLAVDGTPLMPTTHGYARVLIARGKAVAVKQKIFTIQLLHEHKTNKEEIKCELKVDCGFGNIGYSVVANNEELIGGEVELLTGMSARITTKAGYKTQRNGRKRYRKPRFDNRKRKDDWLPPSNEHKNESHFKLIDLMCSLYPVNHLKLEAGNFDMQKFKNPDIKGKQYQESNLDKKLNPNLRLAILYRDDYKCQCCGDSLSKNKNIKLEVHHIVYRSKGGSDSEANLVTLCTKCHTAKNHKDGGILHKWMLQKKSMGSLKEATYMNILASRLKQRYPQAEICFGYDTAEKRKSLGLEKTHHNDAFVVGGGVDETTMRVESSTNFKQKRRHDRSLTKFYDAQYIDIRDGKKKKGAELSCGRTKRNKNLNGENERIFRGEKVLKGRVTHCLTKYPIESGDIISYQGQIYVSGGNKNKGAYIKVVVEGKELSLKTPEVKVLKRNRGTYITTQPSRACLNPVNG

SEQ ID NO: 6355 - protein, 419 aa, unidentified
  REGION 1..419: note = Human gut metagenome
MVYVISQDGKPLMPCSDPIARLLLKQGKAKVKKREPFTIKLTYETTNYTQGLTLGVDTGSGTIGTAVSKDNGDIVYMSEVVVRNDITDKMTQRAKYRRNRRNRKTRYRKARWLNRASSIKKDRFSPTMQSKLHSHVREIEYIQSILPVTEMVFETGQFDMQLMKNPSLANPKVRPWGYQKGANYGFENTKAMVLNRDNYTCQCCKGKHKDSKLEVHHIVFRSQGGSDEESNLLTLCHTCHKDLHSGKINPKLSGKLKGNLKYATQMNSIRKQLFRFYPNAIETFGYVTKANRLHLGVDKEHYYDACTIATQGNAFNVKSNLYKKKCVSDGDFQKTKGIRSEQPIVTDKICGFRKFDKVRYFGNDYFIKGRMSTGYAILMDIDGNKIDFSTMPRGYKTPKLSNCKRITARSTVMTQVKVV

SEQ ID NO: 6356 - protein, 354 aa, unidentified
  REGION 1..354: note = Human gut metagenome
AVSKDNGDIVYMSEVVVRNDITDKMTQRAKYRRNRRNRKTRYRKARWLNRASSIKKDRFSPTMQSKLHSHVREIEYIQSILPVTEMVFETGQFDMHLMKNPSLANPKVRPWGYQKGANYGFENTKAMVLNRDNYTCQCCKGKHKDSKLEVHHIVFRSQGGSDEESNLLTLCHTCHKDLHSGKINPKLSGKVKGNLKYATQMNSIRKQLFRFYPNAIETFGYVTKVNRLHLGVAKEHYYDACTIATQGNAFNVKSNLYKKKCVSDGDFQKTKGIRSEQPIVTDKICGFRKFDKVRYFGNDYFIKGRMSTGYAILMDIDGNKIDFSTMPRGYKTPKLSNCKRITARSTVMTQVKVV

SEQ ID NO: 6357 - protein, 420 aa, Petrotoga sp.
MLVYVLNKYGKPLMPCKPSKARKLLKEGKAKVVRKEPFTIQLLYGSSGYKQPITLGVDAGSKTVGLSATTENKELFAAEVELRDDIPKLISQKGQYRKGRRFRKTRYREPRFLNRVHSKNKGWLAPSVEHKIKSHIKLIDLVHSLLPVTKIVVEVASFDIQKIKNPNIEGKQYQQGEQLAFWNTREYVLWRDNYTCQHCKGKTKDKRFNVHHIESRQIGGDAPGNLITLCETCHKDYHDGKIKLNFKRGQKFKDATFMGIMRWTLYNRLKTLYPKVHLTYGYITKNTRIQNNLPKTHRIDALCISGNPQAKQLEHYYHIKEVRRHNRQIHKAKILKSGIRKLNQASYLVHGFRLFDKIRYNGIECFIFGRRSTGYFDIRKLDGTVIHRSAKSKDLILVSKAKTLLWERRENSAFLSPLKW

SEQ ID NO: 6358 - protein, 493 aa, unidentified; identical to SEQ ID NO: 3781
  REGION 1..493: note = Human gut metagenome

SEQ ID NO: 6359 - protein, 494 aa, unidentified
  REGION 1..494: note = Human gut metagenome
MAMVYVQNKDGKPLMPTTRYCYVRLLLKEKKARVVCTTPFTIQLNYDTPDITQDLILGIDPGRTNIGVAVVTEDGQCVFSAHLETRNKDVPLLMQKRAGFRKQHRTLDRRRKRQRRAKAAGTTIAEGSVERLLPGYEKPVICHHIRNKEARFNNRKRSQGWLTPTANHLLQTHINLIAKVAKFLPITKVVVELNRFAFMAMDNPNIRRWEYQQGPLYGLGSVEDAVYAQQNGHCLFCKKPIDHYHHVVPRHKGGSETLANRCGLCVEHHDLVHTDKAWADKFVTRKEGMNKKYHALSVLNQIIPHLMEYLGDETLYDVYATDGRSTKGFRIAKNVPKEHYTDAYCIACSILDTDIEVSAPVEPFELKQFRRHDRQACIRQMVDRKYLLDGKVVAANRHKAIEQKSDSLEEFREAYGDAAVSQLTVRPHSPQYKDMTRIMPGAAMDFDGTVGVFQGSSGRNNGTPNYYNSTKGARVLTNRCALLAKNVGMVFIPA

SEQ ID NO: 6360 - protein, 442 aa, unidentified
  REGION 1..442: note = Human gut metagenome
MVYVLNKDGQPLMPTNRHGKIRRLLKTNKAKVIKRCPFTIQLLYDTTNHTQDITLGVDAGSKHIGLSATTEDKVLFEADAELRNDISKLLEARYTFRRSRRNRKTRYRKKRFDNRVSSKHKGWLAPSIEHKIQSHFAMVEKVHRILPVTKIVVETASFDTQLLKAQLEGKPIPQGTDYQNGELAGWNIREYIFHRDNYTCQWCKGKSKDPVLVTHHHADWKGDHTNKPSSLITLCNTCNDSKYHKKEANRLWGWEPKITNSYKHAVFMGVMRWTFYNRLKEIYPNVSMTYGYITKNTRIENNLPKAHYVDARCISGHPEAKSNGEYFYYKKVRCHNRQLHKANTLKGGIRKRNQAEYTVKGFRLFDRVEYQNNEYFVFGRRASGFFDIRTLDGQKVNKGSISFKKLKLKETSKTYLIERRMADTGVSLAPLTTEVTSLRQTG

SEQ ID NO: 6361 - protein, 420 aa, unidentified
  REGION 1..420: note = Human gut metagenome
MQYVYVLNKHGEPLMPCSPGKARLLLKQQKACVVKRTPFTIKLLFGSAGYKQPITLGVDAGSKHVGLSASTEKRELYSEEFTPRSDVVELLSTRRQNRRSRRNRKTRYRVPRFDNRVHSKHKGWLAPSVEVKIQEHITVIKHICKILPISLVRVETAEFDTQRLKAMLAGKPLPVGTDYQLGEMYDEYNVRQYVLKRDHYTCQCCGTHNTAKKVVKLHVHHLESRKTGGNAPSNLVTLCTTCHKNLHKGRVTIDGKERGKPLRDAAFMGIMRKTLMVRLKEELPIPVQGTYGYITKMRREQNDIKKSHTNDARCISKHPLAEPCSVCYRTKAIRHHNRQTHKANFSKKGIRKRSQMTYLVEGFRLWDKVLYKGQECFVSGRRSSGSFALKKLDGTSISKGVTFKKLRLLEPATNYLIERM

SEQ ID NO: 6362 - protein, 427 aa, Enterococcus sp.; identical to SEQ ID NO: 2410

SEQ ID NO: 6363 - protein, 414 aa, unidentified
  REGION 1..414: note = Human gut metagenome
MPCSPAKARLLLKEKKAIVKRRTPFTIQLTIATGETKQPVSLGVDAGYKHVGLSASTEKAELYASEVELRQDITDLLSARRALRQSRRNRKTRYRAPRFDNRIRTKRKGWLAPSVENRINAHLSRIEAVLRLLPITKITVETASFDTQLPKNPDIAGKEYQEGEQLAFWNVREYVLFRDGHVCQHCHGRSKDPVLNVHHLESRRTGGDSPGNLITLCETCHKALHRGEIKLSAKRGQSLRAEAFMGIMRWEVLNRLKLSHPELEVNNTYGYRTKHARIANGIAKSHCADAFCIAGNLGAKRLGEFFFQKQTRRNNRQIHKFSILKDGIRKRNQAPFEVNGFRLFDKVACKGEEGFIFGRRSSGYFDVRKLDGTCISAGISYKKLHLLEKRRTYLTEIRKEKALPPLPGGSGLRA

SEQ ID NO: 6364 - protein, 578 aa, Moorena sp.
MVYVYVLDKHGKPLMPTTRCGHVRRLLKSGKAVVVSTTPFTIRLKYESTHFTQPVHEGIDTGRENIGDAVSLEDGRNVFLADVKTHNKSIKKKMVERAGFRRERRRHRRIRKQRRAMHDQTTMQKGKADTVRTKRACQSVEITYPSADNPVTQKVIQGKESKFANRRRPDGWITPSARQVIQITMDEIKQTAKILPVTDIYLERVAFDFQKLENTNIRKWQYGKGPLYGYKTYKDYIWDEQHGKCACCGKPIEEYHHIHHRAEGGIDNVKNIIGLCHHCHEEIHNSKEAEDRLMELKQGALQKYCVGLLNSVMPALIDAVQAYCDEHGLTLTATNGKTTSETRDKYGLEKDHCIDAYAISLAERDVTTVRPADTIYMKRRFKKKTKALISTRNQRVYKLDGKAVAYNRHKALNQKTDSLEELLVQYKGSHSAKDVQKLMHRMKVEPARRTYTYRKQGLVAPVRPGDLVLYRKVRKVKGDVKTEVFSAVSVEYTEVVKKTNGVVTKERDWKIGVDDNRVRKSKFCSVLNHSCVQFTGSEPTSEYLKKVEEEAAERKKKAAKKAAEHKTKAAEGAAKASA

SEQ ID NO: 6365 - protein, 427 aa, Parasutterella sp.; identical to SEQ ID NO: 4733

SEQ ID NO: 6366 - protein, 376 aa, unidentified
  REGION 1..376: note = Human gut metagenome
MFVDMVYVQDIDGKPMMPTTRHGKVRRLLKDKKAVVVNLCPFTIRLTYVTSDYKQEIVLGVDAGTKHVGLSATTKSKELYSSEVILRNDIVDLLSTRRELRRTRRNRLRYRKPRFDNRIKSKRPGWVAPSVKYKVDAHIRVIENICSILPISRIVIEVAQFDTQKINNPNISGKEYQEGNKLGFWNVREYVLARDGHKCQYCKGKSKSKILNVHHLESRKTGGDSPSNLITLCETCHKEYHKGNIDLKIKRGSSLRDAAVMGIMKWKLYEELRSRYDRVSMTFGYVTKYNRIKYGIEKSHTSDAFVISKNINAKRIGCQYLKRLIRRHNRQIHKMKILKGGKKKNNQAPFEVFGFRLFDKVLYNNKICFVYGRRWW

SEQ ID NO: 6367 - protein, 465 aa, unidentified; identical to SEQ ID NO: 3306
  REGION 1..465: note = Human gut metagenome

SEQ ID NO: 6368 - protein, 413 aa, unidentified
  REGION 1..413: note = Human gut metagenome
MTSYAFVLDANGKQLAPTKEQKAWFLIRKKRATLVSKYPMVIQLKKKIPDEKICKDEIRCGIDDGGLHVGVALVQKCQTRNKVVFKGTIEQRNDVKHLMDVRCGYRRYHRYHKRYRPARFNNRSSSKREGRIAPSILQKRQAIIRVINRLNKWINITNYWLEDVAIDIRALTDGHKPYWWQYQKSNRLDENIRKAVILRDGRKCMECGKSNCRLEVHHIKPRRLKGSSTLGNLITLCTKCHQKTEGVEELYMDKYFALLNSSDNKNLDYAQHVMIGKKWLRKQLSNLGLLYLTSGGDTANKRIDWDITKSHSNDAVCITDLRPDTCEIKEWIIKPMRRQSKAKTDNVLGIKHRDLVEYTFRNGETHRGYVTALYPEQNALNFQSLTKHCKKVNARKCKVLWKYSKIYWLDNVV

SEQ ID NO: 6369 - protein, 413 aa, unidentified
  REGION 1..413: note = Human gut metagenome
LKVFVLNMRGQPLMPCSPAKARHLLKAGKAVVRRRTPFTIQLRIATGETKQSVTLGVDAGAKHVGLSAATEKEEVFASEVELRQDITGLLAARLSLRRERRQRKTRYRAPRFLNRVRSKHKGWLAPSVENRIQAHMSRIDAVCRLLPVTKIVIETASFDVQKIKNPTIEGTDYQQGDQLGFWNVREYVLFRDGHICQHCRGRSKDPILNVHHLESRKTGGDAPNNLITLCETCHKAYHAGKIKLKVKRGQSFRAEAFMGIMRWTLLDRVRKTHPKLPVENTYGYLTKHKRIALGLPKTHCADAFCIAGNLKALRRGDFLFQQQTRKHNRQIHKCSILKGGVRTLNQAPFLVKGFRLFDKVRIGGQIGFVFGRRVRGTFNIRRLDKTVIGTDINCKKLSLLETRKTFLTELRKE

SEQ ID NO: 6370 - protein, 440 aa, unidentified
  REGION 1..440: note = Human gut metagenome
MPTNSYRARRLLKSKRAVIYRYRPVFTIKLVDRTNGYTQPIEYKCDTGYQNIGISICSDTKEFVNEQRDLLKDEVKRHSDSRKYRRTRRNRLRYRKARWNNRKGMISKDGFAPSIRNKRDVHIHLYEEYYKVFPITKAVFEMGQFDTQVLKAVEAGLQVPEGTDYQRGEQYGYATLREAVFARDDYKCICCGKSAIKDGVKLRIHHIGYLSGDRSNRMANLGSVCENCHTSKNHKPGGKLYNLKPKLKTFKGATFMTTVRYSMVKKLKVTTPDVDIRVTYGAATKLARRVLSVKKTHSNDAYCMGEFHPKHRSNFKHYKKCRRNSRVLSRFYDAKYRDLRDGSVKTGSQLSCGRTNRKISRHAELDERIYRTHKISRGRVSIRRQHYSLRPGDKVLYDGKIYFVTGMQNSGTHVKLTNGKVCSLKKVHVLQHCNAWTAVI

SEQ ID NO: 6371 - protein, 397 aa, unidentified
  REGION 1..397: note = Sediment metagenome
  REGION 341..354: note = misc_feature - Xaa can be any naturally occurring amino acid
LQTRQAFPTLTKSTLLRKEIHVMFVYMLNCHGEPLMPCLPRKARWLLKEKKATVVKMVPFTLQLLYGSSGYKQEVSLGIDAGTQHIGVAATTEKRLLFEAEVQPRNDITELLATRRQFRRARRSRKTRYRTCRFLNRKKRAGWIAPSVQHKVEAHLKTIRLVHKLLPVSRTTIEVAQFDLQKIRTPEIAGQEYQEGPQLGFWNTREYVLFRDAHRCQWCEGKSKDKILNVHHIESRKTGGDTPDNLITLCETCHDLIHQTHQEHKIERKSKSFRDATQMSIIRWRIYEQAKLLFSHVHLTYGYLTKYTRITHSLEKSHLIDARCISGNPLAAPDSTSYLIXXXXXXXXXXXXXXDQEGWRTATQYCAQGCARLSALRLRALPGEGVLCVWKASFRLL

SEQ ID NO: 6372 - protein, 453 aa, unidentified
  REGION 1..453: note = Human gut metagenome
MLMAVAVVSRTGVPLMPTSPYRARKLLASGKAEKYGYDPFTIRLTERETGDTQPVELCMDTGYIHIGVSVKSEKHEYLALQIDTLTDEKKKHEKCREKRRNRRSRKRYRKPRFDNRKRDKGWLAPSLEHKKEIHVRAAERICRVVPVTDITMEMGNFDTQVLKAKEEGRPLPQGTDYQQGERYGTATLREAVFSRDNYTCLCCGRTMKDGAYFHVHHIRYRSQGGTDRMANLATVCEKCHTPANHQPGGKLYNWKPEIKSFKGATFMTAVRWQMYREIKEKIPDVSVHLTYGAATKERRRALDIEKSHVNDAFVMGRFHPGHRARPELYIKKRRNNRVLESFYDARYIDSRDGKRKPGKELFNGRISRNHKKDSENLHKYRLRKVSKGKRCIRKKHYLIQPHDILVYCGRKYETAGCHNLGTGAILLPERRSIAVSKLKIYRYSGGYYKAAFN

SEQ ID NO: 6373 - protein, 552 aa, unidentified
  REGION 1..552: note = Human gut metagenome
MTSCTCTVFPACNHAKASSSQGKHNLLLRQERFIVKEVANMSTVYVLNKDGKPLMPTTRGGHVRHLLKEQKARVVRAKPFTIQLLYETNDVVQPLYLGIDPGRTNIGVAVVKANGTAVFTAHLETRNKEIPKLMQDRKKARRARRTNGRRCRRQRRAKANGTISKKCVKQTTAQNGSVSKRAKDIGVIKRRLPGCEKDVLCIGIKNKETKFTNRTRPEGWLTPTANQLLQTHINLVKKIQKFLPISDVVLEVNKFAFMRLNNPNIQKWQYQQGPLYKKESLESAVSEIQEHHCLFCKKPIDHYHHVVPQHKNGSNTIGNIVGLCAKHHDLVHKDSAWEKKLAKKSTGLYKKYGALGVLNQIIPTLTNELSSLFPKHSFVTNGKSTYDYRAAHGVSKDHWLDAYCIACSVLPSNVCDSNINNHMPYVLKQFRRHDRRVLNNENMNRVYTLNNKAVAINRHKAKDQKTVSLEEFRKEHPDDVCKLKVKEHHPTYRNMNRNFPGSVFLVGKQIHVMQGIASSKDGKATKYNDTSATAIAAGKCKFVAKNTGILFV

SEQ ID NO: 6374 - protein, 512 aa, unidentified; identical to SEQ ID NO: 3680
  REGION 1..512: note = gut metagenome

SEQ ID NO: 6375 - protein, 459 aa, Moorena sp.
MRVYVLNKNGNPLMPCKPAKARHLLRDGKAEVVNRKPFTIQLLWDCEENVFEISCGIDKGCNVTGIACVGNGEILFSADIKHRNPVAVQQKEGSKTFVQVRAERRRGRRNRHRWHRKPRFNNRASSKKSGRLPPTIKMNVMEVVRVVKQIPLPISHITVEDVAVDVRRLSDPNVTNKEYQQSNRLDENLRLACLMRDSFICQKCSKKETLLEAHHIVWTSKGGKDSIYNLTTLCENCHDKVHKKGESGKVRLKGGKVITGMDGFSDKIAARTMQGKSLMYQELEKIAPLSTVYGYQTAVFRKSCGFPKEHWIDAFCIANFETGEFVQPREENHYQIWFRAKQTRRIFDTQPKKGGVIKQWQKYLGLASNGDNCILVDKRDRNFVLPLGYTLYKKGDVISISGYKTEIASINGKSKGFYYWIYQSDGSRKYASISHKKVKLVEYAQTINYISNDVAFIPS

SEQ ID NO: 6376 - protein, 426 aa, unidentified
  REGION 1..426: note = Filamentous sp.
MSNHVLLIDANKTPMNPIHPAHAQKLMDTGKAAVFRFYPFTLIVNRVVENIITYPIALKIDPGSKTTGISLVNNRNEVIWGMELEHRGSVIKDALQSRRAVRLNRRQRKTRYRKARFLNRKRPKGWLAPSLMHRVQTIETWVKRLCKFALIAEIRQELVKFDMQQLENPEISETDYQQGTLEGYSVREYLLEKYDRTCCYCGKTDVPLQIEHIQARSKGGSNRVSNLCIACEKCNQKKGDRDIKDFLKGKPDIISKILKQAKAPLKDAAAVNATRWKLLETLKMLELPVTTGTGAETKFNRIRLHLAKEHWIDAACVGVTNILKVLTSKILRVKSTGQGGRKKCQTDTIGYPQKYRPLKPIHGFCTGDIVKTVIPKGVNRGTYIARLCPYSDGNGEIYPKSGKKRIGIKLEYIKKAVHRKDGYSYA

SEQ ID NO: 6377 - protein, 426 aa, unidentified
  REGION 1..426: note = Human gut metagenome
MVYVQDINGKPLMPTTRHGKVRRLLKDKKAVVVNLCPFTIKLMYVTSDYKQEIVLGVDAGTKHVGLSATTKSKELYSSEVILRNDIVDLLSTRRELRRARRNRLRYRKPRFNNRIKSKRPGWIAPSVKYKIDAHIRVVENVCSILPISRIVIEVAQFDTQKIKNPNISGKEYQEGDQLGFWNTREYVLARDGHKCQYCKGKSKDKILNVHHIESRKTGGDSPSNLITLCETCHKEYHKGNIDLKIRRGKSLRDAAVMGIMKWRLYEEIKSKYDRVSMTFGYVTKYNRINHGFEKSHVSDAFVISKNFNAIRLGYYYKVRLVRRHNRQIHKQKIQKGGIKRLNQSPFEVFGFRLFDRVMFENSYYFIFGRRKTGSFDIRYIDGKNQKNVTYKKLKLSRCKRFMIQMELNKKTRTCFENERNSDRDAA

SEQ ID NO: 6378 - protein, 414 aa, unidentified; identical to SEQ ID NO: 4924
  REGION 1..414: note = Human gut metagenome

SEQ ID NO: 6379 - protein, 427 aa, Parasutterella sp.
LRVFVLNKRGKPLMPCSPAKARHLLKEKKAIVVRRTPFTIQLTIATGESKQPVSLGVDAGYKYVGLSASTEKAELYASEVELRQGITDLLSARRALRRARRNRKTRYRAPRFDNRIRTKRKGWLAPSVENRINAHLSRIETVLRMLPVTKITVETASFDMQLLKDPDISGKEYQEGEQLGFWNVREYVLFRDGHVCQHCHGRLKDPVLNVHHLKSRRTGGDSPGNLITLCETCHKALHRGEITLKAKRGQSFRAETFMGIMRREVLDRLKASHPKLEVQNTYGYRTKHARISNGIAKSHCADAFCIAGNLGAKRLGEFLFQKQTRRNNRQIHKLSILKGSLRKRNQAPFEVKGFRLFDKVAYQGEEGFIFGRRSSGFFDIRRLDGTRISAGINYKKLRLLEKRRTYLTEIRKEEARGPLPEGRGLRA

SEQ ID NO: 6380 - protein, 413 aa, unidentified; identical to SEQ ID NO: 3295
  REGION 1..413: note = Human gut metagenome

SEQ ID NO: 6381 - protein, 465 aa, unidentified
  REGION 1..465: note = Human gut metagenome
MSTCVCVLSNSGERLMPTFRLGKVRHLLKDGKAKIVKHHPFTIQLLYDSKTNTQPIEICEDVGYNYIGISVKSQSHEYVSAQYNTLQDEKACHDSCRKLRRTRRNRLRYRKPRFDNRKRGEGWLAPSLRHKKELNVNVVKMYCAVMPITHATVEVGSFDTMLVKAIQEGKAIPEGADYQKGPRYNLATLREAVFYRDNYTCQVCGRKVADGAILHMHHMFYWKGRHGDSLNELLTVCEKCHTPANHQKGGKLYGFGENVKFADLSGAAFMNTVRWQIVNELYAAFGKDFVTVTYGAMTKEKRIALRLEKSHNNDAYAMGEFHPNCRCTFEHYEKVRRNNRILEKFYDSRYIDIRTGEIATGKELFNGRINRNHKKDSENLHRYRGKRTYAGHRALLRKKVNLNPGDLVSLNGEVLVVHSTHTNKKGAVNVEFKTPGKSGQKSASLKKLKIVKAADSMHSAWEKIS

SEQ ID NO: 6382 - protein, 431 aa, unidentified
  REGION 1..431: note = Human gut metagenome
MPNKVYVINKHGRPLMPCSPAKARHLLDDGKAKVKKRAPFTIQLVYGSSGYTQEVILGVDAGSKTIGMSASTTKEELLSAEVKPRNDVVDLLSTRREFRRARRNRKTRYRKPRFDNRVRSKHKGWLAPSVEVKIQEHITSIKRVCRILPVSKVVIETAEFDLQLLKAIEEGKPVPQGEDYQQGEMYGHYNVRQYVLWRDGYTCQCCGAHATKKKEVRLHVHHLESRKVDGDAPDNQVTLCESCHEKLHKGLIAEKDFKKRKRKSTRDATFMGIMRKTLMQRLCSELPIPVVKTRGYITKATREKLLVLPKSHTNDALAIAQGKRGFNVGYLPEIAQIDKIYTIRPVRHHNRQLHKATILKGGIRKSNQTEKYVFGYRLFDKVQFNGQDCFIWGRRTTGIFTIKTINGKMIKDGISFKKLKPVEKSTGYLIA

SEQ ID NO: 6383 - protein, 427 aa, Nostoc sp.; identical to SEQ ID NO: 2670

SEQ ID NO: 6384 - protein, 429 aa, Ktedonobacter sp.
VSNVFVIDSDCKPLNPVHPGHARRLLRQGKAAVFRRYPFTIVLKRVVEQPEVQPLHLKLDPGSKTTGIALVNGTNGKIVFAAELSHRGHAIKDSLDSRRASRQGRRQRKTRYRKPRFDNRRRKKGWLPPSLESRLANILTWVARLCRYAPIATLSQELVKFDMQLMENPDIAGVEYQQGTLQGYEVREYLLEKWERTCAYCGKQDVPLQVEHIHPRARSGTNRMSNLTLACEPCNTAKGTQEIEVFLKKKPEVLKRLLAQVKKPLKDASAVNSTRCALLERLKALGLPVECGSGGLTKFNRTTRGLPKTHWLDAACVGKSTPDVLLQKGVIPLRIKATGHGRRQMCVPDKYGFPKQHKERKKKFLGYQTGDLVKAITPKGTFEGRIAIRHRPSFRLEKVDIHPKYMRCVQRSDGYEYTQKGVRHAPPHG

SEQ ID NO: 6385 - protein, 495 aa, Moorena sp.
MSTTLARGESGGSMAGEVIHQRRHKVMAYVAVLSASGKSLMPTTAYKARKLLKSGRAKIYSYRPLFTIQMQDREEGTTQPIEMKVDTGAQYIGVSVCSEKHEYWNRRYDMLPNEKEMHDEARKNRRNRRQKLRYRAPRFDNRTHGHNRKEDKWFTPSLKHRENIHIQLAAKICAVVPVTDAYFEMGQFDIQVLKAYEAGKPIPVGDDYQKDERYGYATLREAIFARDNYTCQVCGAKLDDKHRPILRMHHIGYWKHDHSNRMGNLMTVCIKCHTAANHKPGGKLYGLEPELPTFKGAAFMNTVRWDMFTQLKKTLSNVKCHITYGAMTKLKRSELNTRKTHSNDAYCMGTLHPKWRTDFQHYQKVRRNNRVLSKFYDAQYIDTRDGEKMSGSQLSCGRTKRSESRNSIKNLRGYRGRRATSKGKKPKISKGHISIRRHKYAFNTGDIVIVQGKKLTVSGTQHYGEYVVFRDKTHAAAKAKEVTMYRHGDGWVRVV

SEQ ID NO: 6386 - protein, 442 aa, unidentified
  REGION 1..442: note = Human gut metagenome
MVTVQQSTHHLPFGRVFIRRNLFMVYVISQDGKPLMPCSDPIARLLLKQGKAKVKKREPFTIKLTYETTNYTQGLTLGVDTGSGTIGTAVSKDNGDIVYMSEVVVRNDITDKMTQRAKYRRNRRNRKTRYRKARWLNRASSIKKDRFSPTMQSKLHSHVREIEYIQSILPVTEMVFETGQFDMQLMKNPSLANSKVRPWGYQKGANYGFENTKAMVLNRDNYTCQCCKGKHKDSKLEVHHIVFRSQGGSDEESNLLTLCHTCHKDLHSGKINPKLSGKVKGNLKYATQMNSIRKQLFRFYPNAIETFGYVTKANRLHLGVDKEHYYDACTIATQGNAFNVKSNLYKKKCVSDGDFQKTKGIRSEQPIVTDKICGFRKFDKVRYFGNDYFIKGRMSTGYAILMDIDGNKIDFSTMPRGYKTPKLSNCKRITARSTVMTQVKVV

SEQ ID NO: 6387 - protein, 425 aa, Moorena sp.
MENTLKVFVLNMRGQPLMPCSPPKARKLLRAGKAVPVRRTPFVIQLTVPTGETKQPITLGVDAGYKHVGLSATTAKEELLASEVELRQDVTGLLSNRLALRRARRNRKTRCRAPRFDNRVRSKHKGWLAPSVENRIQAHISRIEAVCRVLPITKIVIETASFDIQKIKNPEVEGTDYQQGDQLGFWNVREYVLFRDGHVCQACKGRSKDLILNVHHIESRKTGGDALGNLITLCEACHKAYHAGKLKQFSPRRGASFRAETFMGIMRWTVLNRLRERHPELPVTNTYGYLTKHKRIVAGLPKTHCADAFCIAGVLDAKRRGEYLFQKQTRRHNRQIHKLTILKGGVRKRHQAPYLVHGFRLFDKVLCKGEVGFIFGRRSSGAFDVRRLNGTKISAGISYKKLSLLEKRKMFLTELRKEGRDSSRV

SEQ ID NO: 6388 - protein, 402 aa, unidentified
  REGION 1..402: note = Human gut metagenome
MPNKVYVINKHGRPLMPCSPAKARHLLDAGKAKVKKRTPFTIQLVYGSSGYTQEVILGVDAGSKTIGMSASTTKEELLSAEVKPRNDVVDLLSTRREFRRARRNRKTRYRKPRFDNRVRSKHKGWLAPSVEVKIQEHITSIKRVCRILPVSKVVIETAEFDLQLLKAIEEGKPVPQGEDYQQGEMYGHYNVRQYVLWRDGYTCQCCGAHATKKKEVRLHVHHLESRKVDGDAPDNQVTLCESCHEKLHKGLIAEKDFKKRKRKSTRDATFMGIMRKTLMQRLCSELPIPVIETRGYITKATREKLLVLPKSHTNDALAIAQGKQGFNVGYLPGIVQINKIYTIRPVRHHNRQLHKATILKGGIRKSNQTEKYVFGYCLFDKVQFNGQDCFIWGRRTTGIFTI

SEQ ID NO: 6389 - protein, 466 aa, unidentified; identical to SEQ ID NO: 2809
  REGION 1..466: note = Human gut metagenome

SEQ ID NO: 6390 - protein, 514 aa, Nocardiopsis sp.; identical to SEQ ID NO: 3215

SEQ ID NO: 6391 - protein, 414 aa, unidentified; identical to SEQ ID NO: 6363
  REGION 1..414: note = Human gut metagenome

SEQ ID NO: 6392 - protein, 304 aa, unidentified
  REGION 1..304: note = Human gut metagenome
VVRRTPFTIQLTIATGESKQPVSLGVDAGYKHVGLSASTEKAELYASEVELRKDITDLLSARRALRQSRRNRKTRYRAPRFDNRIRTKRKGWLAPSVENRINAHLSRIEAVLRLLPITKITVETASFDMQRLKNPDISGKEYQEGEQLGFWNVREYVLFRDGHVCRHCHGRSKDPVLNVHHLESRRTGSDSPDNLITLCETCHKALHRGEITLKAKRGQSFRAQAFMGIMRREVLNRLKASYPELKVHETYGYLTKHARIANGIVKSHGADAFCIAGNLGAERLGEFFFQKQTRRNNRQIHKLS

SEQ ID NO: 6393 - protein, 440 aa, Fervidobacterium sp.; identical to SEQ ID NO: 4293

SEQ ID NO: 6394 - protein, 443 aa, unidentified
  REGION 1..443: note = Human gut metagenome
LTKDENRPSGRTTGLRAEQAEPAGIRKGDTLKVFVLNMRGKPLMPCSPAKARHMLKAGKAVVVRRTPFTIKLTIATGETKQDVTLGVDAGARHVGISATTEKEEVFASEVALRQDITGLLADRLAFRRARRNRKTRYRAPRFNNRVRSKHKGWLAPSVENRIQAHMSRIDAVCRLLPVTKIVIETASFDIQKIRNPEVEGTGYQQGDQLGFWNVREYVLFRDGHVCQHCHGRSRDKILNVHHLESRKTGGDAPNNLITLCETCHKAYHAGKIKLKVKRGQSFRAEAFMGIMRWTLLDRVRKTHPKLPVENTYGYLTKHKRIALGLPKTHCADAFCIAGNLKALRRGDFLFQQQTRKHNRQIHKCSILKGGVRKLNQAPFLVKGFRLFDKVRIGGQIGFVFGRRVRGIFNIRRLDKTVIGTDINCKKLSLLETRKTFLTELRKE

SEQ ID NO: 6395 - protein, 424 aa, Caldicoprobacter sp.
MVYVISKAGKPLMSTERHGKVRRLLKQGLAKVVKREPFTVQLLYDTTTYTQPVTVGLDIGSKTTGVSAVTEKKEMFSAEVELRDDIKGLLIERRQYRRMRRYRKVRYRKPRFLNRARGDRWLAPSLQWKVDAHIRIVDMLGRIMPIERVVVEVAPFDTQKILNPDIEGEDYQNGVQKGFWDVREYCLWRAGYRSELSGKRGILEVHHIVPRSKGGTDTPSNLIVLTADEHKAVHEGRIRIPKSKIEKIKLLKDAAHVSTIGWHIVNRLRERYSVEVTYGSTTKAKRLSCGMEKSHRVDAFIIAGGDLQERLREWYLGKFLRRQNRSLHRANPIKGGVRPVNTIKEAYGFRRYDRVEYEGIIGIIAGLRSSGYFAIRSLSWEKIHDSAKHSKLRLIEGAKTLMLERRKERIPLHLEEDGVSCARI

SEQ ID NO: 6396 - protein, 440 aa, Lactobacillus sp.
MKGKKAMQNRVFVINKHGKALMPCKPRKARILLRDGKAKVLKKEPFTIQLLYGSTGYKQDISVGIDSGQRYIGLAVTSQNKVLFQGEVELRQDVKKLIDTRRTYRRSRRNRKTRYRKSRFLNRIAKKKDNWLPPSVASKVNHNINWIKRLLSVLPKADLHIEVGKFDMQKMKNPEINGEGYQQGDLYGYQTVKQFVLARDNYTCQVCKKKGGKFKIHHIIYRSLGGTNTVNNLTTVCSNCHTTKNHQTGILAKWCKDKMKVNKSYKGATFMNILKRRLFLAFPQAKFQYGAWTTLQRVDLDLTKSHYNDAVAISGIRKVKAKPTSIVMFKQFRKKKRSLHEATARKGRKTPNITSKRNAKNTKYAKGFWLNDYVKIKDSNKKGYISGFMSKGTNVRLRDIFGEYVSNSDKSYTSTKNISLINHSNNWQKQVITEKQYIMG

SEQ ID NO: 6397 - protein, 430 aa, Polaromonas sp.
VIRLIDRKAEDSAFQSVRVKLDPGSKTTGIALVREMADASASNDIAVLSLMELMHRGCQISKALTARRQMRRRRRSANLRHRAPRFSNRGNKGKGWLPPSLAHRLETTMSWVKKLSRYAPVEAISTELVRFDMQLMQNPEISGLEYQQGELQGYEVREYLLEKFSRTCAYCDAKDLPLQIEHITPRAKGGSNRVSNLTLACQCCNQKKGALDVQDFVKDRARLAKILAKARAPLKDAAAVNSTRWALVNALKTTGLDVETGSGGLTKFNRSRLAIPKTHALDAACVGRVGSVLDWNRPTLQIKCTGRGSYQRTRLTAQGFPRGYLMRQKQVHGFQTGDMVKAVVTKGKKVGTHCGRVAVRASGSFNIQTPQGAVQGVAHRFCKIMQRNDGYGYSLMAKTDATGTPSKSRNASRPALYLTGLKADVSRANA

SEQ ID NO: 6398 - protein, 516 aa, Streptomyces sp.
LATFHAGQQTHQAVLPQRPALEFDSADTPGNRDETGFEGRKAPGVEHVRGEIIGGSPATGDVTPAREGREKGREARAVDPVVFVLDRHGLPMQPTSPARARKLLSCGRAVVHRHTPFVIRLKDRTVERSQVDGVELGIDPGSKHTGLSVFTARHGNRRGLYHVELTHRGAQVRDSLARRASYRCGRRSRNVRYRPPRFCNRARPEGWLPPSLRHRVDTTMTWAVRLARWAPVVAVHVELAAFDTHALSAGRPLEGVEYQHGTLHGTEIREYLLAKWGRACVYCGTTGVPLNVDHIRPRSRGGSSRVDNLAIACAPCNQAKGSHAVEDFLRHRPKVLARVLAQAKAPLRDTAAINATRWELFHALKAEFPTVVHASSGGRTKWNRQRARLPKSHTLDALCVGQVGTVDQHPADVLAATATGRGTYSRTRADAFGFPRLRLPRQKRFHGFATGDLVRAIVPTGTKAGRYTGRVAVRTRGTFNIRTAHGTVTDIHHRHVRLLQRADGYAYITRKENTRA

SEQ ID NO: 6399 - protein, 461 aa, Parasutterella sp.; identical to SEQ ID NO: 3646

SEQ ID NO: 6400 - protein, 442 aa, unidentified
  REGION 1..442: note = Human gut metagenome
MATVKQSTHHLPFGRVFIRRNLFMVYVISQDSKPLMPCSNPIARLLLKQGKAKVKKCEPFTIKLTYETTDYTQDLILGVDTGSGTIGTAVSKDNGDIVYMSEVVVRNDITDKMTQRTKYRRNRRNRKTRYRKARWLNRSNSIKKDRFSPTMQSKLHSHVREIEYIQSILPITEMVFETGQFDMHLMKNPSLANLKVRPWGYQKGANYGFENTKAMVLNRDNYTCQCCKGKHKDSKLEVHHIVFRSQGGSDEESNLITLCHTCHKDLHSEKINPELSGKVKGNLKYATQMNSIRKQLFRLYPNAIETFGYVTKANRLHLSVDKEHYYDACTIATQGNAFNVKSNLYKKKCVSDGDFQKTKGIRSEQPIVTDKICGFRKFDKVRYFGNDYFIKGRMSTGYAILMDIDGNKIDFSTMPRGYKTPKLSNCKRITARSTVMTQVKVV

SEQ ID NO: 6401 - protein, 461 aa, Verrucomicrobium sp.
MAVLVLDKRKKPLMPCTERRARLLLTRKRAIVHRRYPFTIRLKDREDGRTQPLRLKIDPGSKTTGLALVREDANGGQHVLWLAELEHRGSVIRGRLIARRAFRRRRRAQLRYRPARFDNRRRTDDHLAPSLRHRVDTAMSWIGRLRRLAPVTGMSQGLVRFDTQAIQNPEITGVEYQQGALAGYEVREYLLEKWSRQCAYCGAKDVPLEVDHIHPKSRGGSDRVSNLTLACHECKQVKDNRKVDEFLANRPDRMATILAKAKAPLHDAAAINSTRWALYNRLKDTGLPIETGSGGRTKYNRSQLNIPKTHCLDAACVGELKTLLGWDAPVLNIKAAGRGSYQRTRLTQHGFPRGCLTRSKRHFGFQTGDLVKAAVPSGKKVGIHLGPVAVRKSGSFNIQTLHGVVQGIGHRNCALIQRADGYGYAIKPKIAERKDAGTGAVSGRRAIPPRHKCPGSPARKR

SEQ ID NO: 6402 - protein, 512 aa, unidentified
  REGION 1..512: note = Human gut metagenome
MSTVYVLNKDGKPLMPTTRGGHVRHLLKEQKARVVRTNPFTIQLLYETDNLVQPLYLGIDPGRTNIGVAVVKTDGTAVFTAHLETRNKEIPKLMQGRKKARRARRTNGRRCRRQRRAKANGTISKKCVKQATAQNGSVSKRANEIGVIKRHLPGCEKEVLCIGIKNKEAKFSNRTRPEGWLTPTANQLLQTHINLVKKIQKFLPISDVVLEINKFAFMQLDNPNIQKWQYQQGPLYQKANLEEAVFEMQEHHCLFCKKPIAHYHHVVPQSENGSDTIGNIVGLCTKHHDLVHKDTAWQKKLAKKKTGLNKKYGALSVLNQIIPALTKELSFLFPKHFFATNGKSTYDYRAAHGVGKDHWLDAYCIAGSVLPNDVCDNNINNHVPYELKQFRHHDRRALHKENMGRVYTLNGKSVATNRHKAIKQTTDSLEEFRQRQPNDVCKLKVKEHHPEYRNPKRNFPGCVFLVGKHTHVMQGTSGSHNGKADGYYDTNGNSYSSGKCKFVVKNEGIVFT

SEQ ID NO: 6403 - protein, 429 aa, Macromonas sp.
MPCSEKRARLLLERGRARVHRVVPMVIRLVDRQVADCTLQPVRVKLDPGSKTTGLALVRDAERIDVTTGEIQREAAVLNLMELVHRGRQISEALSARSRMRRCRRGNLRYRAPRFLNRRKPQGWLPPSLRHRVDTTVAWVERLRRWTPVVAISSELVRFNMQALANSEIAGVEYQQGTLAGYEVREYLLEKWGRKCAYCCATEVPLQVEHIQPKARGGTNRISNLTLACRPCNERKAARPVQEFLAKEPQRLASVLAQAKRPLKDAAAVNTTRWALANALKDTGLPVELASGGQTKYNRVRLGLQKTHALDAVCVGVVGTTVTHSQQPTLTITCTGRGSYQRTRLDQYGFPRGYLMRTKRVKGFGTGDMVRAHVTSGKKVGNYVGRVAVRASGSFNIRTSGELVQGISHKYCHLVQRADGYGYFFNYRA

SEQ ID NO: 6404 - protein, 443 aa, Anoxybacillus sp.
MVEENMTCFMQRKGENPMVFVLDTNKRPLAPCHEAVARKLLKQGKAAIYKRYPFTIILKKIVDNFRPKTPYRLKIDYGSKHTGLAIVRGQEVVWLGQLDHRTDIKERLDKRRAFRRARRKRKTRYRKPRFLNRRRKDGWLPPSLESRVQNIQTWVERLRKICPIEHISYENAKFDTQLMRNPEINGVEYQQGTLQGYEVREYLLEKFGRKCCYCGKEGVPLEIEHIIPKSRGGTDRVDNLCLACHDCNQRKGSKTAEEFGYPHIQEMVKKTLKDASVVNATRWKVYEVLKQSGCEVECGTGARTKMNRIRLGLPKIHYFDACCVGESTPLQLHFKTKEALFIKAKGRGSRSRTNLDKYGFPRGFLARQKYFFCFQTGDIVKANVPKGKYQGVWFGEVACRKNGSFDMKDKDGKRIAQGISYKYFNIIQRFDGYTYRREGMNIA

SEQ ID NO: 6405 - protein, 430 aa, unidentified
  REGION 1..430: note = Human gut metagenome
MPKVYVLNRHGRPLMPCTPVKARHLLDAGKAKVRQRTPFTIQLLYGSTGYTQEVVLGVDAGSKTIGLSASTETEELFSAEAKPRNDVVELMSARRQFRRARRTRKTRHRKLRFNNRVRSKHKGWLAPSVEVKIQEHMTAIRRVCGILPVSKVVVETAEFDLQRLKAVAEGKPVPQGEDYQKGEMYGHYNVRQYVLWRDGYTCRVCGAHGSVKKGVPLHVHHLESRRVGGDAPDNLVTLCTACHDKLHKGIITVEDLKKRKRRSTRDATFMGIMRMTLLRRLWEQLPVPVVETRGYITKVTREKLLVLPKSHTNDALAIAHGPQGFRAGYLPNIRQADRLYTIRPVRHHNRQLHKATILKGGVRKANQAEKYICGFRLYDKVLYNGIECFVWGRRTSGSFLLRQLNGEKVKDGVSHKQLKLLERSQSYLVA

SEQ ID NO: 6406 - protein, 440 aa, Moorena sp.
LVFVLNKNKKPLNPCHFAVARKLLKQGKAVVHKQFPFTIRLKDLKEVNPKGLIIKLDPGAKQTGVALHKPNGEVILLATIEHRADKIKQNLEARRAFRRTRRNRKTRYRTPRFLNRKRPEGWLPPSIQSVVDNVKNFIIKLKKLCYIDTIYIETVRFDTQLMLNPSIEGVDYQQGTLLGYEIREYLLYAYGHTCQYCKGLTNDTKLEIEHKHPKSRGGSNSIRNLTVACRTCNQEKGNNTLDEWVQSLSKSKLDKERVKNINLILKTNKPINLKDTAKVNSSRNAILREMYKLTSNVVVSTGGVTKHNRIKVNLPKTHYYDALCVKETPKIKMHKGLKELYIKSTGRGTRSRTLLNKYGFPRAYLPRQKQFFGYQSGDMVKANIPKGKYIGQYVSNVSCRSTGTFAIYSKKHGKQIDVNHKYLKLIQKGDGYRYELKTLA

SEQ ID NO: 6407 - protein, 429 aa, Ktedonobacter sp.; identical to SEQ ID NO: 5743

SEQ ID NO: 6408 - protein, 453 aa, Anaerotruncus sp.
MSVAVISNTGIRLMPTSEYRARHLLKAGKAVIEQYRPIFTIRLTDREKGKTQPIEYACDTGYQHVGVSIKSEKHEFVHAQYDMLSNETERHNDRRKYRRTRRNRKRYRKPRFDNRSRKNQEMAPSLRHRKENQINLFESFCKVMPITSATFEMGKFDTQLLQAIADGKPLPEGKDYQQGLKYLFQTEREAVFSRDHYTCQVCGKSVKDGVILHTHHIGYWKGYRSNRISNLLTVCEHCHTAKNHKPGGALWGLEPQSTNLAAATYMSIVRWAIYRELVLKYPEIDIHIQYGAKTSVTRKSLHLAKTHANDAYCVGSLHPRHRTAELIYQKKRRNNRILAKFYDAKYIDVRDGAKKSGAVLSCGRTNRRESRRSDKNQRIYRGKKCSSGHTSVRKNHYVYQPGDTIVFHSQRFIVNGSHCKGARVILDTGKSVKATDLTCIKKEGGWHFLPAQA

SEQ ID NO: 6409 - protein, 405 aa, unidentified
  REGION 1..405: note = Ga0373628_0007102
VGQRKQVSGLKVTVPVLSITGSPLMPCSLTKARHLLERRRAKIVSLNPFAIKLTFECENKTQEVSLGVDTGYKHIGFSAITKTKELVSGEIVLDDKTSKRLTERKMYRSNRRSRLRYRKPRFNNRKTPKGWLPPSVQRRLDTHINIINRLKELTPVKKMTVEIGAFDIQKLMDPEISGKEYQQGNLYGYNNLKAFLFSREHGKCQLCGKEIVKGEKAHLHHIKPRSETGTDRPSNIALLHEDCHDKLHKKGLYKKLKAPKQYKSETFMSIVADRLKKVLDCDVTYGYETAIKRNVLGIEKSHVNDALVIAGGTNQDRCLPYSVEQKRINNRVLQTNRKGFAPSIRKQRHKIQNRDFVWIGGRRCVCGGVACKGAMIYYFYGTEKKTIYYKKVSRFFSTGSLVWMN

SEQ ID NO: 6410 - protein, 423 aa, Symploca sp.
MRVFVLNKNRQPLDPCKPARARIILSTGKAKVYRRYPFTIILTEEIEEPITHTHQLKIDPGAKTSGLAIVQNSRVVWGGELTHRGFQIRDALTSRRQLRRARRNRKTRYRKPRFLNRSWSEGWLAPSLMSRVYNILTWVKKLTRLCPITGISQELVRFDTQKLQNPEISGSEYQQGTLYGYELREYLLEKWNRKCAYCGTTDTQLEIEHILPKSKGGSDRVSNLAIACHSCNQAKSNQEIEDFLSGKPDVLRRVLAQAKRPLADAAAVNATRWKLYHELKSIGLPVELGSGGLTKFNRCRQNLPKTHWLDAANVGKIETLVIEVTHPLIITAKGHGTRQLCRTNKYGFPIRYCSRTKVHKGFQTGDIVRAVVTKGKKIGTYVGRVATRKSGSFNISTKSGLVQGISHKYCQFIHRKDGYAYTI

SEQ ID NO: 6411 - protein, 425 aa, Nodularia sp.; identical to SEQ ID NO: 3165

SEQ ID NO: 6412 - protein, 487 aa, unidentified
  REGION 1..487: note = Human gut metagenome
LLKEQKARVVRTKPFTIQLLYETDDVVQPLYLGIDPGRTNIGVAVVKADSTAVFTAHLETRNEEIPKLMQGRKKARRARRTNGRRCRRQRRAKANGTISKKCVKQTTAQNGSASKRAKEIGVIKRHLPGCEKDVLCIGIKNKEAKFSNRTRPEGWLTPTTNQLLKTHINLVRKIRKFLPISDVVLEINKFAFMRLDNPNIQKWQYQQGPLYQKASLEEAVSEMQEHHCLFCKKSIAHYHHVVPQSENGSDTIGNIVGLCTKHHDLVHKDTAWQKKLAKKKTGLNKKYGALSVLNQIIPALTKELSSLFPKHFFATNGKSTYDYRAAHGVSKDHWLDAYCIACSVLADDVCDNNINSHVPYELKQFRRHDRRALHKENMSRVYTLNGKSVATNRHKATEQTTDSLEEFRQCQPDDVCKLKVKEHYPEYRNPKRNFPGCVFLVGKHTHVMQGTSGSHNGKADGYYDTNGNSYPSGKCKFVAKNKGIVFA

SEQ ID NO: 6413 - protein, 462 aa, unidentified
  REGION 1..462: note = Human gut metagenome
MSVLVIGRNGRALMPTNPRKARLLLKKKTASVVCRHPFTIQLLYKTGCATQEGCIGIDTGSQHIGVGITCGDKVILKDEHALRSSMEKRSLLATRAVMRRGRRYRKVRYRKPKWRHHTKRMYFEKANRRGQHWRKVKTTTQSPRSKGWLPPSLQSKCDHHFRIIDRYLKYLPDPITRNLVIEAGRFDMARMNDPTIHGEMYQRGPMYDAENLRAYIFARDNYQCACCKAKAGTTRKADGTTVKLVAHHILFRSRGATDNPKYIISVCDHCHTTKAHQPGGILYSWMENNKKVARGLRDAVFMNILRKRLFARYPQSAFTYGNITATDRKQLRLPKSHANDAVAISLFGKEASTVKNICQTMHYKQIRKSKRSLHEAIPRKGRKNPNTKAVRNKKNTTQVNGFKLWDSVLADGKKLFICSFTGTSAYLIDKNGCYISQPGKTYKQWPLSKLKRLHPNGNWLMA

SEQ ID NO: 6414 - protein, 420 aa, unidentified
  REGION 1..420: note = Human gut metagenome
MQYVYVLNKHGEPLMPCSPRKARLLLKQKKACVIKRTPFTVKLLHGSAGYKQPVTLGVDAGSKHIGISATTEKHELYREEATPRNDVVDLLSARRAFRRSRRNRKTRYRAPRFNNRVHSKHKGWLAPSVEVKIQEHITLIKHVFRILPVTLVRVETAEFDTQRLKAMLEGKPLPVGTDYQLGEMYDEYNVRQYVLKRDNYTCQCCGAHSTKTKGVKLHVHHIETRRTGGNAPNNLITLCKACHKALHAEKVTLDGKKRGKPLKDAAFMGIMRKTLMERLRKELKIPVQGTYGYITKYLREKNGIPKSHTNDARCISKNPLAIPCDTCYYTKAVRHHNRQLHKATILKGGIRKANQAPYIVKGYRLWDKVAYNGTECFITGRRTSGYFALKELDGTVVSNSISYKKMRLLEAATNYITERK

SEQ ID NO: 6415 - protein, 441 aa, unidentified
  REGION 1..441: note = Human gut metagenome
MSVSVFVLDRKHRPLMPCRPARARRLLKSGRARVVRLFPFTIRLTDRLIEDSKLQPVLVKIDPGSRRSGFAVVRVDEKGQHHALFFIELVHRGESIRDALTARRNCRRRRRGNLRHRAPRFLNRTKPKGWLPPSLRHRVDTTTAWVAKLIKLAPVTEIVEELVKFDTQKLQNPEISGIEYQQGTLFEYEVREYLLEKFGRKCVYCGAENVPLNIEHVVPKARGGSNRVSNLVLSCENCNKKKDAQPVEVFLKNRPEVLDRIKRGLKTPLRDAAAVNATRWSLFNALKAFGLPVETGSGALTKFNRHTFRVPKEHWLDALCAGRVNGVHYPEGMGILQVRCTGRGSYQRTRVDKYGFPRSYLTRQKRVHGFATGDMVEAVIPSGKKAGTYRGRVAVRARGCFVIQTPEGKVDGIGWRHCRLLSFNDGYGYAWLRPAPYSSPV

SEQ ID NO: 6416 - protein, 420 aa, unidentified
  REGION 1..420: note = Human gut metagenome
MQYVYVLNKHGEPLMPCSPRKARLLLKQKKAYVIKRTPFTVKLLYGSAGYKQPVTLGVDAGSKHIGISATTEKHELYREEATPRNDVVDLLSARRAFRRSRRNRKTRYRAPRFNNRVHSKHKGWLAPSVEVKIQEHITLIKHACRILPVTLVRVETAEFDTQRLKAMLEGKPLPVGTDYQLGEMYDEYNVRQYVLKRDNYTCQCCGAHSTKTKGVKLHVHHIETRRTGGNAPNNLITLCKACHKALHAEKVTLDGKKRGKPLKDAAFMGIMRKTLMERLRKELKIPVQGTYGYITKYLREKNGIPKSHTNDARCISKNLLAIPCDTCYYTKAVRHHNRQLHKATILKGGIRKANQAPYIVKGYRLWDKVAYNGTECFITGRRTSGYFALKKLDGTVVSNSISYKKMRLLEAATNYIIERK

SEQ ID NO: 6417 - protein, 501 aa, unidentified
  REGION 1..501: note = Human gut metagenome
LHRGVRYGPPYRAGMPDGRRKPERKHMVAVVTSTGKPLMPTSAYRARKLLKKGRAVIFKYRPYFTIQLVDRADGEVQEVEYKSDTGSVHVGISVCTEKKELLSEQRDLLENEPEHHNDRKKNRRTRRNRKRYRKPRFDNRKKKPQEGHEKWLPPTLLHKMEVQVRLFREFCRVVPVTSACFEMGKFDTQALKAVSKGEPVPEGEGYQKGERYGTDTLRAAVFLRDGHPCRFCGRSVKDGAILHVHHVGYWKGDRTDRLANLASACEQCHTPANHGKNGILYGKEPEFKTLKDASYMTSVRWIMLDEIKKVAPGVQVSVTYGVTTKRKRQELHLPKSHVNDAFSMASFHPKKRSDTEYWKKIPRHDRVLQRFYDAVYLDTRDGSEKKGSELSNGRISRNHKKDSENLHRYRGYKVSKGHNSIRRGASSLKPGSIVMYKGEKMTVHGTHTRYVTDKDGKTVKKVNVQFTRPASDGKKSASLKKCTPVSRVYNTGWKRYWPDKK

SEQ ID NO: 6418 - protein, 489 aa, unidentified
  REGION 1..489: note = Human gut metagenome
MTMVYVQNKDGKPLMPTTRYCYVRLLLKEKKARVVCTTPFTIQLNYDTPDVTQDLILGIDPGRTNIGVAVVKEDGSCVFSAHLETRNKEVPLLMKKRAAFRRQHRTQDRRRKRQRRAIAAGTTVESNTIERLLPGYEKPVVCHYIRNKEARFNNRSRPAGWLTPTANHLLQTHINLIAKIAKVLPITKVVVELNRFAFMAMDNPNIHRWEYQQGPLYGLGSVKDAVYAQQDGHCLFCKKPIDHYHHVVPRHKGGSETLANRCGLCERHHALVHKDKAWADKLVTRKEGMNKKYHALSVLNQIIPFLMEYLGSETLYDVYAIDGRSIKGFRIAKNVPKEHYTDAYCIACSTLDTDNKVSAPVEPFELKQFRRHDRQACIRQMVDRKYLLHGKVVAANRHKAFEQKSDSLQEFREAYSDVAVSQLTVKPHPPQYKDMSRIMPGAVMDFDGIVGVMQSSIVGQFYKSTKGHKATPRRCVLLAQNAGMVFLPA

SEQ ID NO: 6419 - protein, 418 aa, unidentified
  REGION 1..418: note = Human gut metagenome
MVYVLNKNNEPVMPCSERKARLLLKQGRAVIYRKDVFTIKLINGSYGYKQHITIGIDCGSKHIGISATTNKKELFSANAELRNDIVKLLSDRKSLRRNRRYRKTRYRKPRFDNRRIKEGWIAPSIRQKIDSHVRIVSLIHKLLPVKQVNVEVVAFDMQKIKNPDIKRSEYQMGEQLDSYNVREYVLFRDNHICQHCKGKSKDDVLQVHHIESRKTGGNAPNNLVTLCKTCHEKYHSGEITLNVNRGKSFRDASAMSTMRWFLYEELKSRFSNVNITYGYITKYKRIKLGLSKEHYNDAYCIAGNLNTSRLCNRHLIRFIPRHSRILHVQKFSKGGVRRSASAPYWLNGGKPSKHGIIFTRFDKVKFNSVVCFISGSSNGFASLRDINWNKVHGCKTTVTVNKLVLVSRRRGSMLFGEL

SEQ ID NO: 6420 - protein, 429 aa, Ktedonobacter sp.
MVFVLDRHKKPLMPCTPRRARLLLARKRAVVHRLSPFTIRLKDRSVQQSTLQPVALKIDPGAKTTGLALARVEETSEGEVHHALHLAELSHRGEEVRDQLRKRAGYRRRRRSTNLRYRPARFLNRRRAPGWLPPSLRSRIDNVLSWGRRYQRWVPLVRIAVERVKFDTQLLQQPEISGVEYQRGELAGWEVRAYLLEKFGRRCVYCGRTDTPFELDHIQPRSRGGSNRVSNLALSCHTCNAAKGERTAAEFGHPEVAAQAKQPLRDTAAVNATRYALCDELRTLDLPLTTWSGGRTRWNRARFSIPKTHALDALCVGEVAGVKVGAHQALAITATGRGRYSRTNVDESGFPVGSLMRRKQVLGIKTGDRVRAMVPEGFAAQGTHTGRIAVRANKHFRMGKVQGIPARFCRVLQLADGYDYAVVATTLQG

SEQ ID NO: 6421 - protein, 413 aa, unidentified
  REGION 1..413: note = Human gut metagenome
MTSYAFVLDANGKQLAPTKEQKAWFFIRKKRASLVSKYPIVIQLMKEIPEKEICQDEIRCGIDDGGLHVGIALVQKCKTKNKVVFKGTMEQRNDVKHLMEVRRGYRRYHRYHKRYRQARFDNRKSSKREGRIAPSILQKRQATIRVIHWLNKWINITNYWLEDVSVDIRALTDGYQSYRWQYQKSNRLDENIRKAAILRDDGKCMECGKSNCRLEVHHIKPRRRNGSNTLDNLITLCESCHQKTEGQEELYMDRYFSLLKSSDNKNLNYAQHVMIGKMWLRKQLSGLGVLYLTSGGDTANKRIDWNIEKSHANDAVCITDLRPDTCDVKEWTMKPMRRQSKAKTDHVLGIHHRDLVEYTFKNGETHRGYVTALYPEQKAINFQSPTKHCKKVNARKCKLLWKYSKIYWFENAS

SEQ ID NO: 6422 - protein, 456 aa, unidentified
  REGION 1..456: note = metagenome
MTNIYILDINGKPLMPCHNGAFVRCRLKNKEAKVIKRKPFTVQLMYEVKNNYKQDIYLGVDAGYKYIGFSASTSNQELFSGELEQDCGMVERNKERRMYRRQRRSRLRYRKARFNNRKAGKPQGWTAPSLQRKRDTHLRFIMMLSSIMPITDINVEIRLFDPALMKATAEGRTIKGADYQHGEAEGFENMKSYIRYRDSYTCQNPDCKCHKMKKEDREKLKLHVHHIGYYKHDRSSRPGNLITLCELSHTPETHQPGNLLYGWKPKMKSLRETAFMNTVRKEIVDTLKAVYPDKTVRYTYGYKTNLTRRDWHVPKSHHDDAFCIAGQYSLKRAETVYFNQQRRNNRSLEIFHDAKYIDSRDGKRKTGKELYCGRNTRNKNFNKENLHQYRSKKVSRGKRNIRKQHYKYQPNDIVVFEGQKYKIRGSHCKGSRVILDTKKSVSVKKIHILKHCSGIC

SEQ ID NO: 6423 - protein, 461 aa, Parasutterella sp.; identical to SEQ ID NO: 3646

SEQ ID NO: 6424 - protein, 396 aa, unidentified
  REGION 1..396: note = Human gut metagenome
VVRRTPFTIQLTIATGESKQPVSLGVDAGYKHVGLSASTEKAELYASEVELRKDITDLLSARRALRQSRRNRKTRYRAPRFDNRIRTKRKGWLAPSVENRINAHLSRIEAVLRLLPITKITVETASFDMLLLKNPDIAGKEYQEGEQLGFWNVREYVLFRDGHVCQHCYGRSKDPVLNVHHLESRRTGGDSPGNLITLCETCHEALHRGEIALKTKRGHSFRAEAFMGMMRWEVLNRLKASHSELEVNNTYGYRTKHARIVNGIDKSHCADAFCIAGNLGAERLCEFFFQKQTRRNNRQIHKLSILKGGIRKRNQAPFEIKGFRLFDKVACKGEESFIFGRRSSGYFDVRKLDGTRISAGISYKKLRLLEKRRTYLTEIRKEEALPPLPEGRGLRA

SEQ ID NO: 6425 - protein, 470 aa, unidentified
  REGION 1..470: note = Human gut metagenome
MSVFVVGLNGCRLMPVSERKARLLLKGGKASVYRKVPFTIKLNYKTGSTVQPGYLGIDTGSQHIGVSVVQKDGTVLHKEEIGLRDSMSKRKLLESRASSRRGRRYRKTRYRHPKWKPKTKRIYNEKADRKGRHWKKQKNTFTSKRQAGWLPPSLQSKTDHHIQWIRKLLDLLPEGYRLSIELGRFDPARMKDPEIHGELYQKGPQYDYENVRAYVLARDGYTCRVCKKKGGKLHVHHILYRSRGASDNPKYMAAVCSKCHTTENHLPGGILYQWMQDQKKFTRGLRDATFMNILKKRLRKAFPDAVFTYGNITKADREKLELPKSHGNDATAIALVNTEVKSVKDEEPVIHIQQVRRKKRSLHEETPRKGRKEPNRTASRSDKNTKSVTVAKGSGEKKASMTACLFDRVELDGKKGWITGFTGTSCYVKDKEDNYICTSPKYKQVSISRLRILHHCGNWAIGAEKPLGKG

SEQ ID NO: 6426 - protein, 377 aa, Moorena sp.
MSKVFVLDTNFTPLNPIHSAQARQLLRTKKAAIFRQFPFTIILKKSRPDSPVSSLRLHIDPGAKFTGMALVNDSTGKVVFAAELKHRGFAIRDALTSRKQLRHSRRARKTRYRQPRFLNRTRPEGWLAPSLQSRVENIKTWVERLRKLAPIEAISQELVRFDMQLMANPDIQSKEYQQGTLAGYETREYLLEKWGRQCAYCGVKDVPFQVEHIHPRAKGGSNSITNLTLSCEKCNTKKGTKDIKDFLKKDPSKLEKILKQAKRPLADAAAVNTTRTALLEVLKATGLPVETGSGGLTKFNRNQQKLEKTHWIDAACVGQSTPILNIKGVKPLLITANGHGSRQSCRTDKYGFPNRHVPREKIHFGFQTGDIAKAVVT

SEQ ID NO: 6427 - protein, 512 aa, unidentified; identical to SEQ ID NO: 5858
  REGION 1..512: note = Human gut metagenome

SEQ ID NO: 6428 - protein, 406 aa, unidentified
  REGION 1..406: note = Ga0315273_10202850
MLVYVLNKEGKPLMPTKPSIARILLKEGKAKAIKKTPFTIKMLIETTNYKQEVIAGMDTGSKVIGTACISNGKVLYKSETFIRQDVSKKMEQRKMYRRNRRGRKTRYREARWNNRANSLRKDRLAPSLLSKLNSHLREKKFIEKLLPVSKWILELASFDIHKISNSEVKDYQKGQQKGFYNVKAFILDRDGFTCQHCKTKKSKLHVHHIIFRSNGGTDSPENLITLCEGCHDKLHKGEFEIKGKKSITKHATEIGITKSQLKKKFGDFVETFGYETKFKREQILQLSKSHCNDAIAICCSDSEIIKDLNYYFIKKNVAKGDYQQTKGIRSEKKIPTGKLFGFKKFDKVKTPEGIGFIKGKRSSGAFVIMDILGNIFNKSWNAKKYLERISARKNYIMEVCAVPMQL

SEQ ID NO: 6429 - protein, 470 aa, Anaerostipes sp.; identical to SEQ ID NO: 2825

SEQ ID NO: 6430 - protein, 434 aa, Solobacterium sp.; identical to SEQ ID NO: 6112

SEQ ID NO: 6431 - protein, 431 aa, unidentified
  REGION 1..431: note = gut metagenome
MPNKVYVINKHGRPLMPCSPAKARHLLDEGKAKVKKRTPFTIQLVYGSSGYTQEVILGVDAGSKTIGMSASTTKEELLSAEVKPRNDVVDLLSTRREFRRAQRNRKTRYRKPRFDNRVRSKHKGWLAPSVEVKIQEHITAIRRVCGILPVSKVVIETAEFDLQLLKAIADGKPVPQGEDYQQGEMYGHYNVRQYVLWRDGYTCQCCGAHATKKKEVRLHVHHLESRKVGGDAPDNQVTLCESCHEKLHKWLIAEKDFKKRKRKSTRDATFMGIMRKTLMQRLCSELPIPVIETRGYITKATREKLLVLPKSHTNDALAIAQGKQGFNVGYLPEIAQIDKIYTIRPVRHHNRQLYKATILKGGIRKSNQTKKYVFGYRLFDKVQFNEQDCFIWGRRTTGIFTIKTINGKMIKDGISFKKLKLAEKSTSYLIA

SEQ ID NO: 6432 - protein, 481 aa, unidentified
  REGION 1..481: note = Human gut metagenome
MWTTVLRGEKPYGRSSALPVRECVSIAKKRRHHMVAVLSKTGIRLMPTSSYRARKLLAKKKAVICMYRPFTIRLTERETGDVQPVELAVDTGYFHVGNSLKTAKHELAAVEIRTLMDEKQRYDDRRRYRRMRRSRLRYRAMRFDNRRRPEGWLALSIQGRMEQNLAFLRRVLSVVPVTRIVMEMGQFDTQVLKAVEEGRPLPEGTDYQQGERYGIATLREAVFTRDNYTCQCCKKTIHDGVILHVHHIVYRSQGGTNRMGNLITVCEKCHTPKNHKPGGKLYKWKPTVKSFKGATFMTAVRWIMYRFVKECFPDVDVRITYGAKTKLQRRALDITKSHVNDAYAMGDFHPKHRARPVILQKKRRNNRILEKFYDAKYIDTRDGSKKTGQQLFNGRTNRNHNTDTENLRLYRGMKLSKGKRAIRTTRYKIQPHDILVYQGQEMEASGCHNKGTRVMTIAKKSLPIGKVRVRRYSGGYYAVAE

SEQ ID NO: 6433 - protein, 453 aa, Halomonas sp.; identical to SEQ ID NO: 2619

SEQ ID NO: 6434 - protein, 544 aa, unidentified; identical to SEQ ID NO: 3705
  REGION 1..544: note = Human gut metagenome

SEQ ID NO: 6435 - protein, 465 aa, unidentified
  REGION 1..465: note = Human gut metagenome
MSTCVCVFSNNGERLMPTIRLGKVRHLLKDGKAKIIKHHPFTIQLLYDSKTNTQPIEICEDVGYNYIGISVKSESHEYVSAQYDTLQDEKEHHDDCRKYRRTRRNRLRYRKPRFDNRKRDDGWLAPSLEHKKELNVNVIKMYCEVMPITHAIVEVGSFDTMLVKAIEEGKATPESADYQKGPRYKLATLREAVFYRDNYTCQVCGRKANEGAILHVHHMFYWKGRHGNSLSELITVCEKCHTPANHQKGGKLYGFGEDIKFANLSGAAFMNTVRWQIVNVLNAAFGKPFVTFTYGAMTKEKRIALHLEKSHNNDAYAMGSFHPVNRCAFEHYEKVKRNNRILEKFYDSQYIDIRTGEIATGKELFNGRISRSHKKDSENLHKYRGKRICKGHRALRRKKVALNPGDLVSLNGEILVVHGTHTKKNGSVNVEFKTPSRGGKKSASLKKLKIVKTSNLMHSAWTKVA

SEQ ID NO: 6436 - protein, 415 aa, unidentified
  REGION 1..415: note = Human gut metagenome
MVYVVANDGQPLMPTERHGKVCRMLKSGMAKVVKKCPFTIQLQYESERNVQPVSLGVDAGSKHIGISATTKTKVLYESDVELRDDIVKLLATRRQLRLSRRSRKTRYRPVRFDNRKRKEGWLVPSIRQKIGSHLTVVANVCKILPINQIIVETASFDIQKIKDPEIQGIEYQQGEQMDFWNIREYVLFRDGHTCQCCKGRSKDKILNVHHIESRKTGGNAPNNLITLCETCHKGYHNGTVILPKNIKHGMQFKDAAFMGIMRWTFYNTLKEQYEPDIPVHYTYGYITKNTRINHNLPKGHCIDARCISGNPDAVSDGTYYYQKKVRCHNRQIHKQTILKGGIRKSNQAEYLVRGFRLFDKVRYQGREYFIFGRRKSGFFDIRTLSGEKVNKGSISVKKLTFADTRKNYLTERRTV

SEQ ID NO: 6437 - protein, 440 aa, Ktedonobacter sp.
LSKVFVLDTNKQALNPVHPGRARRLLSLGQAAVFKRYPFTIILKSAASSPHVWPLRVKLDPGSKTTGLAIVNDASGEVVFAASLIHRGDAIRERLEKRRAARRSRRQRKSRYRQSRFDNRGTKKKGWIAPSVQSRVCNVITWVKRLVRLCPITAISQELVKFDLQQMDHPEISGVNYQQGTLSGYEVREYLLDKWGRQCAYCGAKDVPLEVEHINPRSKSGDDRVCNLTLACEPCNTRKGTQDIRVFLAHQPELLAKLLAQAKSPLKDAAAVNITRWVLHAQLKAFGLPLECGSGGRTKFNRITRGLEKTHWCDAACVGASTPEVLHIGQVRPLSIAAYGHGRRQMCLMNKSGFPRTNPKQKKFKHGFRTGDLVKAVVPPHLKHAGTHVGRMSAKASGAFTIATAGGTVTDIGKKYCRMLQRADGYGYTQKGELAFPPVP

SEQ ID NO: 6438 - protein, 447 aa, unidentified; identical to SEQ ID NO: 5316
  REGION 1..447: note = Human gut metagenome

SEQ ID NO: 6439 - protein, 408 aa, unidentified; identical to SEQ ID NO: 4826
  REGION 1..408: note = Human gut metagenome

SEQ ID NO: 6440 - protein, 431 aa, unidentified; identical to SEQ ID NO: 5232
  REGION 1..431: note = Human metagenome

SEQ ID NO: 6441 - protein, 309 aa, unidentified
  REGION 1..309: note = metagenome
MKGVQIMQNRVFVINKHGKALMPCKPRKARILLRDGKAKVLKKEPFTIQLLYGSTGYKQDISIGIDSGQRHIGLAVTSQDKVLFQGEVELRQDVKKLIDTRRIYRRSRRNRKTRYRKAKFLNRIAKKKDNWLPPSVLSKVNHNINWIKRLLSVLPKADLHIEVGKFDIQKMKNPEINGEGYQQGDLYGYQTVKQFVLARDNYTCQVCKKKGGKLKIHHIIYRSLGGTNTVNNLITVCSNCHTTKNHQTGILAKWCKDKKKVNKSYKGATFMNILRRRLFLAFPQAKFQYGAWTTLQRADLELTKSHYNN

SEQ ID NO: 6442 - protein, 442 aa, unidentified; identical to SEQ ID NO: 3791
  REGION 1..442: note = Human gut metagenome

SEQ ID NO: 6443 - protein, 453 aa, Moorena sp.
MSVAVLSSTGRKLMPTSNYRARKLLKSKRAVIECYRPIFTIRLTDREEGNTQPIEYACDTGYQHVGVSIKSEKHEFVHAQYDMLSDETERHNDCRKCRRTRRNRLRYRKPRFDNRSKKNKEMAPSLRHRKENQIRLFESFCKVMPITSAAFEMGKFDTQLLQAIADKKPLPKGKDYQRGSKYLYQTEREAVFGRDHYTCQVCGKSVKDGVILHTHHIGFWKGYRSNRISNLLTVCEHCHTAKNHQPGGKLWGLEPKSTNLAPATYMSTVRWAMYRDLVLTHPELDIYFQYGAKTAVTRKSLHLAKTHANDAYCVGSLHPRHRSTELVYQKKRRNNRILAKFYDAKYIDIRDGEKKSGSALSCGRTNRRESRRSDKNQRIYRGKKCSSGRTSVRKKRYSYQPGDAILFRSQRFTVNGAHCNGTRVILNTGKSVKMADLTCIKMEGGWCFLPAQA

SEQ ID NO: 6444 - protein, 431 aa, Moorena sp.
MRVFVLDKNLKPLDPCRPARARLLLKQGRAKVLRRYPFTIILSDLEVENCRTHNYQLKIDPGAKTTGVSYRQDNTVIWGAEITHRGFQIRDALTSRRQLRRSRRSRKTRYRKPRFLNRKRPSGWLAPSLMSRVHNILTWVKKLIRFCPIAGISQELVRFDTQKMENPEISGTEYQQGTLCGYEIREYLLEKWNRKCAYCGATDARLEVEHIKPKSLGGSDRVSNLAIACHDCNQAKGSQEIEQFLSGKPDVLKQVLSQAKRSLADAAAVNATRWKLYNELKFTGLPVETGSGGQTKYNRRRFNLVKTHWIDAACVGNVQNIYVEDYQFLSIMAKGHGTRQICRTDKFGFPKRYCSRTKIHKGFQTGDIVKAIVTKGKKIGTYVGRVATRKTGSFNISTSNGLIQGISHKYCTLIHKKDGYAYQINTLSSLS

SEQ ID NO: 6445 - protein, 406 aa, unidentified
  REGION 1..406: note = gut metagenome
MVYVQDIDGKPMMPTTRHGKVRRLLKSKKATVVNLCPFTIRLLYDTTGYKQEITLGVDTGTKHVGLSATTKSKELYASEVILRSDVVDLLSTRRELRKIRRYRLRYRKPRFMNRIKSKKRGWIAPSIRQKIDSHIRIIGFVYSILPVSKLIIEVAQFDTQKIKNPEISGKEYQEGEQLGFWNVREYVLARDEHKCQHCKGKSKDPVLNVHHIESRKTGGDSPSNLITLCKTCHKEFHKGNIKLKVNRGESLRDAAVMGIMKWELYDELKSLYPNVKMTFGYITKYNRINHGIEKSHVSDAFVISRNFDSERLGYYYKRKLVRRHNRQIHKMKAPKGGNKRMNQSPFKVFGFRLFDKVMFQGKERFIYARRLRGIFNIRDINGENKKDISYKKLEYVSHGLISIVAG

SEQ ID NO: 6446 - protein, 465 aa, unidentified
  REGION 1..465: note = Human gut metagenome
MVIALDRHKKPLGFVTERRCRKLLEVRRAVFYRHYPAVIILKDVDARNIYKLPSYRIKIDPGAVHTGIAIVCNETNEVMYFLQIEHRGSEVKKALITRKQTRRNRRSRETRYRRCKFKNGGDFDSSRKNGWLPPSVKSTADNVIHWVEKLCRYINITECSFEAVRFDSQLMDNPEIGGEEYQQGTLSGYELREYLMEHFRHTCQYCGGESGDPVLEWEHKIPRSRGGSDSVKNASLACSCCNRDKGNRTLEEYLEDSKHISPKGKSEKALNEARISHISGILEKGTIYGSNRYSAWVNSTRRYIEKYLFLMFDDVECCSGGRTKYNRIKLKLPKDHHYDALCVGSVPKEGYTDRTNSYVLYVKATGRGTRFRGQCNSCGVITVKYKNNSKRKFGFQTGDIVQLNKPKGKDTGQYTGKVAVRSSGSFDLIRKGCKRITANYKYFRMMQYSDGYEYLGPLRPIPHSA

SEQ ID NO: 6447 - protein, 456 aa, unidentified
  REGION 1..456: note = Human gut metagenome
MNTCVCVLSNSGERLMPTFRLGKVRRLLKDGKAKIVKHHPFSIQLLYDSKTNTQPIETCEDVGYNYIGISVKSESHEYVSAQYDTLQDEKEHHDDCRKYRRTRRNRLRYRKSRFDNRKRDKGWLAPSLEHKKQLNISLIERYVSVIPITHVTVEVGSFDTMLVKAIQEGKVIPEGADYQKGPRYNLATLREAVFYRDNYVCKVCGRKATEGAILHMHHMFYWKGRHGYQLDELVTVCEKCHTPANHQKGGKLYGFGKDKKFANLSGAAFMNAVRWQIVNALYATYGKEFVTITYGAMTKEKRIALQLEKTHNNDAYAMGDYHPARRCKFRHYQKRRRNNRVLEKFYDATYVDTRTGNKAKGKELFNGRISRNHKKDCENLHKYRSKKVSKGRRSIRRQHYAIQPYDTVRLEGKTYITSGCHNKGTRLLIPVNGKSKSVAISKVQVVCHAGAWIQII

SEQ ID NO: 6448 - protein, 406 aa, unidentified
  REGION 1..406: note = Human gut metagenome
MVYVQDIDGKPMMPTTRHGKVRRLLKDNKAVVVNTCPFTIKLMYKTSDYKQEIVLGVDAGTKHVGLSATTKSKELYSGEVILRSDIVELLSTRRESRRTRRNRLRYRKPRFNNRIKSKRTGWVAPSVRHRIDAHIRVIDNICSILPVSRVIVEVAQFDTQKIKNPDISGDEYQEGDQLGFWNVREYILARDGHKCQHCKGKSKDPILNVHHIESRKTGGDSPSNLITLCETCHKEYHKGNIDLKVKRGKSLRDAAVMGIMKWKLYEELKSRYPNVSMTFGYITKYNRIKYGIEKSHTSDAFVISRNFNAKRIERQYLKRLIRRHNRQIHKMKILKGGKKKNNQAPFEIFRFRLFDKVLYNNEILFVYGRRKSGNFNIRDFNGENPKDVSHKKLKLIRGKRHLIILK

SEQ ID NO: 6449 - protein, 442 aa, unidentified; identical to SEQ ID NO: 2903
  REGION 1..442: note = Human gut metagenome

SEQ ID NO: 6450 - protein, 420 aa, Geobacillus sp.; identical to SEQ ID NO: 4984

SEQ ID NO: 6451 - protein, 418 aa, unidentified
  REGION 1..418: note = Human gut metagenome
VYVLNMHGEPLMPCSPRKARLLLKEGKARVVKRTPFAIKLLYGSAGYKQPVTLGVDAGSKHVGLSACTESRELYKEELTPRNDVVELLSARRQYRRSRRNRKTRYRASRFDNRVHSKHKGWLAPSVEVKIQEHITAIKRVCKILPVTLIRVETAEFDTQRLKAMLEGKPLPVGKDYQLGEMYDEYNVRQYVLKRDNYTCQCCDAHPTIKKPIRLHVHHLESRQTSGNAPNNLIVLCEHCHKALHEGKIKLKNGKKRGKPLRDAAFMGIMRNTLLARLRKELPIPVEQTYGYITKLLREKNKISKSHVNDARCIAGFPNAESCDTMFRTRALRHHNRQIHKAKTLKGGIRKKNQAPYLVKGFRLWDKVRYNGEECFISGRRSSGYFALKKYNGAVVSSGVSYKRLTLLEAATNYITERS

SEQ ID NO: 6452 - protein, 408 aa, unidentified
  REGION 1..408: note = Human gut metagenome
LRVFVLNKRGKPLMPCSPAKARLLLKEKKAIVKRRTPFTIQLTIATGETKQPVGLGVDAGYKHVGLSASTDKAELYASQVELRQDITDLLSARRALRRARRNRKTRYRAPRFNNRIRTKRKGWLAPSVENRINAHLSRIEAVLRLLPVTKITVETASFDMLLLKNPDIAGKEYQEGEQLGFWNVREYVLFRDGHVCQHCYGRSKDPVLNVHHLESRRTGGDSPGNLITLCETCHEALHRGEIALKTKRGHSFRAEAFMGMMRWEVLNRLKASHSELEVNNTYGYRTKHARIVNGIDKSHCADAFCIAGNLGAERLCEFFFQKQTRRNNRQIHKFFQVKDGIRKRNQAPFEIKGFRLFDKVACKGEESFIFGRRSSGYFDVRKLDGTRISAGISCKKLRLLEKRRTYLT

SEQ ID NO: 6453 - protein, 411 aa, unidentified; identical to SEQ ID NO: 3917
  REGION 1..411: note = Human gut metagenome

SEQ ID NO: 6454 - protein, 456 aa, unidentified
  REGION 1..456: note = Human gut metagenome
MNTCVCVLSNNGERLMPTFRLGKVRRLLKDGKAKIVKHHPFTIQLLYDSKTNKQPIEICEDVGYNYIGISVKSESHEYVSAQYDTLQDEKEHHDDCRKYRRTRRNRLRYRKSRFDNRKCDKGWLAPSLEHKKQLNISLIERYVSVIPITHVTVEVGSFDTMLLQSIQKGEAKPEGADYQKGPRYNLATLREAVFYRDNYTCQVCKRKIADGAILHMHHMFYWKGRHGYQLDELVTVCEKCHTPANHQKGGKLYGFGKDKKFANLSGAAFMNAVRWQIVNALYATYGKEFVTITYGAMTKEKRIALQLEKTHNNDAYAMGDYHPARRCKFRHYQKRRRNNRVLEKFYDATYVDTRTGNKAKGKELFNGRISRNHKKDCENLHKYRSKKVSKGRRSIRRQHYAIQPYDTVRLEGKTYITSGCHNKGTRLLIPVNGKSKSVAISKVQVVCHAGAWIQII

SEQ ID NO: 6455 - protein, 431 aa, unidentified; identical to SEQ ID NO: 4200
  REGION 1..431: note = Human gut metagenome

SEQ ID NO: 6456 - protein, 413 aa, unidentified; identical to SEQ ID NO: 3587
  REGION 1..413: note = Human gut metagenome

SEQ ID NO: 6457 - protein, 532 aa, unidentified
  REGION 1..532: note = Human gut metagenome
MPTVYVLNKDGKPLMPTTRGGHVRHLLKEQKARVVRAKPFTIQLLYETDDAVQLLYLGIDPGRTNIGVAVVKANGTAVFTAHLETRNKEIPKLMQDRKKARRARRTNGRRCRRQRRAKANGTISKKCVKQTTTQNGSVSKRAKEIGIIKRHLPGCEKDVLCIGIKNKETKFTNRTRPEGWLTPTANQLLQTHINLVKKIQKFLPISDVVLEVNKFAFMRLNNPNIQKWQYQQGPLYKKESLESAVSEIQEHHCLFCKKPIDHYHHVVPQHKNGSNTIGNIVGLCAKHHDLVHKDSAWEKKLAKKSTGLYKKYGALGVLNQIIPTLTNELSSLFPKHSFVTNGKSTYDYRAAHGVSKDHWLDAYCIACSVLPSNVCDSNINNHVPYELKQFRRHDRRVLHKANMSRVYTLNGKAVATNRHKAIKQTTDSLEEFRQNYPDDVYKLKVKEHHPAYRNLNRNYPGSVFLVGKQAHVMQGIASSKDGKTTKYNDTNATTITAGKCKFVAKNSGILFVQCKFRKALSDGTTKKLQYPV

SEQ ID NO: 6458 - protein, 430 aa, unidentified
  REGION 1..430: note = Human oral metagenome
MLVYVLDMNGQPLMPTHNGAKVRVLLNQRRAKVVSKCPFTIKLLYESTSFTQPLTLGVDTGSKYVGSAVVNDTTSEVVYESQVELRDDIKSKMDRRRQFRGARRTKLRYRPARFNNRKSSKRKDRYNPTLISKFQGHKREIEFIKSILPITEVVLEIGEFDPHLIQDPTLAYHKWDYAKGELYQQENFKQAAKARDDYKCQCCGKKDCRLEVHHLIPHSRGGSDKLANLITLCSDCHHLAHSSESQLLAFQKKFGKKARGTLRYATQMNVLRHMLQREYPDAEITYGFITKEMRRVFELEKSHMIDACCIASRGVLFKNNGSNKYKKKCVPKGDYVRTNTTNGKYVVIPKGKIAGFKRYDKVLYDNNECFIVGRMSTGYVYLIDIDNNRVNVERTERTTGKKYLAKASIKVSLIKKIASAKTPIISLVNY

SEQ ID NO: 6459 - protein, 424 aa, Moorena sp.
MVYVLNVEGRPLMPTGRHGHVRRMLRDGKARVVRRCPFTIQLMCEGTSYTQPVHLGIDAGSKRIGVSAATEKEVLYEAEVELRNDIKELLSSRREARRARRNRKTRYRKPRFLNRTKAKRKGWLAPSVEQKVQTHLTVIRKACGILPVSKITIETASFDTQMLRAKELGLSLPAGTDYQQGEQLYSWNVREYVLFRDGHTCRCCKGKSKDGVLEVHHIESRKTGGDAPNNLVTLCRTCHEGHHRGTVKLPEDIKRGNRYNDAAFMGIMRWKVYDRLKEEYGPDMVHMTYGYITKRTRIGHGLQKGHRIDARCISGHPDVAPPEEVFFQKKIRCHNRQIHKFGIPKGGVRKRNQAPYLVKGFRLFDKVEYGGQECFIFGRRSSGYFDVRLLDGTKVHAGVSYRKLRFLEPRRTMLIERRTQGTTA

SEQ ID NO: 6460 - protein, 454 aa, Calothrix sp.; identical to SEQ ID NO: 4352

SEQ ID NO: 6461 - protein, 512 aa, unidentified
  REGION 1..512: note = Human gut metagenome
MSTVYVLNKDGKPLMPTTRGGHVRYLLKEKKARVVTSKPFTIQLLYETDDVVQPLYLGIDPGRTNIGVAVVKTDGTAVFTAHLETRNKEIPKLMQERKKARRARRTNGRRCRRQRRAKANGTISKKCVKQATAQNGSASKRAKKIGVIKRHLPGCEKEVLCIGIKNKEAKFNNRTRPAGWLTPTANQLLQTHINLIKKIQKLLPISDVVLEINKFAFMQLDNPNIQKWQYQQGPLYQKANLEEAVSEMQEHHCLFCKKKIDHYHHVVPQHKNGSNTIDNIVGLCTKHHDLVHKDTAWYEKLTKKKTGLNKKYGALSVLNQIIPALTKGLSSLFQKHFFVTTGKSTYDYRAAHGVSKDHWLDAYCIACSVLPNDVCDSNINSHVPYELKQFRRHDRRALHKENINRVYTLNGKKVATNRHKAIEQTTDSLEEFRQNHPDDVCKLKVKEHHPEYRNPKRNFPGCVFLVGKRTHVMQGTSGSHNGKADGYYDTNGNSYPSGKCKFVAKNKGIVFA

SEQ ID NO: 6462 - protein, 423 aa, Moorena sp.
MRVFVLNSNRQPLDPCKPARARILLSTGKAKVYRRYPFTIILTEEIQEPITHGSQLKIDPGAKTSGLAIVQGNRIVWGGELTHRGFQIRDALTTRWQLRCARRNRKTRYRKPRFLNRSRPEGWLAPSLMSRVHNILTWVKKLTRLCPIAGISQELVRFDTQKLQNPEISGIEYQQGTLYGYELREYLLEKWNRKCAYCGTTGTQLEIEHIKPLSKGGSNRVSNLAIACHSCNQSKSDQEIEQFLSGKPDVLKRVLSQAKRPLTDAAAVNTTRWKLYHEMKSIGLPVEVGSGGLTKFNRCRQNLPKTHWLDAANVGKVDTLIIEGYQPLLIAAKGHGTRQICRTNKYGFPIRYCSRTKIHKGFQTGDIVRAVVTKGKKIGTYVGRVATRKSGYFNISTKSGLVQGISHKYCQFIHRKDGYAYTI

SEQ ID NO: 6463 - protein, 512 aa, unidentified; identical to SEQ ID NO: 5824
  REGION 1..512: note = Human gut metagenome

SEQ ID NO: 6464 - protein, 424 aa, Moorena sp.
MQNRVFVLDTNKQPLSPTHPARARKLLTRGKAAVFRTYPFTIILRKTVESPGDEPHRIKLDPGAKVTGIALVNERTGTVVWAAELTHRGDMIRQKLEKRRVVRRNRRKHKTRYRPARFNNRKRPNGWLAPSLQHRVETAMTWVKRLRKYCPITDISMELVRFDMQKLRNPEISGVSYQQGVLFGYELREYILTKWRHQCAYCGAKEVPLEIEHIHPKSKGGSDRVSNLAIACHKCNQKKGDKHVEQFLKKKPEVLKRLLAQAKAPLRDAAAVNYTRRTLFNRLKETGLAIETGTGGLTKYNRTLQGLSKTHWLDAACVGKSTPMLKIATTQPLLITCKGRGGRQKARINKYGYPICHRPLKPIKGWQTGDIAKHQVHGIGRVTPRSSGSFRLTKPDKTNKYVKPTDLKHLKPVSRRDGYSYKWV

SEQ ID NO: 6465 - protein, 417 aa, unidentified
  REGION 1..417: note = Human gut metagenome
MQYVYVLNKHGEPLMPCSPGKARLLLKQQKACVVKRTPFTIKLLHGSAGYKQPVTLGVDAGSKHVGLSASTETHELYCEEFTPRNDVVELLSTRRQNRRSRRYRKTRYRAPRFNNRVHSKHKGWLAPSVEVKIQEHITVIKRICRILPITLVRVETAEFDTQRLKAMLAGKPIPVGTDYQLGEMYDEYNVRQYVLKRDNYTCQYCGAHTTAKKVVKLHVHHLESRKVGGNTPSNLITLCVTCHNNLHKGKITLDGKKRGKTLRNAAFMGIMRNTLLTRLRNELNIPVQNTYGYITKLLREQNDIKKSHINDARCISKHPLAVPCSVCYCTKAIRHHNRQIYKAKILKGGVRKANQATYIVKGFRLWDKVLYNGQECFISGRRSSGYFALKKLDGTTITNSISFKKIAAIRACNKLLN

SEQ ID NO: 6466 - protein, 442 aa, unidentified; identical to SEQ ID NO: 2903
  REGION 1..442: note = Human gut metagenome

SEQ ID NO: 6467 - protein, 426 aa, Moorena sp.; identical to SEQ ID NO: 3294

SEQ ID NO: 6468 - protein, 415 aa, Parasutterella sp.
LMPCSPAKARLLLKEKKAIVVRRTPFTIQLTIATGETKQPVSLGVDAGYKHVGLSASTENAELYASEVELRQDVSDLLSARRTLRQSRRNRNTRYRAPRFDNRIRTKRKGWLAPSVENRINAHLSRIETVIRLLPVTKITVETTSFDMQLLKNSDIAGKKYQEGEQLGFWNVREYVLFRDGHVCQHCHGRSKDPVLNVHHLESRRTGGDSPGNLITLCETCHKALHRGEITLKAKRGQSFRAETFMGIMRWEVLDRLKASHSKLEVQNTYGYRTKHARISNGIAKSHCADAFCIAGNLGAERLGEFFFQKQTRRNNRQIHKLSILKGGIRKRNQAPYEIKGFRLFDKVACQGEEGFIFGRRSSGYFDVRKLNGTHISAGISCKKLRLLEKRQTYLTEIRKEKALPPLPEGRGLRA

SEQ ID NO: 6469 - protein, 453 aa, Moorena sp.; identical to SEQ ID NO: 2687

SEQ ID NO: 6470 - protein, 423 aa, Scytonema sp.
MSNYCFLIDANKTPLNPVHPSHARKLLDCGKAAVFRRYPFTLILKRVVENPLVHPLTLKIDPGSKFTGIALITNGGEVIWGMELQHRGQQIKDALEHRRVVRRGRRNRNTRYRQARFLNRKRQAGWLAPSLRHRVLTTETWVKRLQKFTPIGSIVQELVKFDTQAIQNPEISGTEYQQGTLHGYECREYLLEKWNRQCAYCGVKDVPLEIEHIQPKSKGGSDRISNLCLACHKCNQRKGSRDIKDFLKGKPDVLHRVLRQAKSPLKDTASVNSTRWSLFNALKSFGLLVSTGTGGQTKFNRIRFELPKAHWIDAACVGVVDAIKLVTTKILKVKATGFGGRQRCQTDKFGYPQKHRPLRPIFGFCTGDIVRADVPKGKYAGTFTARVCPMSHGYGEFVIDKKRRSIKLEYLTPVHRKDGYDYA

SEQ ID NO: 6471 - protein, 457 aa, unidentified
  REGION 1..457: note = Human gut metagenome
VWLYQAVYNLGEGFLPSSEERTAFYWLLIYRKEHGIMQYVYVLNKHGEPLMPCSPGKARLLLKQQKACVVKRTPFTIKLLYGSAGYKQPVALGIDAGSKHVGLSASTEKRELYREEFTPRNDVVELLSTRRQNRRSRRNRKTRYRAPRFDNRVHSKHKGWLAPSVEVKIQEHITVIKRICRILPITLVRVETAEFDTQRLKAMLKGKPLPVGTDYQLGEMYDEYNVRQYVLKRDNYTCQCCGAHPTEKKPIRLHVHHIESRHVGGNAPNNLITLCVACHKALHEGKITLDKGKKRGKPLRDAAFMGIMRNTLLARLKDELNIPVKQTYGYITKLLREKNKIPKSHVNDARCIAKAPNAKPCDTMLYTRALRHHNRQIHKAKILKGGIRKKNQAPYLVKGFRLWDKVRYNGEECFITGRRSSGYFALKKYDGTVISNSASYKKLMLLEAATNYITERS

SEQ ID NO: 6472 - protein, 420 aa, unidentified
  REGION 1..420: note = Human gut metagenome
MQYVYVLNKHGEPLMPCSPRKARLLLKQKKACVVKRTPFTIKLLYGSTGYKQPLTLGVDAGSKHIGISAATEKYELYCEEATPRNDVVDLLSARRAFRRSRRNRKTRYRAPRFNNRVHSKHKGWLAPSVEVKIQEHITLIKRVCRILPVTFVRVETAEFDTQRLKAMLEGKPLPVGTDYQLGEMYDEYNVRQYVLKRDNYTCQCCGAHPTKTKAVKLHVHHIETRRTGGNAPNNLITLCTACHKALHAGKVTLDGKKRGKPLKDASFMGIMRKTLMERLLKELKIPVQGTYGYITKYLREKHSIPKSHTNDARCISKNPLAIPCDTCYYTKAIRHHNRQLHKATILKGGIRKANQAPYTVKGYRLWDKVSYNGSECFITGRRTSGYFALKKLDGTVVSNSASYKKMRLLEVATNYITERR

SEQ ID NO: 6473 - protein, 413 aa, Sutterella sp.
LKVFVLNMRGKPLMPCSPAKARHMLKAGKAFVVRRTPFTIKLTIATGETKQDVTLGVDAGARHVGISATTEKEEVFASEVALRQDITGLLADRLAFRRARRNRKTRYRAPRFNNRVRSKHKGWLAPSVENRIQAHISRIEAVCRLLPVTKIVIETASFDIQKIRNPEVEGTGYQQGDQLGFWNVREYVLFRDGHICQHCRGRSKDPILNVHHLESRKTGGDAPNNLITLCETCHKAYHAGKIKLKVKRGQSFRAEAFMGIMRWTLLDRVRKTHPKLPVENTYGYLTKHKRIALGLPKTHCADAFCIAGNLKALRRGDFLFQQQTRKHNRQIHKCSILKGGVRKLNQAPFLVKGFRLFDKVRIGGQIGFVFGRRVRGTFNIRRLDKTVIGTDINCKKLSLLETRKTFLTELRKE

SEQ ID NO: 6474 - protein, 555 aa, Streptomyces sp.
MTTFPVGEQTHQAVLPQQPALESVGADTPGSRDETAHGHSAVSWSTGRKHGRGETGGRGIASGRRHAKSAVPAAQEAETGSGDTPTSEQDDCSYRGGIGASRVLVLARGGQPLMPCHPARARALLRKGRAAVVRQVPFVIRLKDRTRDASAVEGVQLRIDPGSKGTGLVLTDEKKELDDHGALITVRRGLVSVGLQHRGDQIRAGMRQRAGYRRRRRKANLRYRAARAHNRARRTGWLPPSVRHRVDTTFSLADRLCRQAPVVEIHVERVAFDTHSLSVGKFVQGIEHQRGPLAGTTVRGHVRARWDGACAYCGVSGVPLNVEHLRPRSRGGSHRIANLVLACAPCNRAKGSKPVGAFLADRADRLAVILPQLRAPLDDAATMNATRWQLTDAMSALGKPVDVWAGGLTAANRLAMGLAKTHTIDALCVGPLDHASGDRIVRYPADVLTARATGRGSYARTTPDSHGFPRLLRTRAKQHFGYITGDLVRAVVPRGTWSGTWTGRVSVRARGQHSVTTPVGRINVSHRYLRLLQRGDGYEWGIRPEPPQSTSRKMG

SEQ ID NO: 6475 - protein, 373 aa, Moorena sp.; identical to SEQ ID NO: 6300

SEQ ID NO: 6476 - protein, 442 aa, Lactobacillus sp.; identical to SEQ ID NO: 5193

SEQ ID NO: 6477 - protein, 419 aa, unidentified
  REGION 1..419: note = Human gut metagenome
MVYVLDINRQPLMPTTRHGKVRRLLNNHLAKAVKRCPFTIQLLYQSTKETQPVSLGVDAGSKHIGLAAATEKKVVYQEELIPRNDVVKLLSARRALRYSRRNRKTRYRKSRFNNCVHSKHKGWLAPSVEAKIQEHITAIKRICQILPVSEIHVETAEFDLQRLKAIEEGKPLPVGTDYQLGEQYDFYNTRQYVLHRDGYTCQCCGTHDNNVKLHVHHIESRQTGGNAPNNLITLCEHCHKALHEGKLKLPKRKKRGKSYRDATFMGIMRKTLLERLKKEVDVPVTGTYGYITKYWREKAGLEKSHINDAVCISKHPYVEPLDTYYLTKAVRHHNRQIHKVNFSKGGIRKRNQAPHLVKGFRLFDKVLYQGKECFIFGRRVSGRMDIRLLDGIRINASVGYKNLELLELRKAYLTERRTC

SEQ ID NO: 6478 - protein, 427 aa, Moorena sp.; identical to SEQ ID NO: 3411

SEQ ID NO: 6479 - protein, 427 aa, unidentified
  REGION 1..427: note = Human metagenome
MVFVLDKSKKPVNMISHAKARILLKNRLAVVHKVYPFTIRLRDNSCVSNDKTYTVKIDPGSKHTGIAIIDDKDTVVMLAEIEHRGHIIKRDMNSRRVVRNSRRQRKTRYRESRFLNRTKPKGWIAPSVKSIADNVINFIKKYKKLLNITKVMIENVSFDTAQMSSDTKLIGIGYQQGPLYNTNLREFVFSRTNGRCSYCGAKATEIDHIIPRAQGGSNSVHNLTPACRSCNQKKSNLSLKDFGEIMNKDYSHLEPKKLPKDAAIVQLARNYMVREITKLVPDTTTHDAWLTKCNRDSLGLSKQHYYDALSVGEVPNKFDFFTDKILVISAKGRGSRKMCKVDKYGFPRTAAKASKSVEGFQTGDIVKAVVSNGLKAVEYLGRVTVRSTGRLNIKTKSGLTKDIGYKYCRLIQRGDGYSYKYKERSLT

SEQ ID NO: 6480 - protein, 414 aa, unidentified
  REGION 1..414: note = Human gut metagenome
MVYVINKQGQALMPTERFGKVRRLLKNSLAHVVCRIPFTIQLDYDTTDYTQPVSLGIDAGSKHIGISATTSEKELYAADVELRNDIVDKLSTRRELRRTRRSRLRYRKARFNNRVSSKRKGWLAPSVENKIQTHLTVVEKIHKFLPITNIVVETASFDIQKINNPSISGSEYQQGEQLDFFNVREYVLFRDNHTCQHCKGKSKDKVLNVHHIESRKTGGDSPNNLITLCETCHKAYHRGEFKLNVKRGKSFRDAVFMGIMRWSFYDRLKNIYPNVSMTFGYITKNTRTTNNLPKEHYVDARCISGNPVAKPLGYYFYQKKVRCQNRQIHKANFLKGGRKKLNQAPFLVKGFRLFDLVEYQKELYYIFGRRSNGSFDIRKLDGTKVNKGSINCKHLRLISTRKSILIEKRTQVNL

SEQ ID NO: 6481 - protein, 432 aa, Moorena sp.; identical to SEQ ID NO: 6011

SEQ ID NO: 6482 - protein, 453 aa, unidentified
  REGION 1..453: note = Human gut metagenome
MMTAVLSSMGVRLMPTTCFRARKLIKSGKAVIHSHNPFTIRLTQRENGGTQPIEYCCDTGYQHIGISIKSAKHEYVGVQIDTLKNEKKHHQDAITYRRTRRNRKTRYRAARFDNRKATKSKGWLAPSIRHKKDIHLAQVQKYAKVFPITSIVFEMGEFDTQKLKAIEEGRPAPVGIEYQQGEQYGFDDVRNAVFTRDGYRCVCCGRGIENGAILHAHHLKYRSLGGTNRMGNLVTVCDRCHTPVNHQKGGLLWKLMDKYKVKNFKGATFMTAVRWQMYDELKSMFPDTEIHLTYGSRTKEARRLLSVRKSHINDAYCMGDFHPKHRSKRWLYIKKRRNNRVLAKFYDAKYIDSRDGKKKSGQELFSGRTKRNRELNAENQHRYRQLKVSKGRVSIRRQHYSIQPGDTVIYEGKKHITKGVQNLGTYLKIGEKVVPVKKIHIYRYVGGYIRQMM

SEQ ID NO: 6483 - protein, 471 aa, Acidiferrobacter sp.
MAVLVLDRRKRPLMPCSERRARVLLARGRARIHRIVPFTIRLVDRLQEDSTLQPLRLQADPGSKGTGLALVREQETVDEVTGAMIRTIVVVMLLEIAHRGQTLHEVLTQRRAFRRRRRGNLRHRPDRFDNRTRPEGWLAPSLQHRVDTTASWVDRLCRWAPVTSLSQELVRFDTQQMQDPEIAGVMYQQGTLAGYEVREYLLEKWGRKCVYCGQEGVPIEIDHIHPKSRGGSDRVSNLTLACHDCNQAKGNSPLEQFLAKQPEVLRRIQAQAKTPLKDAAAVNSTRWALVQRLKATGLEVEVASGGRTKWNRHRLHLPKTHSLDAACVGHVDAIHCWQQPVLTIKATGRGSYQRTRLTRHGFPRGYLTRNKSAFGFQTGDLVRAFVTSGKKAGRYLGRVAIRASGSFNIQTATGLVQGIPHRFCTLIQRADGYGYALTQRAFDIGEAGTGAAYAAALSLPGLNPRVSRVIG

SEQ ID NO: 6484 - protein, 431 aa, unidentified
  REGION 1..431: note = Human gut metagenome
MPNKVYVINKHGRPLMPCSPAKARHLLDEGKAKIKKRTPFTIQLVYGSSGYTQEVILGVDAGSKTIGVSASTKKEELFAANVIPRNDVVDLLSTRRESRRARRNRKTRYRKPRFDNRVRSKHKGWLAPSVEVKIQEHITSIKRVCRILPVSKVVVETAEFDLQLLKAIADGKPVPQGEDYQKGEMYGHYNVRQYVLWRDDYTCQCCGAHATKKKEVRLHVHHLESRKVGGDAPDNQVTLCESCHEKLHKGLITEKDFKKRKRRSTRDATFMGIMRKTLMQRLCSELPIPVVETRGYITKATREKLRVLPKSHINDALAIAQGKQGFNVGYLPGILQIDKIYTIRPVRHHNRQLHKAAILKGGIRKSNQAGKYVFGYRLFDKVQFNGQDCFIWGRRTTGIFTIKTINGKMIKDGISFKKLKLVEKSTSYLIA

SEQ ID NO: 6485 - protein, 412 aa, unidentified
  REGION 1..412: note = Human gut metagenome
MIYVLNQNGQPLMPTKNHAKVRILLKSKKAKVIRRCPFTIQLMYSSTNYTQSINLGVDAGSKHIGISATTKNKVLFESDVELRNDIVNLLSTRRQNRRTRRNRKTRYRKPRFDNRKRKDGWLAPSVQNKVDTHLTVIRKVHEILPVSKIIVEVASFDIQKIKNPTIGGTEYQQGSQLDFWNVREYVLFRDNHTCQCCKGKSKDKILNVHHIESRKTGGDAPNNLITLCETCHTGYHKGTVNLPKRIKRGMSFKDASFMGIMRWAFYNKLKEIYPNVSLTYGYITKNTRIENKLPKDHYIDARCISGNPKAVSDLGVYYQKKVRCHNRKIHKNTIFKDGYRKRNQAPYEVIGFRLYDKVRWKQQNCFIFGRRSTGRMDLRLLDGTKVNASVGYKNLKMLEMCKNILIELRMEV

SEQ ID NO: 6486 - protein, 447 aa, unidentified; identical to SEQ ID NO: 3915
  REGION 1..447: note = Human gut metagenome

SEQ ID NO: 6487 - protein, 447 aa, Marinobacter sp.
MSVFVLDRRKQPLMPCTERRARLLLDRRRAVVVRAYPFTIRLKDRTGGITQPVRIKIDPGSKTTGIAVVRENSQKQHVLALMELAHRGRPISKSLDQRRAFRRRRRSQLRYRAPRFLNRTKPKGWLAPSLQHRVDTTRSLVNRLRSLVPVVSISQELVRFDTQKMENPEVSGVEYQQGTLLGYEVREYLLEKWGRECAYCTDKDTPLQIEHIDPKVNGGSSRISNLTLACRPCNQEKGRQPLADFFASSKRLKNHQARLDRILKQCKKPLRDASAVNSTRWTLYQTLKQTGLPVEVGTGGRTKFNRCRLRIPKTHALDAACVGEVEIVEGWDVPTLAIKATGRGSYKRTRLTKHGFPRGYLMRQKQVQGFQTGDMVRAVVPSGLKMGTWLGRVAVRKTGSFNIQTNSGAIQGISHRHCVLTQRADGYGYHIQPNQPKEEGDRKNESR

SEQ ID NO: 6488 - protein, 414 aa, unidentified; identical to SEQ ID NO: 2588
  REGION 1..414: note = Human gut metagenome

SEQ ID NO: 6489 - protein, 512 aa, unidentified
  REGION 1..512: note = Human gut metagenome
MSTVYVLNKDGKPLMPTTRGGHVRHLLKEQKARVVRTNPFTIQLLYETDNLVQPLYLGIDPGRTNIGVAVVKTDGTAVFTAHLETRNKEIPKLMQGRKKARRARRTNGRRCRRQRRAKANGTISKKCVKQATAQNGSVSKRANEIGVIKRHLPGCEKEVLCIGIKNKEAKFSNRTRPEGWLTPTANQLLQTHINLVKKIQKFLPISDVVLEINKFAFMRLDNPNVQKWQYQQGPLYQKASLEEAVSEMQEHHCLFCKNTIDHYHHVVPQSENGSNTIGNIVGLCTKHHDLVHKDTSWQEKLAKKKTGLNKRYGALSVLNQIIPALTKELSSLFPKHFFATNGKSTYDYRAAHGVSKDHWLDAYCIAGSVLPNDACDNNINNHVPYELKQFRRHDRRALHKENMGRVYTLNGKSVATNRHKAIKQTTDSLEEFRQRQPNDVCKLKVKEHHPEYRNPKRNFPGCVFLVGKHTHVMQGTSGSHNGKADGYYDTNGNSYSSGKCKFVVKNEGIVFT

SEQ ID NO: 6490 - protein, 414 aa, unidentified
  REGION 1..414: note = Lachnospiraceae bacterium UBA6986
MRMVYVLNQNGQPLMPTENHAKVRILLKQGKAKVVNKCPFTIQLLYSSTNYTQKVTLGVDSGSKHIGLSATTKNKVLFESDVELRNNIVDLLSTRRELRRSRRSRKLRYRKPRFNNRKRSDGWLAPSVKQKVDSHITMIAKVHKILPISNIIVEAASFDIQKIKNPAISGADYQQGEQLDFWNVREYVLFRDGHKCQCCHGKSKDKILTVHHIESRKTGGNAPNNLITLCETCHTGYHKGIVKLPKTIHRGMSFKDATFMGIMRWALYEKLKTIYSDVKLTYGYITKNIRIKNGLPKDHYIDARCISGNPNAVNNGDVYYYKKVRCHNRQIHKNTILKGGYRKRNQAAYEVKGFRLYDKVLWKGQKCFIFGRRSTGRMDLRLLDGTHLNASVGYKNLKLLKMRSNYLIEQRKVG

SEQ ID NO: 6491 - protein, 442 aa, Moorena sp.
MHLTMQNYVFVIDTNKQPLNPISPKKARRLLDKGKAAVFRMYPFTIILKTAVDNPTISPCQIKIDPGSRFTGFALVQNNQVIWAMELEHRGGLIKKKLEARSAVRRGRRNRHTRYRKPRFLNRRRSEGWLAPSLKHRVLTIETWVKRLIKFCPINEIWVERVKFDTQKMQNPEISGVAYQQGELAGYEVREYLLEKWGRECAYCGKQNVPLQIEHIHPKSKGGSDSAKPTLRERVSNLCLACEKCNQRKGNKPIEEFLKKKPSLLQKIKSKAKQPLKDAAAVNTTRNKLVKVLRSVKPVVTGTGAQTKYNRTRLGFPKQHWIDAACVGDIEMLTLKTSQPLLVTCIGPGGRQKAALNKYGYPVRHNPLKPIKGWITGDIAKHQKLGIGKVTPRTKGSFGFTPLGMKGYKSCKPQDISAIHRKDGYTYSFCELLPESSRKWSS

SEQ ID NO: 6492 - protein, 439 aa, Moorena sp.
VLDRRKKPLMPCSEKRARLLLERGRARVHRLVPFTIRLLDREQEDCALQPVRLKLDPGSRATGVALVRESQEVGADTGEVQRSAHVLFLAELVHRGHAIRAALRQRAAFRRRRRCANLRHRQSRFDNRTRRNGWLPPSLQHRVDTITSWVRRLCRWAPVSSLSQELVRFDTQALQNPEISGIEYQQGTLAGCEVREYLLEKWGRKCAYCDAENVPLGIDHIHPRSKGGSDRVSNLTLACHPCNRRKGAQGIEDFLAKDPKRLARIEAQRKAPLRDAAAVNSTRWELWRRLTATALPVEAGTGGRTKWNRHRLNLPKAHALDAACVGEVHAVTNWRVPTLNIQCTGRGSYQRTRLTKHGFPRGDLTRSKSAFGFQTGDLVRVVVTTGKKAGNYLGRVAIRASGSFNIQSATGLVQGIHHRFCTLLQRADGYGYSWTRIAI

SEQ ID NO: 6493 - protein, 532 aa, Acidithiobacillus sp.; identical to SEQ ID NO: 4458

SEQ ID NO: 6494 - protein, 453 aa, unidentified
  REGION 1..453: note = Human gut metagenome
MPVAVISKTGERLMPTSEHRARKLLKSGKAIKYSYHPFTIQLTERESGDVQPIELCVDTGYIHIGISVKSEKHEYLAEQIDTLTNEKARHDACRMYRRQKRSRKRYRQPRFNNRKRNNRWIAPSLEHKKSIHIQAILRICKVMPVTDITLEMGNFDTQVLKAREEGKPLPQGVDYQHGERYGITTLREAVFARDGYTCQCCGRAIKDGAILHVHHIVYRSQGGTNRMSNLITICDKCHTPANHKQGGKLYNWKPKIASFKGATYMTTIRWKLYNEVKALFPDIDIDIHITYGAETKERRRALDIDKSHVNDAFVMGQFHPKHRSKPICYKKKRRNNRCLEKFYDAKYIDSRDGKNRSGQELFNGRISRNHKKDSENLHQYRLQKVTPGRRAIRRQHYPIQPHDIIVYNGNKIEVSGCQHKGTRVVFSKTKKSVQISKIKLFKYAGGYSKSVFN

SEQ ID NO: 6495 - protein, 459 aa, Petrotoga sp.
MSKVFVLDTKKRPLLPCHPAKARILLKQGRAAIYKRYPFTIILKQEIANPEVQPLRLKIDPGSKVTGLAVVNDATGEVIFAGELHHRGEQIKAKLATRRTLRRARRNRKKRHRAPRFLNRKKKDGWLPPSLQSRIANVLTWVNRIRRYCPIQSITVELVKFDLQRIENPGIQGIEYQQGTLYGYKIREYLLEKYDHQCAYCRGKSGDSVLEVEHVVPKKPRHGPAGTNRVNNLVIACETCNKSKGNLRPEEWLNYLQASTNSLDQERAKNLLQVLQQLEQPLKDATVVNTIRWILFKRLKELELPLEAGSGGRTKYNRVQMGLPKAHWIDAACTGASTPEHINIDKVVVLEIKATGHGRRQRCRTDKYGFPIQHAPRAKTYLGYQTGDIVKAIIPKGKYAGIHIGRIAIRHKPSFKLIRFDVHPKYLRLLQKADGYEYMLREGSNASSPGVNSGAPGVA

SEQ ID NO: 6496 - protein, 473 aa, unidentified
  REGION 1..473: note = Human gut metagenome
LVSGQLIMAWEAIQTRRIKPHDIGEGTLRRHAAGTVSFPVLCKNRKETLMSVLVIGRNGRALMPTNPRKARLLLKKKTASVVCRHPFTIQLLYKTGCATQEGCIGIDTGSQHIGVGITCGDRVILKDEHALRSSMEKRSLLATRTVMRRGRRYRKVRYRKPKWRHHTKRMYFEKANRRGQHWRKVKTTTQSPRLKGWLPPSLQSKCDHHFRIIDRYLKYLPDPITRNLVIEAGRFDMARMNDPTIHGEMYQRGPMYDAENLRAYIFARDNYQCACCKAKAGTTRKADGTTVKLVAHHILFRSRGATDNPKYIISVCDHCHTTKAHQPGGILYSWMENNKKVARGLRDATFMNILRKRLFARYPQAAFTYGNITAADRKQLRLPKSHANDAVAISLFGKEASTVKNICQTMHYKQIRKSKRSLHEAIPRKGRKNPNTKAVRNKKNTTQANGFKLWDSVLADGKKLFICSFTGTS

SEQ ID NO: 6497 - protein, 549 aa, unidentified
  REGION 1..549: note = Human gut metagenome
MYLQVFPAHNTTKLLSSQGKHNLLLRQERLIVRDVTNVSTIYVLNKDGKPLMPTTRGGHVRHLLKEQKARVVRTKPFTIQLLYTTDNVVQPLYLGIDPGRTNIGVAVVKADGTAVFTAHLATRNKEIPKLMKKRKESRRARRTNGRRHRRQRRAKANGTISKKCVKQATAQNGSVSKRAKEVGVIKRHLPGCEKEILCIGIKNKEAKFNNRTRPEGWLTPTANQLLQTHINLVKKIQKFLPISDVVLEINKFAFMALDNPDLQKWQYQQGPLYKKESFESAVSKMQEYHCLFCRKPIDNYHHVVPRHKNGSNTIGNIVGLCTKHHDLVHKDTAWQEKLAKKKTGLNKKYGALSVLNQTIPALTKELGVLFPKHFFVTTGKSTYDYRAAHGVSKDHWLDAYCIACSVLPNDVCDSEINNRVPHELKQFRRHDKRALHKVNMNRVYTLNGKKVATNRHKAIEQTTDSLEEFRQNHPDDVCKLKVKEHHPEYRNPKRNFPGCVFLVGKHTHVMQGTSGSHNGKADGYYDTNGNSYPSGKCKFIAKNEGITFV

SEQ ID NO: 6498 - protein, 406 aa, unidentified; identical to SEQ ID NO: 3980
  REGION 1..406: note = Human gut metagenome

SEQ ID NO: 6499 - protein, 423 aa, Clostridium sp.; identical to SEQ ID NO: 5342

SEQ ID NO: 6500 - protein, 473 aa, unidentified; identical to SEQ ID NO: 3562
  REGION 1..473: note = uncultured beta proteobacterium

SEQ ID NO: 6501 - protein, 498 aa, unidentified
  REGION 1..498: note = Human gut metagenome
MPTTRGGHVRHLLKEQKARVVQSNPFTIQLLYETNDVVQPLYLGIDPGRTNIGVAVVKADGTAVFAAHLETRNKEVPKLMQDRKKARRARRTNGRRCRRQRRAKANGTISKKCVKQDTAQSKNPSKRAKEIGIIKRRLPGYKKDVLCIGIKNKEAKYTNRTRPEGWLTPTANQLLQTHINLVRKIQKFLPISDVVLEVNKFAFMRLDNPDIQKWQYQQGPLYQKGSLENAVSEMQEHHCLFCDKPIDHYHHVVPKSENGSNTIANIVGLCAEHHNLVHKDVAWQEKLVEEKTGLNKKYGALSVLNQIIPALTNKLSVLFPKHFFVTAGKSTHDYRATHGVSKDHWLDAYCIACSVLPIDVCDSTINNCVPYELKQFRRHDRRALNNENMNRVYTLNDKVVATNRHKATEQEAASLEEFRKEHPNDVCKLKVKEHHPTYRNMNRNYPGSVFLVGKQIHVMQGIASSKDGKATKYNDTRATTIAAGKCKFVAKNSGILFV

SEQ ID NO: 6502 - protein, 413 aa, unidentified; identical to SEQ ID NO: 2636
  REGION 1..413: note = Human gut metagenome

SEQ ID NO: 6503 - protein, 358 aa, Moorena sp.
VLYESEVELRNDIVELISTRREARHARRNRKTRYRAPRFDNRTSSKKEDWLAPSIRQKIHSHLKVIADVHEILPVSKVIIEVASFDTQLLKAAEEGRPLPQGTDYQFGEQLGFYNTREYVLFRDNHTCQCCKGKSKDKVLNVHHIESKKVGGNAPNNLITLCETCHTGYHKGVVKFPSSIRRGMKFNDASFMGIMRWPVYSRLKEIYPSVELTYGYKTKNMRIENQLPKEHYIDARCISGNPKAKSDGIVYYQKKVRCHNRQIHKFKVNKDGLRKLNQAPYLVKGFRLWDKVLYNSEECFVQGRRSSGFFQLKKLDGTMISASASCKKLSLVETGKHFITERKRAIPPTVEECGFSCL

SEQ ID NO: 6504 - protein, 423 aa, Ktedonobacter sp.
MVFVLDKHKQPLMPCTPKRARLLLAQGRAVVHRIKPFVIRLKDRRALDSVLQPVVLKLDPGSKTTGSALVREEATPDGPVHYALHLAELTHRGEAVHRALLQRASYRRRRRSANLRYRPCRVALRRRAPSWLPPSLRSRIGNVLTWAQRYAHWAPVSRIEVERVKFDLALMQNPEVAGVEYQRGELFGWEVRAYLLEKFQYRCAYCGRAHTVFELDHIVPRSRHGSNRVSNLALSCHDCNIAKGKQTAAEFGHPEVEAQAKRPLGDTAAVNATRYALVEALRVLGLPIGTWSGGRTRWNRDRFGIEKAHCLDALCVGTLAGVHVPPLCPLAITAQGRGRHQRTNVNGSGFPRGYFKREKRVRGFSTGDLVRAEVPAHLKTGGVRLGRVAVRASGSFRVGKTDGINARYCRVLQRMDGYSYASS

SEQ ID NO: 6505 - protein, 456 aa, unidentified; identical to SEQ ID NO: 4017
  REGION 1..456: note = Human gut metagenome

SEQ ID NO: 6506 - protein, 496 aa, Streptomyces sp.; identical to SEQ ID NO: 4777

SEQ ID NO: 6507 - protein, 420 aa, unidentified
  REGION 1..420: note = Human gut metagenome
MQYVYVLNKHGEPLMPCSPRKARLLLKQKKACVIKRTPFTVKLLHGSAGYKQPVTLGVDAGSKHIGISATTEKHELYREEATPRNDVVDLLSARRAFRRSRRNRKTRYRAPRFNNRVHSKHKGWLAPSVEVKIQEHITLIKHVFRILPVTLVRVETAEFDTQRLKAMLEGKPLPVGTDYQLGEMYDEYNVRQYVLKRDNYTCQCCGAHSTKTKGVKLHVHHIETRRTGGNAPNNLITLCKACHKALHAEKVTLDGKKRGKPLKDAAFMGIMRKTLMERLRKELKIPVQGTYGYITKYLREKNGIPKSHTNDARCISKNPLAIPCDTCYYTKAVRHHNRQLHKATILKGGIRKANQAPYIVKGYRLWDKVAYNGTECFITGRRTSGYFALKELDGTVVSNSISYKKLRLLEAATNYITERK

SEQ ID NO: 6508 - protein, 423 aa, Nostoc sp.; identical to SEQ ID NO: 2734

SEQ ID NO: 6509 - protein, 428 aa, unidentified
  REGION 1..428: note = Human gut metagenome
LKVFVLNMRGRPLMPCSPAKARHLLKAGKAVVRRRTPFTIQLRIATGETKQSVTLGVDAGAKHVGLSAATEKEEVFASEVELRQDITGLLAARLSLRRDRRHRKTRYRAPRFLNRVRSKHKGWLAPSVENRIQAHMSRIDAICGLLPVTKIAIETASFDIQKIKHPDVEGTDYQQGDQLGFWNVREYVLFRDGHVCQHCHGHAKDKILNVHHLESRQTGGDAPNNLITLCETCHKACHAGKIKLKVKRGQSFREEAFMGIMRWTLLDRVRKAHPGLPVENTYGYLTKNTRITLGLPKAHCVDAYCIAGNLKAVRRGVHLYQRQVRKHNRQIHKCTVLSKTLKDGTKIGYRKLNQTPHLVKNFRLFDKVRCLGQTGFIFGRRSSGYFDVRRLDGVKISSCINYRKLTLLEKRGTCLTELRKEDGASSPV

SEQ ID NO: 6510 - protein, 501 aa, Desulfotomaculum sp.; identical to SEQ ID NO: 2400

SEQ ID NO: 6511 - protein, 415 aa, Beggiatoa sp.
MPCHPARARKLLKKGKAAVYRRYPFTIIMTHRLCGDLQPIEIKFDPGSRTTGIALVGHFDRGSEVIWAGNLNHRGLQVKSNLVSRRAIRRSRRNRKTRYRPARFLNRRRPKGWLPPSLRSRVLNVKNWMLKLSRLAPLTQIAIETVRFDTQKMQKPEISGIEYQQGELVGYELREYLLEKWDRQCAYCGAKNVPLEIEHIQASSKGGSNRVSNLTLACSPCNFDKGNKDIKEFLKRKPKRLKKIQAQAKASLKDAAAVNATRYATGNILKCFGLPITFSSGGRTKFNRLKLGYSKDHWIDAACVGESGSHVVIPKTITPLIITAKGRGSRQKCRMNQYGFPRTGPKKQKRVKGFQTGDIVKAVVTKGKKIGTYIGRVVVRAKGSFDIGSGEEKVGGISYKYCQLLQRSDGYEYLK

SEQ ID NO: 6512 - protein, 529 aa, Moorena sp.; identical to SEQ ID NO: 3816

SEQ ID NO: 6513 - protein, 452 aa, unidentified
  REGION 1..452: note = Human gut metagenome
VLRVSETPPNMGEGLQPTERSRRQNLRVFVLNKRGQPLMPCSPAKARLLLKEKKAVVRHRTPFTIQLTQATGETVQPVTLGVDAGSKFIGLSASTEKAEHYASEAELRTEVVDLLSSRREMRRARRNRKTRYRAPRFDNRIHSKNKGWLTPSVENKINTHLSCVDNVRKCLPVTKIVVETAAFDIQKIKNPDIEGTDYQQGDQLGFWNVREYVLCRDGHQCCHCHGKSKDPILNVHHLESRKTGGNAPNNLITLCETCHKAYHDGKITLKQKRGQVFRDAAFMGIMRWTFFNRLKAQCPEIEVRNTYGYLTKNTRIRHGLEKSHHTDAFCIAGNLEAKRLGVYFFQKQTRKHNRQIHKMSILKGGVRKLQQAPYEVKGFRLFDKVRYDGREAFIFGRRSSGYFDIRLLTGEKVSAGVSYKKLVLLEKRKTFLTQLIKENAIPPATEVAGFLA

SEQ ID NO: 6514 - protein, 413 aa, unidentified; identical to SEQ ID NO: 3290
  REGION 1..413: note = Human gut metagenome

SEQ ID NO: 6515 - protein, 407 aa, Methanohalobium sp.
MHVYVLSKNKKPLMPTRPAKARRLLKSGKAKVVRRTPFSIKLLYETTEYTQPVIAGMDSGSKYIGCAAVANDEVMYQSEIKLRDDVSKKMKDRADHRMNRRYRKTRYRKPRFNNRGNSKKENRIAPSIKSKVQSHERERRFVESILPVKKWIVETTSFDIHKITNPNVSGTGYQNGDLKGYYNIRIYVLHRDDYTCQKCKNKSKDPKLECHHIIFRSKGGTDRPNNLITLCETCHSKLHKGEFSINKNPSNTKHPTEMGIVRSQIRKLNWKFQETFGYITKYKREQKLKLEKTHYNDAVAICCDENNPNLQLSNVVYYKKHVNKGDYQQTKGVKSEKKIPTGKLHGLKKFDFIETPYVSGFVKGKRTSGNFSIMDIFGNTSKKNPNVKKNCRRISARCTTLTQQIQI

SEQ ID NO: 6516 - protein, 398 aa, unidentified
  REGION 1..398: note = Marine sediment metagenome
MPCGPRKARLLLKEGKAKVVYRVPFTIQLLYGSSGYRQPIYCGRDPGLTQGVGAIRGDGRILFLAEVTGRKDISELIYQRRCLRRSRRHRKTRYRKPRFDNRRRSEGWLPPSVAHLLYEHQKVRRLVESILPVTAWADEINRFDTHRMWNPGVSSRGYQEGPLKGKFDVREYVLERDSYWCVLCGSPEKREVHHIIWRFRGGSNRPRNLVTLCGDFHSKVTSGEIPLSAIVESYRWPARLNAINKRFLEGGSVSVPAYRVKRAREELGLDKTHASDALAVICSAFHLKPDFLEMPPVYRGRFVRRENRQLHRANPAKGGKRPRANANRYLMNKHGVRLTKYDLVEYRNGDRRLIGYINTLRSSGTARVSNWQGRELANVSVNQLKKLQNADTLIWEVD

SEQ ID NO: 6517 - protein, 421 aa, unidentified
  REGION 1..421: note = Human gut metagenome
MQYVYVLNMHGEPLMPCPPRKARLLLKEGKARVLKRTPFVIKLLHGSAGHKQPVVLGVDAGSKRVGLSVCTENRELYKEELTPRNDVVELLSARRQYRRSRRNRKTRYRAPRFDNRVHSKHKGWLAPSVEVKIQEHITAIKRVCRILPIVLVRVETAEFDTQRLKAMLEGRPLPVGIDYQRGEMYNEYNVRQYVLKRDRYVCQHCGAHPTPEKPVRLHVHHLESRHTGGNAPNNLIVLCEHCHKALHGEKITLDKGKKRGKSLRDAAFMGIMRNTLLARLETELSVPVQQTYGYITKLLREENHIEKSHTNDARCIAGFPKAAPCDTLYCTRAIRHHNRQIHKAKILKGGIRKKNQAPYLTKGFRLWDKVRYNGEECFIAGRRSSGYFALKKYDGTVISNGASYKKLTLLEAATNYITERG

SEQ ID NO: 6518 - protein, 512 aa, unidentified; identical to SEQ ID NO: 3776
  REGION 1..512: note = Human gut metagenome

SEQ ID NO: 6519 - protein, 379 aa, Arthrospira sp.; identical to SEQ ID NO: 2972

SEQ ID NO: 6520 - protein, 433 aa, Microcystis sp.
MQNYVFQVDADKRPLDMIPPARARKLQARGKAATFRTYPYAVVRPHAIDSPNTKEYILKIDPGAVWTGFAIQCGEDIIFRLELKHRGVEIKESLAKRSGFRRSRRSRQVRYRQKRFNRKKPEGWLPPSLRHRLETTRTWIKRFMALCPITTIEIEQVKFDLQKLENPEIEGCQYQQGTLLGYEIREYLLEKWGRACVYCSATNLPLQIEHIQAKSNRGSNRIGNLTLACPECNQNKGSQDIRDFLAAKPELLGRILAQAPQPLASATAVNATRLAIVEMAQELCDDVRCWTGGRTKYNRVRQGFPKSHSIDAACVGESGANIKVLVAQPLMVESKGHGTRQAVRCNASGFPALGKDGRPIKAKAGYRHCQSGDIVKFCLDKDRKNARSGIYTARVKTQTPKGFEVKINGSRVAQKMEHLIRFVHRNDGYAYSF

SEQ ID NO: 6521 - protein, 439 aa, unidentified; identical to SEQ ID NO: 3280
  REGION 1..439: note = Wastewater metagenome

SEQ ID NO: 6522 - protein, 459 aa, Moorena sp.
LRQAIKSSEGKERCRLHQTPSNIDEGCLLPERAWRQNLRVFVINQRGKPLMPCSPAKARVLLREKKARVKRRTPFTIQLTTATGEARQDVSLGVDAGYRHVGLSASTEKAELYASEAVLRDDITDLLSARLALRRARRSRKTRYRAPRFLNRVHSKNKGWLAPSVEQRIASHLKLVENVCRLLPVTKITVETASFDMQAIKNPDIKGAEYQQGEQLGFWNVREYVLWRDGHQCQHCRGKSGDPILNVHHLESRRTGGDAPNNLVTLCETCHKAYHAGRIDLKLKRGRSMRAEAFMGIMRWTFFNRLKEIYSGKTVENTYGYLTKHTRITHGIEKSHCADAYCIAGNLRAERLPDYLWQKQVRKHNRQIHKLTIGKGGIRKRQQTPFEVKGFRLFDKVRLGDEEGFIFGRRSSGYFDVRRLDGQKLSAGVSFRKLHLLEKRTTYLTVLLPRLKTRVSAPE

SEQ ID NO: 6523 - protein, 453 aa, unidentified
  REGION 1..453: note = Human gut metagenome
MNTVAVISNTGEKLMPTTSYRARRLIKSGKAIAYKYRPVFTIQLIERKTGEVQPIEYACDTGYQHIGISIKSATKEYVNRQYDLLLNEPEKHNDRLKYRRTRRNRLRYRAARWNNRKSSMICKDGFAPSIRNKRDRHIDLCKSFCEIMPITYIIFEMGQFDTQVLKAIEEGKPIPEGTDYQQGEQYGYATLREAVFNRDNYTCIVCGKSALKNGAILKIHHLGYLQNDRTNRMNNLATVCSCCHTSKNHKPGGKLYELKPKFKNFKGATFMTSVRWSMLDSLRESFPEIPVHVTYGAYTKMARRTLNVKKDHSNDAYCMGKLHPKHRTDWEHLKKCRRNSRVLSKFYDAKYVDKRDGSIKSGSQLSCGRTNRSVSRHTDSDERQYRLCKVSKGKFATRRQHYQYRPGDTVWIENKKYKVKGIQSNGKTVNVFERSFSVNKIQKCVHTGAFTFV

SEQ ID NO: 6524 - protein, 417 aa, unidentified
  REGION 1..417: note = Human gut metagenome
MPCSPAKARLLLKEKKAIVKRRTPFTIQLTIATGEARQPVTLGVDSGYKHIGLSATTEKAELYASEVELRQDITDLLSARLALRRSRRSRKTRYRAPRFDNRVASKRKGWLAPSVENRIAAHMSRVEAVMRVLPVTAITVETAAFDTQLLKNPDIAGEAYQQGEQLGFWNVREYVLFRDGHVCQHCRGKSKDPILNVHHIESRRTGGDAPNNLITLCETCHKAFHRGEIKLKVKRGKSFKAETFMGIMRWTLFERLKKAHPELRVRNTYGYLTKHKRISHGIAKSHCADAYCIADNLGAKRLEGFFFQKQTRKHNRQIHKLSILKGGLRKKNQAPYEVKGFRLFDKVICKGEEAFIFGRRTSGSFDVRRLDGTRISAGINYKKLRLLEPRTTYLTEFRMEAALPPLHECRGFRAEFL

SEQ ID NO: 6525 - protein, 427 aa, Moorena sp.
MSKVFVIDSEKRPLEPIHSAQARQLLRNKKAAVYKRFPFTLILKESRSEAPVHPLRLKIDPGAKHTGIALVNDRTGEVVFAGELKHRGFAIRESLTSRRQLRRSRRNRKTRYRQTRFLNRTRPDGWLAPSLQSRVDNIKTWVERLCKLAPIEAISQELVRFDMQLMRNPEIQGKEYQQGTLAGYETREYLLEKWSRQCAYCGVKDVPLQIEHIHPRAKGGSNSITNLTLSCEKCNTNKGTKDIKDFLKKDLSRLEKILKQAKRPLVDAAAVNTTRFALLEVLKSTGLPVETGSGGLTKFNCNQQNLAKSHWLDAAYVGKSTPKLIIKGVKPLLITANGHGARQSCRTDKFGFPSRHVPREKIHFNFQTGDIVKAIVTTGKKVGQYVGKVAIRSSGSFNISAKNGLIQGISHKFCQRIHAKDGYSYAT

SEQ ID NO: 6526 - protein, 406 aa, unidentified
  REGION 1..406: note = Human gut metagenome
MVYVQDIDGKPMMPTTRHGKVRRLLKDNKAVVVNTCPFTIKLTYKTSDYKQEIVLGVDAGTKHVGLSATTKSKELYSGEVILRNDVVELLSTRRESRRARRNRLRYRKPRFENRVKSKHHGWVAPSVRHRIDAHIRVIDNVCSILPISRIIIEVAQFDTQKINNPNISGNEYQKGDQLGFWNVREYVLARDGHKCQHCKGKSKDHILNVHHIESRKTGGDSPSNLITLCETCHKEYHKGNIDLKVKRGKSLRDAAVMGIMKWKLYDELKSKYDNVSMTFGYITKYNRIKYGIEKSHTSDAFVISRNFNAKRIERQYLKRLIRRHNRQIHKMKILKGGKKKNNQAPFEVFGFRLFDKVLYNNEINFIYGRRKSGCFDIRDFDGKNSKNVTYKKLKLIRGKRYPIILK

SEQ ID NO: 6527 - protein, 415 aa, Bacillus sp.; identical to SEQ ID NO: 2671

SEQ ID NO: 6528 - protein, 413 aa, unidentified; identical to SEQ ID NO: 3751
  REGION 1..413: note = Human gut metagenome

SEQ ID NO: 6529 - protein, 413 aa, unidentified
  REGION 1..413: note = Human gut metagenome
MTNYAFVLDANGKQLAPTKEQKAWFLIRKKRATLVSKYPMVIQLKKEISDEQICKDEICCGIDDGGIHVGLALVQKCKTKNKVIFKGTIEQRNDVKHLIEVRKGYRNYHRFHKRYRQARFNNRKSSKRKGRIAPSIFQKRQATIRVIKQLNKWINIANYSLEDVAIDIRALTDGYKSYRWQYQQSNRLDENIRKAVILRDGCKCMECGKSNCRLEVHHIKPRRLNGSNTLDNLISLCEKCHQRTEGQEELYMDRYFSILSSTDNKNLDYAQHVMIGKKWLREQLSELGTLILTTGGDTANKRIDWNIEKSHANDAICITGLQPDACNVKEWTIKPMRRQSKAKTDNVLGIKHRDLVEYTFKNGETHRGYVTALYPKQNAINFQSPTKHCKKVNAKKCKLIWKYSKIYWLDNVL

SEQ ID NO: 6530 - protein, 413 aa, unidentified; identical to SEQ ID NO: 2636
  REGION 1..413: note = Human gut metagenome

SEQ ID NO: 6531 - protein, 440 aa, Lactobacillus sp.; identical to SEQ ID NO: 5150

SEQ ID NO: 6532 - protein, 470 aa, unidentified; identical to SEQ ID NO: 2925
  REGION 1..470: note = Human gut metagenome

SEQ ID NO: 6533 - protein, 424 aa, unidentified
  REGION 1..424: note = Human gut metagenome
MVYVISKDGNPLMSCCNVIARLLLKQGKAQVKKREPFTIKLNYETTNYLQNLTLGVDTGSRTIGTAVSNDNGDILYMSEVVVRNDITEKMTQRAKYRRNRRNRKTRYRKARWLNRANSIKNDRFSPTMRSKLYSHVKEIECIKSILPITQMVFETGQFDTHLMKNPSLANPRIRRWGYQKGPNYGYENTKAMVLNRDNYTCQCCKGKHKDSKLEIHHIVFRSKGGSGEASNLITLCHTCHKDLHSGKINPKLKGRIKGNLKFATQMNTIRKQLFRLYPNAIETFGYITKANRLQLGVNKEHYYDACTIATQGNRFTIKSNLYKKKCISDGDFQQTKGICSKQPIVTNKIHGFRKFDKVRYLGKNYFIKGRMSTGYAVLMDINGKKADFSNMPKGFKTPKMANFKRIEARTTWMTTTVVLTSNIA

SEQ ID NO: 6534 - protein, 415 aa, unidentified
  REGION 1..415: note = Human gut metagenome
MENRIEYCFVVDKNNRPLTPTKVNKGWYLVRKSRAKLKSKYPMVIQLEKEVKSDEDDESHIVCGIDDGSAHVGLAIVQKCPTKNKVVFKGTIEQRQDVKHLMDVRRGHRRYHRYHKRYRQARFNNRSSSKRTCRLAPSIKQKKDAILRVLYQLNKWVNIQEYHLEDVCIDIRALTDDYKPYRWQYQKSNRLDENLRKATILRDECRCQECGKSNCVLEVHHIRARKYGGADTIGNLITLCSGCHQKTEGRERDFEDRYFNMIKSKPKRFDYAMHVMQGKTYLREKISELGSLHLTNGGETANKRIEWNMEKSHGNDAICVTDCIPDNCDVKEWIIKPMRRKSKAKTNNLLGIRHRDLVSYTYKNGETHTGYVTALYPEQLVLNFQSKTKHCKKVNARKCRLLWKFNKIYWLEQCV

SEQ ID NO: 6535 - protein, 458 aa, Lactobacillus sp.
LKGVGMMSEIKKVDYIYVVDSNGTPLMPTSRLGMVRRWLKTGQAKWFGNSRNTIQFVRPVTTNTQELTLGVDAGFHLGLSVVGNNRECYVSESLRKSEKDRITSRRESRRTRKNRLRYRKARFDNRRRKEGWLAPSIQHRLDFTIKEIKRLYMFLPIANLVVEVTPFDNQKLLNPDIQGWQYQKGKMYGFKTIKDYLLARDNYRDALDGKQYPASQLRVHHLVQRKDGGSNQPDNLVLLSDINHNQANHNNGILAKLKENRQKTIDYRGAYFMSVLATRLSNYFDNFTITQGYLTANLRQKYEIEKSHLNDAFVIAGGTDTTLRTNNVYSRQKLRNNNRVLQKFYDAKYIDSRDGKKKTGKELSSGRTRRSRELNYTNLRQFRKEKVKKGRISIRRGHYQLRPHDVVLNTRTNRIEIVKGVQNSGTVIKFQTGKTCSIKSVVSLYHVNGILEKKMENV

SEQ ID NO: 6536 - protein, 430 aa, unidentified
  REGION 1..430: note = Human gut metagenome
MPKVYVLNRHGRPLMPCTPAKARHLLDAGKAKVRHRTPFTIQLLYGSTGYTQEVILGVDAGSKTIGLSAATETEELFSAEVKPRNDVVELMSARRQFRRAQRNRTTRYRKPRFDNRVRSKHKGWLAPSVEVKIQEHMTAIRRACAILPVSKVVVETAEFDLQLLKAVAEGKPVPQGEDYQKGEMYGHYNVRQYVLWRDSYTCCICGVHGSVRKGVPLHVHHLESRRVGGDAPDNLVTLCTACHDKLHKGIIMAADIKKRKRRSTRDATFMGIMRMTLLRRLREQLPVPVVETRGYITKATRENLLVLPKSHANDALAIAHGPQGFRAEHLPNIRQADRLYTIRPVRHHNRQLHKATILKGGVRKTNQAEKYICGFRLYDKVLYNGIECFVWGRRTSGSFLLRQLNGEKVKDGVSYKHLKLLERSQSYLVA

SEQ ID NO: 6537 - protein, 413 aa, unidentified
  REGION 1..413: note = Human gut metagenome
VLNIEGQPLMPCKEAKARKLLKQNKAKIYKREPFTIQLLFVCENQTQDITLGVDAGSKHIGLSATTKEKELYAADVELRNDIVELLAIRRQNRRARRNRLRYRKPRFNNRVYSKKSGWLAPSVEQKIRTHFRVIEDIHKLLPITKIVVETASFDIQKIKNPEIHNEEYQQGEQLGFWNVREYVLFRDNHTCQCCKGKSKDKILNVHHIESKKTGGNAPNNLITLCETCHKGYHNGTVKLLKTIKRGMSFKDAAFMGIMRWSFYDRLKEAYPNVFMTYGYITKNTRVKCNLPKEHYIDARCISGNPNVEPLGYYFYQKKVRCHNRQIHKAKILKGGKKKMNQASYLVKGFRLFDKVEFDGQVGFIFGRRNSGYFDVRKLNKEVISRSASYKKLTFLETRKSLLIEKRIQGVGII

SEQ ID NO: 6538 - protein, 480 aa, unidentified; identical to SEQ ID NO: 2726
  REGION 1..480: note = Human gut metagenome

SEQ ID NO: 6539 - protein, 512 aa, unidentified; identical to SEQ ID NO: 4031
  REGION 1..512: note = Human gut metagenome

SEQ ID NO: 6540 - protein, 428 aa, unidentified
  REGION 1..428: note = Human gut metagenome
LKVFVLNMRGQPLMPCSPAKARHLLKAGKAAVRRRTPFTIQLRIATGETKQSVTLGVDAGAKHVGLSAATEKEEVFASEVELRQDITGLLAARLLLRRERRQRKTRYRAPRFLNRVRSKHKGWLAPSVENRIQAHMSRIDAICGLLPVTKIVIETASFDIQKIKHPDVEGTDYQQGDQLGFWNVREYVLFRDGHVCQHCHGHAKDKILNAHHLESRQTGGDAPNNLITLCETCHKACHAGKIKLKVKRGQSFRAEAFMGIMRWTLLDRVRKAHPGLPVENTYGYLTKNTRITLGLPKAHCVDAYCIAGNLKAVRRGVYLHQRQVRKHNRQIHKCTVLSKTLKDGTKIGYRKLNQTPHLVKNFRLFDKVRCLGQTGFIFGRRSSGYFDVRRLDGVKISSCISYRKLTLLEKRSTCLTELRKEDGASSPV

SEQ ID NO: 6541 - protein, 466 aa, unidentified
  REGION 1..466: note = Human gut metagenome
MSVFVVGLNGCRLMPVSERKARLLLKGGKASIYRKVPFTIKLNYKTGSTVQPGYLGIDTGSQHIGVSVVQKDGTVLHKEEIGLRDSMSKRKLLESRASSRRGRRYRKTRYRHPKWKPKTKRTYNEKADRKGRHWKKQKNTFTSKRQAGWLPPSLQSKTDHHIQWIRKLLEGYRLSIELGRFDPARMKDPEIHGELYQKGPQYDYENVRAYVLARDGYTCRVCKKKGGKLHVHHILYRSRGASDNPKYMAAVCSKCHTTENHLPGGILYQWMQDQKKFTRGLRDATFMNILKKRLRKAFPDAVFTYGNITKADREKLELPKSHGNDATAIALVKTEVKSVKDEEPVIHIQQVRRKKRSLHEETPRKGRKEPNRTASRSDKNTKSVTVTKGSGEKKASMTACLFDRVELDGKKGWITGFTGTSCYVKDKEDNYICTSPKYKQVSISRLRILHHCGNWAIGARQSLGKG

SEQ ID NO: 6542 - protein, 516 aa, unidentified
  REGION 1..516: note = Human gut metagenome
MTPKERRHLMSEFIYVLGMDGKPQMPTTRRRHVRKLLDTGKARIAEHVPYTIQLLYDNNPVLQPVALALDPGRTNIGMASVSGKGDLLFSAVAETRNREIAKLMLKRRQYRRASRNGERKARQRLAKRFGTMVKAGMRMRKLPMYGEDKLLTCKWIRNTEARFCNRKRPEGWLTPSARHLVDTHLHLIHKCQKYLPVTDIALEVNKFAFMLLEDPSISGIDFQNGPLKGFPSLHDAVNYLQHGKCLLCNDKIEQYHHIVPRSRNGADTINNITGLCCRCHEKVHKDEKYAKVLLDEKAGVDKKYGALSVLNQSIPFICGKLEAEFGQEHVYYCTGKDTSEIRHYYGFHKTKKDQLHEVDAWCIGICALGLSPEKVPDFAAIHTIRQFRRQDRSLVQAQVERTYRLEGKVVAKNRRKKMGQKSDSLEEWYEKQVQIYGEAKAKRLRNQLSITGSYRRYQNPKRVMPGAVFLYKGIRHVLNSSITNGQYFRTVGDPKTNYPARDCVILKQNEGLVFIG

SEQ ID NO: 6543 - protein, 424 aa, Anabaena sp.
MQNYVFVVDTNKQPLNPIPPARARELLTKEKAAVFRMYPFTIILKHTVLNPTLKPLTVKLDPGSKFSGIAVLDEENVIWVAELEHRGGQIKNALESRRSLRRSRRNRKTRYRQPRFNNRKRTEGWLAPSLMHRVFTIETWVKRLCRYAPIVQITMELVKFDTQAMQNPEIDGVEYQQGELAGYEVREYLLEKWGRKCAYCDQEAVPLQIEHIHPRAKGGSNRVSNLTLSCQRCNTKKGTRSIDEFLQKNPSRLKKIQRQAKQPLRDAAVVNSTRWALFQTLKNILPTTTGTGGQTKYNRTRLELPKHHWVDAACVGNVEKLNLLTQQPLRIKCTGWGTRQMCGTDKYGFPIRHRERKQVHFGFRTGDIVKAVVLSGKKVGQYVGRLLCRKIGSFDIVTHVGRVAGVSYRFCTPIHKQDGYSYKF

SEQ ID NO: 6544 - protein, 466 aa, Cupriavidus sp.
MAVFVLDKHSKALMPCSEKRARLLLERGRARVHRLMPFTIRLTDRCLDDSELQPLRLKLDPGSKETGVAIVRETTFGADGAREAYVLSLAEIIHRGRQISEALTARRSMRRARRRRKTRYRAARFDNRRKPKGWLAPSLLHRVVTTEAWVRRFSKVAPLQAIGVELVRFDTQAMENPEISGVEYQQGTLLGYELKEYLLAKFGRTCSYCDAADRPLETEHIVAKANGGSNRVSNLTLACRPCNEKKGKLPLEVFLRKDPARAKRILARAKAPLGDAAAVNTTRLALLDALKAFGLPVETGSGGQTKYNRRRLEIPKSHALDAACVGQVHAVLDWQRPALRIKCTGRGSYQRTRLSAHGFPRGYLMRSKRVFGFQTGDMVEAIVPTGKKAGTYVGRVAIRVTGFFNIQTAAGAVQGISHKHCKLIQRGDGYGYQLVAQTAKESENRGDASRRALSLPGLKAEVSRAN

SEQ ID NO: 6545 - protein, 466 aa, unidentified; identical to SEQ ID NO: 4288
  REGION 1..466: note = Cyanobacteria bacterium UBA11369

SEQ ID NO: 6546 - protein, 507 aa, unidentified
  REGION 1..507: note = Human gut metagenome
MSEYIYVIGMDGDPQMPTKRKRHVEKLLQTGRARVFRQVPYTIQLTYKNQPVLQPVTIAEDPGRSNIGMAVVSLSGELLSAAVVQTRNKEIVKLMEKRKLHRRASRNGERKARQRLAKRCHTMLKAGFLMRKLPMYRKDKRVKCLVIRNTEARFCNRKREDGWLTPSAEHLVRTHINLIHKMQKFLPITDVAIEINRFAFLSLEDPSISGVDFQKGPLKGYDDLNAAVEDLQDGHCLMCDSPIEHRHHIVPRSMQGSNTIGNIAGLCCKCHERVHKDARFEDRLKKKKAGLDKRYAAVSALNQAIPFICKRLEQEFGKEHVHYCSGRDTAMVRRSFGYYKTKEEQLHEVDAWCIAVLSLQQVPEKAPEFDHVHEILQFRRQDRSIINAQTSRRYYHEGKKIAKNRKKAEGQREDSLQEWRKRQVERYGEEQTRKMISQLKVKKSIRRYNRLNRLMPGAVFYYQGVRYVMRGQHCEGTYLQAVGMGSKDFPAKKCKIVANNEGLVFVS

SEQ ID NO: 6547 - protein, 388 aa, unidentified
  REGION 1..388: note = Human gut metagenome
MSVAVISKTGERLMPTSEYRARKLLKLGKAVKYSYHPFTIQLTERKAGDVQPIELCMDTGYIHIGISVKSEKHEYLAEQIDTLTNERTRHDACRMYRRQRRGRKRYRQPRFNNRKRDKGWIAPSLEHKKDIHVQAISRINKVMPLTNITMEMGNFDTQVLKAKEEGKPLPHGADYQHGERYGIATLREAVFSRDGYKCQCCGKTISEGAILHVHHIKYRSRGGTNSMTNLATVCDKCHTPKNHKPGGKLYDWKPKLPDFKGTTFMTTIRWQLYSEVKSLFPDVNIHVTYGAATKEQRRELNIDKSHVNDAFAMGKFHPKHRINAVLYKKKRRNNRCLEKFYDAKYIDSRDGSKRTGQELFNGRINRNHKKDSENLHQYRLQKTTFAPR

SEQ ID NO: 6548 - protein, 408 aa, unidentified
  REGION 1..408: note = Human gut metagenome
MVYVQDINGKPMMPTTRHGKVRRLLKENKAVVVSLCPFTIKLTYVTSDYKQEIVLGVDAGTKHVGLSATTKSKELYSSEVILRNDIVDLLSTRRELRKTRRNRLRYRKPRFNNRIKSKRSGWIAPSVKYKVDAHIRVIDNVCSILPIFRIVIEVAQFDTQKIKNPNISGKEYQEGDQLGFWNTREYVLARDGHKCQYCKGKSKDKILNVHHIESRKTGGNSPSNLITLCETCHKEYHKGNIDLKIRRGKSLRDAAVMGIMKWRLYEELKSKYDNISMTFGYVTKYNRINHDIEKSHVSDAFVISKNFNAIRLGYYYKVRLVRRHNRQIHKQKIQKGGIKRLNQSPFEVFGFRLFDRVMFENSYYFIFGRRKTGSFNIRDIDGKSQKNITYKKFKLSRCKRFMIQKEMN

SEQ ID NO: 6549 - protein, 416 aa, Moorena sp.
MVYVLDQSGQPLMPTERHGKVRHLLKSGKAKVIKRCPFTIQLLYNSTHYTQDITLGVDAGSKQIGLSATTKQKELYAAEIELRNDIVKLLAARRELRRSRRSRKTRYRKPRFQNRTHSRKPGWLAPSIRQRIQCHLTVIANVHKLLPTKTILIETASFDIQKIKHPDIHGVQYQKGEQLDFWNVREYVLFRDNHTCQCCKGRSKDNILNVHHIESRQTGGNAPNNLITLCETCHTGYHNGKVILPKTIKRGMSFKDAAFMGIMRWSCYDMLKNIYPDVHMTYGYITKNTRIGNNLPKEHYVDARCISKNPKAEPLPYYYYQKKVRCHNRQIHKTKPTKHGIRKRNQAEYVVHRYRLFDKVQYQNNEYFIFGRRKTGYFDIRTLTGVKVKNGSISYKKLKLLEKSKKYLTETRLQTT

SEQ ID NO: 6550 - protein, 413 aa, unidentified; identical to SEQ ID NO: 2636
  REGION 1..413: note = Human gut metagenome

SEQ ID NO: 6551 - protein, 413 aa, unidentified; identical to SEQ ID NO: 2636
  REGION 1..413: note = Human gut metagenome

SEQ ID NO: 6552 - protein, 414 aa, unidentified; identical to SEQ ID NO: 4492
  REGION 1..414: note = Human gut metagenome

SEQ ID NO: 6553 - protein, 442 aa, unidentified; identical to SEQ ID NO: 3791
  REGION 1..442: note = Human gut metagenome

SEQ ID NO: 6554 - protein, 431 aa, Escherichia sp.; identical to SEQ ID NO: 3801

SEQ ID NO: 6555 - protein, 433 aa, Moorena sp.
MTIGLRAEQAEPAGIRKGDTLKVFVLNMRGKPLMPCSPAKARHMLKAGKAVVVRRTPFTIKLTIATGETKQDVTLGVDAGARHVGISATTKKEEVFASEVALRQDITGLLADRLAFRRARRNRKTRYRAPRFNNRVRSKHKGWLAPSVENRIQAHMSRIDAVCRLLPVTKIVIETASFDVQKIKNPTIEGTDYQQGDQLGFWNVREYVLFRDGHVCQHCHGRSRDKILNVHHLESRKTGGDAPNNLITLCETCHKAYHAGKIKLKVKRGQSFRAEAFMGIMRWTLLDRVRKTHPELPVENTYGYLTKHKRIALGLPKTHCADAFCITGNLNALRRGDFLFQRQTRKHNRQIHKCSILKGGVRKLNQAPFLVKGFRLFDKVRIGGQIGFVFGRRVRGIFNIRRLDKTVIGTDINCKKLSLLETRKTFLTELRKE

SEQ ID NO: 6556 - protein, 406 aa, unidentified; identical to SEQ ID NO: 6072
  REGION 1..406: note = Human gut metagenome

SEQ ID NO: 6557 - protein, 451 aa, unidentified
  REGION 1..451: note = Human gut metagenome
MSVAVMSKTGMRLMPTSEYRARKLLKSKKATVYGHNPFTIQLTERETGDVQPVELCMDTGYLHIGTSVKSEKHEYLGVQIDTLTDEKQKHDACRMYRRQRRSRKRYRQSRFNNRKRSDGWIAPSLEHKKDIHIQTISRICNAMPITNITLEMGNFDTQVLKALEENRPLPQGTDYQHGERYGIATLREAVFARDKYTCQCCRKTIADGAILHVHHIIYRSRGGTNRMSNLATVCDRCHTPANHKPGGRLYNWKPKIASFKGATFMTAVRWKMYNEVKSKFSDINIHITYGAETKEQRRAFDITKSHVNDALVMGQFHPKHRSRPVCYKKKRRNNRCLEKFYDAKYIDSRDGKKRSGQELFNGRINRNHKKDSENLHQYRQQKVSAGRRTIRKQHYSIQPHDIIVFNRQQFETSGCHCNGARAILLPQKKSVAIKKLSIHKYAGGYFKSDFT

SEQ ID NO: 6558 - protein, 257 aa, unidentified; identical to SEQ ID NO: 5154
  REGION 1..257: note = Human gut metagenome

SEQ ID NO: 6559 - protein, 442 aa, Virgibacillus sp.
VKVHVLDKSGKALMPTKRFGKVRRMLKQKKAKVVQRKPFTIQLLFETTTHTQDLTLGIDSGYKYIGVSVVSEKEELLSAELELLDGVKKRLKERSDYRKQRRSRKRHREPRFDNRITSKKKGWFAPTVQHKLDTHIRFIDMLKGILPISKTIIEVANFDIQKIKNPEITGKQYQEGEMMGFWNLREYILHRDKHTCQNPDCKNNEAHPILEIHHIVFRDNEGTDAPSNLITLCNKCHTSANHKKGKYLYEWQTKKPKLNKFRDATFMSTVRFRLVNLKDVTHTYGYITKNNRIRLGIKKTHYNDAFVIAGGTEHKRVKPIFFKQSRSNNRSLQKFYDAKYIDLRTGKKVAAAELHCGRTRRSKNTNGENLKGFRGQKISKGRKTIRKQRYFYQPNDLVYFEGNLCKVIGTMNKGKSVKLDNKKNPDPKKLKPCKYGKGIVAI

SEQ ID NO: 6560 - protein, 459 aa, Ammonifex sp.
VVFVLDRKGRPLMPCSERRARKLLEQGRAVVVRLEPFVIRLKDRVAEEASLQPLRLKIDPGYEVTGISVVRVAGGKEVVVYFAEVHHRTDVPGKLLSRRQARRSRRSRKTRYREPRFDNRRKPEGWLPPSAEARVSQVFSVVGKLVRWLPVTEIVVESAKFDTQKLQNPEVSGVEYQQGELQGYEVREYLLEKYGRRCAYCGKENVPLEVDHVVPKSRGGTDRVSNLTLACRECNQAKGNKLPQEWLEELKDSGRAVDRKRAENVPKVLARLKEPLKAAACMNATRYVLVERLRALGPPVLTATTAQTKYNRARFNLPKTHYFDACCVGEVSGELEVAAGYVQVFRAVGRGTRRVANLDRHGFPRGHRAREKVHFGFATGDLVVAEVPNGKYAGRYVGYVAVRRSGYFDLKDLSGRRVCQGIAFHHFKLVQRFDGWRYEKFKVAALSSPHLKVGASSAA

SEQ ID NO: 6561 - protein, 407 aa, unidentified; identical to SEQ ID NO: 3417
  REGION 1..407: note = Human gut metagenome

SEQ ID NO: 6562 - protein, 518 aa, unidentified
  REGION 1..518: note = Human gut metagenome
MTPKKRKEASRMSEYIYVLGIDGNPQMPTKRKRYVEQLLQTGRARIFRQVPFTIQLTYKNEPVLQPVTIAEDPGRSNIGMAVVSLSGELLSAAVVQTRNKEIVKLMEKRKQHRRASRNGERKARQRLAKKCHTMIKTGFLMRKLPMYGKDKRVRCNVIKNTEAKFCNRKREDGWLTPSAEHLVRTHINLIHKMQKFLPITDVAIEINRFAFLSLEDPSISGVDFQNGPLKGYDDLNAAIEDLQDGHCLMCNSPIEHRHHIVPRNMQGSNTIGNIAGLCCKCHERVHKDARFEDRLKKKKAGLNKRYAAVSVLNQAIPFICKRLEQEFGKEHVHYCSGRDTSMARRSLGYHKTKEKQLHEVDAWCIAVLALQHVPEKAPEFDHVHEILQFRRQDRSRIKAQTSRAYYHEGKKIAKNRKKAEGQREDSLQEWRKRQVERYGKEQTRKMISQLEVKESIRRYNRLDRLMPGAVFYYQGVRYVMRGQHSNGQYLQAVGMGDKDFPAKKCKIVVHNQGLVFVS

SEQ ID NO: 6563 - protein, 245 aa, unidentified
  REGION 1..245: note = Human gut metagenome
LPIYRKEHDIMQYVYVLNKHGEPLMPCSPGKARLLLKQQKAHVIKRTPFTIKLLYGSTGYKQPITLGVDAGSKHVGLSASTEKRELYREEFTPRNDVVDLLSTRKQNRRSRRNRKTRYRPPRFDNRVHSKHKGWLAPSVEVKIQEHITVIKRICRILPITLVRVETAEFDTQRLKAMLAGKPIPVGTDYQLGEMYDKYNVRQYVLKRDNYTCQCCGAHTTAKKAVKLHVHHLESRKVGGNAPSNL

SEQ ID NO: 6564 - protein, 422 aa, Petrotoga sp.
MLVYVLNKHGEPLMPCKPSKARKLLKDGKAKVVRKEPFTIQLLYGSSGYKQPITLGVDAGSKTVGLSATTKKKELFASEVEIRDDITKLISQKRQYRRDRRLRKTRYRKPRFLNRVHSKNKGWIAPSVEHKIKSHIKLIDLVYRLLPITKIVVEVASFDIQKIKNPNIEGKQYQQGKQLDFWNVREYVLWRDNYTCQHCKGKSKDKRLNVHHIESRQIGGNAPSNLITLCETCHRDYHNGKIKLNFKRGQKFKDATFMGIMRWTLYNRLKDLYSNVHLTYGYITKNTRIQNNLPKTHRIDALCISGHPQAKQLDYYYHIKEVRRHNRQIHKANILKGGTRKLNQAPYLVHGFRLFDKVRYNGIECFIFGRRSTGYFDIRKLDGTVIHRSAKSKDLILVSKAKTLLWERRENSAFLSPLPYLP

SEQ ID NO: 6565 - protein, 465 aa, unidentified; identical to SEQ ID NO: 3603
  REGION 1..465: note = Human gut metagenome

SEQ ID NO: 6566 - protein, 440 aa, unidentified
  REGION 1..440: note = Human gut metagenome
LLLKKKTASVVCRHPFTIQLLYKTGCATQKGSIGIDTGSQHIGVGITCGDKVILKDEHALRSSMEKRSLLATRAAMRRGRRYRKVRYRKPKWRHHTKRMYFEKANRRGQHWRKVKTTTQSPRSKGWLPPSLQSKCDHHFCIIDRYLKYLPDPITRNLVIETGRFDMARMNDPTIHGKMYQRGPMYDAENRRAYIFARDNYQCACCKAKAGTTRKADGTTVKLVAHHILFRSRGATDNPKYMVSVCDHCHTTKAHQPGGILYSWMENNKKVARGLRDAAFMNILRQRLFARYPQAAFTYGNITAADRKQLLLPKSHANDAVAISLFGKEVSAVRNTCQTIYYRQVRKSKRSLHEAIPRKGRKNPNTKAVRNKKNTTQVNGFKLWDSVLANGKKLFICSFTGTSAYLIDKNGCYVSQPGKTYKQWPLSKLKRLHPNGNWLMA

SEQ ID NO: 6567 - protein, 433 aa, Lactobacillus sp.
MQNRVFVINKHGKALMPCKPRKARILLRDGKAKVLKKEPFTIQLLYGSSGYKQDVSIGIDSGQRHMGLAVTSQDKVLFQGEVELRQDVKKLIDTRRTYRRSRRNRKTRYRKVRFLNRIASKKDNWLPPSVASKVNHNINWIKRLLSVLPKADLHIEVGKFDMQKMKNPAINGEGYQQGDLYGYQTVKQFVLARDNYTCQVCKKKGGKLKIHHIIYRSLGGTNTVDNLITVCSKCHTTKNHQTGILAKWCKNKKKVNKSYKGATFMNILRRRLYAAFPQAKFQYGAWTTLQRAGLELTKSHYNDAVAISGIRKIKEKPTSIMMFKQFRKKKRSLHEATARKGRKTPNITSKRNAKNTKYAKGFWLNDYVKIKDSNKKGYISGFSKTTCYIKDIFGNYLTTSDRYKQVALSKLDRLSHYNNWSKQEINENIYQMN

SEQ ID NO: 6568 - protein, 416 aa, unidentified
  REGION 1..416: note = Human gut metagenome
MVYVLDKNGQPLMPTDRHRKVRLMLQSGQAKVIKRCPFTIQLTYNTGHQAQEISLGIDAGSKHIGVSATTKTRVLYEADVELRNDIVDLLSSRRELRRGRRNRKTRYRPARFDNRRREDGWLAPSIRQKIGTHLTVVENICKILPISRITVETASFDIQKIKNPDIQGAEYQQGDQLGFWNNREYVLFRDNHTCQCCKGKSKDKILNVHHIESRKTGGNAPNNLITLCEICHTGYHKGAIQLPKTVKRGMRFKDAAFMGIMRWAFYEALKQQYEPVGTPVHNTYGYITKHTRIEHNLPKEHYVDARCISGNPDAFPNGEYYYQKKVRCHNRQMHKLTILKGGIRKQNQATYLVKGYRLFDKVSYQRKEYFVFGRRKSGFFDIRTLSGKQVNKGSLSCKKLKFIATRMYYLIERRAV

SEQ ID NO: 6569 - protein, 396 aa, unidentified
  REGION 1..396: note = Human gut metagenome
VVRRTPFTIQLTIATGESKQPVSLGVDAGYKHVGLSASTEKAELYASEVELRQDITDLLSARRALRQSRRNRKTRYRAPRFDNRIRTKRKGWLAPSVENRINAHLSRIEAVLRLLPITKITVETASFDMQRLKNPDISGKEYQEGEQLGFWNVREYVLFRDGHVCRHCHGRSKAPVLNVHHLESRRTGSDSPDNLITLCETCHKALHRGEITLKAKRGQSFRAQAFMGIMRREVLNRLKASYPELKVHETYGYLTKHARIANGSVKSHGADAFCIAGNLGAERLGEFFFQKQTRRNNRQIHKLSILKGGIRKRNQAPFEAKGFRLFDKVACQGEEGFIFGRRSSGSFDVRKLDGTRISAGISCKKLRLLEKRRTYLTEIRKEEALPPLPEGRGLRA

SEQ ID NO: 6570 - protein, 431 aa, unidentified
  REGION 1..431: note = Human gut metagenome
MPNKVYVINKHGRPLMPCSPAKARHLLDAGKAKIKKRTPFTIQLVYGSSGYTQEVILGVDAGSKTIGMSVSTTKEELLSAEVKPRNDVVDLQSTRREFRRARRNRKTRYRKPRFDNRVRSKHKGWLAPSVEVKIQEHITSIKMVCRILPVSKVVIETAEFDLQLLKAIEEGKPVPQGEDYQKGEMCGHYNVRQYVLWRDDYTCQCCGTHATKKKEVRLHVHHLESRKVGGDAPDNQVTLCESCHEKLHKGLITAKDFKKRKRRSTRDATFMGIMRKTLMQRLCSELPIPVVETRGYITKTTREKLLVLPKSHTNDALAIAQGKQGFNVGYLPGILQIDKIYTICPVRHHNRQLHKATILKGGIRKPNQAEKYVFGYRLFDKVQFNGQDCFIWGRRTTGIFTIKTINGKMIKDGISFKKLKLAEKSTSYLIA

SEQ ID NO: 6571 - protein, 425 aa, Caldicellulosiruptor sp.; identical to SEQ ID NO: 3912

SEQ ID NO: 6572 - protein, 470 aa, unidentified; identical to SEQ ID NO: 3168
  REGION 1..470: note = Groundwater metagenome

SEQ ID NO: 6573 - protein, 428 aa, Moorena sp.; identical to SEQ ID NO: 4442

SEQ ID NO: 6574 - protein, 464 aa, unidentified
  REGION 1..464: note = Human gut metagenome
MYVFVIGLDGTRLMPCKPRKARKLIEAHKAEIYKKQPFTIRLLYKTGCATQPVTIGIDTGSQHIGIAVTSGNKVLYQAEIELRSTMDKRSLMETRRSYRRSRRYRKTRYRSPKFRFHTKRTYSETLVKRKTTGVMTHWVKHTNSMSTNRPDGWLAPSMQSKADHHIRWINRFLDVLPPDTKLRLEIARFDIARMKNPEVHSELYQYGPQYDYENLKAYVFDRDHYKCVVCKRKLGSKQPDGHSLKGMMHHITFRSKGATDNPDQLVTVCEYCHTPQAHKKGGVLWDLKEKHRPVQRGLRDATQMNIIRTRLVKAFPDAELTYGNITAADRKKMHLPKSHAGDAVAIAMKGKTVNICEPTVYIKQVRKKKRSLHEATPRKGRKNPNTQAVRNPKNTKSIGIYHIYDTVRFQNKTGFISGFTGRSAYVQDFDGNYITMPGKSYKQINLSNLELVRHNNNWIQKTGN

SEQ ID NO: 6575 - protein, 420 aa, unidentified
  REGION 1..420: note = Human gut metagenome
MQYVYVLNKHGEPLMPCSPRKARLLLKQKKACVVKRTPFTIKLLYGSAGYKQPITLGVDAGSKHVGLSASTEKRELYSEEFTPRSDAVELLSTRRQNRRSRRNRKTRYRVPRFDNRVHSKHKGWLAPSVEVKIQEHITVIKHICKILPISLVRVETAEFDTQRLKAMLAGKPLPVGTDYQLGEMYDEYNVRQYVLKRDHYTCQCCGTHNTAKKVVKLHVHHLESRKTGGNAPSNLVTLCTTCHKNLHKGRVTLDGKERGKPLRDAAFMGIMRKTLMVRLKEELPIPVQGTYGYITKMRREQNDIKKSHTNDARCISKHPLAEPCGVCYRTKAIRHHNRQTHKANFSKKGIRKRSQMPYLVEGFRLWDKVLYKGQECFVSGRRSSGSFALKKLDGTSISKGVAFKKLRLLEPATNYLIERM

SEQ ID NO: 6576 - protein, 442 aa, unidentified; identical to SEQ ID NO: 3791
  REGION 1..442: note = Human gut metagenome

SEQ ID NO: 6577 - protein, 451 aa, unidentified
  REGION 1..451: note = Human gut metagenome
MPVAVISKTGERLMPTSEHRARKLLKSGKAIKYSYHPFTIQLAERESGDVQPIELCMDTGYIHIGISVKSEKHEYLAEQIDTLTDEKARHDACRMYRRQRRSRKRYRQPRFNNRKRNDRWIAPSLEHKKSIHIQAILRICKVMPVTDITLEMGNFDTQVLKAREEGKPLPHGADYQHGERYGIATLREAVFTRDDYKCQCCGRTIKDGAILHVHHIKYRSQGGTNRMSNLITVCDKCHTPANHKQGGKLYNWKPKIASFKGATYMTTIRWKLYNEVKALCPDIDIHITYGAETKERRRALDIDKSHVNDAFVIGQFHSKHRSEPICYKKKRRNNRCLEKFYDAKYIDSRDGKKRSGQELFNGRISRNHKKDSENLHQYRLQKVTPGRRAIRRQHYPIQPHDIIVYNGNKIEVLGCQHKGTRVVFSKTKKSVQISKIKLFKYAGGYSKSVFN

SEQ ID NO: 6578 - protein, 411 aa, unidentified; identical to SEQ ID NO: 5658
  REGION 1..411: note = Human gut metagenome

SEQ ID NO: 6579 - protein, 414 aa, unidentified
  REGION 1..414: note = Human gut metagenome
MPCSPAKARLLLKEKKAIVKRRTPFTIQLTIATGETKQPVSLGVDAGYKHVGLSASTEKAELYASEVELRQDITDLLSARRALRQSRRNCKTRYRAPRFDNRIRTKRKGWLAPSVENRINAHLSRIEAVLRLLPVTKITVETASFDMQLLKNPDISGKEYQEGEQLGFWNIREYVLCRDGHVCQHCYGRSKDPVLNVHHLESRRTGGDSPGNLVTLCETCHKALHRGEITLKAKRGQSFRAEAFMGIMRWEVQNRLKASHPELEVNNTYGYRTKHARIANDIAKSHCADAFCIAGNLGAERLGEFFFQKQTRRNNRQSHKLSILKGGIRKRNQAPFEVNGFRLFDKVACKGEEGFIFGRRSSGFFDVRKLDGTRISAGISYKKLHLLEKRRTYLTEIRKEEVLPPLPEGRGLRA

SEQ ID NO: 6580 - protein, 440 aa, Moorena sp.
LVFVLNKNKKPLNPCHFAVARKLLKQGKAVVYKQFPFTIRLKDLKEVNPKGLIIKLDPGAKQTGVALHKPNGEVILLATIEHRADKIKQNLEARRAFRRTRRNRKTRYRTPRFLNRKRPEGWLPPSIQSVVDNVKNFIIKLKKLCYIDTIYIETVRFDTQLILNPSIEGVDYQQGTLLGYEIREYLLYTYGHTCQYCKGLTNDTKLEIEHKHPKSRGGSNSIRNLTLACRTCNQEKGNNTLDEWVQSLSKSKLDKERVKNINLILKTNKPVSLKDTAKVNSSRNTILREMYKLTPDVVVSTGGVTKHNRIKVNLPKTHYYDALCVKETPKIKIHKGLKELCIKSIGRGTRSRTLLNKYGFPRAYLPRQKQFFGYQSGDMVKANIPKGKYMGQYVSNVSCRSTGTFAIYSKKHGKQIDVNHKYLKLIQKGDGYRYELKTLV

SEQ ID NO: 6581 - protein, 492 aa, unidentified; identical to SEQ ID NO: 4486
  REGION 1..492: note = Human gut metagenome

SEQ ID NO: 6582 - protein, 420 aa, unidentified
  REGION 1..420: note = Human gut metagenome
MQYVYVLNKHGEPLMPCSPGKARLLLKQQKACVVKRTPFTIKLLFGSAGYKQPITLGVDAGSKHVGLSASTEKRELYSEEFTPRSDVVELLSTRRQNRRSRRNRKTRYRVPRFDNRVHSKHKGWLAPSVEVKIQEHITVIKHICKILPISLVRVETAEFDTQRLKAMLAGKPLPVGTDYQLGEMYDEYNVRQYVLKRDHYTCQCCGTHNTAKKVVKLHVHHLESRKTGGNAPSNLVTLCTTCHKNLHKGRVTLDGKERGKPLRDAAFMGIMRKTLMVRLKEELPIPVQGTYGYITKMRREQNDIKKSHTNDARCISKHPLAEPCSVCYRTKAIRHHNRQTHKANFSKKGIRKRSQMPYLVEGFRLWDKVLYKGQECFVSGRRSSGSFALKKLDGTSISKGVTFKKLRLLEPATNYLIERM

SEQ ID NO: 6583 - protein, 442 aa, unidentified; identical to SEQ ID NO: 3161
  REGION 1..442: note = Human gut metagenome

SEQ ID NO: 6584 - protein, 512 aa, unidentified
  REGION 1..512: note = Human gut metagenome
MSTVYVLNKDGKPLMPTTRGGHVRHLLKEQKARVVRTKPFTIQLLYETDDVVQLLYLSIDPGRTNIGVAVVKTDGTAVFTAHLETRNKEIPKLMKKRKNSRRARRTNGRRCRRQRRAKANGTISKKCVKHDTAQNGSVSKRAKEIGVIKRHLPGCEKDVLCIGIKNKEAKFSNRTRPEGWLTPTANQLLQTHINLVKKIQKFLPISDVVLEINKFAFMRLDNPNVQKWQYQQGPLYQKANLEETVSEMQEHHCLFCKKKIDHYHHVVPQHKNGSNTIDNIVGLCTKHHDLVHKDTAWHEKLTKKKTGLNKKYGALSVLNQIIPALTKELSSIFPKHFFVTTGKSTYDYRAAHGVSKDHWLDAYCIACSVLPNDVCDNNINSHVPYELKQFRRHDRRALHKENMSRVYTLNGKSVATNRHKATEQTTDSLEEFRQRQPNDVCNLKVKEHHPTYRNMNRNYPGSVFLIGKQVHVMQGIAGSKDGEATTYKDTNANSIAAGKCKFVAKNSGILFV

SEQ ID NO: 6585 - protein, 470 aa, unidentified; identical to SEQ ID NO: 2825
  REGION 1..470: note = Human gut metagenome

SEQ ID NO: 6586 - protein, 456 aa, unidentified; identical to SEQ ID NO: 3505
  REGION 1..456: note = Human gut metagenome

SEQ ID NO: 6587 - protein, 438 aa, Moorena sp.
MIFVLNKNKQLLNPCHPAVARKLLGMGKAVIHKKYPFIIRLKELKKSESNAKFRLKIDYGSRHTGLAILNGSKVTWLAQIHHKTNIKKNMDSRRAMRRARRNRKLRYRKPRFLNRKRNDGWIPPSLQSRVDNIKNWVIRLRKLCPLTHISYENVKFDTQLMQNPEISGIEYQQGELQGYEIREYLLKKMGRKCAYCGAENVPLEVEHIIPKIRGGSSRVSNLTLACRYCNQAKGSMTAEEFGHPEVYDLVKKPLKDVAIVNATRWKIYDILVSIGLKIECGTGGRTKFNRIKLNLPKDHHFDAVCVGQSTPNEINFKTNQVLHIKAKGRGSHCRTNLNKYGFPRGYLARQKSFFGFQTGDIVKAIIPKGKYKGTHIGAISCRKTGYFDIKNKEGMKIAQGINHKYCNVLSRTDGYEYTLNGLEVDGIPLTTKVASILP

SEQ ID NO: 6588 - protein, 417 aa, unidentified
  REGION 1..417: note = Human oral metagenome
MFVYVISKDGQPLMPTTRFGKVRRLLRDKKAKVVRSCPFTIKLLYEPENLVVQEVVLGQDTGSKHVGTACVSNDKVLYQSEVALRDDIKKKMDNRRSSRRNRRYRKTRYRKPRFLNRANLAKKDRLPPSVRSRVQSHIDEIEFCKKILPISKIVLEVSQFDTHLMKNPELIDEKVKHWGYREGFNYEYSSRREAVLVRDNYTCQCCGKKHAKLEVHHIIFRSMGGTDDERNLITLCEKCHKMVHDGLLILTKKPRKLNLKYATQMSIIRSQLLKIYPDAIETFGFVTKENRNNLNLPKGHYIDACVIASGGKKFKQLNWLFKKRRVAKQNRQLCKGIRGEKKLPTGKVFGFKRFDKVKYLKEICFIKGRRTSGGFVLMDIDNNAIDFRDRGGRQNPSYKLLERLNTRRSILCISQRI

SEQ ID NO: 6589 - protein, 414 aa, unidentified; identical to SEQ ID NO: 2588
  REGION 1..414: note = Human gut metagenome

SEQ ID NO: 6590 - protein, 447 aa, unidentified; identical to SEQ ID NO: 5309
  REGION 1..447: note = Human gut metagenome

SEQ ID NO: 6591 - protein, 408 aa, unidentified
  REGION 1..408: note = Human gut metagenome
LMPCSPGKARLLLKQQKACVVKRTPFTIKLLYGSAGYKQPITLGVDAGSKHVGLSASTEKRELYREEFTPRNDVVDLLSTRRQNRRSRRNRKTRYRAPRFDNRVHSKHKGWLAPSVEVKIQEHITVIKRICRILPITLVRVETAEFDTQRLKAMLKGKPLPVGTDYQLGEMYDEYNVRQYVLKRDNYTCQCCGAHPTEKKPVRLHVHHLESRHVGGNAPNNLITLCVACHKALHEGKITLDKGKKRGKPLRDAAFMGIMRNTLLARLKDELNIPVKQTYGYITKLLREKNKIPKSHVNDARCIAKAPNAKPCDTMLYTRALRHHNRQIHKAKILNGGIRKKNQAPYLVKGFRLWDKVRYNGEECFITGRRSSGYFALKKYDGTVISNSASYKKLMLLEAATNYITERS

SEQ ID NO: 6592 - protein, 442 aa, Sutterella sp.; identical to SEQ ID NO: 3234

SEQ ID NO: 6593 - protein, 456 aa, Halomonas sp.
MAVFVLGKNKQPLMPCSEKRARLLLERGRAVVVNLTPFVIRLRDRCLSDCALQPTLLGIDPGSKETGLTLMRLENNATEEKAPATRHGLCLFQLVHRGFQIRQALEQRAGFRRRRRSKNLRYRQPRFDNRTRKKGWLPPSLQHRVDTTMAWVDKLCRWAPVTHLNMELVRFDLQKMENPEISGVEYQQGTLLGYEVREYLLEKWGRECAYCGTGDTPLEIEHVVAKSRDGSSRVSNLTIACHECNQAKDNQWLTDFFATDKGLKKRLKANGLSATVRLERVQRQLKLPLRDATAVNATRWTLFGTMKATGLPVAVGSGGRTKYSRQRLGIPKTHALDAACVGKFDTLKGWRAPTQVIKAMGRGSYQRTRLDKYGFPRGYLMRQKQVQGFQTGDRVRAVVPSGKKAGTHTGRVAIRKTGSFNIQTEQGAVQGISWRHCTLLQRGDGYGYHPLPTIQS

SEQ ID NO: 6594 - protein, 456 aa, unidentified
  REGION 1..456: note = Human gut metagenome
MSTCVCVLSNSGERLMPTFRLGKVRRLLKDGKAKIVKHHPFTIQLLYDSKTNTQPIEICEDVGYNYIGISVKSESHEYVSAQYDTLQDEKEHHDDCRKYRRTRRNRLRYRKPRFDNRKRSEGWLAPSLEHKKQLNIRLIERYVSVIPITRATVEVGSFDTMLLQAIQKGESKPEGVDYQKGPRYNLATLREAVFYRDNYTCQVCGRKIADGAILHMHHMFYWKGRHGYQLDELVTACEKCHTPANHQKGGKLYGFGKDKKFANLSGAAFMNAVRWQIVDALHATYGKEFVTITYGAMTKEKRIILGIEKTHNNDAYAMGDYHPAHRCVFRHYQKRRRNNRVLEKFYDATYIDARTGNKAKGKELFNGRISRNHKKDSENFHKYRSKKVSKGRRSIRRQRYAIQPYDTVRLEGKTYITSGCHNKGTRLLIPANGKSKSVAISKVQVVCHAVAWIQII

SEQ ID NO: 6595 - protein, 462 aa, unidentified; identical to SEQ ID NO: 5736
  REGION 1..462: note = Myxococcales bacterium UBA6777

SEQ ID NO: 6596 - protein, 417 aa, unidentified
  REGION 1..417: note = Human gut metagenome
MVYVISKENKPLMSCSNVVARLLLRQQKAKVKRKQPFTIKLLYETTNYIQDLTLGVDTGSGTIGAAVTTDDGKIIYASEVIVRNDINDKMTQRSKYRRNRRNRKTRYREPRFLNRKNSIKSNRFSPTMVSKFHSHIKEIEYIKSILQIKTLVLETGQFDVHLLKNPELKYKPWGYQKGKNYGFSNTKEIVLNRDNYTCQYCEGKHKDNKLEVHHIVYRSNYGSDDESNLITLCHTCHQLLHRGDIELNLKGKTKGVLKYATQMNSIRKQLLKFYPEAIETFGFITKENRLNVNVDKKHYLDACIIATGGKAFKICCDIYKKRCISKGDFQQTKGIRSEQKLNTKKICDFRKFDKVKYFGKEYFIKGRMSTGYAVLMDVGGNKIDFSNMLNGYKTVKLNNCKRISARKSQLIAIHPTP

SEQ ID NO: 6597 - protein, 430 aa, unidentified
  REGION 1..430: note = Human gut metagenome
MPKVYVLNRHGRPLMPCTPAKARHLLDAGKAKVRHRTPFTIQLLYGSTGYTQEVILGVDAGSKTIGLSAATETEELFSAEVKPRNDVVELMSARRQFRRARRNRTTRYRKPRFDNRVRSKHKGWLAPSVEVKIQEHMTAIRRACAILPVSKVVVETAEFDLQLLKAVAEGKPVPQGEDYQKGEMYGHYNVRQYVLWRDSYTCRICGAHGSVRKGVPLHVHHLESRRVGGDAPDNLVTLCTACHDKLHKGIIMAADIKKRKRRSTRDATFMGIMRMTLLRRLREQLPVPVVETRGYITKATRENLLVLPKSHTNDALAIAHGPQGFRAEYLPNIRQADRLYTIRPVRHHNRQLHKATILKGGVRKANQAEKYICGFRLYDKVLYNGIECFVWGRRTSGSFLLRQLNGEKVKDSVSYKHLKLLERSQSYLVA

SEQ ID NO: 6598 - protein, 421 aa, unidentified
  REGION 1..421: note = Human gut metagenome
MVYVLNKYGQPLMPTNRYGKVRHLLKDSKAKVVNRCPFTIKLLYDSTNYTQNLTLGIDTGSGTLGSAVSDDNGNVVYMSKVVVRNDITDKMTRRAKYRRNRRNRKTRYRKARWLNRKNSIKKDRFSPTMISKFHSHIKEIEYIKSILPITTLVLETAQFDTHLLENPSLVNPKIKHWGYQKGINYGFENTRAMVLNRDNYTCQYCKGKHKDSKLEVHHIVFRSRGGSDEESNLITLCHTCHKDLHSGKIAPKFSGKKKGTLKYATQMNSIRCQLLKKYPDAIETFGCVTKANRLSVGIEKDHHLDACVIASGLNPIAIKTNLLYIKKSVSKGDYQQTKGIRSEQPITTGKICGFRKFDKVKYFGKEYFIKGRMSTGYAVLMDIDGNKIDFSTMPKGYKTPKLSNCKRLASRKTTLVTQVAV

SEQ ID NO: 6599 - protein, 453 aa, unidentified; identical to SEQ ID NO: 5967
  REGION 1..453: note = Human gut metagenome

SEQ ID NO: 6600 - protein, 420 aa, unidentified; identical to SEQ ID NO: 5866
  REGION 1..420: note = Human gut metagenome

SEQ ID NO: 6601 - protein, 471 aa, Acidiferrobacter sp.
MAVFVLDRRKKPLMPCSERRARLLLTRGRARVHRVVPFTIRLVDRCQEDSILQPLRLKMDPGSKETGLALVREPDTVAGATGEIVRTLTVLMLLELRHRGPSIHEALTQRSSHRRFRRGRLRHRPARFDNRTRPEGWLAPSLQHRVDTTMAWVDRLCRWAPVAALSQELVRFDTQQMQNPEIVGTEYQQGTLAGYEVREYLLEKWDRTCAYCGAHNTPLEIDHIHPKSRGGSDRVSNLTIACHDCNQRKGNRPLTEFLAQDPERARRIRAQAPAPLRDAAAVNSTRWALFQQLKATGLEVEVASGGRTKWNRHRLHLPKTHSLDAVCVGSVDTIHNAQQPVLTIKATGRGSYQRTRLTKHGFPRGYLTRSKSAFGFQTGDLVKAVVTSGKKAGRYLGRVAIRATGSFNIQTATGLVQGIAHRFCILIQRADGYGYALTKRAFDTGEAGTGAAYAAALSLPGMNPGVSRANG

SEQ ID NO: 6602 - protein, 433 aa, unidentified
  REGION 1..433: note = Microcoleaceae bacterium UBA9251
MSKIPNQVFVLDNSKKPLTPCLPVIARKLLNAGKAKVFRLYPFTIILKKTVDEQPQPIEIRIDPGSKTTGIALVSLTQVIWGAELTHRGQEIKSRLETRHAIRCSRRHRKTRYRQPRFLNRTRPKGWLPPSLQHRVLTTMTWVNRLCKLAPIKSIAFELVNFDTQKMQNPEISGVEYQQGELQGYEVREYLLEKWNRKCAYCGAEKLPLQVEHINPRASCGSNRVSNLCLACKKCNTKKGTQNIKDFLKGKPEILKRIMSQAKAPLKDAAAVNGTKSALLQALKATNLEPIYVGRGSLTKFNRTKLGLPKAHWIDAACCGDVSQGLTLMIDQPLLIKAMGWGSRQVVQTDKYGLTRKGYKPKQKVKGWNTGDIISVIGGKHEGVKCKRIKTTRFKGDIDIRVNDTTVISVSRNQIKPVYRNDGYNYSFVGNCR

SEQ ID NO: 6603 - protein, 300 aa, unidentified
  REGION 1..300: note = metagenome
INAHLSRIEAVLRLLPVTKITVETASFDLQLLKNPDISGKEYQEGEQLGFWNIREYVLCRDGHVCQHCYGRSKDPVLNVHHLESRRTGGDSPGNLITLCETCHKALHRGEITLKAKRGQSFRAEAFMGIMRWEVHNRLRALHPGIEVSNTYGYRTKHARIANGIAKSHCADAFCIAGNLGAERLCEFFFQKQTRRNNRQIHKLSILKGGIRKRNQAPFEVKGFRLFDKVACQGEEGFIFGRRSSGFFDVRKLDGTRISAGISCKKLHLLEKRRTYLTEIRKEEALPPLPEGRGSAPKCDE

SEQ ID NO: 6604 - protein, 426 aa, unidentified
  REGION 1..426: note = Human gut metagenome
MVYVQDINGKPMMPTTRHGKVRRLLKENKAVVVSLCPFTIKLTYVTSDYKQEIVLGVDAGTKHVGLSATTKSKELYSSEVILRNDIVDLLSTRRELRRSRRNRLRYRKPRFDNRIKSKRPGWIAPSVKYKIDAHIRVVENVCSILPISRIVIEVAQFDTQKIKNPNISGKEYQEGDQLEFWNTREYVLARDGHKCQYCKGKSKDKILNVHHLESRKTGGDSPSNLITLCETCHKEYHKGNIDLKIKRGKSLRDAAVMGIMRWRLYEELKSKYDNISMTFGYVTKYNRIKHGIEKSHVSDAFVISKNFNAIRLGYYYKVRLVRRHNRQIHKQKIQKGGIKRLNQSPFEVFGFRLFDRVMFENSYYFIFGRRKTGSFDIRYIDGKNQKNVTYKKLKLSRCKRFMIQMELNKKTRTCFENERNSDRDAA

SEQ ID NO: 6605 - protein, 413 aa, unidentified; identical to SEQ ID NO: 2636
  REGION 1..413: note = Human gut metagenome

SEQ ID NO: 6606 - protein, 427 aa, Enterococcus sp.; identical to SEQ ID NO: 2410

SEQ ID NO: 6607 - protein, 412 aa, unidentified
  REGION 1..412: note = Human gut metagenome
MIYVLNQNGQPLMPTKNHAKVRILLKSKKAKVIRRCPFTIQLMYSSTNYTQSINLGVDAGSKHIGISATTKNKVLFESDVELRNDIVNLLSTRRQNRRTRRNRKTRYRKPRFDNRKRKDGWLAPSVQNKVDTHLTVIRKVHEILPVSKIIVEVASFDIQKIKNPTIGGTEYQQGSQLDFWNVREYVLFRDNHTCQCCKGKSKDKILNVHHIESRKTGGDAPNNLITLCETCHTGYHKGTVNLPKRIKRGMSFKDASFMGIMRWAFYNKLKEIYPNVSLTYGYITKNTRIENKLPKDHYIDARCISGNPKAVSDWGVYYQKKVRCHNRKIHKNTILKDGYRKRNQAPYEVMGFRLYDKVRWKQQNCFIFGRRSTGRMDLRLLDGTKVNASVGYKNLKMLEMCKNILIELRMEV

SEQ ID NO: 6608 - protein, 430 aa, unidentified
  REGION 1..430: note = Human gut metagenome
MPKVYVLNRHGRPLMPCTPAKARHLLDAGKAKVRHRTPFTIQLLYGSTGYTQEVILGVDAGSKTIGLSAATETEELFSAEVKPRNDVVELMSARRQFRRARRNRTTRYRKPRFDNRVRSKHKGWLAPSVEVKIQEHMTAIRRACAILPVSKVVVETAEFDLQLLKAVAEGKPVPQGEDYQKGEMYGHYNVRQYVLWRDSYTCRICGMHGSVRKGVPLHVHHLESRRVGGDAPDNLVTLCTACHDKLHKGIIMAADIKKRKRRSTRDATFMGIMRMTLLRRLREQLPVPVVETRGYITKATRENLLVLPKSHTNDALAIAHGPQGFRAEYLPNIRQADRLYTIRPVRHHNRQLHKATILKGGVRKANQAEKYICGFRLYDKVLYNGIECFVWGRRTSGSFLLRQLNGEKVKDGVSYKHLKLLERSQSYLVA

SEQ ID NO: 6609 - protein, 424 aa, Caldicoprobacter sp.; identical to SEQ ID NO: 4263

SEQ ID NO: 6610 - protein, 420 aa, unidentified; identical to SEQ ID NO: 3504
  REGION 1..420: note = Human gut metagenome

SEQ ID NO: 6611 - protein, 429 aa, Moorena sp.
MCNYVFVLDASHKPLNPCRPVTARKLLTAGKAAVYRRYPFTIILKKQVDGSAKPMSLKIDPGSKITGLAVVYSNQVVWSAEIEHRGSKIKSALDYRRGVRRSRRKRKCRYRKPRFNNRKRPEGWLAPSLQHRVATTMTWVLRLMKLTAIGSISQELVRFDTQKLQNPEISGIEYQQGELMGYEVREYLYQKWGRQCVYCGAKSVKLEVEHIIPKSKGGTNRVNNLTLACHRCNQAKGNLDARDFLSGKPHVLKRILGRAKQPLLDAAAVNSTRWQLYLCLKETGLSVAVGTGARTKYNRIKLGLPKGHWVDAACVGEVATLKIVTRQPLLIKAMGHGCRQVIQMDKYGFPRKGYKPKHPVKGWKTGDIVNVVAGKNAGLKGVRIKTVRAKGNFDLIGADHGVSKKVNSASRNYIQCVHRQDGYYYSFAK

SEQ ID NO: 6612 - protein, 406 aa, unidentified
  REGION 1..406: note = Human gut metagenome
MVYVQDIYGRPLMPTTRHGKVRRLLKSKKATVVNLCPFTIRLLYDTTGYKQEITLGVDTGTKHVGLSATTKSKELYASEVILRSDVVDLLSTRRELRKIRRYRLRYRKPRFMNRIKSKKRGWIAPSIRQKIDSHIRIIGFVYSILPVSKLIIEVAQFDTQKIKNPEISGKEYQEGEQLGLWNVREYVLARDEHKCQHCKGKSKDPVLNVHHIESRKTGGDSPSNLITLCKTCHKEFHKGNIKLKVNRGESLRDAAVMSIMKWELYDELKSLYPNVKMTFGYITKYNRINHGIEKSHVSDAFVISRNFDSERLGYYYERKLVRRHNRQIHKMKAPKGGNKRMNQSPFKVFGFRLFDKVMFQGKERFIYARRLRGIFNIRDINGENKKDISYKKLEYVSHGLISIVAG

SEQ ID NO: 6613 - protein, 414 aa, unidentified; identical to SEQ ID NO: 2588
  REGION 1..414: note = Human gut metagenome

SEQ ID NO: 6614 - protein, 417 aa, unidentified
  REGION 1..417: note = Human gut metagenome
MPCSPAKARLLLKEKKAIVKRRTPFTIQLTIATGEAKQPVTLGVDSGYKHIGLSATTKKAELYASQVELRQDITDLLSARLALRRSRRSRKTRYRAPRFDNRVASKRKGRLAPSVENRIAAHMSRVEAVMRVLPVTAITVETAVFDTQLLKTPDIAGAAYQQGEQLGFWNVREYVLFRDGHVCQHCRGKSKDPILNVHHIESRRTGGDAPNNLITLCETCHKAFHRGEIELQIKRGKSFKAETFMGIMRWTLFERLKKAHPELNVHNTYGYLTKHKRISHGIAKSHCADAYCIADNLSAKRLKGFFFQKQTRKHNRQIHKLSILKGGLRKKNQAPHEVKGFRLFDKVICKGEEAFIFGRRTSGSFDVRRLDGTRISAGISYKKLRRLEPRTTYLTEFRKEAALPPLHKCRGLRAEFL

SEQ ID NO: 6615 - protein, 531 aa, unidentified; identical to SEQ ID NO: 4135
  REGION 1..531: note = Human gut metagenome

SEQ ID NO: 6616 - protein, 417 aa, unidentified
  REGION 1..417: note = Human gut metagenome
MPCSPAKARLLLKERKAIVKRRTPFTIQLTIATGEAKQPVMLGVDSGYKHIGLSATTEKAELYASEVELRQDITGLLSARLALRRSRRSRKTRYRAPRFDNRVASKRKGRLAPSVENRIAAHMSRVEAVMRVLPVTAITVETAVFDTQLLKTPDIAGAAYQQGEQLGFWNVREYVLFRDGHVCQHCRGKSKDPILNVHHIESRRTGGDAPNNLITLCETCHKAFHRGEIELKIKRGKSFKAETFMGIMRWTLFERLKKAHPELNVHNTYGYLTKHKRISYGIAKSHCADAYCIADNLSAKRLKGFFFQKQTRKHNRQIHKLSILKGGLRKKNQAPYEVKGFRLFDKVICKGEEAFIFGRRTSGSFDVRRLDGTRISAGINYKKLRLLEPRTTYLTEFRKEAALPPLHECRGFRAEFL

SEQ ID NO: 6617 - protein, 331 aa, unidentified
  REGION 1..331: note = Human gut metagenome
LRVFVLNKRGKPLMPCSPAKARLLLKEKKAIVVRRTPFTIQLTIATGEAKQPVSLGVDAGYKHVGLSASTEKAELYASEVELRQDVSNLLSARRALRQSRRNRKTRYRAPRFDNRIRTKRKSWLAPSVENRINAHLSRIEAVLRLLPVTKITVETASFDMQLLKNPDISGKEYQEGEQLGFWNVREYVLFRDGHVCQHCHGRSKDPVLNVHHLESRRTGGDSPGNLITLCETCHKALHRSEITLKTKRGQSFRAEAYMGLMRWEVLNRLKTSHPGLEVHNTYGYRTKYTRIVNGIDKSHCADAFCIAGNLGAERLGEFFFQKQTRRNNRQI

SEQ ID NO: 6618 - protein, 441 aa, unidentified
  REGION 1..441: note = Human gut metagenome
MSTCVCVLSNSGERLMPTFRLGKVRRLLKDGKAKIVKHHPFTIQLLYDSKTNTQPIEICEDVGYNYIGISVKSQSHEYVSAQYDTLQDEKEHHDDCRKMRRSRRNRLRYRKPRFDNRKRGESWLAPSLRHKKELNVNVVKMYCAVMPITHATVEVGSFDTMLVKAIQEGKATPESADYQKGPRYKLATLWEAVFYRDNYTCQVCGRKANEGAILHVHHMLYWKGRHGNSLSELITVCEKCHTPANHQKSGKLYGFGENVKFADLSGAAFMNTVRWQIVNELYAAFGKPFVTITYGAMTKEKRIALHLEKSHNNDAYAMGEFHPNCRCTFEHYEKVRRNNRILEKFYDSRYIDIRTGEIATGKELFNGRINRNHKKDSENLHKYRGKRTYAGHRALLRKKVNLNPGDLVSLNGKVLIVHGTHTNKKGAVNVEFKAPAKNGQK

SEQ ID NO: 6619 - protein, 403 aa, unidentified
  REGION 1..403: note = Human gut metagenome
LLMVAVVDLFGKPLMPTNEYRARKLLKQKKAKIFGYRPFTIQLTERKSAEIQPIELCMDTGYIHIGISAKSERHEYLGMQIDTLTDEKLKRDDKRQYRRQRRNRKRYRAPRFDNRRRKEGWIAPSLEHKKEIHIDAIQRICKVMPITDITLEIGNFDTHVLKAVEEGKPLPQGSDYQHGERYGIATLREAVFLRDGYKCQCCEKSVKDGAILHVHHIKYRSQGGTNRMSNLITVCDKCHTPKNHKPGGKLWNWKPKLAEFKGASYMTSIRWTLYNEVTALLPNSSVHITYGAKTKESRRKLDIKKSHVNDAYVMGLFCPKHRTKPVYFKKKRRNNRVLEKFYDAKYIDSRDGKKQSGQELFNGRINRNHRKDSENLHLYRKQKVTKGKRSIRNKHYLIQPHDI

SEQ ID NO: 6620 - protein, 509 aa, unidentified
  REGION 1..509: note = Human gut metagenome
MPDTDYIYVLGADGKPQMPTKRKRHVKRLLDTGKARIACHVPYTIQLLYENTPVLQPVILAEDPGRTNIGMAVLSVKGELLMSAVVETRNREIVRLMNHRRGYRRASRNGERKARQRLAKRFSTMLKAGLIMRKLPKFAADKFITCHYIRNTESRFCNRKRPDGWLTPTSRQLVETHINLIHKIQKYLPVTDIAMEVNRFAFLSLENPSVSGVDFQNGPLKGFDSLHDAVNELQHGKCLLCDKKIEHYHHIVPRFMNGSNTIGNIAGLCMECHNKVHKRAAYQKKLNDVKKGLDKKYGALSALNQAVPFICKRLEAEFGKEHVSYCTGRDTAKMRSSFGFQKTKDNQMHETDAWCIGVLALNRIPDIVPDFGQTYCIRQFRRQNRSFVCAQTERAYKLDGVTIAKNRKKRAEQKTDSLEDWYNRQVVLYGKKKADFMRSRLTVVKSKRRYNDLTRVMPGAVFMYNGERYVLSGRLSKGLLFRAVGDAKTNYPASKCKIIRHNEGLVFVC

SEQ ID NO: 6621 - protein, 413 aa, unidentified; identical to SEQ ID NO: 3695
  REGION 1..413: note = Human gut metagenome

SEQ ID NO: 6622 - protein, 456 aa, unidentified; identical to SEQ ID NO: 5939
  REGION 1..456: note = Human gut metagenome

SEQ ID NO: 6623 - protein, 416 aa, unidentified
  REGION 1..416: note = Human gut metagenome
VSEITSYAFVLDVNGKPLAPTKEQKAWFLIRKKRAALVSKYPMVIQLKKEIPENKICKDEIRCGIDDGGLHVGIALVQKCKTKNKVVFKGTIEQRNDVKHLMEVRRGYRRYHRYYKRYRQARFDNRKSSKRKERIAPSILQKRQATMRVIHRLNKWINITNYWLEDVSVDIRALTDGYKPYRWQYQKSNRLDENIRKAAILRDGSKCMECGRANCRLEVHHIKPRRRNGSNTLDNLITLCESCHQKTEGQEELYMDRYFSLLKSSDHKNLNYAQHVMIGKKWLRKQLSNLGVLYLTNGGDTANKRIDWNVEKSHANDAVCITDLQPDTYDMKEWAIKPMRRKSKAKTDNVLGIRHRDLVEYTFKNGETHRGYVTALYPEQKAINFQSPTKHCKKVNARKCKLLWKYSKIYWFENAS

SEQ ID NO: 6624 - protein, 431 aa, unidentified
  REGION 1..431: note = Human gut metagenome
MPNKVYVINKHGRPLMPCSPAKARHLLDAGKAKVKKRTPFTIQLVYGSSGYTQEVILGVDAGSKTIGMSASTTKEELLSAEVKPRNDVVDLQSTRREFRRARRNRKTRYRKPRFDNRVRSKHKGWLAPSVEVKIQEHITTIRRVYGILPVSKVVVETAEFDLQLLKAIADGKPVPQGEDYQKGEMYGHYNVRQYVLWRDDYTCQCCGAHATKKKEVRLHVHHLESRKVGGDAPDNQVTLCESCHEKLHKGLIAEKDFKKRKRRSTRDATFMGIMQKTLMQRLCSELPIPVVKTRGYITKATREKLLVLPKSHTNDALAIAQGKHGFNVGYLPGIEQIDKICTIRPVRHHNRQLHKAAILTGGIRKSNQTEKYVFGYRLFDKVQFNGQDCFIWGRRTTGIFTIKTINGKMIKDGISFKKLKPVEKSTSYLIA

SEQ ID NO: 6625 - protein, 413 aa, unidentified; identical to SEQ ID NO: 3587
  REGION 1..413: note = Human gut metagenome

SEQ ID NO: 6626 - protein, 458 aa, Lactobacillus sp.; identical to SEQ ID NO: 5823

SEQ ID NO: 6627 - protein, 464 aa, unidentified
  REGION 1..464: note = Human gut metagenome
MYVFVIGLDGTRLMPCKPRKARKLIEAHKAEIYKKQPFTIRLLYKTGCASQPITLGIDTGSQHIGIAVTSENKVLYQAEIELRSTMDKRSLMETRYSYRRSRRYRKTRYRSPKFRFHTKRTYSETLVKRKTTGIMTHWVKHTNSMSTNRPDGWLAPSMQSKVDHHIRWINRFLDVLPPDTKLRLEIARFDMARMKNPEVHNELYQHGPQYDYENLKAYVFDRDHYKCVVCKRKLGSKQPDGHSLKGMMHHITFRSKGATDNPDQLVTVCEYCHTPQAHKEGGVLWDLKEKHKSVQRGLRDATQMNIIRTRLVKAFPDAELTYGNITATDRKKMHLPKSHAGDAVAIAMKGEDVNICEPTVYIKQIRKKKRSLHEATPRKGRKRPNTQAVRNPKNTKSIGIYHIYDTVRFQNETGFISGFTGKSAYVQDFDGNYITMPGKSYKQINLSSLELVKHNNNWIQKTRN

SEQ ID NO: 6628 - protein, 442 aa, unidentified
  REGION 1..442: note = metagenome
MVTVQQSTHHLPFGRVFIRRNLFMVYVISQDGKPLMPCSDPIARLLLKQGKAKVKKREPFTIKLTYETTNHTQGLTLGVDTGSGTIGTAVSKDNGDIVYMSEVVVRNDITDKMTQRAKYRRNRRNRKTRYRKARWLNRASSIKKDRFSPTMQSKLHSHVREIEYIQSILPVTEMVFETGQFDMQLMKNPSLANPKVRPWGYQKGANYGFENTKAMVLNRDNYTCQCCKGKHKDSKLEVHHIVFRSQGGSDEESNLLTLCHTCHKDLHSGKINPKLSGKVKGNLKYATQMNSIRKQLFRFYPNAIETFGYVTKVNRLHLGVAKEHYYDACTIATQGNAFNVKSNLYKKKCVSDGDFQKTKGIRSEQPIVTDKICGFRKFDKVRYFGNDYFIKGRMSTGYAILMDIDGNKIDFSTMPRGYKTPKLSNCKRITARSTVMTQVKVV

SEQ ID NO: 6629 - protein, 419 aa, unidentified; identical to SEQ ID NO: 4877
  REGION 1..419: note = Human gut metagenome

SEQ ID NO: 6630 - protein, 443 aa, Chromatium sp.
MAVFVLDKRQQPLMPCSEKKARLLLSRGRAVVARLVPFTIRLKDRVGGAVQPVRIKLDPGSKTTGLALVRETEAIDPETGNTTRRAAVLWLGELTHRGQQISEALTARRQMRRRRRSANLRHREPRFHNRTKPVGWLAPSLRHRVETTQNWVKRLRDLAPVTAISLELVRFDMQQMQNPEISGVEYQRGTLAGYEVREYLLEKWQRQCVYCGAKNVPLQIEHIQPRASGGSNRISNLALACASCNQKKGSQPIAEFLNKKPEVLRRIQAQAKKPLRDAAAVNSTRWALFNALNAIGIPVETGSGGLTQFNRSRLNIPKTHALDAACVGKIDTLTGWQCPILAIKATGRGLYQRAQLDCFGFPRSHRTRRKRIYGFQTGDRVIARVLKGKNAGVHIGRVAIRATGRFNLQTAERLIQSISHRCCTVIQRADGYSYTHQKTLLRR

SEQ ID NO: 6631 - protein, 425 aa, unidentified
  REGION 1..425: note = bioreactor sludge metagenome
MSNYVLVLDAEKRPLDPIHPGAARHLLNEGKAAVFRRFPFTIILKESRPDAPVQDLELKLDPGSKVTGIAIKQGNKVIFGAELQHRGQQIKDALLSRRQLRRGRRNRKTRYRQARFLNRTRPDGWLAPSLQHRVLTTLTWVRKFMRLAPITNITQELVRFDLQLMQNPEISGIQYQQGELQGYEVREYLLEKWNRKCAYCSVENVPLEVEHIQPRSKGGSDRVSNLTIACHACNQSKGNQDIRDFLAGKHDLLNRILKQAKSPLKDAAAVNSTRWALFNALKETGLPVATGTGGQTKFNRTRLGLPKTHWLDAACVGNVESLEILTSKPLIIAAKGHGTRQMCGTNKFGFPTRHKSRVQIHKGFQTGDIVRATVTAGKKIGSYVGRVLCRASGSFDIATTDGRVAGISHKYCKPIHKKDGYLYGF

SEQ ID NO: 6632 - protein, 414 aa, unidentified; identical to SEQ ID NO: 4779
  REGION 1..414: note = Human gut metagenome

SEQ ID NO: 6633 - protein, 399 aa, Moorena sp.
MRVFVLDKNRKPLDPCHPARARKLLKSGRAKVLRRYPFTIIIKDLEEENCSTHDHQLKIDPGAKTTGLALIQGNRVIWGAELTHRGFQIREALTSRRQLRRSRRNRKTRYRQPRFLNRKRPKGWLAPSLMSRVYNILTWVNKLIKFCPVTGISQELVRFDTQKMLNPEISGIEYQQGTLYGYELREYLLEKWNRTCAYCEANNTRLEIEHIKPKSKGGDHRVSNLAMACHNCNQAKGNLEIEEFLSSKPNVLKRIISQAKKPLADAAAVNATRWKLHDELKLIGLPVEVGSGGLTKYNRCRQNLPKTHWLDAANVGKVEALYIEDYQSLLIAAKGHGKRQICGTNKYGFPIRHNSRKKIHKGFQTGDIVKAVVTKGKKIGTYVGRIATRKTGSFDITTL

SEQ ID NO: 6634 - protein, 480 aa, unidentified
  REGION 1..480: note = Human gut metagenome
LYTKPLDNIGEGSLLPSGEINLKGMTFMVYVKSIDGKALMPTSNAKARKLLKQKKAKVVSLRPFVVKLTYKTKTEYTQKLNLGVDSGYSNIGFSVIDAKQEYIAGEVKLLEGMKKRLLEKASYRRIRRSRLRYRKARWNNRVKSKKKGWLAPSLKHKLDTHIKFIDYLKNILPIGKITIEVANFDIQKMKDDLISGVDYQNGDMFSFWNVREFVLHRDGHKCQNPNCKHKDKKEQILKVHHIRYRSEGGSDRPENLITLCSKCHTPANHKKGKFLYDWCVNGKKVRGFKDATFMSMIRWYLVNDLKSKHNNVSITYGYITKNHRIQNGIEKSHLNDAFAIAKGTNQARTKDRFLVIQDRLKNRSLEKFYDSKIIDIRTGKKVSGRDLSCGRSTRNKNLNTENLRKYRGAKISKGQRRIRKQKYFYQPNDLVKYDGKVYTVKGTQNEGKYIALKEIKKVPKVELLIPYVFKKGLNWSYGLC

SEQ ID NO: 6635 - protein, 335 aa, unidentified
  REGION 1..335: note = Human gut metagenome
LISTRRQNRRSRRNRKIRYRKARFQNRVSGKKNWLTPSIRQKVDTHMTVVSRVCKILPVTKIIVETASFDIQKIKDPDISGTGYQHGEQLDFWNVREYVLSRDGHTCQCCKGKSKDPVLNVHHIESRKTGGDAPNNLITLCETCHKGYHSGAVQLPKAIHRGMRFKDAAFMGVMRWNFYNKLKEIYELQGIEIRMTFGYLTKNTRIRHHLPKEHYIDARCISGHPEAISSNVVFYQKKIRYHNRQIHKNTILKGGIRKRNQAGYLVKGFRLFDKVAYEGREYFIFGRRQSGFFDLRNLSGCKVNKGSLSYRKIGFLEPRQYYLCERRVMDTQGCA

SEQ ID NO: 6636 - protein, 432 aa, Moorena sp.
MEGLMSKIFLIDTAKKPLNPIHPAQARQMLRNGKAAIFRRFPFTLILKTAQPETLVDKLRIKIDPGAKTTGLALINDLSGEVIFAAELQNRGFEIRDALKSRSQIRRSRRSRKTRYRARRYKNRSRKEGWLAPSLQSRVDNILTWVSRLRKFAEISAISQELVKFDTQKMQDPEITGKEYQQGTLAGYETREYLLEKWGRKCAYCDTENVPLQVEHIYPQAKGGSNRISNLTLSCEKCNVKKGTKDIKDFLKKHPQRLDAILKQVKKPLADTAAVNTTKYALLKSLEATGLPVETGSGGLTKFNRTQQGLKKTHWIDAACVGQSTPRLIAKNIKPLLIKAEGNGNRKLCITDKFGFPKKHRPRKKLHFGFRTGDIAKAVVTKGKNVGTYIGRVAIRSNGSFDISIKDRHKKQGVSYKYCQTVHRKDGYSYLF

SEQ ID NO: 6637 - protein, 431 aa, unidentified
  REGION 1..431: note = Viral metagenome
MVFVLDKHKKPLMPCTEKRARLLLTRKRAVVHKMFPFTIRLKDRTVAQSVLQPLHLKFDPGSKTTGMAVLRGNESDPTEAEAILLGEIRHKPGIKHKLDKRRTVRRSRRARKTRYRKPRFLNRKREKGWLPPSLDARVAQTMSAVNKLLKLLPITSISTEHIKFDTQLIQNPNISGVEYQQGTLAGYEVREYLLEKWARKCAYCQATNVPLQIEHIQPKSRGGTDRISNLTLACHTCNQKKGTRTAAEFGFAGVQDQAKKPLKDAAMLNATRWELYTRLKETGLPVECGTGARTKMRRIRAGFPKSHYYDACCVGAGTPGALVIAQKYISVWTAVGRGSRKLCKTDKHGFPISHRSGKKNHFEFQTGDIVTATVPRGKYMGRHTGRVAARANGSFDIKDSAGKRIAQSVLHKHCRLLQRNSGWHYEKVKAA

SEQ ID NO: 6638 - protein, 414 aa, unidentified
  REGION 1..414: note = Human gut metagenome
MPCSPAKARLLLKEKKAIVVRRTPFTIQLTIATGESKQPVSLGVDAGYKHVGLSASTEKAELYASEIELRQDITDLLSARRALRQSRRNRKTRYRAPRFDNRIRTKRKGWLAPSVENRINAHLSRIEAVLRLLPVTKITVETASFDLQLLKNPDISGKEYQEGEQLGFWNVREYVLFRDGHVCQHCHGRSKDPVLNVHHLESRRTGGDSPGNLITLCETCHKALHRGEIKLRAKRGQSFRAETFMGIMRWEVLNRLKASHSKLEVNNTYGYLTKHARIKSGITKSHCSDAFCIAGNLGAKRLGEFLFQKQTRRNNRQIHKLSILKGGIRKRNQAPFEIKGFRLFDKVACKGEEGFIFGRRSSGSFDVRRLDGTRISAGISYKKLRLLEKRQTYLTEIRKEEALPSLREGRGLRA

SEQ ID NO: 6639 - protein, 442 aa, Lactobacillus sp.; identical to SEQ ID NO: 3226

SEQ ID NO: 6640 - protein, 473 aa, Aneurinibacillus sp.
MFSMVYVLNHNGEPLMPTKRFGKVRRMLKNKQATVVRRRPFTIQLTYETTNYVQPVTLGVDAGYQTVGFSAVSENEELLSGECRLLTGMSERLKERAMYRRQRRGKLRYRAPRFDNRRRPEGWLAPSIQHKLDSHVRLVELLKKLLPVQKVIVEVANFDIQAIQNPEIAGTLYQEGEQLGFWNLREYILHRDHHQCQHPNCKNKSVNPILQVHHVGYWKGDRSDRPGNLVTLCNQCHIPANHQPKGFLYGWEPKVKSFRPETFMSIVRWRLTQLLGRTATYGYVTKHVRIQHGIEKSHANDAFVIAGGTTQPRTAPFVLQQVRRNNRSLEKFYDAKYVDIRTGAKASGQELFCGRRTRNREVARENLRQYRGVKLSKGRRSIRRMRYPLQPMDTVRFDGKDYLVSGTNNKGKTVVLKGCARVPSVKKVQGVKYGKGFCWLAGEDRRVSGFPFPSEERGIQPGLFMNNQMRRLG

SEQ ID NO: 6641 - protein, 426 aa, Lactobacillus sp.; identical to SEQ ID NO: 3294

SEQ ID NO: 6642 - protein, 443 aa, unidentified
  REGION 1..443: note = Ga0373625_0000996
MLELKNTPTDVQLLQVCSSVSSVLNKVERPSVQDKVLDIINPEGVHSQHTERSLKPLVYVLSKEGNPLMPCTQAKANRMVKKGSCKIIKRFPFTIQLNFECENKTQEVTLGIDSGYENIGFSAVSETKELISGTVKLDGRTSKRIQEKSMYRKLRRNRLWYREPRFLNRTKPEGWLPPSIQRRYDTHLNIINRLKKILPISQVIVEVANFDIQKIMNPDIQGKEYQQGSLYGYQNMRNYLMAREKGRCQLCKKIFEKGQPSHIHHCKPRKEIGSNRPENLAILHKPCHEKLHKQGLKLSKPKSYKPNTFMSIIHKRFWNDIPDLKVVYGYETFIKRNELNLGKFHRNDAFVIANGTIQKRFRSWNVKQKHRHNRAIQMNRKGFKPSIRTSRYKIQPNDLVKIQGLWKETSGIHCKGTRLLVDKKSINIKRVASIYNFGGLSWN

SEQ ID NO: 6643 - protein, 346 aa, Arthrospira sp.
MPNYQNYVFVVDTLGQPLSPTHPARARKLLKQGLAAVFRTYPFTIILKKTVENPVNEPSRIKLDPGASVTGIALVNQSRDTVIWGAELAHRGDRIRAKLAARRLVRRHRRCRKTRYRQARFNNRKRPDGWLAPSLKHRVETTLTWVNRLISSCPITDISMELVRFDTQKLLNPEISGVEYQQGVLFGYELREYLLTKWQHQCAYCGGQNIPLEIEHIQPKSKGGSDRVSNLAIACHKCHQKKGSQPVEQFLLPKPEILKRCSVQAQAPLKNAAAVNSTRWALFNGLKLTGLPIEIGTGGLTKYNRTVQGLPKTHWLDAADCVGKSTHPPVDNQNSPAITNYLFWAR

SEQ ID NO: 6644 - protein, 509 aa, unidentified
  REGION 1..509: note = Human gut metagenome
MVLTYVLSVDGKPLMPTTRCNRVAWLLKHSMAKVVSKNPFTIRLAYDTPDVTQSLILGIDPGRTNIGLTVIRETGESVYTAHLETRNKKIPKLMKARKQFRTERRTLKRRRKRQCRAIASNTVSPKCVKTSNSQSSNESKKGMKQGVLERLLPGCDTPILCIGIKNKEARFNNRIRKTGWLTPTANHLLQTHLNAMNKICKILPVTKTVLEINKFAFMQLDNPCVKKWQYQRGQLFGYGSVEEVVYEQQNSHCLFCDKAIDHYHHVVPRSKRGSETLANRVGLCAEHHTLVHNDEKWNTKLIDKKQGMNKQYHALSVLNQIIPALSNALVKLFPDRFYATSGKSTYTFREAYGINKDHHIDAYCIAASILPDVNVKLSQTVYEIKQFRRHDRQVCHKANLNRRYALNGKVVATNRHKAMNQKTDSLEEYTTNGGKTENLTVIEHKAQYKRLDRIMPGAIFELDNKRKVMFKTDGFHNNQSDYVCFIDGSKIGYSKCNKPVTLNSGLVYC

SEQ ID NO: 6645 - protein, 444 aa, Trichococcus sp.
MVFVLSKQKQPMDNCTPAKARILLRDGSATIHKQYPFTIRLKDNAAHTADKTYQIKLDPGAKITGVALVDSEAHAVFFAELEHRGERIVALLQTRYRKPKWGNSFKKKDSKFNADTRRPEGWLPPSVVSIEQDIVHFVKKMRNLCMIQLAAVESVKFDMQKMENASITDVVYQQGTLMGYEIRHYLLEKKGHACQYCGGLSQDKHLEVEHMHPKSRGGSDRLSNLNVACHTCNQDKDNRTLAEYVERLKSSKTKLDQTRIKRIEQILRTNKTFIGLRYAAWANSMRHHLVADLEKLLPHISQGTGGQTQYNRTTGMGLPKEHYYDALCVGRIPSSGYRLVTDKVLCIKSYGRGSRFRGRTNSCGIITKQLTRQKQFFSFQTGDVVRATVPNGKKKGIHLGRVAVRKSGYFNIQSTGLVVQGVSYKHCRIIQRNDGYGYTLKQRS

SEQ ID NO: 6646 - protein, 512 aa, unidentified
  REGION 1..512: note = Human gut metagenome
MSTVYVLNKDGKPLMPTTRGGHVRHLLKEQKARVVRTNPFTIQLLYETDNLVQPLYLGIDPGRTNIGVAVVKTDGTAAFTAHLETRNKEIPKLMQGRKKARRARRTNGRRCRRQRRAKANGTISKKCVKQATAQNGSVSKRANEIGVIKRHLPGCEKEVLCIGIKNKEAKFSNRTRPEGWLTPTANQLLQTHINLVKKIQKFLPISDVVLEINKFAFMQLDNPNIQKWQYQQGPLYQKANLEEAVSEMQEHHCLFCKKPIAHYHHVVPQSENGSNTIGNIVGLCTKHHDLVHKDTTWQKKLTKKKTGLNKKYGALSVLNQIIPALMKELSSLFPKRFFATNGKSTYDYRAAHGVSKDHWLDAYCIAGSVLPNDACDNNINNRVPYELKQFRRHDRRALHKENMSRVYTLNGKSVATNRHKAIKQTTDSLEEFRQRQPNDVCKLKVKEHHPEYRNPKRNFPGCVFLVGKHTHVMQGTSGSHNGKADGYYDTNGNSYSSGKCKFVVKNEGIVFT

SEQ ID NO: 6647 - protein, 414 aa, unidentified; identical to SEQ ID NO: 2588
  REGION 1..414: note = Human gut metagenome

SEQ ID NO: 6648 - protein, 414 aa, unidentified; identical to SEQ ID NO: 2588
  REGION 1..414: note = Human gut metagenome

SEQ ID NO: 6649 - protein, 445 aa, unidentified
  REGION 1..445: note = Human gut metagenome
MSVAVVSKTGMLLMPTSEYRARKLLKSKKAIIHGYHPFTIQLTERETGYIQPVELCMDTGYIHIGTSVKSEKHEYLGEQIDTLTDERQKHDACRMYRRQRRNRKRYRQPRFNNRERDDGWIAPSLEHKKTIHIQAISRICKVIPVTDITLEMGNFDTQVLKAREEGRPLPQGLDYQHGERYSVTTLREAVFLRDGYTCQCCGRTIKDGAILHAHHVVYRSQGGTNRISNLITVCDKCHTPANHKPGGKLYGWKPKVASFKGATYMTTIRWKLYNEVKALFLDIDIHITYGAETKERRRAFDITKSHVNDAFVMGQFHPKHRSKPVCYKKKRRNNRCLEKFYDAKYIDNRNGKTRTGQELFNGRISRNHKKDSENLHQYRRQKISAGKRTIRKQHYAIQPHDIVIFNGEKFETSGCHNNGTRVILLPQKKSVAIKKLNIYRYAGGY

SEQ ID NO: 6650 - protein, 453 aa, Moorena sp.; identical to SEQ ID NO: 4050

SEQ ID NO: 6651 - protein, 414 aa, unidentified; identical to SEQ ID NO: 2588
  REGION 1..414: note = Human gut metagenome

SEQ ID NO: 6652 - protein, 533 aa, Brachybacterium sp.
VLPQRPALESTSADNPGAGTKRGVEPGTIQDTGVHRGRGETAAPSAASPGKGSFPPPDGGSDPVTHEQPASEGGTSDAPRRAEARVLVLDRRGKPLMPTTPRRARQLLRSGRARVHRVQPFVLRIVDRRVEDSETEPLVLGIDPGFRHTGVALAREQEVPDPRSGRATTIRHGLFLLRVDHRGAVIRDRLSARSALRRGRRSRKLRYRAPRFDNRARAAGWLAPSIRHRAETTVTWARRLAAWAPVTRIDLEVPRFDARALHRADAAVGDRGQGTLHGTEVREYVLERDGRTCVYCGASGLGAASVPLTLDHVRARAHGGPDAPANLVAACVPCNRDKGDREVEEYLARRPAVLARVRRSLASVVQQDLSVSVSRSALCRALQSVGPEVRTHSGGRTKWNRSRAGLPWDHVTDALCVGRVDAIASLPALQHVAVSMGRGSYSRTRMDRYGFPRLRLTRRKMHHGLITGDLVRAVVPSGRRAGTHVGRVAVRASGSCNITTARSTVQHIGHRHITVLQRGDGYRHLRAPVALAA

SEQ ID NO: 6653 - protein, 296 aa, unidentified
  REGION 1..296: note = Human gut metagenome
INAHLSRIEAVLRLLPVTKITVETASFDMQLLKNPDISGKEYQEGEQLGFWNIREYVLCRDGHVCQHCYGRSKDPVLNVHHLESRRTGGDSPGNLITLCETCHKALHRGEITLKAKRGQSFRAEAFMGIMRWEVQNRLKASHPELEVNNTYGYRTKHARIANDIAKSHCADAFCIAGNLGAERLGEFFFQKQTRRNNRQIHKLSILKGGIRKRNQAPFEVNGFRLFDKVACKGEEGFIFGRRSSGFFDVRKLDGTCISAGISYKKLHLLEKRRTYLTEIRKEEVLPPLPEGRGLRA

SEQ ID NO: 6654 - protein, 515 aa, unidentified
  REGION 1..515: note = Human gut metagenome
MTALEERLSKTEYIYVLGFDGKPQMPTRRKRHVLKLLKTGRARIAEDIPFTIRLTYRNAPVLQPVTLAEDPGRTNIGAAVLSPLGDLLFAAVIETRNKEIKKLMADRQKSRQASRRGERKARQRLAKRYGSMVKSGMVMRKLPMYAADKFVICKFIRNTQARFCNRKRCPDWITPTVQHLVQTHLNIIRKISRYLPVTDIAFEVNRFAFMHMENPEAMGVDFQNGPLKGYGDVKEAIRTQQHGKCLMCKKPISHFHHIVPRSRGGSDTIQNLAGLCPECHTKVHTDTAFRKDFDEKKSGQLKKYGVLSALNQAVPFICKKLLEEYGEEHVHFCRGLDTSLIRTALGFEKTKKNQMHEVDAYCIGLAALEVNEVETPAFDHTFQIRQFRRQDRSIIHHQTGRSYYQGKEKVAQNRKPGFEQKTTALSQWYEEQVRIHGEKEAEKLRSQLRVEKSCRHYNDMDRFLPGAVFLYEGKRYVLSGRITNGKYLRACGQGMKNFPAAECTFIRHNAGLVFI

SEQ ID NO: 6655 - protein, 424 aa, Ruminococcus sp.; identical to SEQ ID NO: 2430

SEQ ID NO: 6656 - protein, 436 aa, unidentified
  REGION 1..436: note = Mouse gut metagenome
MPCHPARARELLKKGRARVHKVFPFTIRLTDRELENSSVQPMLIKIDPGSKETGIALVREEKNKEHHALYFINLQHRGQQIRNALYKRRCLRRSRRSRNLRYRSPRFLNRRRAEGWLAPSLQHRADSILSWVSRLRKITPVERISQELVKFDTQLTQNSKIEGIEYQQGELAGYELREYLLEKFGRKCIYCGADNVPLNIDHVIPKSKGGSNRVSNLVLACVQCNQKKGSRSIEEFLKDKPEVLRQIKNQLKQPLKDAASVNATRWKLFNKLKSTGFPFEVGSGALTKFNRKKFGIPKAHWLDALCVGNVPSVTNWRNLNVLNIKCCGRGAYQRTRTDKYGFPRGICMRQKKVYGFSTGDMVKAIIPKGKKKGVYVGKVAVRKTGSFNLQTSGQTIQGISYRYCRLITHSDGYSYSWKSGPLPPRVETRGILGEVR

SEQ ID NO: 6657 - protein, 407 aa, unidentified
  REGION 1..407: note = Human gut metagenome
MPCSPAKARLLLKEKKAIVKRRTPFTIQLTIATGEAKQPVTLGVDSGYKHIGLSATTEKAELYASQVELRQDITDLLSARLALRRSRRSRKTRYRAPRFNNRVASKRKGWLAPSVENRITAHMSRVEAVMRVLPVTAITVETAAFDTQLLKNPDIAGEAYQQGEQLGFWNVREYALFRDGHVCQHCRGKYKDPILNVHHIESRRTGGDAPNNLITLCETCHKAFHRGEIELKVRRGKSFKAEAFMGIMRWTLFERLKKAHPELSVRNTYGYLTKHTRISHGIAKSHCADAYCIADNLGAKRLNGFFFQKQTRKHNRQIHKLSILKGGLRKKNQAPYEVKGFRLFDKVICKGEEAFIFGRRTSGSFDVRRLDGTRISAGISYKKLRLLEPRTTYLTEFRKEAALPPPA

SEQ ID NO: 6658 - protein, 442 aa, unidentified; identical to SEQ ID NO: 2903
  REGION 1..442: note = Human gut metagenome

SEQ ID NO: 6659 - protein, 414 aa, unidentified
  REGION 1..414: note = Human gut metagenome
MPCSPAKARLLLKEKKAIVKRRTPFTIQLTIATGESKQPVTLGVDAGYKHVGLSASTEKAELYASEVELRQDVSDLLSARRALRQSRRNRKTRHRAPRFNNRLRTKRKGWLAPSVENRINAHLSRIEAVLRLLPVTKISVETASFDMQLLKNPDIAGKEYPEGEQLGFWNVREYVLFRDRHVCQHCYGRSKDPVLNVHHLESRRTGGDSPGNLITLCETCHKALHRGDITLKAKRGKSFRAEAFMGIMRWEVHNRLRALHPGIEVSNTYGYRTKHARIANGIAKSHCADAFCIAGNLGAERLCEFFFQKQTRRNHRQIHKLSILKGGIRKRNQAPFEVKGFRLFDKVACQGEEGFIFGRRSSGFFDVRKLDGTRISAGISCKKLHLLEKRRTYLTEIRKEEALPPLPEGRGLRA

SEQ ID NO: 6660 - protein, 451 aa, Moorena sp.; identical to SEQ ID NO: 3199

SEQ ID NO: 6661 - protein, 394 aa, unidentified
  REGION 1..394: note = Human gut metagenome
LQFYRKEHGIMQYVYVLNRHGEPLMPCSPGKARLLLKQQKACVVKRTPFTIKLLYGSAGYKQPITLGVDAGSKHVGLSASTEKRELYREEFTPRNDVAELLSTRKQNRRSRRCRKTRYRAPRFDNRVHSKHKGWLAPSVEVKIQEHITIIKRICKILPISLVRVETAEFDTQRLKAMLAGKPLPVGTDYQLGEMYDEYNVRQYVLKRDHYTCQCCGAHNTAKKVVKLHVHHLESRKTGGNAPSNLITLCTTCHKNLHKGKVTLDGKERGKPLRDAAFMGIMRKTLMARLKEELPILVQGTYGYITKMRREQNDIKKSHTNDARCISKHPLAEPCSVCYRTKAIRHHNRQTHKANFSKKGIRKRSQMPYLVEGFRLWDKVLYKGQECFVSGRRSS

SEQ ID NO: 6662 - protein, 529 aa, unidentified
  REGION 1..529: note = Human gut metagenome
MSTVYVLNKDGKPLMPTTRGGHVRHLLKEQKARVVRTKPFTIQLLYETNDVVQPLYLGIDPGRTNIGVAVVKTDGTAVFTAHLETRNKEIPKLMKKRKESRRARRTNGRRCRRQRRAKANDTISKKCVKQPTAQNGSISKRAKEIGIIKRRLPGCEKDVLCIGIKNKEARFNNRTRPEGWLTPTANQLLQTHINLVKKIQKFLPISDVVLEVNKFAFMQLDNPNIQKWQYQQGPLYKKESLERAVSEMQEHHCLFCDKPIDHYHHVVPQSENGSNTIANIVGLCAEHHNLVHKDAAWQKKLAEEKVGLNKKYGALSVLNQIIPALTKELSFLFPEHSFVTNGKSTYDYRATHGVSKDHWLDAYCIACSVLPSDVCDSNINNHMPYELKQFRRHDRRVLHKANTSRVYTLNGKKVATNRHKAAKQTADSLEEFRQSHPDDICKLKVKEHHPAYRNLNRNYPGSVFFVGKQVHVMQGIASSKDGKATKYNDTSATTIAAGKCEFVAKNSGILFVQCKFRKVFSDETTKKLQ

SEQ ID NO: 6663 - protein, 423 aa, Moorena sp.
MRVFVLNKNRQPLDPCRPARARILLSTSKAKVYRRYPFTIILTEEIKQPVTHGSQLKIDPGAKTSGLAIVQGKRVIWGAELTHRGFQIRDALTSRKQLRRSRRNRKTRYRKPRFLNRTKPKGWLAPSLISRVQNILTWVKKLTRLCPVAGISQELVRFDTQKLQNPEISGIEYQQGTLYGYELREYLLEKWSRKCVYCGATGVQLEIEHIKPKSRGGSDRVSNLAIACHPCNQAKSNQDIELFLSLKPSILRRILSQAKRPLADAASVNTTRWKLYHDLKSIGLPVEVGSGGLTKFNRCRQNLPKTHWLDAANVGKVETLILEVTLPLIITAKGHGTRQICRTNKYGFPTRHCSRIKFHKGFQTGDIVRAVVTKGKKIGTYIGRVATRKSGSFNVSAKSGLVQGISHKYCQFIHRKDGYAYTN

SEQ ID NO: 6664 - protein, 431 aa, unidentified; identical to SEQ ID NO: 4306
  REGION 1..431: note = Human gut metagenome

SEQ ID NO: 6665 - protein, 436 aa, unidentified
  REGION 1..436: note = metagenome
MFRLTVSNIPNQEKGMLCQMVYVLNINGQPLMPTARHGKVRRLLRDKKAKVIKRCPFTIQLLYETLNVTQDITLGVDAGSKHIGLSAATDNKELYAAEVELRNEIVDLLSTRRENRRTRRNRKTRYRKPRFDNRECGDGWLAPSVQNKVDTHLTVIRRVHEILPITKIIVEVAAFDIQKIKNPEIEGVEYQQGEQLGFWNVREYVLFRDGHTCQCCKGKSKDKILNVHHIESRKIGGDAPNNLITLCETCHKDYHEGTVQLPKTIKRGMAFRDATFMGIMRWAFYNQLKGMYPDVSLTYGYFTKNTRIRNGLPKTHFVDARCISGHPLAEPLEYYFYQKKVRCHNRQIHKNAILKSGCRKRNQAPYLVKGFRLFDKVAYNNQECFIYGRRNSGYFDLRKLDGTKVHASASYKKLKLLEPRKTMLCERRMRQFLATV

SEQ ID NO: 6666 - protein, 423 aa, Thermosipho sp.
MVYVISKHGKTLMPTKRHGKVRRLLKQGLAKVVRRGPFTIQLLYDTTTYTQPLTVGIDIGSKTVGISAITEKQELLSMEVELRQDIKRLLLERREYRRNRRYRKRRYRKPRFLNRRRYEGWLAPSVQWKVDAHIRLVNLIAKILPVTKIVIEIAPFDTHKIVNPDVEGIQYQEGPQKSFSDVREYCLWRAGYKSELSGKKGILEVHHIIPRSKGGTDNPSNLIVLTAEEHKALHEGKIKIPRSKLEKVRILKDASHVSTIGWHIVNRLKQQYDVGITFGSITKSKRIEMGLEKTHRNDAFVIADGNKNINRTTKWYFGKFFRRQNRSIHKANPIKGGIRPSNTVKEVRGFRRFDKVRYKNQIGIIHGLRSSGYFDIRTLSGEKIHSSAKWSNLKLLEKAKTLMLESRNQLIPLHLNGVSCAGS

SEQ ID NO: 6667 - protein, 512 aa, unidentified
  REGION 1..512: note = Human metagenome
MSTVYVLNKDGKPLMPTTRCGHVRRLLKEQKAQVVTSKPFTIQLLYETDDVVQPLYLGIDPGRTNIGVAVVKIDGTAVFTAHLETRNKEIPKLMQGRKKARRARRTNGRRCRRQRRAKANGTISKKCVKQTTAQNGSVSKRAKKIGVIKRHLPGCEKEVLCIGIKNKEAKFSNRARPEGWLTPTANQLLQTHINLVKKIQKFLPISDVVLEINKFAFMRLDNPNVQKWQYQQGPLYQKASLEEAVSEMQEHHCLFCKNTIDHYHHVVPQHKNGSNTIGNIVGLCAKHHDLVHKDTSWQEKLAKKKTGLNKRYGALSVLNQIIPALTKELSSLFPKHFFATNGKSTYDYRAAHGVSKDHWLDAYCIAGSVLPNDACDNDINSHVPYELKQFRRHDRRALHKENMSRVYTLNGKSVATNRHKAIKQTTDSLEEFRQRQPNDVCKLKVKEHHPEYRNPKRNFPGCVFLVGKHTHVMQGTSGSHNGKADGYYDTNGNSYSSGKCKFVAKNKGIVFA

SEQ ID NO: 6668 - protein, 442 aa, unidentified; identical to SEQ ID NO: 4467
  REGION 1..442: note = Human gut metagenome

SEQ ID NO: 6669 - protein, 414 aa, unidentified
  REGION 1..414: note = Human gut metagenome
MPCSPAKARLLLKEKKAIVKRRTPFTIQLTIATGESKQPVTLGVDAGYKHVGLSASTEKAELYASEVELRQDVSDLLSARRALRQSRRNRKTRYRAPRFNNRLRTKRKGWLAPSVENRINAHLSRIEAVLRLLPVTKITVETASFDMQLLKNPDIAGKEYQEGEQLGFWNVREYVLFRDGHVCQHCHGRSKDPVLNVHHLESRRTGGDSPGNLITLCETCHKALHHGEITLKTKRGQSFRAEAFMGIMRWEVLNRLKVSHPELEVNNTYGYRTKHVRIANGIAKSHCADAFCIAGNLGAKRLGEFFFQKQTRRNNRQIHKLSILKHGLRKRNQAPFEIKGFRLFDKVACKGEEGFIFGRRSSGFFDVRKLDGTRISAGISCKKLHLLEKRRTYLTEIRKEEALPPLPEGRGLRA

SEQ ID NO: 6670 - protein, 422 aa, unidentified
  REGION 1..422: note = Human gut metagenome
LNKRGKPLMPCSPAKARLLLKEKKAIVVRRTPFTIQLTIATGESKQPVSLGVDAGYKHVGLSASIEKAELYASEVELRKDITDLLSARRALRQSRRNRKTRYRAPRFDNRIRTKRKGWLAPSVENRINAHLSRIEAVLRLLPITKITVETASFDMQRLKNPDISGKEYQEGEQLGFWNVREYVLFRDGHVCRHCHGRSKDPVLNVHHLESRRPGSDSPDNLITLCETCHKALHRGEITLKAKRGQSFRAQAFMGIMRREVLNRLKASYPELKVHETYGYLTKHARIANGIVKSHGADAFGIAGNLGAERLGEFFFQKQTRRNNRQIHKLSILKGGIRKRNQAPFEAKGFRLFDKVACQGEEGFIFGRRSSGSFDVRKLDGTRISAGISCKKLRLLEKRRTYLTEIRKEEALPPLPEGRGLRA

SEQ ID NO: 6671 - protein, 419 aa, unidentified
  REGION 1..419: note = Human gut metagenome
MVYVQDIDGKPLMPTTRHGKVRRLLKEKKAVVVNLCPFTIKLMYVTSDYKQEIVLGVDAGTKHVGLSATTKSKELYASEVILRNDIINLLSTRRELRKARRNRIRYRKPRFNNRIKSKRQGWIAPSVCQKIDSHIKVVSFIHSILPVSRLIIETSQFDTQKIKNPDILGKEYQQGEQLGFWNVREYILFRDGHKCQHCKGKSKNPILNIHHIESRKTGGDSPSNLITLCETCHKEYHKGNIKLKVKRGTSLRDAAAMGIMKWKLFDKLKSLYPNVSMTFGYITKHNRIKHRIEKSHVSDAFVISENFKAKRLGYHFKMKLTRRHNRQIHKMKMQKGGIKRMNQSPFRVFGFRLFDKVMFYGEKRFIYARRLSGSFKIKDIDGENEKNISYKKLKYIGHGLTSIEVDQSYGYKANTHNNE

SEQ ID NO: 6672 - protein, 266 aa, unidentified
  REGION 1..266: note = metagenome
MEEGRPLPVGTDYQLGEQYDFYNTRQYVLHRDEYTCQCWGTHDNNVKLHVHHIESRQTGGDAPNNLITLCEHCHKLLHAGKTIIPKGKKRGKSYRDATFMGIMRKTLLERLKKEIDVPVEGTYGYITKYWRERAGLEKSHIHGAVCISKYPYAKPLDIYYLTKTVRHHNRQIHKSNFSKGGIRKRNQAPYLVKGFRLFDKVLYQGKSYFIFGRRATGFFDIRTLNGAKVNKGSISYKKLRIQDTANAYLKEIKAIPHMNKFTCVLA

SEQ ID NO: 6673 - protein, 453 aa, Moorena sp.; identical to SEQ ID NO: 2687

SEQ ID NO: 6674 - protein, 414 aa, Moorena sp.; identical to SEQ ID NO: 3802

SEQ ID NO: 6675 - protein, 451 aa, Aphanothece sp.
MSNYVLVIDSNKQPLNPCHPSVARKLLKSKNAAIFRQYPFTIVLKKEILDVVIEPIEIKIDPGSQTTGIALVQGDKVIFGAELSHRGSTIKDSLESRRSLRRGRRSRKTRYRQARFLNRKKPSCWLAPSLQHRVDTTLTWIKKLIKFAPIVGISQELVRFDLQQLENPEISGVEYQQGELVGYEVREYLLNKWDRKCSYCSIENVPLQVEHIHPKAKGGTNRISNLCLACESCNLKKGTKDINVFLAKKPDVLKRILSQAKRPLKDAAAVNSTRWTLFNALKNTGLPITTGSGGKTKFNRTRLNLPKQHWIDAACVGIVDTLKVLTNKPLLIKATGHGTRQSCRTDKYGFPSRYVPRFKFIKGFQTGDIVKAVVTKGKKIGTYVGRVAVRSIGSFNISSPNGLIQGISYKNCTPYSQKRMVILMRHRPCPSFPLIANRSTDVARVSMRAER

SEQ ID NO: 6676 - protein, 451 aa, unidentified; identical to SEQ ID NO: 3061
  REGION 1..451: note = Human gut metagenome

SEQ ID NO: 6677 - protein, 414 aa, unidentified; identical to SEQ ID NO: 3297
  REGION 1..414: note = Human gut metagenome

SEQ ID NO: 6678 - protein, 412 aa, unidentified; identical to SEQ ID NO: 4932
  REGION 1..412: note = Human gut metagenome

SEQ ID NO: 6679 - protein, 348 aa, unidentified
  REGION 1..348: note = Human gut metagenome
GIDDGGLHVGVALVQKCQTRNKVVFKGAIEQRNDVKHLIDDRRGYRCYHRYHKRYRPARFNNRNSSKREGRIAPSILQKRQATTRVINQLNKWINITNYWLEDVAIDIRALTDGYKPYRWQYQKSNRLDENIRKAVILRDGCKCMECGKSNCRLEVHHIKPRRLKGSSTLDNLITLCTKCHQKTESVEELYMDRYFALLKSSDNKNLNYAQHVMIGKKWLREQLSNLGMLYLTNGGDTANKRIDWDIAKSHSNDAICITDLRPDTCEIKEWAIKPMRRQSKAKTDNVLGIKHRDLVEYTFRNGKTHRGYVTALYPEQNAINFQSPTKHCKKVNAKNVKYFGNILKFTG

SEQ ID NO: 6680 - protein, 420 aa, unidentified
  REGION 1..420: note = Human gut metagenome
MQYVYVLNKHGEPLMPCSPGKARLLLKQQKACVVKRTPFTIKLLYGSTGYKQPITLGVDAGSKHVGLSASTEKRELYREEFTPRNDVVDLLSTRRQNRRSRRNRKTRYRAPRFDNRVHSKHKGWLAPSVEVKIQEHITVIKRICRILPVTLVRVETAEFDTQRLKAMFTGKPLPVGTDYQLGEMYDEYNVRQYVLKRDNYTCQCCGAHTTAKKTVKLHVHHLESRKIGGNAPSNLITLCTTCHNALHKGKVFLDGKERGKTLRDAAFMGIMRNTLLERLRNELHISVQNTYGYITKLLREQNDIKKSHVNDARCISKHPLAEPCSVCYRTKAIRHHNRQTHKANFSKGGIRKRSQMPYVVEGYRLWDKVLYKGQECFVSGRRASGSFTLKKLDGTRISKGVTFKKLRLLEPATNYLIERM

SEQ ID NO: 6681 - protein, 470 aa, Blautia sp.; identical to SEQ ID NO: 2925

SEQ ID NO: 6682 - protein, 421 aa, unidentified
  REGION 1..421: note = Human gut metagenome
MRGQPLMPCSPAKARHLLKAGKAVVKRRTPFTIQLRIATGETKQNVTLGVDAGAKHVGLSATTKKEEVFASEVELRQDITGLLAARLSLRRDRRHRKTRYRAPRFLNRVRSKHKGWLAPSVENRIQAHMSRIDAVCRLLPVTKIVIETASFDIQKIKDPSVEGTDYQQGDQLGFWNVREYVLFRDGHVCQHCHGYSKDKILNVHHLESRQTGGDAPNNLITLCETCHKACHAGKIKLKVKRAQSFRAEAFMGIMRWTLLDRMRKAHSGLPVENTYGYLTKNTRITLGLPKTHCVDAYCIAGNLKAVRRGVCLHQRQVRKHNRQIHKCTVLSKTLKDGTKIGYRKLNQTPHLVKSFRLFDKVRCLGQTGFIFGRRSSGYFDVRRLDGVKLSSGISYRKLTLLEKRSTYLTELRKEDGASSPV

SEQ ID NO: 6683 - protein, 408 aa, unidentified
  REGION 1..408: note = Human gut metagenome
MNTCVCVLSNNGERLMPTFRLGKVRRLLKDGKAKIVKHHPFTIQLLYDSKTNKQPIEICEDVGYNYIGISVKSESHEYVSAQYDTLQDEKEHHDDCRKMRRARRNRLRYRKPRFDNRKRSEGWLAPSLEHKKQLNISLVERYVSVIPITHATVEVGSFDTMLLQAIQKGETKPEGADYQEGPRYNLATLREAVFYRDNYTCQVCGRKITDGAILHMHHMFYWKGRHGYKLDELVTACEKCHTPANHQKGGKLFGFGEDKEFADLSGAAFMNAVRWQIVNALHTTYSKEFVTITYGAMTKEKRIALQLEKSHNNDAYAMGDFHPVHRCGFRHYQKRRRNNRVLEKFYDATYIDARTGNKAKGKELFNGRISRNHKKDSENLHKYRSEKVSKGRRSIRKRRYAIQPYDTV

SEQ ID NO: 6684 - protein, 429 aa, Ktedonobacter sp.; identical to SEQ ID NO: 6420

SEQ ID NO: 6685 - protein, 517 aa, Nocardiopsis sp.
MATFRTGEQTHPGVLPQRRALEFGPADNPGIRDETGPEHRDAVPGTEHVRGETGPASPGGSGVTPDPAGVGEQGREAHTERSEPYVFVPDKNQNPLQPCAPARARKLLGKGRAVVHRRTPCTIRLRDRTVAESKVGGVQVGVDPGSQHTGIAVFTHRAGQRRGRYSIQLNHSDARIRKNMGQRAAYRRRRRSANLRYRPPRFSNRTRPRGWLTPSLRHRVDTTTSRVDRSARWAPVRAVHMERVAFDTHALSPGQPLEGIEYQQGTLHGYEVRGCLLAKFGRACVYCGAAKTPLNLDRVHPRSKGGSDRVSNLVLACVPCNQAKGHRPVAEFAPDRAARILSRAKAPLRDATAAQSTRWALWRTLQERTPPRVGSGGRTKWNRMCNQLPKTHTLDALVAGEADTVTETVGRVLVAGRTGRGSYARTRTDRYGFARLRLPRVKRFFTFATGDLVRAVVPAGKKAGSYTGRVAVRASGRFNITTARGTVQGIGHKHMRLLQRADGYGYTWKGEGVPSRP

SEQ ID NO: 6686 - protein, 375 aa, unidentified
  REGION 1..375: note = Human gut metagenome
VVRRTPFTIQLTIATGESKQPVSLGVDAGYKHVGLSASTEKAELYASEVELRKDITDLLSARRALRQSRRNRKTRYRAPRFDNRIRTKRKGWLAPSVENRINAHLSRIEAVLRLLPITKITVETASFDMQRLKNPDISGKEYQEGEQLGFWNVREYVLFRDGHVCRHCHGRSKDPVLNVHHLESRRTGSDSPDNLITLCETCHKALHRGEITLKAKRGQSFRAQAFMGIMRREVLNRLKASYPELKVHETYGYLTKHARIANGIVKSHGADAFCIAGNLGAESSANSSSRSRLAETTGRFTNFPSSKGAFESAIRHPLRPKASVFLIRLPAREKKASFSAVDHPGLLMYESSTAPAFQPASAARSCVCWRRDGPI

SEQ ID NO: 6687 - protein, 440 aa, unidentified
  REGION 1..440: note = Firmicutes bacterium
MQRVLVLDCNKNPLMPCHPARARQMLKDGKAAIYRRYPFIIILKERSGGETQPVALKLDPGSKITGIALVADFQKGKRVIWAAELQHRSERIRELLLVRRAVRRSRRNRKTRYRKPRFLNRRRPEGWLPPSLKSRVDNILTWVMRLREFSPVSSLSQELVRFDAQKLENPEISGIEYQRGTLFGYEVKEYLLEKFGRQCAYCRGRSGDPILEVEHVVPKNPKHGPKGTDRVSNLVIACETCNKAKDNNQPEEWLARLEASADPLDKERAENFPTVIEQLKQPLKDTAAVNATRWAIFQSLKSFGLPVEIGTGGRTKYNRVIQHYRKAHWIDAACVGKSGESVFLSSVHVPLYIKAVGRGSRQFCRMDRHGFPRTSPKRIKRVHGFQTGDIVRATIPLGKYAGIHIGRIAVRASGSFRVGSTDGVSWRCCKILHCSDGYEY

SEQ ID NO: 6688 - protein, 432 aa, Sharpea sp.
MSSARYWHEEKFSERKVSEMTNYAFVLDADNKQLAPTKEQKAWFLIRKKRATLVSKYPMVIQLKKKIQDKEICKDEIRCGIDDGGLHVGVALVQKCQTRNKVIFKGTIEQRNDVKHRMDVRRGFRRYYRYHKRYRPARFNNRKFSKRKERVAPSILQKRQATVRVISQLNKWINITSYWLEDVAIDIRALTDGYKPYQWQYQKSNRLDENIRKAVILRDGCRCMECGKSNCRLEVHHIKPRRLKGSNTLGNLITLCTECHQKTEDAEELYMNRYFALLNSSDNKNFDYAQHVMIGKKWLREQLSNLGMLHLTNGGDTANKRIDWGIAKSHSNDAICITDLQPDTCEIKEWVIKPMRRQSKAKTDNVLGIKHRDLVEYTFRNGETHRGYVTALYPEQNALNFQSPTKHCKKVNARKCKLLWKYSKIYWLDDVD

SEQ ID NO: 6689 - protein, 461 aa, Parasutterella sp.; identical to SEQ ID NO: 3646

SEQ ID NO: 6690 - protein, 473 aa, unidentified
  REGION 1..473: note = Human gut metagenome
MAVFVIGLTEKRLMPTTERKARILLKQKKAEVFCKNPFTIKLLYQTGGTTQHVTLGVDTGSQHLGFAVAGDNGNIIHEQEVSLRRSMEKRKLLVKCKESRRGRRYRKVRYRHPKWRHHTVRAYIQKGCRKKGAKRYWKKLKVQFSSPRPEGWLPPSLQSKTDHHIRWIHRFLDVLPKNTRMVLEVGRFDAARMKNPEVHGELYQRGPQYDYENVKAYVFDRDGYKCRCCHAKAGTRRKDGTVVKLIAHHIDYRSRGASDNPDALASVCDACHTAANHQPGGVLYDWMVKNKRFKRGQRDTAFMNILRRRLFEAFPDAEYTYGNITAARRKELMLPKSHADDAVAIACTGMDINSIRKRPDHVVYVQQVRKKKRSLHEANPRKWSKTKNRFAVRNSKNTKEVNGVCLFDKVEVIGKGYGWVTGFTGTSCYVLDKNGNYVTTADTYKQVAISRLKVIQHSGNWISGLKCPIGNGS

SEQ ID NO: 6691 - protein, 408 aa, unidentified; identical to SEQ ID NO: 3064
  REGION 1..408: note = Human gut metagenome

SEQ ID NO: 6692 - protein, 424 aa, unidentified
  REGION 1..424: note = Human gut metagenome
MRVFVFNMRGRPLMPCSQRKARLLLRENKAMIYKYHPFTIQLTYTTGETKQDCHIGIDTGSKYIGAAVRSEDKVFWKGEIELRQDIRSNLDTKRIYRRSRRNRKTRYRKPRFLNRKRRDEWLPPSLQSRINHTFHWIDTLSSLVPNPILHIEVGKFDVAKMINPEIHGVDYQHGQTYGFFDERYFVFARDNYTCQCCGKSKNKILNTHHIIYRSNGGTNRVDNLITVCTDCHTSQNHRKGGIFYQWQEQHKKVKQYKEPPFMNTLRKRIFVAYPDAEITYGSETTPKRKAMKLDKAHYNDAIVISGINEIKENPEEWLLIKQFRKKKRSLHEATARKGRKKPNRNQTRNSKNTPYYKGFYLNDKVSVFGKSGYITGFTSNAAYIKDENNDYITLPNKTYKQVSINKMKLECHNNNWQYIIKNAV

SEQ ID NO: 6693 - protein, 420 aa, unidentified
  REGION 1..420: note = Human gut metagenome
MQYAYVLNKRGEPLMPCSPGKARILLKQQKACVVKRTPFTIKLLHGSAGYKQPITLGVDAGSKHVGLSASTEKRELYSEEFTPRNDVVELLSTRRQNRRSRRNRKTRYRAPRFNNRVHSKHKGWLAPSVEVKIQEHITVIKRICRILPVTLVRVETAEFDTQRLKAMLAGKPLPVGTDYQLGEMYDEYNVRQYVLKRDNYTCQCCGAHTTAKKTVKLHVHHLESRKVGGNAPSNLITLCTTCHNNLHKGKITLDGKKRGKTLRDAAFMGIMRNTLLTRLRNELNIPVQNTYGYITKLLREQNDIKKSHVNDARCISKHPLAKPCSVCYRTKAIRHHNRQIHKAKILKGGIRKANQAPYIVKGFRLWDKVLYNEQECFISGRRSSGYFALRKFDGTTITNSISFKKLRLLEPATNYLIERK

SEQ ID NO: 6694 - protein, 424 aa, Moorena sp.
MRVFVLDKNKKPLDPCQPARARILLKQGKARVLKRYPFTIIMPELEVKNCVTHEHQLKIDPGAKTTGLAIVQDNKVVWGAELTHRGFQIRDALISRRRLRRSRRNRKTRYRQPRFLNRKRSVGWLAPSLMSRVHNILTWTKKLSRLCPIVGISQELVRFDTQKMENPEISGVEYQQGTLYGYELREYLLEKWNRQCAYCGAANTPLEIEHIKPLARGGSNRVCNLAIACHKCNQTKGVQEIEQFLSGKPSVLKRVLAQAKKPLANAAAVNSTRWKLYNHLKSTGLPIETGSGGLTKYNRCRQNLPKTHWLDAANVGKVDNLYIESYQPLLITAKGHGTRQMCRTNKFGFPTRYVPRYKEVKGFQTGDIVKAIVTKGKKIGTYTGRVATRQTGSFNISTKPGLVQGISHKYCSVIHRKDGYYYSF

SEQ ID NO: 6695 - protein, 459 aa, unidentified
  REGION 1..459: note = gut metagenome
MPTTRYGKVRRMLKSGQAVAARTKPFTIRLAAVREDGTCLYSAKCGTRNKQVPKLMAERAMHRRASRRGERLARKRLAKKLGTTTKFLNGRTLPGYGKPVMLKDIINTESRFNNRRRPEGWLTPTARQLLQTHLRLIEEVCRILPVTRVAVELNRFAFMAMDNPQVRRWQYQKGPLHGYHGIREALKEIQGGTCLLCGSRSIEHGHHIVPRSRGGSNTLVNIAGLCESCHTKVHNDEDAAARLEKTKAGQNKKYHALSVLNQIMPRLLKELDMKFPGQTFITSGRDTKAYRDGHGIAKDHDADAYCIACSTLEKQAILDVPKDGFHIKQFRRHDRALINNQRERIYKLDGLEVAQNRRKRMDQKGPSLHEWFLGMVKQHGRQIARRMQSQLVVSKSARRHNSPDRMLPGMVFLYEGKQYVMSGQLSGGAYLRACGAGNQNFPASRASILSRNAGLVYVA

SEQ ID NO: 6696 - protein, 485 aa, unidentified
  REGION 1..485: note = Ga0315285_10008303
VRRRSGESQRTDGGVHASSPALSKQVANKSQEVGTVRLHTADLEPREGAQTPCAARKSGREIAAETRHIAQPVFVVDEAGRILAPCHPARARELLGRGVAQAVETCPFAIRLLKSVPDPRVQGTDFKVDTGAAHHGFAVVEKESGRCLLWGQMDLRRDIKERLDWRRICRRNRRNRKTRYRKPRFDNRRRPEGWLPPSLEHRVACLTKFASRLAKFVKVDRIVAETAQFDMHRLMNPEVEGEGYQKGLLYKTDLRRYLFWKFKGKCAYCKKDLDKGWQADHVQPKSRGGSDRPFNRVAACEKCNQVKGNKTAEEFGHPEATDLATRAYAPAAIVTSIRTALVKALARLAPVRETDGALTARNRRKAKLEKSHAADALVALEAPTKITIPEKELRIVVRSCGSRQLVNGQRGEHKIRLNREIKGYRQWDLVEWRGRRCYVKGRRKTGSFLLSDLLGEKIGDGASAKRLHLIRRRTTLQGEYVSMCV

SEQ ID NO: 6697 - protein, 421 aa, unidentified
  REGION 1..421: note = Human gut metagenome
MLVYVLSKNGQPLMPTHRCGFVRRLLNSQKAKVVRRCPFTIQLQYDTDCKTQPVTLGIDAGSKHIGVSATTESKVLYEADIELRNDIVDLLATRRQMRRARRSRKTRYRKARFDNRKRNDKWLAPSIQHKVNCHLEAVRFVHKLLPISKIIVEVASFDIQKIKNPLITSTDYQNGELLDWKNVREYVLFRDSHICQCCKGKSKDPVLQVHHIESRKTGGNAPNNLITLCKTCHNGYHHGTVKLPAKIKRGMKFNDATFMGIMRWGFYNQLKSLYPDVSLTYGYITKDIRISNGLAKTHFIDARCISGNPLATSDNTVYFLKKRRRHNRQIHKFNILKGGRKKRNQAAYLVKGYRLFDKVNYNRKEYFIFGRRASGFFDIRTLSGEKVNKGSISCKKLKLLEASKGYLTERRNAFLSPLNSV

SEQ ID NO: 6698 - protein, 451 aa, Moorena sp.; identical to SEQ ID NO: 3199

SEQ ID NO: 6699 - protein, 431 aa, Escherichia sp.
MNRVFVLGKTGQALMPCHPARARQLLQSKKARVKRLYPFTIQLTQRSDGYIQPVELKFDPGSKQTGVGLVLHGKNRLSAIYASVLTHRGQEIKSNLDSRRMIRRARRNRKTRYRQERFLNRVRSKHKGWLAPSVHSRVDNIVEWSKRFMRLSHVDFITVESVKFDMQKMESAAVEGLEYQRGTLFDYEVKEYLLEKYHYSCVYCGIKNVPFEKEHVVPRSRGGSNRISNLVLSCRSCNEKKDNLPIEEFLKDNPALLKKIKAQLKSSLKDAAAVNITRKQIVKELSDLNVPVLTGIGAETKYNRVSQGYGKEHYIDALCAGTTGTKVYIPSKLKPLLIKKERRNNRQMCLVDKYGFPRGKAKGSKIVHGFKTGDIVKAVVLKGKKKGVYKGKVAVRSSGSFNINVKQGRIEGIGWKNCVMLHRFDGYSYTY

SEQ ID NO: 6700 - protein, 414 aa, unidentified
  REGION 1..414: note = Human gut metagenome
MVYVINKQGQALMPTERFGKVRRLLKNSLAHVVCRIPFTIQLDYDTTDYTQPVSLGVDAGSKHIGISATTSEKEMYAADVELRNDIVDKLSTRRELRRTRRSRLRYRKARFNNRVSSKRKGWLAPSVENKIQTHLTVVEKINKFLPITNIVVETASFNIQKINNPSIYGSEYQQGEQLDFFNVREYVLFRDNHTCQHCKGKNKDKVLNVHHIESRKTGGDSPKNLITLCETCHKAYHRGEFELNVKRGKSFRDSAFMGIMRWKLYDRLKNIYPNVSMTFGYITKNTRITNNLPKDHYVDARCISGNPTAKPLGYYFYQKKVRCQNRQIHKANFLKGGRKKLNQAPFLVKGFRLFDLVEYKKELYYIFGRRSNGSFDIRKLDGTKVNKGSINCKYLRLIDKRKSILTEKRTQVNL

SEQ ID NO: 6701 - protein, 420 aa, unidentified; identical to SEQ ID NO: 5988
  REGION 1..420: note = Human gut metagenome

SEQ ID NO: 6702 - protein, 477 aa, Caldanaerobius sp.; identical to SEQ ID NO: 4554

SEQ ID NO: 6703 - protein, 343 aa, unidentified
  REGION 1..343: note = Human gut metagenome
DRKGRHWKKKEITFASKRAKGWLPPSLQSKTDHHIWWIKKLQDLLPEGYRLSIELGRFDPARLKDPEIHGELYQKGPQYDYENVRAYVLNRDRYTCQVCGKKGGKLHVHHILYRSHGATDDPQYMATVCSDCHNTENHQQGGILYQWMQKQKKFTRGLRDATFMNILRKRLIEAFPGATFTYGNITKADRERLRLPKSHGNDATAIAIVKTGIMTVKDKEPVIYIQQVRRKKRSLHEETPRKGRKEPNRKASRYDKNTKAVTVTKRKNKKKITITGCLFDRVELNGKKGWISGFTDKSCYVKDENDQYIRTSPKYKQVSLSKLKILHHCGNWAIGARRSLGKG

SEQ ID NO: 6704 - protein, 358 aa, unidentified
  REGION 1..358: note = Human gut metagenome
CKKDVLCVGIKNKEAKYTNRARLEGWLTPTANQLLQTHINLVKKIQKFLPISDAVLEVNKFAFMRLDNPNIQKWQYQQGPLYQKGSLENAVSEMQEHHCLFCEKPIEHYHHVVPKSENGSNTIANIVGLCAEHHNLVHKDVAWQEKLVEEKTGLNKKYGALSVLNQIIPALTKELSFLFPKHSFMTNGKSTHDYRAAHGISKDHWLDAYCIACSVLPIDVCDSTINNCVPYELKQFRRHDRRALNNENMNRVYTLNDKVVATNRHKATEQEAASLEEFRKEHPNDVCKLKVKEHHPTYRNMNRNYPGSIFLVGKHVHIMQGIAGSKDGKATTYKDSNANSITASKCKFVAKNSGILFV

SEQ ID NO: 6705 - protein, 371 aa, unidentified
  REGION 1..371: note = Human gut metagenome
LQFYRKEHGIMQYVYVLNKHGEPLMPCSPGKARLLLKQQKACVVKRTPFTIKLLFGSAGYKQPITLGVDAGSKHVGLSASTEKRELYSEEFTPRSDVVELLSTRRQNRRSRRNRKTRYRVPRFDNRVHNKHKGWLAPSVEVKIQEHITVIKHICKILPISLVRVETAEFDTQRLKAMLAGKPLPVGTDYQLGEMYDEYNVRQYVLKRDHYTCQCCGTHNTAKKVVKLHVHHLESRKTGGNAPSNLVTLCTTCHKNLHKGRVTLDGKERGKPLRDAAFMGIMRKTLMVRLKEELPIPVQGTYGYITKMRREQNDIKKSHTNDARCISKHPLAEPCSVCYRTKAIRHHNRQTHKANFSKKGIRKRSQMPYLVE

SEQ ID NO: 6706 - protein, 456 aa, Halomonas sp.; identical to SEQ ID NO: 2773

SEQ ID NO: 6707 - protein, 474 aa, Halomonas sp.
LEDLRHQARKGSIEEGDRMAVFVLGKNKQPLMPCSEKRARLLLERGRAVVVNLTPFVIRLRDRCLSDCALQPTLLGIDPGSKETGLALMRLENNATEEKAPATRHVLCLFQLVHRGFQIRQALEQRAGFRSRRRSKNLRYRQPRFDNRTRKKGWLPPSLQHRVDTTMAWVDKLCRWAPVTHLSMELVRFDLQTMENPEISGVEYQQGTLFGYEVREYLLEKWGRECAYCGTSDTPLEIEHVVAKSRDGSSRVSNLTIACHECNQAKDNQWLVNFFAADKGLKKRLKANGLSATVRLERVQRQLKLPLRDATAVNATRWTLFGIMKATGLPVAVGSGGRTKYNRQRLGIPKTHALDAACVGKFDTLKGWRVPTLVIKAMGRGSYQRTRLDKYGFPRGYLMRQKQVQGFQTGDRVRAVVPSGKKAGTHTGRVAIRKTGSFNIQTEQGAVQGISWRHCTLLQRGDGYGYHPLPTIQH

SEQ ID NO: 6708 - protein, 470 aa, unidentified
  REGION 1..470: note = Human gut metagenome
MVGGVSQIFQKKEVSVLDTVAVISASGRKLMPTNSYRARRLLKSKRAVIYRYRPVFTIKLADRADGYTQPIEYKCDTGYQNIGISICSDTKEFVNEQRDLLKDEVKRHSNSRKYRRTRRNRLRYRKKRFDNRRGMISRDGFAPSIRNKRDVHVRLYEEYYKVFPITKAVFEMGQFDTQVLKAVEAGLPVPVGTDYQQGEQYGYATLREAVFARDSYTCICCGKSAIKDGVKLRIHHIGYLSGDRSNRMANLGSVCESCHTSKNHKPGGKLYNLKPELKTFKGAAFMTTVRYSMVKQLKAATPDVDIRVTYGAATKLARKALNVKKTHSNDAYCMGEFHPEHRSDFKHYRKCRRNNRVLSRFYDAKYRDLRDGSVKTGSQLSCGRTSRRISRRTELNERIYRGHKISKGKLVVRRQHYQYRPGDTVWAEGKRYTVKGIISNGTRIALNERNPVSVNKIDKTVHTGGWAKAS

SEQ ID NO: 6709 - protein, 457 aa, unidentified; identical to SEQ ID NO: 3236
  REGION 1..457: note = Human gut metagenome

SEQ ID NO: 6710 - protein, 434 aa, unidentified
  REGION 1..434: note = Human gut metagenome
VVLMDAWDIIVVLNKRGKPLMPCSPAKARLLLKEKKAIVKRRTPFTIQLTIATGESKQPVSLGVDAGYKHVGLSASTEKAELYASEVELRQDITDLLSARRALRQSRRNRKTRYRAPRFDNRIRTKRKGWLAPSVENRINAHLSRIETVIRLLPVTKISVETTSFDMQLLKNSDIAGKEYQEGEQLGFWNVREYVLFRDGHVCQHCHGRSKDPVLNVHHLESRRTGGDSPGNLITLCETCHKALHRGEITLKAKRGQSFRAETFMGIMRWEVLDRLKASHPKLEVQNTYGYRTKHARISNGIAKSHCADAFCIAGNLGAERLGEFFFQKQTRRNNRQIHKLSILKGGIRKRNQAPFEVNGFRLFDKVACKGEEGFIFGRRSSGYFDVRKLDGTHISAGISYKKLRLLEKRQTYLTEIRKEEALPPLPEGRGLRA

SEQ ID NO: 6711 - protein, 419 aa, Moorena sp.
MQNYVFVIDANKQPLNPIHPKKARRLLDKGKAAVFRMYPFTIILKTAIANPVILPCQIKIDPGSKTAGFALVRDGQVIWGMELEHRGGLIKKKLESRRAVRRGRRNRNTRYRKPRFLNRKRPEGWLPPSLEHRILTTETWVKRLIKFCPVREIWIERVKFDTQKMQNPEISGVEYQQGELVGYEVREYLLEKWGRECTYCGKQNVPLQVEHIHPISKGGSNRVSNLCLACEKCNQRKGNKPIEEFLKKKPSLLQKIKTKTKQPLTDAAAVNATRNKLVKVLKDSRVVVTGTGAQTKYNRTRLGLPKQHWIDAACVGNIESLALKTLQPLLVTCKGQGGRQKAALNKYGYPIRHNPLKPIKGWMTGDIAKHQKLGIGRVIPRSKGSFGFTPLGMKGYKSCFPQDISAIHRKDGYTYGFCK

SEQ ID NO: 6712 - protein, 415 aa, Homo sapiens
MIYVKNKDGKAIMPSERGGRIGYLLRHGKAHVVSRVPFVVQLDYDSTTYTQDVSLGIDAGSKHIGVSASSEKKEMLAAQVELRSDIVNLLSTRRELRRTRRNHKTRYRKSRFDNRKKKDGWLAPSVGQKIESHLKVIRLVHKLLPITKTTIEVAQFDAQKIKNPDINGEDYQQGEQMGFWNVREYVLARDGHKCVHCKGKSKDPILNVHHLESRKTGGNSPSNLVTLCETCHKAYHRGEFELKIKRGTSLRDAAVMNIMRWNVYKRVNAEFRNVHLTYGYVTKHTRIENGIAKTHAADAFCIAKNVHAMRLSSFFMCRCVPRHTRALHVANPKKGGIRRNTIASHKIGKSNFQRFDMVRWMGKECFIFGSTHGRPVLRDIDGIQVANQPSVNIKTIKFLKRLKNNILMEEKTSEI

SEQ ID NO: 6713 - protein, 274 aa, Moorena sp.; identical to SEQ ID NO: 3413

SEQ ID NO: 6714 - protein, 478 aa, Moorena sp.
MQKNKTVLVIGLNGCGLMPCTPRKARILLTEKKAKVVRRSPFTIRLLYKTGCSTQPTTLGVDTGSQHIGIAIVSDDTVLAKSEYELRSTMEKRKLMEIRKQYRRSRRYRKTRYRHPKFWFHTKRTYVEKPIKRNDHMTHWKKETVSCMSNRPAGWLPPSVQSKCDHHIRIISRYIEALPPSTRAVIEIGRFDMAHMLNPAAHGEEYQHGPQYEFENKKAYLLKLYDYKCPIYGKKFGSVRTDGITVKARLHHVLYRSKGSTNNANVLIPICNHCHTAEAHQGGGTLDKLRKIAEKQQLGIRGLRDATMMNVVAKHIQAAFPDAYYTYGNITKADRDEMCLEKSHANDAVAIAKHLDIRAFRNYTISDCGYTTLYKQVRKKKRSLHEANPRKGRKQPNRTAKRNAKNTKRVKNVCLLDKVVYQHNVGIVIGFSNSSCRAVKADGSYLGANVKYKQPVLPVGQVEVLHHNNNWMEMRLVI

SEQ ID NO: 6715 - protein, 431 aa, unidentified; identical to SEQ ID NO: 6117
  REGION 1..431: note = Human gut metagenome

SEQ ID NO: 6716 - protein, 424 aa, Tolypothrix sp.
MSNFVFVIDTDKKPCNPIHPVTARKLLSSKKAAVYRTYPFTIILKSVSTKETKPVQIKIDPGSKVTGLALVQDSKVVFGAELSHRGSAIKASLESRKSLRRGRRARHTKYRKPRFSNRARPKGWLAPSLQHRVETVLTWVKKFIKLSPVTGISQELVRFDLQQLENPEISGIEYQQGKLLGYEVREYLLNKWDRKCTYCGIENVALQVEHIHPKAKGGSNKISNLCLACDKCNKKKGTQDIKTFLSKKPELLKKILFSAKRPLKDAAAVNSTRWALFNALNTTCLPVSTGSGGKTKFNRTRLKLSKTHWLDAACVGNVESLEILTTKPLLIKTVGHGSRQSCRTDKYGFPNRYVPSNKIHFGFQTGDIVKAVVTTGKKVGCYVGKVAIRSSGSFNITAKNGLAQGISYKFCKRIHSKDGYSYGQ

SEQ ID NO: 6717 - protein, 428 aa, unidentified
  REGION 1..428: note = Human gut metagenome
LKVFVLNMRGRPLMPCSPAKARHLLKAGEAVVRRRTPFTIQLRIATGETKQSVTLGVDAGAKHVGLSAATEKEEVFASEVELRQDITGLLAARLSLRRERRQRKTRYRAPRFLNRVRSKHKGWLAPSVENRIQAHMSRIDAICGLLPVTKIVIETASFDIQKIKHPDVEGTDYQQGDQLGFWNVREYVLFRDGHVCQHCHGHAKDKILNVHHLESRQTGGDAPNNLITLCETCHKACHAGKIKLKVKRGQSFRAEAFMGIMRWTLLDRVRKAHPGLPVENTYGYLTKNTRIAMGLPKAHCVDAYCIAGNLKAVRRGVHLYQRPVRKHNRQIHKCTVLSKTLKDGTKIGYRKLNQTPHLVKNFRLFDKVRCLGQTGFIFGRRSSGYFDVRRLDGVKISSCISYRKLTLLEKRGTCLTELRKEDGASSTV

SEQ ID NO: 6718 - protein, 420 aa, unidentified
  REGION 1..420: note = Human gut metagenome
MQYVYVLNKHGEPLMPCSSGKARLLLKQQKACVVKRTPFTIKLLFGSTGYKQPITLGVDAGSKHVGLSASTEKRELYCEEFTPRNDVVDLLSTRKQNRRSRRNRKTRYRAPRFDNRVHSKHKGWLAPSVEVKIQEHITVIKRICRILPITLVRVETAEFDTQRLKAMLEGKPLPVGTDYQLGEMYDEYNVRQYVLKRDHYTCQCCGAHTTTKKTVKLHVHHLESRKVGGNAPSNLITLCTTCHDALHKGKVSLDGKERGKPLRDAAFMGIMRKTLMARLRDELSIPVQGTYGYITKMRREQNDIKKSHVNDARCISKHPLAEPCSVCYRTKAIRHHNRQIHKANFSKGGIRKRSQMPYVVEGYRLWDKVLYKGQECFVSGRRASGSFTLKKLDGTRISKGVTFKKLRLLEPATNYLIERM

SEQ ID NO: 6719 - protein, 314 aa, unidentified
  REGION 1..314: note = Human gut metagenome
LFRQGRLIVKEVTYMSTVYVLNKNGKPLMPTTRCGHVRRLLKEQKARAVASKPFTIQLLYETDDVVQPLYLGIDPGRTNIGVAVVKTDGTAVFTAHLETRNKEIPKLMKKRKDSRRARRTNGRRCRRQRRAKANGTLSKKCVKQTTAQNGSVSKRAKKIGVIKRHLPGCEKEALCIGIKNKEAKFNNRTRPEGWLTPTANQLLQTHINLVKKIQKFLPISDVVLEVNKFAFMRLDNPNIQKWQYQQGPLYQKASLEEAVSEMQEHHCLFCKNTIDHYHHVVPQHKNGSNTIDNIVGLCTKHHDLVHKETAWQEK

SEQ ID NO: 6720 - protein, 280 aa, unidentified
  REGION 1..280: note = Human gut metagenome
VKYKIDAHIRVIDNVCSILPIFRIVIEVAQFDTQKIKNPNISGKEYQEGDQLGFWNTREYVLARDGHKCQYCKGKSKDKILNVHHLESRKTGGDSPSNLITLCETCHKEYHKGNIDLKIKRGSSLRDAAVMGIMKWKLYEELRSRYDRVSMTFGYITKHNRIKYGIEKSHTSDAFVISKNINAKRIGCQYLKRLIRRHNRQIHKMKILKGGKKKNNQAPFEVFGFRLFDKVLYNNKICFVYGRRKSGSFNIRDFNGENSKDVSRKKFKLIRGKMHPIILK

SEQ ID NO: 6721 - protein, 425 aa, Moorena sp.
MFVYVINKHGQPLMPCTPRKARLLLKAGKAKVVHAVPFTLQLLYGSSGYRQDVGLGVDAGTRHIGISATTENEVLFEAEVHPRTDIQALLATRRQFRRVRRSRKTRYRPARYANRKKPKGWLTPSVQHKVESHLKAIRFVGAILPVNRITIEVAQFDMQKIKNPSIAGEEYQHGPQSDFWNTRQYVLWRDEHRCQRCQGKSKDPILNVHHIESSKTGGDSPDNLVTLCETCHTALHKNHLESTLTRRSPSLRDATQVNMMRWQVYEQAKALCSQVCLTYGYQTKQTRIATNLEKSHGIDARCISGHPQACSDGTSYLFKCVRRNNRQVHKATIRKGGMRSRNTAPRYVKGFRLFDQVRYEGKLCFIFGRRSSGYFDLRRLDGTKVHASANYKHLHLVQRSSTCLRERRSGIPPTPEGAGILPLES

SEQ ID NO: 6722 - protein, 426 aa, Lactobacillus sp.; identical to SEQ ID NO: 3294

SEQ ID NO: 6723 - protein, 535 aa, unidentified; identical to SEQ ID NO: 6116
  REGION 1..535: note = Human gut metagenome

SEQ ID NO: 6724 - protein, 414 aa, unidentified
  REGION 1..414: note = Human gut metagenome
MPCSPAKARLLLREKKAVVVRRTPFAIQLTIATGESKQPVSLGVDAGYKHVGLSASTEKAELYASEVELRQDITDLLSARRALRQSRRNRKTRYRAPRFDNRIRTKRKGWLAPSVENRINAHLSRIETVLRLLPATKITVETASFDTQLLKNPDISGKEYQEGEQLGFWNVREYVLFRDGHVCQHCHGRSKDPVLNVHHLESRRTGGDSPGNLITLCETCHKALHRGEIALKAKRGQSFRAEAFMGIMRWEVLNRLKASHPELEVHNTYGYWTKNARIANGIAKSHCADAFCIAGNLGAKRLGEFFFQKQTRRNNRQIHKLSILKGGLRKRNQAPFEVKGFRLFDKVACKGEEGFIFGRRSSGSFDVRKLDGTRTSAGINYKKLRLLEKRPTYLTEIRKEEALPPLPAGRGLRA

SEQ ID NO: 6725 - protein, 493 aa, unidentified; identical to SEQ ID NO: 2644
  REGION 1..493: note = Human gut metagenome

SEQ ID NO: 6726 - protein, 442 aa, unidentified; identical to SEQ ID NO: 2939
  REGION 1..442: note = Human gut metagenome

SEQ ID NO: 6727 - protein, 443 aa, Anoxybacillus sp.
MVEENMTCFMQRKGENPMVFVLDTNKRPLAPCHEAVARKLLKQGKAAIYRRFPFTIILKKSVDESEIKATYRLKIDYGSRHTGLAILRGQEVVWLGQLDHRTDIKERIDKRRAFRRARRNRKTRYRKPRFLNRKRKEGWLPPSLESRMQNIKTWVERLRKICPIEHISYENAKFDTQLMRNPEINGVEYQQGTLQGYEVREYLLEKFGRKCCYCGKEGVPLEIEHIIPKSRGGTDRVDNLCLACHDCNQRKGSQTAEEFGYPHIQEMVKKTLKDASVVNATRWKVYEVLKQSGCEVECGTGARTKMNRIRLGLPKIHYFDACCVGKSTPLQLHFKTKEVLFIKAKGRGSRSRTNLDRYGFPRGYLARQKYFFGFQTGDMVKANVPKGKYQGVWFGEVACRKTGSFDIKGKDGKRIAQGINYRYVQVIQRFDGYAYGKGVAELA

SEQ ID NO: 6728 - protein, 465 aa, unidentified
  REGION 1..465: note = Human gut metagenome
MSTCACVLNKNGERLMPTIRLGKVRHLLKDGKAKIIKHHPFTIQLLYDSETNIQPIEICEDVGYNYIGISVKSQSHEYVSAQYDTLQDEKSCHDACRRMRRTRRNRLRYRQKCFDNRKRDKGWLAPSLKHKKELNVNVIKMYCEVVPITHATVEVGSFDTMLVKAIEEGKATPEGADYQKGPRYNLATLREAVFYRDNYTCQVCGREASEGAILHVHHMFYWKGRHDNSLSELITVCEKCHTPANHQKGGKLYGFGEDIKFANLSGAAFMNTVRWQIVNELYAAFGKPFVTFTYGAMTKEKRIALHLEKSHNNDAYAMGEFHPNCRCTFEHYEKVRRNNRILEKFYDSRYIDIRTGEIATGKELFNGRINRSHKKDSENLHKYRGKRIRKGYRALRRKKVALNPGDLVSLNGEILTVHGTHTKKNGSVNVEFKTPSKSGKKSTSLKKLKIIKTISPMRSAWDKVS

SEQ ID NO: 6729 - protein, 408 aa, unidentified
  REGION 1..408: note = Human gut metagenome
MVYVQDINGKPMMPTTRHGKVRRLLKDKKAIVVNLCPFTIKLMYVTSDYKQEIVLGVDAGTKHVGLSATTKSKELYSSEVILRNDIVDLLSTRRELRRSRRNRLRYRKPRFDNRIKSKRPGWVAPSVKYKVDAHIRVIDNVCSILPISRIVIEVAQFDTQKINNPNISGKEYQEGDQLGFWNVREYVLARDGHKCQHCKGKSKDPVLNVHHIESRKTGGDSPSNLITLCETCHKEYHKGNIDLKIKRGSSLRDAAVMGIMKWRLYEELRSKYNRVSMTFGYVTKYNRIKHGIEKSHVFDAFVISKNFDAIRLGYYYKVRLVRRHNRQIHKQKIPKGGIKRPNQSPFEVFGFRLFDRVMFENSYYFIFARRKTGSFNIRDIDGKNQRDITYKKLKLSRCKRFMVQKEMD

SEQ ID NO: 6730 - protein, 452 aa, Moorena sp.; identical to SEQ ID NO: 3322

SEQ ID NO: 6731 - protein, 407 aa, unidentified
  REGION 1..407: note = Human gut metagenome
MPCSPAKARLLLKEKKAIVKRRTPFTIQLTIATGEAKQPITLGVDSGYKHIGLSATTEKAELYASQVELRQDITDLLSARLALRRSRRSRKTRYRAPRFNNRVASQRKGWLAPSVENRITAHMSRVEAVMRVLPVTAIAVETAAFDTQLLKNPDIAGAAYQQGEQLGFWNVRKYVLFRDGHVCQHCRGKYKDPILNVHHIESRRTGGDAPNNLITLCETCHKAFHRGEIKLKVKRGKSFKAATFMGIMRWTLFERLKKAHPELSVRNTYGYLTKHTRISHGIAKSHCADAYCIADNLGAKRLNGFFFQKQTRKHNRQIHKLSILKGGLRKKNQAPYEVKGFRLFDKVICKGKEAFIFGRRTSGSFDVRRLDGTRISAGISYKKLRLLEPRTTYLTEFRKEAALPPPA

SEQ ID NO: 6732 - protein, 431 aa, unidentified; identical to SEQ ID NO: 5220
  REGION 1..431: note = Human gut metagenome

SEQ ID NO: 6733 - protein, 421 aa, unidentified
  REGION 1..421: note = Human gut metagenome
MRGQPLMPCSPAKARHLLKAGKAVVKRRTPFTIQLRIATGETKQNVTLGVDAGAKHVGLSATTEKEEVFASEVELRQDITGLLAARLSLRRDRRHRKTRYRAPRFLNRVRSKHKGWLAPSVENRIQAHMSRIDAVCRLLPVTKIVIETASFDIQKIKDPSVEGTDYQQGDQLGFWNVREYVLFRDGHVCQHCHGRSKDKILNVHHLESRQTGGDAPNNLITLCETCHKAYHAGKIKLKVKRGQSFRAEAFMGIMRWTLLDRVRKAHPGLPVENTYGYLTKHTRITHGLPKTHCVDAYCIAGNLKAVRRGVYLHQRQMRKHNRQIHKFTVLSKRLEDGTKIGYRKLNQSPYLVHGFRLFDKVRCLGQIGFIFGRRSSGYFDVRRMDGVKLSPSISWRKLTLLEKRSTYLTELRKEDGASSPV

SEQ ID NO: 6734 - protein, 463 aa, unidentified
  REGION 1..463: note = Human metagenome
LAKATKGCLYPLTALNKQKLIRKDFVKRMTKTLTTRTTQACVLDQQGRPLMPTTRLGKVYRLLKTQKAHIVSYEPFTIQLDYEPDTQVIQPMTLGVDSGAIHSGYSLTNEHREYYSAEVVARNDISNRLSDRRMCRQNRRSRKTRYRQPRFNNRKNQKKGWLPPSLEQKVTVQVNEINHIHRYFPIDTIIVETAEFDIQKIKNPDISGIEYQQGTLQGYNIRNYLLEKHGRRCFYCGKAVSDFEVEHMFPKSKGGSNRIDNLTLSCHDCNEKKGTLTVEEFIQQTLPAKKATAKLKQLPQEKRLFKYMAYMNATRWALYDAIKERYPNVKMTYGYITKYNRIQAGLPKAHHIDAKCITGFPTVPSIDQTVVKVKMRRHNRQLHRATFSKGHVRKAACLPTTVFGFQLYDLVLFNNHRYYIKGRRSSGSFALVSVEGLKDENRSYKKLTLLAHTNTYLTNHYVN

SEQ ID NO: 6735 - protein, 453 aa, Anaerotruncus sp.; identical to SEQ ID NO: 6408

SEQ ID NO: 6736 - protein, 470 aa, Thermoanaerobacterium sp.
VWQTQKAEITLARRDYLLIALLVLYRTPKGEFYMVFVLDKHKKPLMPCTEKRARLLLESGRAVIHKINPFVIRLKDVTVDNCIIQPCRIKIDPGSRVTGIAILQGEKVLFLMELYHKQGIKKSLDDRRNHRKFRRNKLRYRKPRFDNRKREEGWLPPSLEARVQQIINTVKKLAKYIPIDSISVEHVKFDTQLMQNPEISGIEYQQGELQGYEVREYLLEKWGRKCAYCGKENVPFEVEHIVPKSRGGTDRVSNLTIACHECNQKKDNMTAEEFGYPNIQKQAKKPLKDAAMINATRWKTYNLLKEMYPVECGTGALTKKNRIDRNLPKEHYYDACCVGKSTPKEFVFKTDYVLEIYAKGRGTRQRTLLNKYGFPRGYLSRQKIFFGFQNGDYIKARIPKGKYKGQYTGYVAVRKTGYFDIRDANGKNIAQGVSYKYCHIIQRYDGYKYGRRKRHIPLHPSYAMDGVSCA

SEQ ID NO: 6737 - protein, 493 aa, unidentified
  REGION 1..493: note = Human gut metagenome
MAAVYVISASGKPLMPTTRCGHIRGLLNAGKARVVEREPFTIQLKYETPDVTQPLYLGIDPGRTNVGSAVVREDGECVFTAQLTTRNKDVPKLMKARKQFRMAHRRLKRRCKRQRRAKAAETLSQKGEFQRLLPGYEEPILCKGIRNKEARFNNRQRPAGWLTPTANHLLLTHLNMVKKLQKLLPITDVVLEVNRFAFMAMENPSIRRWQYQQGPLYGKGSVEDAVYAQQDGHCLFCGKPIAHYHHVVPQHKNGSETLENRVGLCNEHHDLVHKDRAWDAKMKETKAGLNKKYHALSVLNQIIPALTEQLTAMFPQHAFVTTGKDTADFREDYGISKEHHLDAYCIACSVLAEPTKVAAPTGKPHRLMQFRRHDRQVCHKENIKRVYLSEGKAVATNRHKAIEQKDDSLEEFRKTHTQQEVSALTVKDHQPVYKDMRRFMPGGVFLFNGKVHTLQRSHGRYKGMPFYYIDTDGSKNHAKGCIFLQQNCGLRWV

SEQ ID NO: 6738 - protein, 430 aa, unidentified; identical to SEQ ID NO: 6405
  REGION 1..430: note = Human gut metagenome

SEQ ID NO: 6739 - protein, 465 aa, unidentified
  REGION 1..465: note = Human gut metagenome
MSTCVCVLSNSGERLMPTFRLGKVRRLLKDGKAKIIKHHPFTIQLLYDSKTNTQPIEICEDVGYNYIGISVKSQSHEYVSAQYDTLQDEKACHDSCRKLRRTRRNRLRYRKPRFDNRKRGEGWLAPSLKHKKELNVNVVKMYCAVMPITHATVEVGSFDTMLVKAIEEGKATPESADYQKGPRYNLATLREAVFYRDNYICKVCGRKATEGAILHMHHMFYWKGRHGNSLSELITVCEKCHTPANHQKSGKLYGFGENVKFADLSGAAFMNTVRWQIVNELYAAFGKDFVTVTYGAMTKEKRIALHLEKSHNNDAYAMGSFHPVNRCAFEHYEKVKRNNRILEKFYDSQYIDTRTGELTNGKSLFNGRISRSHKKDSENLHKYRGKRICKGHRALRRKKLALNPGDLVSLNGEILVVHGTHTKKNGSVNVEFKTPSRSGKKSASLKKLKIVKTSNLMHSAWTKVA

SEQ ID NO: 6740 - protein, 245 aa, unidentified; identical to SEQ ID NO: 5863
  REGION 1..245: note = Human gut metagenome

SEQ ID NO: 6741 - protein, 457 aa, unidentified
  REGION 1..457: note = Human gut metagenome
MDAVAVISASGKPLMPTNPVRARKLIKKGKAVIYKYRPLFTIRLTERTDGDIQTIEYCCDTGYQHIGLSIKSRKHEYVNEQRDLLPNETERHNDSRKYRKARRRRKLRHRACRRDNRHDNQICKDGYAPSIRNKRDQHISLYRSYTEILPVERAVFEMGQFDTQVLKAIEKGEPLPQGKDYQHGERYGYATLREAVFARDDYTCICCGKNSFKDKRILCVHHLGFRIGDRTNRLANLATVCTKCHTPKNHQPKGKLYNLKPELKDFKGATFMTMVRWDMLDKLKVVSKDIQVDVTYGAATKEARRDLKIKKSHANDAYCMGSFHPSHRTDLKRYEKCRRNNRVLSKFYDATYIDIRDGKKKKANALGCNRTKRRESRRSEKNERIYRGEKVSKGRIVLRTKRAVIRPGDIVYVGKKKYIVASSKNLGKQLKLADGSLLTTSKVTKIIHCGGWKTVTL

SEQ ID NO: 6742 - protein, 465 aa, unidentified
  REGION 1..465: note = Human gut metagenome
MSTCACVLSKNGERLMPTIRLGKVRHLLKDGKAKIIKHHPFTIQLLYDNETNIQPIEICEDVGYNYIGISVKSQSHEYVSVQYDTLQDEKDCHDSCRKMRRIRRNRLRYRKPRFDNRKRNKGWLAPSLEHKKELNVNVIKMYCKVVPITHVTVEVGSFDTMLVKAIQEGKAIPEGADYQKGPRYNLATLREAVFYRDKYTCQVCGRKANEGAILHVHHMFYWKGRHGNSLSELLTVCEKCHTPANHQQGGKLYKFGENIKFANLSGAAFMNTVRWQIVNELYTAFGKLFVTFTYGAMTKEKRIAFYLEKCHNNDAYAMGNFHPVDRCAFEHYKKVKRNNRILEKFHDSQYIDIRTGKVANGRSLFNGRINRSHKKNSENLHKYRGKRTRKGYRALRRKKVALNPGDLVSLNGEILVVHSTHAGKNGYVGVEFKAPSKSGKKSASLKKLKIVKTSNSMRSAWTKVS

SEQ ID NO: 6743 - protein, 424 aa, unidentified; identical to SEQ ID NO: 3351
  REGION 1..424: note = Human gut metagenome

SEQ ID NO: 6744 - protein, 408 aa, unidentified
  REGION 1..408: note = metagenome
MVYVQDIDGKPMMPTTRHGKVRRLLKANKATVVNLCPFTIRLTYATSGYKQEIVLGVDAGTKHVGLSATTKSKEIYSSEVILRSDIVELLSTRRELRRTRRNRLRYRKPRFGNRVKSKHHGWVAPSVRYRIDAHIRVIDNVCSILPISRVIIEIAQFDTQKIKNPDISGNEYQEGDQLGFWNVREYVLARDGHKCQHCKGKSKDPILNVHHIESRKTGGDSPSNLITLCETCHKEYHKGNIDLKVKRGKSLRDAAVMGIMKWKLYEELKSRYPNVSMTFGYITKYNRIKYGIEKYHISDAFVISKNFNALRLEYHYKVRLVRRHNRQIHKQKVLKGGAKKPNQSPFEVFGFRLFDRVMFEGNYYFIFGRRKSGSFNIRDINGGNQRNVTYKKLKLSIGKRFMIQKEMN

SEQ ID NO: 6745 - protein, 533 aa, Moorena sp.
MSNVVYVVDKHGKPLMPTKRFGKVRHLFETGKAVAISNCPFTIRLKYESTHYTQDIYVGIDTGRENIGSGASKEDGTNVYLANTKTHNKSIKKQMSDRACFRRERRRYHRQKKQRKAVSDGNTIQNGDDDTVCTKHACKSVQISYPMAENAVTHKVIRGKEGKFANRKRPDGWITPSARQVVQVTVNELKSITKILPVTHMIMERVSFDFQKLENESIKAWEYGKGPLCGYKTYKDYIFDEQHGKCACCGKPITQYHHIVHRTNGGIDSVKNIIGLCDDCHEEIHTSINAEERLKELKAGVIQKYHVGLLNSVMPTLIEEMAIYCEEQGIVFAITDGKTTSKAREQYDIPKDHCFDAYAISLADRDVENIDIYDIIYQKRRFKKKSNNIINARNKRAYKLDGKVVAYNRHKATDQKDDSLEEFFVKYRDNHSEKEVQQMMHNIKIEPAKRTYTFHKTGQIAPIHPGDVVRYVKHNKIRGNTKTEMLVADNVNMSKDGRVGYGTKNKKLKYCKRIASGCVQIIDVIKAKEHITK

SEQ ID NO: 6746 - protein, 436 aa, unidentified
  REGION 1..436: note = Human gut metagenome
VQHPRVAAKGETMRVFVKNMRGEPLMPCTQRKARLLLKAGKARICKYHPFTIQLDYATGETKQDCTIGIDTGSKNIGIAVRSEDKVLFKGEVELRQDVKSNLDTRRIYRRSRRNRKTRYRKPRFLNRKRPDTWLPPSLENRIRHTFRWIDVFCLLVPSPCLHIEVGKFDTAKMIDPKIQGVDYQHGQTYGYYDVRYFVFARDHYTCQVCGKSRDKILRTHHIRYRSNGGTDRADNLITVCTDCHTGRNHQKDGILYQWQEENKKVRSYKEPPFMNILRQRIFQRYPYAHITYGSETAQRRKKLCLGKTHYNDAIAISGIQTITEDPEEWLLIRQSRKKKRSLHEANPRKGRKKPNRTQERSSKNTPSYRNLYLNDKVSVLGRTGYISGFTNGGCYVKDTDGQYITLPGKTYKQVGIANVHRICHNNNWQYITKRAL

SEQ ID NO: 6747 - protein, 421 aa, unidentified; identical to SEQ ID NO: 4235
  REGION 1..421: note = Human gut metagenome

SEQ ID NO: 6748 - protein, 428 aa, unidentified
  REGION 1..428: note = Human gut metagenome
LKVFVLNMRGQPLMPCSPAKARHLLKAGKAVVKRRTPFTIQLRIATGETKQNVTLGVDAGAKHVGLSAATEKEEVFASEVELRQDITGLLAARLSLRRDRRHRKTRYRAPRFLNRVRSKHKGWLAPSVENRIQAHMSRIDAVCRLLPVTKIVIETASFDIQKIKDPSVEGTDYQQGDQLGFWNVREYVLFRDGHVCQHCHGHAKDKILNVHHLESRQTGGDAPNNLITLCERCHKACHAGKIKLKVKRGQSFREEAFMGIMRWTLLDRVRKAHPGLPVENTYGYLTKNTRITQGLPKAHCVDAYCIAGNLKAVRRGVHLYQRQVRKHNRQIHKCTVLSKTLKDGTKIGYRKLNQTPHLVKNFRLFDKVRCLGQTGFIFGRRSSGYFDVRRLDGVKISSCINYRKLTLLEKRGTCLTELRKEDGASSPV

SEQ ID NO: 6749 - protein, 515 aa, unidentified
  REGION 1..515: note = Human gut metagenome
VTDVSTIYVLNKDGKPLMPTTRCGHVRYLLKEKVARVAASKPFTIQLLYETNDVVQPLYLCIDPGRTNIGVAVVKTDGTAVFTAHLETRNKEIPKLMQGRKKARRARRTNGRRCRRQRRAKANGTISKKCVKQTTAQNGSVSKRAKEIGVIKRHLPGCEKDVLCIGIKNKEAKFNNRTRPTGWLTPTANQLLQTHINLVKKIQKFLPISDVVLEVNKFAFMQLDNPNIQKWQYQKGPLYQKESLKSAVSEMQEHHCLFCKKKIDHYHHVVPQHKNGSNTIDNIVGLCTQHHDLVHKDATWQKRLAKKKTGLNKKYGALSVLNQIVPVLTKELGSLFLKHFYVTTGKSTYDYRAAHGVSKDHWLDAYCIACSVLPNDVCDSNINSHVPYELKQFRRHDRRALHKENINRVYTLNGKKVATNRHKAIEQTTDSLEEFRQNHPNDVCKLKVKEHHPEYRNPKRNFPGCVFLVGKHTHVMQGTSGSHNGKADGYYDTNGNSYPFGKCKFVAKNEGIVFA

SEQ ID NO: 6750 - protein, 439 aa, Tolypothrix sp.; identical to SEQ ID NO: 2044

SEQ ID NO: 6751 - protein, 412 aa, unidentified
  REGION 1..412: note = Human gut metagenome
MVYVISSNGQPLMPTENHVKVRILLKNQKAKVIKKCPFTIQLTYNSTNYTQPVSLGVDAGSKHIGLSATTKDKVLFESDVELRNDIVDLLSARRQNRRARRNRKTRYRKPRFSNRRRKDGWLSPSVQNKVDTHLTAVRKVHEILPVSKIIVEVASFDIQKIKNPAISGADYQKGEQMGFWNVREYVLFRDGHECQCCHGRSKDMILNVHHIESRKTGGDAPNNLITLCESCHTGYHKGTVKLPKTIHRGMSFRDACFMGIMRWAFYNKLKELYSNVSLTYGYITKTIRIENDLPKGHCIDARCISGNPLASSDGTVYYQKKVRDHNRQIHKNTILKGGIRKRNQAPYEVMGFRLYDKVRWKGKNCFIFGRRSTGRMDLRLLNGAKVNSSVGYKNLRLLEMRKNMLIELRKVV

SEQ ID NO: 6752 - protein, 429 aa, Parasutterella sp.
LRVFVLNKRGKPLMPCSPAKARHLLKEKKAIVVRRTPFTIQLTIATGESKQPVSLGVDAGYKYVGLSASTEKAELYASEVELRQGITDLLSARRALRRARRNRKTRYRAPRFDNRIRTKRKGWLAPSVENRINAHLSRIETVLRMLPVTKITVETASFDMQLLKDPDISGKEYQEGEQLGFWNVREYVLFRDGHVCQHCHGRLKDPVLNVHHLKSRRTGGDSPGNLITLCETCHKALHRGEITLKAKRGQSFRAETFMGIMRREVLDRLKASHPKLEVQNTYGYRTKHARISNGIAKSHCADAFCIAGNLGAKRLGEFLFQKQTRRNNRQIHKLSILKGSLRKRNQAPFEVKGFRLFDKVAYQGEEGFIFGRRSSGFFDIRRLDGTRISAGINYKKLRLLEKRRTYLTEIRKEEARRPLPEGRGPRAQM

SEQ ID NO: 6753 - protein, 347 aa, unidentified; identical to SEQ ID NO: 4100
  REGION 1..347: note = Human gut metagenome

SEQ ID NO: 6754 - protein, 386 aa, unidentified
  REGION 1..386: note = Human gut metagenome
LTIATGESKQPVSLGVDAGYKHVGLSASTEKAELYASEVELRQDITDLLSARRALRQSRRNRKTRYRAPRFDNRIRTKRKGWLAPSVENRINAHLSRIETVIRLLPVTKISVETTSFDMQLLKNSDIAGKEYQESEQLGFWNVREYVLFRDGHVCQHCHGRSKDPVLNVHHLESRRTGGDSPGNLITLCETCHKELHRGEITLKAKRGQSFRAETFMGIMRWEVLDRLKASHPKLEVQNTYGYRTKHARIVNGIAKSHCADAFCIAGNLGAERLGEFLFQKQTRRNNRQIHKLSILKGGIRKRNQVPFEVKGFRLFDKVACKGEEGFVFGRRSSGYFDVRKLDGTRISTGISYKKLRLLEKRQTYLTEIRKEEALPPLPEGRGLRA

SEQ ID NO: 6755 - protein, 464 aa, Actinomadura sp.
MLGASPGVERVTPNPAVGEKVREGHPAVFVLDKHGAPLQSTTPARARKLLKTGRAVVARHTPFVIRVKDRTIAESQVDGVELGVDPGSKHTGIAVFTNTGGNRRGLYGIALAHRGGSIRNKMSQRAAYRRGRRSRNLRYRAPRFSNRTKPRGWLAPSLRHRVETTMAWTARLARWAPVQTVHLERVAFDTHTISAGRPLEGAEYQHGTLHGTEVREYLLAKWGRACAYCGATAVPLNIDHIHPRSKGGSDRVGNLCTACIPCNRAKNNRSVEDFLSTSPKQLARILANAKVPLRDAAAVNATRSALRRALDAAFPAVRTASGGRTKWNRTRTGLPKTHTLDALCVGHLDTIDRIPRTVLIAAATGRGTYTRTRTDRYGFPRLRLPRVKTFFGYQTGDLAHAVVPAGKNAGTHTGRIAVRASGSFNIRTRHGLIQGVRHEHFHLLQRADGYGYTTRPEGVVSDAT

SEQ ID NO: 6756 - protein, 420 aa, unidentified
  REGION 1..420: note = Human gut metagenome
MQYVYVLNKHGEPLMPCSPGKARLLLKQQKAHVIKRTPFTIKLLYGSTGYKQPITLGVDAGSKHVGLSASTEKRELYREEFTPRNDVVDLLSTRKQNRRSRRNRKTRYRPPRFDNRVHSKHKGWLAPSVEVKIQEHITIIKRICKILPISLVRVETAEFDTQRLKVMLAGKPLPVGTDYQLGEMYDEYNVRQYVLKRDNYTCQCCGAHTTAKKLVKLHVHHLESRKTGGNAPSNLVTLCTTCHKNLHKGKVTLDGKERGKPLRDAAFMGIMRKTLMARLKKELPIPVQGTYGYITKMRREQNDIKKSHTNDARCISKHPLAEPCSVCYRTKAIRHHNRQTHKANFSKGGIRKRSQMPYVVEGYRLWDKVLYKGQECFVSGRRTSGSFTLKKLDGTRISKGVTFKKLRLLEPATNYLIERM

SEQ ID NO: 6757 - protein, 406 aa, unidentified; identical to SEQ ID NO: 6079
  REGION 1..406: note = Human gut metagenome

SEQ ID NO: 6758 - protein, 512 aa, unidentified; identical to SEQ ID NO: 3870
  REGION 1..512: note = Human gut metagenome

SEQ ID NO: 6759 - protein, 515 aa, unidentified
  REGION 1..515: note = Human gut metagenome
MATVYVLNKDGKPLMPTTRCGHIRHLLKEKKARVVRTNPFTIKLVYETDDVVQPLYLGIDPGRTNIGVAVVKVDGTAVFTAHLETRNKEIPKLMVKRKEHRQGRRHYRRCKRQRRAAAHGTLSKKCKKQDTAQGGNISKRAQTIGVFERNLPGCENSVLCIGIKNKEARFNNRVRPARWLTPTANQLLLTHVNFVKKICKFLPISDVVLEINKFAFMALDNPNIQKWQYQQGPLYQKGSLENAVSEQQDHHCLFCEKTIEHYHHVILRSENGSDTIANIVGLCAEHHDLIHKDDKLKEELAKKKQGLNKKYGALSVLNQIIPALTYELGSRFQGHFYVTTGKSTYDYRAAHSVSKDHWLDAYCIACSVLPDGCFDNTINSRVPYELKQFRRHDRQVCQQQNVKRKYYLDKKLVATNRHKAIKQETDSLEEYRNNGGTTDKLVVKEHKPTNKRLNRILPGALMAANGKLNVMVASRGLHNGIPDNYVFDNNSKAKPSKCTLINKNKGIVFVSNSVS

SEQ ID NO: 6760 - protein, 450 aa, Moorena sp.; identical to SEQ ID NO: 2935

SEQ ID NO: 6761 - protein, 406 aa, unidentified; identical to SEQ ID NO: 3415
  REGION 1..406: note = Human gut metagenome

SEQ ID NO: 6762 - protein, 413 aa, unidentified; identical to SEQ ID NO: 2636
  REGION 1..413: note = Human gut metagenome

SEQ ID NO: 6763 - protein, 512 aa, unidentified
  REGION 1..512: note = Human gut metagenome
MSTVYVLNKDGKPLMPTTRGGHVRHLLKEQKARVVRTNPFTIQLLYETDNLVQPLYLGIDPGRTNIGVAVVKTDGTAVFTAHLETRNKEIPKLMQGRKKARRARRTNGRRCRRQRRAKANGTISKKCVKQATAQNGSVSKRANEIGVIKRHLPGCEKEVLCIGIKNKEAKFSNRTRPEGWLTPTANQLLQTHINLVKKIQKFLPISDVVLEINKFAFMRLDNPNVQKWQYQQGPLYQKASLEEAVSEMQEHHCLFCKNTIDHYHHVVPQHKNGSNTIGNVVGLCAKHHNLVHKDTSWQEKLAKKKTGLNKRYGALSVLNQIIPALTKELSSLFPKHFFATNGKSTYDYRAAHGVSKDHWLDAYCIAGSVLPNDACDNNINNRVPYELKQFRRHDRRALHKENMSRVYTLNGKSVATNRHKAIKQTTDSLEEFRQRQPNDVCKLKVKEHHPEYRNPKRNFPGCVFLVGKHTHVMQGTSGSHNGKADGYYDTNGNSYSSGKCKFVVKNEGIVFT

SEQ ID NO: 6764 - protein, 438 aa, Methanosarcina sp.
MIFVLNKNKQPLSPCHSAVARKLLKTGKAVIHKKYPFTIRLKELKTSINKVEFRLKIDYGSRHTGLAILNGSKVIGLAHIHHKTSIKSNMDNRRAMRRTRRNRTTRYRKPRFNNRKRKEHWLPPSLQSRVDNIQNWVNRLQKLCPLTHISYENVKFDTQLMQNPEISGIEYQQGELQGYEVREYLLEKWNRKCAYCGAENVPLEIEHIIPKARHGTSRVSNLTLACRTCNEAKGTKTAEEFGYPEIQKQARKTLKDAALVTATRWKVYNVLSKPALNIECGTGARTKMNRIRLNLPKDHHFDAICVGASTPNKIIFKTNQVLHIKAKGRGSHCRTNLDKYGFPRGYLSRQKSFFGFQTGDIVKAVVPKGKYKGIHFGAVACRKTGYFDIKNKEGVRIVQGINHKYCNILSRADGYEYATEHLEVDGIPPMTKVIGVLP

SEQ ID NO: 6765 - protein, 346 aa, Arthrospira sp.; identical to SEQ ID NO: 2872

SEQ ID NO: 6766 - protein, 328 aa, Moorena sp.
MKVFVLSQEGKPLMPTTPRRARVWLKAKRARLVRQEPFTIRLRFATKAHVQATKVGVDTGSKDVGIAAIANGEVVFQAEVHLRDDITEKLTQRRQFRRNRRARKTRYREARYDNRRRPDGWLPPSLHSKAEATVKAVRFMASFLPVGRVTVEVGRFDTQRMQNPDIAHLEYQQGELQGYFLREYVLAKWQRTCAYCEAREVPLELEHIVPRSRGGSNRASNLTLACHACNRRKGQQTAAEFGFPDVQAKARVPLKDAAHVSSLKSRVVQDLQAVFGESQVSITYGYETTYKRLQVLDLPKSHTNDAVAIACEISEVVKPLKMVIRSAV

SEQ ID NO: 6767 - protein, 439 aa, unidentified
  REGION 1..439: note = Human metagenome
MVFVLNKSKKPLNMITNAEARILLRKKLAVIHKIYPFTIRLRDNSCVNNDKFYTVKIDPGSKTTGVAIVDNTDKVVMLAEIEHRGHIIKKKLDQRRAARSSRRQRHTRYRPARFLNRTKPKGWIAPSVKSRADNVINFIRKYKKLININKVMIEHVSFDVAQMSSDTKIYGVAYQQGPLYQNKLRSFIFSRSGGKCVYCGAKAEEIDHIIPRANGGTNSTYNLVASCRACNQMKSNLTLKAFGKLVGKNFSKIEPKKLPKDAAIVQLARNYMAREITKLVSDTTLHDAWLTKYNRDQLGLPKQHYYDALSVGEVPTKFNFLTDKILLISAKGRGSRQMCRVDKYGFPRTSPKGSKSVEGFQTGDIVKAVVTKGLKQGEYLGKVAVRSKGSFNIQTRTQVIQGVGYKYCHIIQRCDGYLYDYKECDFLSAINNRVSIAKI

SEQ ID NO: 6768 - protein, 453 aa, Moorena sp.
MMSEVQKVNYIYVVDSNGTPLMPTSRLGMVRRWLKSGQARWFGNSRKIIQFVRPVTTNTQELTLGVDAGFHLGLAVVGNKREYYASESLRQSEKDRITSRRELRRTRRNRLRHRQARFDNRRRKASWLAPSMQHRLDFTIKEIKRLYTFLPITNLVIEVTPFDNQKLLNPNIKPWEYTQGKMHGFKTIKDYLLARDNYRDALDGKQYPASQLRVHHLVQRKDGGTNQPDNLVLLSDINHSQANHNNGSLAKLRENRQKALDYRGAYFMSILATRLSDYFDNYTTTQGYLTANLRQKYQLEKSHLNDAFIIAGGTDTTLRTNNVYSRQKLRNNNRVLQKFYDAKYIDNRDNKTKTGKELSSGRTRRSREINYTNLRQFRKIKIKPGRVSIRRSHYQLRPHDVVLNTKTNKIETVTGVQNSGTVIKFQTGKTCSIKTVVSLYHVNGMLEKKIENI

SEQ ID NO: 6769 - protein, 420 aa, unidentified; identical to SEQ ID NO: 2812
  REGION 1..420: note = Human gut metagenome

SEQ ID NO: 6770 - protein, 424 aa, unidentified; identical to SEQ ID NO: 4676
  REGION 1..424: note = Human gut metagenome

SEQ ID NO: 6771 - protein, 434 aa, Lactobacillus sp.; identical to SEQ ID NO: 6197

SEQ ID NO: 6772 - protein, 429 aa, unidentified
  REGION 1..429: note = Microbial mat metagenome
MSKQNHVLVLDEHKKPLSPCRPVTARKLLKAKKAAVFRLFPFTIILRKVVEETPEPMTIKLDPGSKTTGIALIQGEKVVWGAELTHRGQGIKASLESRRSLRRSRRNRHTRYRQPRFLNRKRSEGWLAPSLQHRVKTILTWVRKLIKLAPIDSIVQELVRFDLQKLENPEISGIEYQQGQLAGYEVREYLLEKWDRKCAYCGVENVPFEVEHIHPKSKGGTDRISNLAIACHNCNQEKGNRDIRDFLSGKPDLLNRILKQAKSPLKDATAVNSTRWALFNKLKEMGLPVLKGSGGLTKFNRTRLNLPKTHWIDASCVGQIESLTLVTNQPILIKATGRGTRQMCGTNKYGFPTRHRSRIQIHKGFQTGDIVTATVTAGKKVGFYLGRVLCRASGSFDIATQNGRVTGISHKYCQSIHKKDGYSYGFQKH

SEQ ID NO: 6773 - protein, 290 aa, unidentified
  REGION 1..290: note = Human gut metagenome
MPCSPAKARLLLKEKKAIVKRRTPFTIQLTIATGETKQPVSLGVDAGYEHVGLSASTEKAELYASEVELRQDITDLLSARRALRQSRRNRKTRYRAPRFDNRIRTKRKGWLAPSVENRINAHLSRIETVIRLLPVTKISVETTSFDMQLLKNSDIAGKEYQESEQLGFWNVREYVLFRDGHVCQHCHGRSKDPVLNVHHLESRRTGGNSPGNLITLCETCHKALHRGEITLKAKRGQSFRAETFMGIMRWEVLDRLKASHPKLEVQNTYGYWTKHARMLSASPAILAPKG

SEQ ID NO: 6774 - protein, 512 aa, unidentified; identical to SEQ ID NO: 3493
  REGION 1..512: note = Human gut metagenome

SEQ ID NO: 6775 - protein, 512 aa, unidentified
  REGION 1..512: note = Human gut metagenome
MSTVYVLNKDGKPLMPTTRCGHVRHLLKEQKARIVTSKPFTIQLLYEADDLVQSLYLGIDPGRTNIGVAVVKADGTAVFTAHLETRNKEIPKLMKKRKESRRARHTNGRRCRRQRRAKANGTISKKCVKHDTAQNGSVSKRAKEIGVIKRHLPGCEKDVLCIGIKNKEAKFSNRTRPEGWLTPTANQLLQTHINLVKKIQKFLPISDVVLEINKFAFMRLDNPNVQKWQYQQGPLYQKANLEETVSEMQEHHCLFCKKKIDHYHHVVPQSENGSDTIGNIVGLCTKHHDLIHKDTAWQKKLAKKKTGLNKKYGALSVLNQIIPALTKELSSLFPKHFFVTNGKSTYDYRAARGVSKDHWLDAYCIACSVLPNDTCDKTINSRVPYELKQFRRHDRRALNNENMSRVYTFNGKMVATNRHKATEQTTDSLEEFRQRQPNDVCNLKVKEHHPTYRNMNRNYPGSVFLVGNQIHVMQGIAGSKDGEATTYKDTNANSIAAGKCKFVAKNSGILFV

SEQ ID NO: 6776 - protein, 502 aa, Moorena sp.
MSEYIYVLGMDGRPQMPTRRKRHIDRLLSTGKAKVVEYVPFTVQLLYENHPVLQPVILAEDPGRTNIGVAAVSQKGELLFSAVVETRNKEITKFMEKRRKARQRLAKRCHTMIKAGQVMRKLPMFGEEKYITCRYIRNTESRFCNRRRKDGWLTPSAEQLVRTHINLVHRIQGFLPVTDVALEVNRFAFMQLEDPYITGVDFQNGPLKGYDDRKAAVYDQQDGQCLLCNKKPIEHYHHIVPVAKRGSDTLANIAGLCCRCHEKVHKDAGAARRLQNKKQGLTKKYGALSVLNQAIPFICKRLEEEFGEHVHYCSGRDTSRLRQSFGFHKTKDEPLHEVDAWCIGVLSLREIPEKCPDFTKVYQIKQFRRQNRRRINHQTERRYYLDGKLVAVNRKKRMGQTGRKDNQTKDSLADWFTKMVHLYREKEAEHLRSRLTVKKSQHSYNDLKREMPGAEFIYENQRYILSGQLTNGKYYRAVGSTQNFPAAKCRIRRHNRGLVFVS

SEQ ID NO: 6777 - protein, 451 aa, unidentified
  REGION 1..451: note = Human gut metagenome
MSVAVISKTGERLMPTSEYRARKLLKSGKAIKYSYHPFTIQLTERKTGNIQPIELCMDTGYIHIGISVKSEKHEYLTEQIDTLTDERSRHNARRMYRSQRRNRKRYRQPRFNNRKKDKGWIAPSLEHKKNIHVQAISRINNVMPLTDITMEMGNFDTQVLKAKEEGRPLPQGVDYQHGERYSIATLREAVFARDGYKCQCCGRTIKDGAILHVHHIKYRSQGGTNSISNLATVCDKCHTPKNHKPGGKLYGWKPKLPSFKGATFMTTIRWQLYNEAKALFPDIDIHITYGAATKERRRELNIDKSHINDAFVMGQFHPRHRIKAVLYKKKRRNNRCLEKFYDAKYIDSRDGKKRSGQELFNGRINRNHKKDSENLHQYRLQKVTAGKRTVRKQHYSVQPHDIIIYESRKRETTGCHCNGARVMLLPDKKSVSIKKIKIYRYASGYFKSTFN

SEQ ID NO: 6778 - protein, 471 aa, Acidiferrobacter sp.; identical to SEQ ID NO: 6284

SEQ ID NO: 6779 - protein, 544 aa, unidentified; identical to SEQ ID NO: 3572
  REGION 1..544: note = Human gut metagenome

SEQ ID NO: 6780 - protein, 408 aa, unidentified
  REGION 1..408: note = Human gut metagenome
MVYVQDIDGKPLMPTTRHGKVRRLLKDSKAVVVNTCPFTIKLMYKTSDYKQEIVLGVDSGTKHIGLSATTKSKELYSSEVILRSDIVDLLSTRRELRRTRRNRLRYRKPRFENRVKSKRLGWVAPSVRHRIDAHIRVIDNICSTLPISRIIVEIAQFDTQKIKNPDISGNEYQEGDQLGFWNVREYILARDGHKCQHCKGKSKDPILNVHHIESRKTGGDSPSNLITLCETCHKEYHKGKIDLRVKRGKSLRDAAVMGIMKWKLYEELRSRYDNVSMTFGYITKYNRIKYGIEKSHISDAFVISKNFNALMLEYHYKVRLIRRHNRQIHKQKVLKGGVKKPNQSSFEVFGFRLFDRVMFEGNCYFIFGRRKSGSFNIRDIDGGNQRDITYKKLKLLRCKRFMIQKETN

SEQ ID NO: 6781 - protein, 427 aa, Nostoc sp.; identical to SEQ ID NO: 2670

SEQ ID NO: 6782 - protein, 426 aa, Actinomadura sp.
VFVLDKHGTPLQPTTPARARKLLNAGRAVVARHTPFVIRLKDRTAERSQIDGVEVGVDPGSRHTGIAVFTARGGERRGRYAIRLDHRGAAITKKLRQRAAYRRGRRTRNLRHRPPRFSDRARPSGWLPPSLRHRVETTVSWIDRLTRWAPVRAVHVERVAFDTHALTAGRPLEGVEYQHGTLHGFEVREYLLAKFGRACVYCDAAGVPVNIDHVHPRSQGGSDRVSNLVLACIPCNRAKSDRPVQEFAPGRAAAIKARAKAPLRDAAAVQSTRWVLWRALDERLPTSVGSGGRTKWNRTRSRLPKSHTLDALAVGTLDSITGTVDTVLVAGCAGRGSYARTRTDRHGFPRLRLPRVKGFFGFQTGDLVRAVVPTGKKAGTHTGRVAVRATGRFNITTGTETVQGIGHRHVRLLQRADGYAYTTRPE

SEQ ID NO: 6783 - protein, 418 aa, unidentified; identical to SEQ ID NO: 4327
  REGION 1..418: note = Human gut metagenome

SEQ ID NO: 6784 - protein, 418 aa, unidentified
  REGION 1..418: note = Human gut metagenome
MVYVINKQGQALMPTERFGKVRRLLKNGLAHVVCRIPFTIQLDYDTTDYTQPISLGLDAGSKHIGISATTSEKELYAADVELRNDIVEKLSTRREQRRTRRSRLRYRKARFNNRVSSKRKGWLAPSIENKIQTHLTVVEKIHKFLPITNIIVETASFDIQKIKNPSISGSEYQQGDQLDFFNVRDYVLHRDGHQCQHCKGKSKDKVLNVHHIESRKTGGDSPNNLITLCETCHKAYHRGEFELNVKRGKSFRDAAFMGIMRWSFYDRLKNIYPNVSMTFGYITKNTRITNNLPKEHYVDARCISGNPVAKPLGYYFYQKKVRCQNRQIHKANFLKGGRKKLNQAPFLVKGFRLFDLVEYQNDLYYIFGRRDSGFFDIRKLDGTKVNKGSISCKHLRLIDIRKTILTERRNSGSIPPTN

SEQ ID NO: 6785 - protein, 512 aa, unidentified
  REGION 1..512: note = Human gut metagenome
MSTIYVLNKDGKPLMPTTRGGHVRHLLKEQKARVVQSNPFTIQLLYETNDVVQPLYLGIDPGRTNIGVAVVKTDGTAVFAAHLETRNKKIPKLMQDRKKARRARRTNGRRCRRQRRAKANGTISKKCVKQATAQNGSVSKRAKEIGVIKRHLPGCKKDVLCVGIKNKEAKYTNRARLEGWLTPTANQLLQTHINLVKKIQKFLPISDAVLEVNKFAFMRLDNPNIQKWQYQQGPLYQKGSLENAVSEMQEHHCLFCEKPIEHYHHVVPKSENGSNTIANIVGLCAEHHNLVHKDVAWQEKLVEEKTGLNKKYGALSVLNQIIPALTKELSFLFPKHSFMTNGKSTHDYRAAHGISKDHWLDAYCIACSVLPIDVCDSTINNCVPYELKQFRRHDRRALNNENMNRVYTLNDKVVATNRHKATEQEAASLEEFCKEHPNDVCKLKVKEHHPTYRNMNRNYPGSIFLVGKHVHIMQGIAGSKDGKATTYKDSNANSITASKCKFVAKNSGILFV

SEQ ID NO: 6786 - protein, 529 aa, unidentified
  REGION 1..529: note = Human gut metagenome
MSTVYVLNKDGKPLMPTTRGGHVRHLLKEQKARVVRTKPFTIQLLYETNDVVQPLYLGIDPGRTNIGVAVVKTDGTAVFTAHLETRNKEIPKLMKKRKESRRARRTNGRRCRRQRRAKANDTISKKCVKQPTAQNGSISKRAKEIGIIKRRLPGCEKDVLCIGIKNKEARFNNRTRPEGWLTPTANQLLQTHINLVKKIQKFLPISDVVLEVNKFAFMQLDNPNIQKWQYQQGPLYKKESLERAVSEMQEHHCLFCDKPIDHYHHVVPQSENGSNTIANIVGLCAEHHNLVHKDAAWQKKLAEEKVGLNKKYGALSVLNQIIPALTKELSFLFPEHSFVTNGKSTYDYRATHGVSKDHWLDAYCIACSVLPSDVCDSNINNHMPYELKQFRRHDRRVLHKANTSRVYTLNGKKVATNRHKAAKQTADSLEEFRQSHPDDVCKLKVKEHHPAYRNLNRNYPGSVFFVGKQVHVMQGIASSKDGKATKYNDTSATTIAAGKCEFVAKNSGILFVQCKFRKVFSDETTKKLQ

SEQ ID NO: 6787 - protein, 512 aa, unidentified
  REGION 1..512: note = Human gut metagenome
MSTVYVLNKDGKPLMPTTRCGHVRHLLKEQKARVVASKPFTIQLLYKTNDVVQPLYLGIDPGRTNIGVAVVKADGTAVFTAHLETRNKEIPKLMKKRKDSRRARRTNGRRCRRQRRAKANGTISKKCVKHDTAQNGSVSKRAKEIGVIKRHLPGCEKDILCIGIKNKEAKFSNRTRPEGWLTPTANQLLQTHINLVKKIRKFLPISDAVLEINKFAFMQLDNPNIQKWQYQQGPLYQKANLEEAVSEMQEHHCLFCKKPIAHYHHVVPQSENGSDTIGNIVGLCTKHHDLVHKDTAWQKKLAKKKTGLNKKYGALSVLNQIIPALTKELSSLFPKHFFATNGKSTYDYRSAHGVSKDHWLDAYCIACSVLPNDVCDSGINNRVPYELKQFRRHDRRALNNENMSRVYTLNDNVVATNRHKATKQTTDSLEEFRQNHPDDVCKLKVKEHHPTYKNMNRNYPGSVFLIGKQVHVMQGIAGSKDGEATTYKDTNANSIAAGKCKFVAKNSGILFV

SEQ ID NO: 6788 - protein, 449 aa, Allochromatium sp.
MAVFVLDKQKRPLMPCTEKRARLLLERGRAVVVRLAPFTIRLKDRIGGAIQPLRLKLDPGSRVTGLALVRESEICDPETGAVERLEHGLWFGELAHRGQAIREALEQRRHYRRARRARKTRYRAARFLNRTRRAGWLPPSLQHRLDTTVNWVERLRRLAPISALSQERVSFDTQALQNPEISGVEYQQGELAGYEVREYLLEKWNRRCAYCGARAVALEIEHIVPRARGGSDRVSNLTLACRPCNVSKGHQPIETFLKGRPALLHQIQAQAQAPLKDAAAVNATRWALFNALNATGLPVETGSGGRTKFNRTRLDIPKTHALDAACVGTVDQVRDWNRPVLAIRATGRGAYSRTLTFNNGFPRGYLMREKRIHGFQTGDWVRAEVPKGKKAGVHVGRVAIRRTGSFNVQTPGGTVEGLSHRYCRVLQRADGYGYAFQPKPDTEDARRAA

SEQ ID NO: 6789 - protein, 428 aa, Enterococcus sp.; identical to SEQ ID NO: 4335

SEQ ID NO: 6790 - protein, 428 aa, unidentified; identical to SEQ ID NO: 4442
  REGION 1..428: note = Bioreactor metagenome

SEQ ID NO: 6791 - protein, 317 aa, unidentified
  REGION 1..317: note = Human gut metagenome
MSTTVFVLDKKHRPLMPCRPARARRLLRAGRARVVKRFPFVIRLVDRTVEQSEVQPALIKLDPGSRETGAAVVRDDGKKRHHALAFFVIEHRGGAIRDALKARSAFRRRRRSQNLRCRSPRFLNRVKPKGWLPPSLRHRVETTLSFVRRMCRYLPVSGIATELVKFDSQKLQNPEVSGVEYQQGTLFEYEVREYLLEKFGRKCVYCGAEGVPLNIDHVVPRAKGGSNRVSNLVLACMSCNQKKGARSLEDFLKGKPKVLARVRRELKTPLRDAAAVNATRWVLFNELKATGLPVETGSGALTKLNRHAFGVEKEHWL

SEQ ID NO: 6792 - protein, 426 aa, unidentified
  REGION 1..426: note = Human gut metagenome
MRIFVMNMRGDPLMPCTQKKARILLKEGKAVIYKYDPFTIQLTYATGETKQDCHIGIDTGSKHIGMAITSENKVLFKGEIELRQDVKSNIDTKHIYRRSRRNRKTRYRQPRFLNRKRSDKWLPPSLQNRVDHTFHWIDTFCSLVSDPILHIEVGKFDTAKMINPEINGVDYQYGQTYGFFEERYFVFARDNYTCQCCGKSKDKILQTHHIIYRSNGGTDRVDNLITVCTDCHTSKNHQKGGILYKWQEQHKKVKQYKEPPFMNAIRKRIFARYPNAHITYGSETTPHRKELGLEKTHYNDAITISGITNIKEDPKEWLLIKQFRKKKRSLHEATARKGRKEPNCFQKRNSKNTPFYRGFYLNDKVKVFGHGQIGYITGFTSGGAYVKNVDGEYITIPNKSYKQVSIKYLKLLSHNNNWQYVVKSAV

SEQ ID NO: 6793 - protein, 442 aa, unidentified; identical to SEQ ID NO: 3161
  REGION 1..442: note = Human gut metagenome

SEQ ID NO: 6794 - protein, 393 aa, Moorena sp.
AAVFRQYPFTIILKVEVTAIPDPITLKIDPGSKTTGIALVQGEKVVFGAELTHRGQAIKASLESRRSLRRSRRNRHTRYRQARFLNRTRHQGWLAPSLQHRVETTLTWVNKLIKFVPIKGIYQELVRFDLQQLENPEISGVEYQQGELAGYEVREYLLNKWERKCAYCGIENLPLQVEHIQPKAKRGSNRISNLCLACEKCNLKKGTQDIEKFLAKKPDVLKRILSQAKRQLQDATAVNSTRWTLFNRLKETGLPVSTSSGGLTKFNRTRLNLSKTHWLDAACVGQVNCLQVLTNQPLLIKAIGHGTRQMCRTDKFGFPSRYVPRLKFVKGFQTGDIVKAVVTSGKKIGTYIGRVAVRTTGSFNISAASGLIQGIGNKYCSLIHRKDGYLYAT

SEQ ID NO: 6795 - protein, 408 aa, unidentified
  REGION 1..408: note = Human gut metagenome
MVYVQDINGKPMMPTTRHGKVRRLLKDKKAVVVNLCPFTIKLMYVTSDYKQEIVLGVDAGTKHVGLSATTKSKELYSSEVILRNDIVDLLSTRRELRRSRRNRLRYRKPRFDNRIKSKRPGWVAPSVKYKVDAHIHIIDNVCSILPISRIVIEVAQFDTQKINNPNISGKEYQEGDQLGFWNVREYVLARDGHKCQYCKGKSKDPVLNVHHLESRKTGGDSPSNLITLCETCHKEYHKGNIDLKIKRGSSPRDAAVMGIMKWRLYEELKSKYDNISMTFGYVTKYNRIKHGIEKSHVFDAFVISKNFDAIRLGYYYKVRLVRRHNRQIHKQKIPKGGIKRPNQSPFEVFGFRLFDRVMFENSYYFIFARRKTGSFNIRDIDGKKQRDITYKKLKLSRCKRFMVQKEMD

SEQ ID NO: 6796 - protein, 431 aa, unidentified; identical to SEQ ID NO: 5232
  REGION 1..431: note = Human gut metagenome

SEQ ID NO: 6797 - protein, 497 aa, Moorena sp.
MRVFVLDKNRKPLDPCHPAKARKLLKSGRAKVLRRYPFTIIIQDLEVENCSTHVHQLKIDPGAKTTGLAIVQGSRVVWGAELTHRGFQIRDTLTSRRQLRRSRRSRKTRYRQPRFLNRKKPKGWLAPSLMSRVHNILTWVNKLIKFCPVTGISQELVRFDTQKMLNPEISGIEYQQGTLYGYELREYLLTKWNRTCAYCGAKNTRLEIEHIKPRSKGGSNRASNLTIACHDCNQAKGNQEIEQFLSRKPSILKRILSQAKKPLADAAAVNATRWKLHDELKLIGLPVEVGSGGLTKYNRCRQNLPKTHWLDAANVGKVDTLYIEDYQPLLIAAKGHGKRQICGTNKYGFPIRHNSRKKIHKSFQTGDIVKAVVTKGKKIGTYVGRIATRKTGSFDITTHLEKFQGLAISTVKLFIAKMDIAINFMADKSVVTALRLRGQCPSATLRRVSGQALRDRGVELQGPRSRSAVSTSSAPPPWSPPVGGKQGGRFPFSREIS

SEQ ID NO: 6798 - protein, 442 aa, Lactobacillus sp.
MKHENANRVFLLNKDGKPLMPCRPRKARQLLKSGKAFVVKKYPFTIQLKYGSYGYKQKVSLGVDTGQRHIGFAVVSQDKVLHQSEVELRQDVHTNLYTRKIYRRGRRNRKTRYRQARFLNRVHGKRDGLWLPPSVKSKVSHNIAWIKRYLAVLPNPDLHIEVGKFDMAKMVNPDISGKQYQEGSLKDWKNYEYYVLARDKYTCQLCHKHGEGVKLVVHHIVYRSQGGTDRVDNLITLCTNCHTTKNHQPGGKLYKWMKAKKKVTKQLKGATFMNILRKRIMTTFPEASFQYGSQTYVDRKNLLLPKGHFMDAIAISGIKSVGQMPETVTMISQFRKKKRSLHEATARKGRKQPNTSSKRNEKNTKYARGLWLNDYVRVIGNNAKGYVKGFKSNGYSVYLTDGLGNYVLNDGRNYVNSKQCQLITHNSSWQKAEQMLSLYEFK

SEQ ID NO: 6799 - protein, 432 aa, unidentified; identical to SEQ ID NO: 6070
  REGION 1..432: note = Human gut metagenome

SEQ ID NO: 6800 - protein, 392 aa, unidentified
  REGION 1..392: note = Human gut metagenome
MTSYAFVLDANGKQLAPTKEQKAWFFIRKKRASLVSKYPIVIQLMKEIPEKEICQDEIRCGIDDGGLHVGIALVQKCKTKNKVVFKGTMEQRNDVKHLMEVRRGYRRYHRYHKRYRQARFDNRKSSKREGRIAPSILQKRQATIRVIHWLNKWINITNYWLEDVSVDIRALTDGYQSYRWQYQKSNRLDENIRKAAILRDGGKCMECGKSNCRLEVHHIKPRRRNGSNTLDNLITLCESCHQKTEGQEELYMDRYFSLLKSSDNKNLNYAQHVMIGKMWLRKQLSGLGVLYLTSGGDTANKRIDWNIEKSHANDAVCITDLRPDTCDVKEWTMKPMRRQSKAKTDHVLGIHHRDLVEYTFKNGETHRGYVTALYPEQKAINFQSPTKHCQKS

SEQ ID NO: 6801 - protein, 442 aa, Lactobacillus sp.; identical to SEQ ID NO: 5193

SEQ ID NO: 6802 - protein, 408 aa, unidentified; identical to SEQ ID NO: 4709
  REGION 1..408: note = Human gut metagenome

SEQ ID NO: 6803 - protein, 414 aa, unidentified
  REGION 1..414: note = Human gut metagenome
MPCSPAKARLLLKEKKAIVKRRTPFTIQLTIATGESKQPVTLGVDAGYKHVGLSASTEKAELYASEVELRQDVSDLLSARRALRQSRRNRKTRYRAPRFNNRLRTKRKGWLAPSVENRINAHLSRIEAVLRLLPVTKITVETASFDMQLLKNPDISGKEYQEGEQLGFWNVREYVLFRDGHVCQHCHGRSKDPVLNVHHLESRRTGGDSPGNLITLCETCHKALHRSEITLKTKRGQSFRAEAYMGLMRWEVLNRLKTSHPGLEVHNTYGYRTKYTRIVNGIDKSHCADAFCIAGNLGAERLGEFFFQKQTRRNNRQIHKLSILKGGIRKRNQAPFEVNGFRLFDKVACKGEEGFIFGRRSSGYFDVRKLDGTCISAGISYKKLHLLEKRRTYLTEIRKEEALPPLPEGSGLRA

SEQ ID NO: 6804 - protein, 433 aa, unidentified
  REGION 1..433: note = Human gut metagenome
MPDKVYVISRLGHPLMPCSPAKARHLLDDKKAKVVKRMPFTIRLLYGSTKYIQPIILGVDAGSKTIGLSASTAKEEVFAAEVMPRNDVVENLSTRREFRRARRNRTTRYRKPRSDNRVRSNHERWLAPSVKVKIQEHITSIKRVCTILPISKVVIETAEFDLQLLKAIQEGKPIPEGEDYQKGEMYGSYNVCQYVLWRDNYTCICCGVRGTPKNPVRLHIHHFESRKYGGNAPDNHGTLCDDCHKKFHLGIITDVKLKTRRRQSTRDAAFMGIMRKTLMWRLRTELFIPVAETKGYITKATREKLLVLPKSRTRDALAIAQGRHGFGIKEYAYVEPANHIYTVRPVRHHNRQLHKASILKGGIRKRNQASKYVFGFRLYDKVLYQGKACFVWGRRTSGTFLLRTIDGIKVKDGVSYRNLIYLNKAAITLLRKQ

SEQ ID NO: 6805 - protein, 414 aa, unidentified; identical to SEQ ID NO: 2588
  REGION 1..414: note = Human gut metagenome

SEQ ID NO: 6806 - protein, 420 aa, unidentified
  REGION 1..420: note = Human gut metagenome
MQYVYVLNKHGEPLMPCSPGKARLLLKQQKACVVKRTPFTIKLLFGSAGYKQPITLGVDAGSKHVGLSASTEKRELYSEEFTPRSDVVELLSTRRQNRRSRRNRKTRYRVPRFDNRVHSKHKGWLAPSVEVKIQEHITVIKHICKILPISLVRVETAEFDTQRLKAMLAGKPLPVGTDYQLGEMYDEYNVRQYVLKRDHYTCQCCGTHNTAKKVVKLHVHHLESRKTGGNAPSNLVTLCTTCHKNLHKGRVTIDGKERGKPLRDAAFMGIMRKTLMVRLKEELPIPVQGTYGYITKMRREQNDIKKSHTNDARCISKHPLAEPCSVCYRTKAIRHHNRQTHKANFSKKGIRKRSQMPYLVEGFRLWDKVLYKGQECFVSGRRSSGSFALKKLDGTSISKGVTFKKLRLLEPATNYLIERM

SEQ ID NO: 6807 - protein, 413 aa, unidentified; identical to SEQ ID NO: 2636
  REGION 1..413: note = Human gut metagenome

SEQ ID NO: 6808 - protein, 421 aa, unidentified
  REGION 1..421: note = Human gut metagenome
MIYVRSKDGKALMPSERGGRIGYLLRHGKAHVVSRVPFVVQLDYESTTYTQEVSLGIDAGSKHIGVSASSVKRELLAAQVELRSDVTKLLSSRRELRRTRRNRKTRYRKSRFDNRKRKDGWLAPSVEQKVESHLKVIHLAHKLLPITKTTIEVAQFDAQEIKNPDINGKEYQQGEQMGFWNVREYVLARDGHKCIHCKGKSKDPILNVHHLESRKTGGNSPGNLVTLCETCHKAYHRGEFDLKIKRGTTLRDAAVMNIMRWSVYERAKAEFGNVYLTYGYITKHTRIENDIEKTHAADAFCIAKNVHARRSRTFFMCRCVPRHTRALHVANPKKGGIRRSCIASHKIGKSRFQRFDMVWWKGKECFIFGSTHGRPILRDVEGKQIAGQPSVNIKTIKFLKRLRNNILVEERTSESWIENES

SEQ ID NO: 6809 - protein, 442 aa, unidentified
  REGION 1..442: note = Human gut metagenome
MSTSVFVLDKKHRPLMPCRPARARRLLRAGRARVVKRFPFVIRLVDRTVEQSEVQPVLIKLDPGSRETGAAVVRDDGKKRHHALAFFVIEHRGGAIRDALKARSAFRRRRRSQNFRCRSPRFLNRVKPKGWLPPSLRHRVETTLSFVRRMCRYLPVSGIAAELVKFDSQKLQTPEVSGIEYQQGTLFEYEVREYLLEKFGRKCVYCGAEGVPLNIDHVVPRAKGGSNRVSNLVLACVSCNQKKGARSLEDFLKGKPEVLARVRRELKTPLRDAAAVNATRWVLFNELKATGLPVETGSGALTKFNRHAFGVEKEHWLDALCVGRLNGAVTRKGLNVLEIRCMGRGSRQRTRLTKYGFPRGYLMRQKCVHGFATGDMVEANVPKGKKAGLWRGRVAVRVSGSFNIQTPKGVIQGVGWKHCRLISHNDGYGYAWLGHAPHSSPA

SEQ ID NO: 6810 - protein, 443 aa, Anoxybacillus sp.; identical to SEQ ID NO: 2800

SEQ ID NO: 6811 - protein, 417 aa, unidentified; identical to SEQ ID NO: 5046
  REGION 1..417: note = Human gut metagenome

SEQ ID NO: 6812 - protein, 293 aa, Parasutterella sp.
HLSRIKAVLRLLPVTKITVETASFDLQLLKNPDISGKEYQEGEQLGFWNIREYVLCRDGHVCQHCYGRSKDPVLNVHHLESRRTGGDSPGNLITLCETCHKALHRGEITLKAKRGQSFRAEAFVGIMRWEVHNRLRALHPGIEVSNTYGYRTKHARIANGIAKSHCADAFCIAGNLGAERLCEFFFQKQTRRNNRQIHKLSILKGGIRKRNQAPFEVKGFRLFDKVACQGEEGFIFGRRSSGFFDVRKLDGTRISAGISCKKLHLLEKRRTYLTEIRKEEALPPLPEGRGLRA

SEQ ID NO: 6813 - protein, 424 aa, unidentified
  REGION 1..424: note = Human gut metagenome
MASMQYVYVLNKHGEPLMPCSPGKARLLLKQQKAHVVKRTPFTIKLLYGGAGYKQPITLGVDAGSKHVGLSASTEKRELYREEFTPRNDVVELLSTRRQNRRSRRNRKTRYRAPRFDNRVHSKHKGWLAPSVEVKIQEHITVIKRICRILPITLVRVETAEFDTQRLKAMLKGKPLPVGTDYQLGEMYDEYNVRQYVLKRDNYTCQCCGAHPTEKKPIRLHVHHIESRHVGGNAPNNLITLCVACHKALHEGKITLDKGKKRGKPLRDAAFMGIMRNTLLARLKDELNIPVKQTYGYITKLLREKNKIPKSHVNDARCIAKAPNAKPCDTMLYTRALRHHNRQIHKAKILKGGIRKKNQAPYLVKGFRLWDKVRYNGEECFITGRRSSGYFALKKYDGTVISNSASYKKLMLLEAATNYITERS

SEQ ID NO: 6814 - protein, 423 aa, Moorena sp.
MSNYVFLIDSNQTPLNPVHPKQARKLLDAGTAAVFRRYPFTLRLKRVIDNPNVYPLTLKIDPGSKFTGIALVTNQGNVIWGMELQHRGKQIKNALLARKAVRRGRRNRNTRYRQARFLNRKRPNGWLAPSLKHRVLTTQTWVKRIQKFASISSIVQELVKFDTQAVQNPEISGIEYQQGTLKGYECREYLLEKWNRQCAYCGVKDVPLEIEHIEPKSKGGSDRISNLCLACHKCNQCKGNKDIKDFLKGKSELLNRVLKQAKTSLKDAASVNSTRWALFNTLKSFGLPVSTGTGGQTKFNRMRFDLPKAHWIDAACVGSVETIKLVTTKIIKVKATGFGGRQRCQTNKFGYPQKHRPLRPIQGFCTGDIVRADVPKGKYKGTFTARVCPMSHGYGELVIDKKRRSIKLDYLTSIHQKDGYDYP

SEQ ID NO: 6815 - protein, 425 aa, Moorena sp.
  SITE 425: note = misc_feature - Xaa can be any naturally occurring amino acid
MRVFVLDKNLKTLDPCRPARARLLLKQGRAKVFRRYPFTIILSDLEVENCTTHHHQLKIDPGAKTTGLAIRQNNTVIWGAEITHRGFQIRDALTSRRQLRRSRRNRKTRYRKPRFLNRKRPERWLAPSLMSRVHNILTWVKKLIRFCPIAGISQELVRFDTQKTENPEISGTEYQQGTLYGYEIREYLLEKWNRKCAYCGTTDTKLEIEHIKPKSLGGSDRVSNLAIACHDCNQAKGNQEIQQFLSGKPDVLRRILSQAKRPLADAAAVNATRWKLYKELKSIGNPLETGSGGRTKYNRCRFNLPKTHWLDAACVGNVQSIYVENYQPLLIEAKGHGTRQICRTDKFGFPKRYCSRTKIHKGFQTGDIVKAVVTKGKKIGTYVGRVATRKTGSFNISTANGLIQGISHKYCQPIHKKDGYAYTIX

SEQ ID NO: 6816 - protein, 420 aa, unidentified
  REGION 1..420: note = Human gut metagenome
MQYVYVLNKHGEPLMPCSPGKARLLLKQQKACVVRRTPFTIKLLYGSAGYKQPITLGVDAGSKHVGLSASTEKRELYREEFTPRNDVVELLSTRRQNRRSRRNRKTRYRAPRFDNRVHSKHKGWLAPSVEVKIQEHITIIKRICKILPISLVRVETAEFDTQRLKAMLAGKPLPVGTDYQLGEMYDEYNVRQYVLKRDNYTCQCCGAHTTAKKLVKLHVHHLESRKTGGNAPSNLVTLCTTCHKNLHKGKVTLDGKERGKPLRDAAFMGIMRKTLMARLKEELPIPVQGTYGYITKMRREQNDIKKGHTNDARCISKHPLAEPCSVCYRTKAIRHHNRQTHKANFSKKGIRKRSQMPYLVEGYRLWDKVLYKEQECFVSGRRSSGSFTLKKLDGTSVSKGVTFKKLRLLEPATNYLIERM

SEQ ID NO: 6817 - protein, 431 aa, unidentified
  REGION 1..431: note = Human gut metagenome
MPNKVYVINKHGRPLMPCSPAKARHLLDDGKAKVKKRAPFTIQLVYGSSGYTQEVILGVDAGSKTIGMSASTTKEELLSAEVKPRNDVVDLLSTRREFRRARRNRKTRYRKPRFDNRVRSKHKGWLAPSVEVKIQEHITSIKRVCRILPVSKVVIETAEFDLQLLKAIEEGKPVPQGEDYQQGEMYGHYNVRQYVLWRDGYTCQCCGAHATKKKEVRLHVHHLESRKVDGDAPDNQVTLCESCHEKLHKGLIAEKDFKKRKRKSTRDATFMGIMRKTLMQRLCSELPIPVIETRGYITKATREKLLVLPKSHTNDALAIAQGKQGFNVGYLPGIVQINKIYTIRPVRHHNRQLHKATILKGGIRKSNQTEKYVFGYCLFDKVQFNGQDCFIWGRRTTGIFTIKTINGKMIKDGISFKKLKLVEKSTSYLIA

SEQ ID NO: 6818 - protein, 373 aa, Moorena sp.; identical to SEQ ID NO: 6300

SEQ ID NO: 6819 - protein, 460 aa, Streptomyces sp.
VYTGGVGSGRIFVLSKEGHPLMPCHPARARELLGKGRAVVARYVPFTIRLKDRALAGSEVDGVQLRIDPGSKGTGLHLTDEKEEINERGATGTVRRGLVSVELQHRGDQIRGCMQQRAGYRRRRRSANCRYRAPRSGNRTRRESWLPPSLRHRVDTVFAQAARLCRYAPVAEIHVESGGFDTHSTGTQGTLAGTDARAYLHARWNSACSYCGVTGVRLNIEHVRPRSRGGSSRISNLVLACVPCNRRKGTLPVEVFLAASPDRLARILQQGETPLHDAAAMNATRWPLREALSRLDRPVFGWPGGLTKRNRAAMGLEKSHTLDALSVGHLDHESGDAIVRFPSRVLVVKATGRGSYARTTPDRFGFPRLRRARTKQHFGYVTGDLVRATVPTGKWTGTWTGRVCVRARGQHSLSTPKGRINVSHRNLRLLQRGDGYGYGTRPEPRRQYPGKPVDRRPTGS

SEQ ID NO: 6820 - protein, 425 aa, Moorena sp.; identical to SEQ ID NO: 3889

SEQ ID NO: 6821 - protein, 423 aa, Arthrospira sp.
MSNHIFVLDTNRKPLTPCKPGVARSLLKAGKASVFRRYPFTIILNKEVDANPEPLELKLDPGSKVTGIALKQGNHIIFAAELQHRGQQIKEALLSRRQLRRSRRNRKTRYRPARFLNRTRPEGWLAPSWQHRVDTLMTWVHRFRRLAPVGRITQELVRFDLQLMENPEISGVEYQQGELQGYEVREYLLFKWGRTCAYCGAQNVPLEVEHIQPRSKGGSDRVSNLTMACHSCNQAKGNGDIRDFLSGQPDVLSRLLRQAKSPLKDAAAVNSTRWALFKALKATGLPVTTGTGGQTKFNRLRLNLPKAHWLDAACVGPVESLEVLTSKPLLILAKGHGTRQMCGTNKYGFPTRHRSRRQIHKGFQTGDMVTALVTAGKKIGSYLGRVLCRASGSFDITTASVRVAGISHKYCQPIHRKDGYAYA

SEQ ID NO: 6822 - protein, 442 aa, unidentified; identical to SEQ ID NO: 2834
  REGION 1..442: note = Human gut metagenome

SEQ ID NO: 6823 - protein, 466 aa, Solobacterium sp.
LSIKPLINIGEGVIYSSICTGLSLQTYQKRKEVPYMVYVLDIDGQPLMPTTRHGKVRRLLNSHLAKVVKRCPFTIQLLYQSTKETQPVSLGVDAGSKHIGMAATTEKKVVYQEELSPRNDVVKLLSARRTLRRTRRNRKTRYRKPRFNNRAHSKHKGWLAPSVEVKIQEHITAIKRICQILPISEIHVETAEFDLQRLKAMDEGSPLPVGIDYQLGEQYDFYNTRQYVLHRDGYTCQCCGTHDNNIKLHVHHIESRQTGGDAPNNLIILCEHCHKALHEGKLELPKGKKRGKSYRDATFMGVMRKTLLERLKKEIDVPVEGTYGYITKYWRERAGLEKSHIHDAVCISKYPYAKPLDIYYLTKTVRHHNRQIHKSNFSKGGIRKRNQAPYLVKGFRLFDKVLYQGKEYFIFGRRATGYFDIRTLDGTKVNKGSISYKKLRIQDTAKAYLKEARAIPHMNKFTCVLA

SEQ ID NO: 6824 - protein, 442 aa, unidentified; identical to SEQ ID NO: 3161
  REGION 1..442: note = Human gut metagenome

SEQ ID NO: 6825 - protein, 448 aa, unidentified
  REGION 1..448: note = Human gut metagenome
MSTGLRAVQAEPAGIRKGDALKVFVLNMRGRPLMPCSPARARHLLKAGKAVVRRRTPFTIQLRIATGETKQSVTLGVDAGAKHVGLSAATEKEEVFASEVELRQDITGLLAARLSLRRDRRHRKTRYRAPRFLNRVRSKHKGWLAPSVENRIQAHMSRIDAVCRLLPVTRIVIETASFDVQKIRNPEVEGTGYQQGDQLGFWNVREYVLFRDGHVCQHCHGHSKDKILNVHHLESRQTGGDAPNNLITLCETCHKACHAGKIKLKVKRAQSFRAEAFMGIMRWTLLDRMRKAHSGLPVENTYGYLTKNTRITLGLPKTHCVDAYCIAGNLKAVRRGVCLHQRQVRKHNRQIHKCTVLSKTLKDGTKIGYRKLNQTPHLVKSFRLFDKVRCLGQTGFIFGRRSSGYFDVRRLDGVKLSPSISWRKLTLLEKRSTYLTELRKEDGASSPV

SEQ ID NO: 6826 - protein, 460 aa, unidentified
  REGION 1..460: note = Marine sediment metagenome
MDDVRVLVLDNQKQPLMPCSSARARQLLRDDKASVFRRYPFTIILKHRAGGDLQPVSLNIDPGSKTTGVALVADYPRGTCAVWALHIGHRGQQIKSALDSRRGIRRSRRNRKTRYRAPRFLNRTRTKGWLPPSLMSRVYNVETWVKRLLQFTPIASANVETVRFDMQMMENPAIAGTDYQQGSLFGWELREYLLYRHKHTCAYCDGLTGDPVLEKEHVIPRALGGSNRLANHVISCRTCNQDKGSLHPSAWAQLCAKHGGTLNIKRDRNMRRILAGYRPALKDAAAVNATRYAVGDVVKRLIANTQFWSGGRTKKNRSEQGYPKDHWIDAACVGKKGSSVILLCDTVLIAHAKGHGSRQMCRVDKYGFPRTSAKTFSIVNGFKTGDMVLASVPSGKKQGMHMGRVAVRSSGSFNIQTKTGVVQGISHKHCRIIQRNDGYNFNYGAAIPLCAKAQSILAGT

SEQ ID NO: 6827 - protein, 401 aa, unidentified
  REGION 1..401: note = Bioreactor metagenome
MPTTPCKARKLLKQGKAKVVKREPFTIQLLYATGETKQDITLGVDAGSKIIGLSATTDKQELFSAEVELRNDIVDLLSTRREFRRTRRNRLRYRKPRFLNRVYSKNKGWLAPSVENKIQTHLKIISKIHEILPISKIIIEVASFDIQKIKNPDIEGEQYQQGEQLGFWNVREYVLWRDGYKCQGKKGCKNKILNVHHIESRKTGGNSPSNLITLCESCHKDYHAGKLKLNLKRGQSFKDATFMGIMRWTFYNRLKEVYPNVKITYGYITKNTRIQNNLPKEHRIDALCISGNPNVKRLDYWYYIKQVRRHNRQIHKAKILKGGIRKLNQAPYLVKGLRLFDKVKYKGQECFIFGRRSSGYFDLRKLDGTVIHRSASYKDLQLLSKRKTLLWERREGVSSPT

SEQ ID NO: 6828 - protein, 421 aa, unidentified
  REGION 1..421: note = Human gut metagenome
MPKVYVLNRHGRPLMPCTPAKARHLLDAGKAKVRHRTPFTIQLLYGSTGYTQEVILGVDAGSKTIGLSAATETEELFSAEVKPRNDVVELMSARRQFRRARRNRTTRYRKPRFDNRVRSKHKGWLAPSVEVKIQEHMTAIRRACAILPVSKVVVETAEFDLQLLKAVAEGKPVPQGEDYQKGEMYGHYNVRQYVLWRDSYTCCICGVHGSVRKGVPLHVHHLESRRVGGDAPDNLVTLCTACHDKLHKGIIMAADIKKRKRRSTRDATFMGIMRMTLLRRLREQLPVPVVETRGYITKATRENLLVLPKSHTNDALAIAHGPQGFRAEYLPNTRQADRLYTIRPVRHHNRQLHKATILKGGVRKANQAEKYICGFRLYDKVLYNGIECFVWGRRTSGSFLLRQLNGEKVKDGVSYKHLKLL

SEQ ID NO: 6829 - protein, 415 aa, Bacillus sp.; identical to SEQ ID NO: 5533

SEQ ID NO: 6830 - protein, 442 aa, unidentified; identical to SEQ ID NO: 3333
  REGION 1..442: note = Human gut metagenome

SEQ ID NO: 6831 - protein, 383 aa, Sutterella sp.
MSTGLQAEQAEPAGIRKGDTLKVFVLNMRGKSLMPCSPAKARHMLKAGKAVVVSRTPFTIKLTIATGETKQDVTLGVDAGARHVGIATTTEKEEVFASEVKLRQDITGLLADRLAFRRARRNRKTRYRSPRFNNRVRSKHKGWLAPSVENRIQAHMSRIDAVCRLLPVTKIVITTASFDVQKIKNPTIEGTDYQQGDQLGFWNVREYVLFRDGHVCQHCHGRSRDRILNVHHLESRKTGGDAPNNLITLCETCHKAYHAGKIKLKIKLKVKCGQSFRAEAFMGIMRWTLLDRVRKTHPELPVENTYGYLTKHKRIALGLPKTHCADAFCIAGNLKALEEEISSSNNRRESTTDRYTGVRFSKAECENSIRRHSSSRGSAYSTR

SEQ ID NO: 6832 - protein, 434 aa, unidentified
  REGION 1..434: note = Human gut metagenome
MVYVLNKQGKPLMPCKEAKARKLLKQNKAKIVKHEPFTIQLLFDCENQTQDISLGIDAGSKHIGVSATTEKQVLYEADVELRNDIVNKLSSRSEARRIRRNRLRYRPARFNNRVHSKHKGWLAPSIEQKINAHIQVIRHLYEILPITKLIVETAQFDIQKINNPEISGEEYQQGNQLGFWNVREYVLFRDNHECQCCHGKSKDNVLNVHHIESRKTGGNAPNNLITLCETCHQAYHKGEVTLKFKRGNSYRGAAFMGIMRKTLFSRLCALYPNVNETYGYITKNIRVENNLPKEHYIDARCISGNPKANPLEYYIYQKCVRRQNRQIHKNNFLKGGYKKNNQLIGNVFGFDLFDTVEYQNKHYFVFGKRKSGFLDIRNLDGDKVNNGSISYKKLKRIKHNSVKLTERRRQFLRTPKGDAVPLPKILWRNKYVLL

SEQ ID NO: 6833 - protein, 420 aa, unidentified
  REGION 1..420: note = gut metagenome
MQYVYVLNKHGEPLMPCSPGKARLLLKQQKACVVKRTPFTIKLLFGSAGYKQPITLGVDAGSKHVGLSASTEKRELYSEEFTPRSDVVELLSTRRQNRRSRRNRKTRYRVPRFDNRVHSKHKGWLAPSVEVKIQEHITVIKHTCKILPISLVRVETAEFDTQRLKAMLAGKPLPVGTDYQLGEMYDEYNVRQYVLKRDHYTCQCCGTHNTAKKVVKLHVHHLESRKTGGNAPSNLVTLCTTCHKNLHKGRVTIDGKERGKPLRDAAFMGIMRKTLMVRLKEELPIPVQGTYGYITKMRREQNDIKKSHTNDARCISKHPLAEPCSVCYRTKAIRHHNRQTHKANFSKKGIRKRSQMPYLVEGFRLWDKVLYKGQECFVSGRRSSGSFALKKLDGTSISKGVTFKKLRLLEPATNYLIERM

SEQ ID NO: 6834 - protein, 421 aa, unidentified
  REGION 1..421: note = Human gut metagenome
LWYKTGCATQEGSIGIDTGSQHIGVGVTCGDKVILKDEHELRSSMEKRSLMETRATMRRGRRYRKVRYRKPKWRHHTKRMYFEKANRKGQHWRKVKTTTQSPRPESWLPPSLQSKCDHHFRIIDRYLKYLPDSITKNLVIEVGRFDMARMNDPTIHSEMYQRGPMYDTENLRAYIFARDGYKCACCKAKAGSIRKKDGTSVKLIAHHIQFRSRGATDNPKYMISVCDHCHTTKAHQPGGILYSWMEKNKKVTRGLRDATFMNILRRRLFDRFPQAAFTYGNITAADRKRLLLPKGHANDAVAISLFGKDVSVINGICQTMHYKQVRKSKRSLHEATPRKGRKEPNTKAIRNKKNTTHVNGFKLWDSVLANGQKLFICGFTGSSAYLVDQDGRYVSPPGKTYKQWTLSKLSRLHPNGNWMMA

SEQ ID NO: 6835 - protein, 418 aa, unidentified
  REGION 1..418: note = Human gut metagenome
MVYVLGQDGHPLMPTCRHGKVKRMLKSGMAKVVKKCPFTIQLQYESTTHTQKINLGIDAGSKTIGVSATTESKVLYESEVVLRNDIVELLSGRRALRRSRRNRKTRYRKPRLDNRRRPDGWLAPSIRQKIKTHVTVVENVMKILPVTKIIVETASFDIQKIKNPKIEGAEYQYGEQLDFWNVREYVLFRDGHTCQCCKGKSKDNILNVHHIESRKTGGNAPNNLITLCETCHKAYHKGVITLPKEIHRGMRFRDAAFMGIMRWAFYDRLKELYTPFGVEVINTYGYITKNTRIEHGLPKEHYVDARCISGNPAAKPLGHYYFQKKVRCHNRQIHKNTILKGGIRKRNQAAYLVNGYRLFDKVKYQNQEYFIFGRRSSGFFDIRTLDGTKVNKGSISCKKLQLVEKSKHYLTEQRKVAA

SEQ ID NO: 6836 - protein, 420 aa, unidentified
  REGION 1..420: note = Human gut metagenome
MQYVYVLNKHGEPLMPCSPGKARLLLKQQKAHVVKRTPFTIKLLYGSTGYKQPITLGVDAGNKHVGLSASTEKREFYCEEFTPRNDVVDLLSTRKQSRRSRRNRKTRYRAPRFDNRVHSKHKGWLAPSVEVKIQEHITVIKRICRILPVALVRVETAEFDTQRLKAMLEGKPLPVGTDYQLGEMYDEYNVRQYVLKRDHYTCQCCGAHTTTKKTVKLHVHHLESRKVGGNAPSNLITLCTTCHDALHKGKVSLDGKERGKPLRDAAFMGIMRKALMARLREELPIPVQGTYGYITKMRREQNDIKKSHVNDARCISKHPLAEPCSVCYRTKAIRHHNRQTHKANFSKGGIRKRSQMPYVVEGYRLWDKVLYKGQECFVSGRRASGSFTLKKLDGTRISKGVTFKKLRLLEPATNYLIERM

SEQ ID NO: 6837 - protein, 408 aa, unidentified; identical to SEQ ID NO: 5302
  REGION 1..408: note = metagenome

SEQ ID NO: 6838 - protein, 414 aa, unidentified
  REGION 1..414: note = Human gut metagenome
MPCSPAKARLLLKEKKAIVVRRTPFTIQLTIATGETKQPVSLGVDAGYKHVGLSASTEKAELYASEVELRQDITDLLSARRALRQSRRNRKTRYRAPRFDNRIRTKRKGWLAPSVENRINAHLSRIEAVLRLLPVTKITVETASFDLQLLKNPDISGKEYQEGEQLGFWNIREYVLCRDGHVCQHCYGRSKDPVLNVHHLESRRTGGDSPGNLITLCETCHKALHRSEITLKTKRGQSFRAEAFMGIMRWEVLNRLKASHSELKVHNTYGYLTKHARIENGIAKSHGADAFCIAGNLGAERLGEFFFQKQTRRNNRQIHKLSILKGDIRKRNQAPFEVNGFRLFDKVACKGEEGFIFGRRSSGFFDVRKLDGTRISAGISCKKLHLLEKRRTYLTEIRKEEALPPLPEGRGLRA

SEQ ID NO: 6839 - protein, 480 aa, unidentified
  REGION 1..480: note = Human gut metagenome
LYTKPLDNIGEGSLPPSGEINLKGMTFMVYVKSIDGKALMPTSNAKARKLLKQKKAKVVSLRPFVVKLTYKTKTEYTQKLNLGVDSGYSNIGFSVIDAKQEYIAGEVKLLEGMKKRLLEKASYRRIRRSRLRYRKARWNNRVKSKKKGWLAPSLKHKLDTHIKFIDYLKNILPIGKITVEVANFDIQKMKDDLISGIDYQSGDMFGFWNVREFVLHRDGHKCQNPNCKHKDKKEQILKVHHIRYRSEGGSDRPENLITLCSKCHTPVNHKKGKFLYDWCVNGKKVRGFKDATFMSMIRWYLVNELKSKHNNVSITYGYITKNHRIQNGIEKSHLNDAFAIAKGTNQARTKDRFLVIQDRLKNRSLEKFYDSKIIDIRTEKKVSGGDLNCGRSTRNKNLNTENLRKYRGIRISKGQRRIRKQKYFYQPNDLVKYDGKVYTVKGTQNEGKYIALKEIKKVPKVELLIPYVFKKGLNWSYGLC

SEQ ID NO: 6840 - protein, 465 aa, unidentified
  REGION 1..465: note = Human gut metagenome
MSTCVCVLSNSGERLMPTIRLGKVRRLLKDGKAKIIKHHPFTIQLLYDSKANTQPIEICEDVGYNYIGISVKSQSHEYVSAQYDTLQDEKACHDSCRKLRRTRRNRLRYRKPRFDNRKRGEGWLAPSLEHKKQLNIRLIERYVSVIPITHATVEVGSFDTMLVKAIEEGKATPESADYQKGPRYNLATLREAVFYRDNYICKVCGRKATEGAILHMHHMFYWKGRHGNSLSELITVCEKCHTPANHQKSGKLYGFGENVKFADLSGAAFMNTVRWQIVNELYAAFGKDFVTVTYGAMTKEKRIALHLEKSHNNDAYAMGSFHPVNRCAFEHYEKVKRNNRILEKFYDSQYIDTRTGELTNGKSLFNGRISRSHKKDSENLHKYRGKRICKGHRALRRKKLALNPGDLVSLNGEILVVHGTHTKKNGSVNVEFKTPSRGGKKSASLKKLKIVKTSNLMHSAWTKVS

SEQ ID NO: 6841 - protein, 494 aa, unidentified
  REGION 1..494: note = Human gut metagenome
MTKVYVQNKDGKPLMPTTRYCYVRLLLKEKKARVVSTTPFTIQLNYDTPDITQDLILGIDPGRTNIGVAVVKEDGQCVFSAHLETRNKDVPLLMQKRAGFRRQHRTLDRRRKRQRRAKAAGTNIAAGSVERLLPGYEKPIVCHYIRNKKARFNNRKRPQGWLTPTANHLLQTHINLIAKVAKFLPITKVVVELNRFAFMAMDNPNIHRWEYQQGPLYGLGSVEDAVYAQQDGRCLFCKKPIDHYHHVVPRHKGGSETLANRCGLCREHHALVHTDKVWADKLVTRKEGVNKKYHALSVLNQIIPHLMEYLGSETRYDVYATDGRSTKGFRVAKNVPKEHYTDAYCIACSILDTDIEVSTPVEPFELKQFRRHDRQACHQQRVDRKYYLNGKQVATNRHKAIEQKSDSLQEFRESYGDTAVSQLAVKPHSPQYKDMTRIMQGAVMDFGGTVGVFQGSDGFHNGKPDYYKSAKGARVLTKRCVLLAQNTGIVFIPA

SEQ ID NO: 6842 - protein, 420 aa, Clostridium sp.
MLKLEYCLNPKWQKWLIQKPFTIKLLYNSKKFIQSVTLGIDSGYLNIGFSAITNRKELISGEVKLLKGMSERLKEKAMYRRQRRSHLRYRKPCFDNRKRSNGWLAPSIQHKYDSHIRFINKLKMLLPITNIIIEVANFDTHKLKNPSIEGADYQNGEQKDFYNLREYIFHRDGHKCKNPNCKNKDKNPILQVHHIGFWKKDRSDRPGNLITLCDKCHIPKNHNKNGFLYGWQPKVKAFKEATFMSMIRWLLVNTLSCKYTYGYITKFNRIALKLEKTHYNDAFCIAGGSSQSRVKPLIFEQIKRNSRSLEKFYDAKVIDIRTNTKVSGAELFNGRRTRNKNLNSENLRKYRGVKVSKGQRRIRTKRYFYQPGDLVKYEDKVYTVKGTQNKGKYIALKELRKVPKVELLTPYKYRKGLVCI

SEQ ID NO: 6843 - protein, 415 aa, unidentified
  REGION 1..415: note = Human gut metagenome
MVYVLANDGQPLMPTERHGKVCRMLKSGIAKVVKKCPFTIQLQYESERNVQPVALGIDAGSKHVGVSATTKAKVLYESDVELRDDIVKLLATRRQLRRRRRSRKTRYRPARFDNRRRKEGWLAPSIRQKIESHLTVVANVCKILPVSQIIVETASFDIQKIKNPDIQGIEYQQGEQMDFWNIREYVLFRDGHTCQCCKGKSKDKVLNVHHIESRKTGGNAPNNLITLCETCHKGYHNGTVTLPKNIKRGMKFKDAAFMGIMRWTFYNTLKEQYEPDIPVHYTYGYITKNTRINHNLPKGHCIDARCISGNPDAVSDSTYYYQKKVRCHNRQIHKQTILKGGIRKSNQAEYLVRGFRLFDKVRYQGREYFIFGRRKSGFFDIRTLSGEKVNKGSINVKRLTFVDTRKNYLTERRTV

SEQ ID NO: 6844 - protein, 418 aa, unidentified
  REGION 1..418: note = Human gut metagenome
MPCSPAKARLLLKEKKAIVKRRTPFTIQLTIATGETKQPVVLGVDAGYKHVGLSASTDKAELYASQVELRQDITDLLSARRALRRARRNRKTRYRAPRFDNRIRTKRKGWLAPSVENRINAHLSRIEAVLRLLPVTKITVETASFNMQLLKNPDISGKEYQEGEQLGFWNVREYVLFRDGHVCQHCYGRSKDPVLNVHHLESRRTGGDSPGNLITLCETCHEALHRGEIALKTKRGHSFRAEAFMGIMRWEVLNRLKALHSELEVHNTYGYRTKHVRIANGIAKSHCADAFCIAGNLGAERLGEFLFQKQTRRNNRQIHKLSILKGAQRKRNQAPFEVKGFRLFDKVACKGEEGFIFGRRSSGSFDVRKLDGASISAGISYKKLHLLEKRQTYLTEIRKEEALPPLPEAGVSAPKCDE

SEQ ID NO: 6845 - protein, 363 aa, unidentified
  REGION 1..363: note = Human gut metagenome
MTMVYVQNKDGKPLMPTTRYCYVRLLLKEKKARVVCTTPFTIRLNYDTPNITQDLILGIDPGRTNIGVAVVKEDGSCVFSAHLETRNKEVPLLMKKRAAFRRQHRTQDRRRKRQRRAIAAGTTVESNTIERLLPGYEKPIVCHHIRNKEARFNNRSRPAGWLTPTANHLLQAHINLIAKAAKFLPITKVVVELNRFAFMAMDNPNIRRWEYQQGPLYGLGSVKDAVYAQQDGHCLFCKKPIDHYHHVVPRHKGGSETLANRCGLCEKHHALVHKDKAWAEKLVTRKGGMNKKYHALSVLNQIIPHLMEYLGSETPYDVYATDGKSTKGFRIAKNVPKEHYTDAYCIACSILDADTKVSACRTF

SEQ ID NO: 6846 - protein, 429 aa, Moorena sp.; identical to SEQ ID NO: 3068

SEQ ID NO: 6847 - protein, 434 aa, Solobacterium sp.
MKVFVLNKHGNPLMPCNPKKARLLLKQQKAVVAKQMPFTIRLLYGSSGYKQPVSLGVDAGSKHIGIAATTEKEVLFAEELTPRNDVVNLMSVRRQNRRSRRNRKTRYRKVRFDNRVHAKRKGWLAPSVEVKIQEHITAIKHVQQILPITEVHVETAEFDTQRMKAVEEGRPLPVGTDYQLGEMYDSYNVRQYVLKRDNYTCQCCGKHGDGVQFHVHHLESRKTGGNAPGNLITLCEDCHKAIHAGAKTLHARKAKRSTKSLRDAAFMGIMRKTMLERLRAEPGIPVNGTYGYITKLYRDLYRIEKSHINDAIVISKHFTAVPDDVWYFAKAVRRHNRQIHKNKILKGGIRKRNQAPHVVKGCRLFDSVKYARNTYFIFGRRASGQMDIRTLDGVKVSGGSLSFRKFSVQHCNAGALLERRKAIPPTNESVGFLA

SEQ ID NO: 6848 - protein, 473 aa, unidentified; identical to SEQ ID NO: 3562
  REGION 1..473: note = uncultured beta proteobacterium

SEQ ID NO: 6849 - protein, 410 aa, unidentified
  REGION 1..410: note = Fermentation metagenome
LRVYVLNQRKEPLMPTTPSKARKLLKQGKAKVIKREPFTIQLLTATGETKQDITLGVDAGSKAIGLSVTTDKDELFSAEVELRNDIVDLLSTRRQNRRTRRNRLRYRKPRFLNRVGSKNKGWLAPSIENKINTHLKVISKIYEILPISKTIVEVASFDIQKIKNPDIQGKEYQQGEQLDFWNVREYVLFRDGHKCQGRKGCKNKILNVHHIESRKIGGDSPNNLITLCENCHEDYHDGRLKLNLKRGQSFRDATFMGIMRWSFYNRLKEIYPNVQMTYGYITKNTRIVNGLPKEHRIDALCISGNLSVKQSEYWYYIKQIRKHNRQIHKANILKGGKKKLNQAPYEVKGFRLFDKVKYKGQECFIFGRRSSGYFDLRKLDKVVVHRSASYKDLELIQKSNSLLIERRSAG

SEQ ID NO: 6850 - protein, 453 aa, unidentified
  REGION 1..453: note = Human gut metagenome
MTAVYVISADGQKLMPTLRNGKVRHLLKEGKAKICKYRPFTIQLTYDTPNQVQPIEIGMDSGYQHIGLSVKTEKKEIFSAEFTLLTDEKKRHDDCRKYRRTRRNRLRYRKPRWLNRTKTIPEGWLAPSLLHKAEAHIKLVKDICSVAPITNVTTEAGEFDPALLKAMHEGKEPPQGTDYQQGPLYFADSLRKAVFQRDNYTCKICHKSALKDKNVILKIHHALYWKNRHGNNLSELITVCDRCHTSANHAPNGKLYGLEPKVARLESAAYMNIVRWYIINTLKKELPNIQVNFCYGALTARKRKDLELEKSHTNDAFCIGNFLPSLRSVATEYFKKKRRNSRILEKFYDAKYIDIRDGKIKKGAELSTGRTNRSIPRNNENNLRKFRSEKKSKGRRQIRKTRYSFQQNDFVFYKKRLYKVIGMQNLGKYISLQGFKPVPISQVQLYKHANAWT

SEQ ID NO: 6851 - protein, 505 aa, unidentified; identical to SEQ ID NO: 4960
  REGION 1..505: note = Human gut metagenome

SEQ ID NO: 6852 - protein, 442 aa, Lactobacillus sp.; identical to SEQ ID NO: 5262

SEQ ID NO: 6853 - protein, 426 aa, unidentified
  REGION 1..426: note = Human gut metagenome
LAKDLYRSIDREETNLRVYVLNKRGEPLMPCSAAKARILLKEKKAVVKRRTPFTIQLTIATGETKQSVTLGVDAGYKHIGLSASTEKAELYASEIELRQDVSELLAGRSALRQARRSRKTRHRAPRFDNRKREKGWLAPSVENRIGAHVSRVEAVLRILPVTKIIVETASFDVQRLKNPDMQGVEYQQGEQLGFWNVREYVLFRDGHECQHCHGKSKDKVLNVHHIESRRTGGDAPNNLITLCETCHKAFHRGEIELKVKRGRSFQAETFMGVMRRTFFERLRASHPEIEVRNTYGYLTKDTRIANKIEKSHCADAFCIAGNLKAKRLGYYFFQKQTRRHNRQIHKLTILKGGVRKRHQTPYEIKGFRLYDKVLYRGKVAFIFSRRSSGYFDIRTLDGERIAASGSYKKLRLLEKRRTFLIELRRN

SEQ ID NO: 6854 - protein, 560 aa, Streptomyces sp.
MTTFPAGEQTHRAVLPQQPALESARADTPGSRDETAHGHPATARGTGGEHGRGEIDGYGTGTRRRHAKNVATAANTAENGSGDAPPHDRKSKAGTGNGRVFVLSRDGHPLMPCHPARARELLRRGRAVVARHVPFTIRLKNRTLAGSEVVGVQLRIDPGSQGTGLVLTDEKQHITEDGIAITARRGLVSVELRHRGAQIHSTMLRRAGYRHRRRSANCRYRSPRAKNRLQPEGWLPPSLRHRVDTTFSVARRLCRWAPVSEVHVERSAFDTHSMSAGRPLYGAEYTRGPLVGTTARAYLRTRWHNACAYCGATGVPLNVEHVRPRSRRGSHRVANLVLSCVPCNKAKGSRSVETFLAHRPELLAEILGQTKAPLRDAAAMNAIQTRLVQALQTLGKPVHAWPGAVTKANRDATGLGKTHTLDALSVGPLGHESGNGIVRIPDGVLVVKATGRGTYARTTPDRYGFPRLPRTRRKQHFGYSTGDLVRAVVPSGRWKGTWTGRISVRARGQHSLAVPGGRVNVSHRHLRLLQRGDGYGYGIRPEAVPSAFPKKTVEPAPATS

SEQ ID NO: 6855 - protein, 427 aa, unidentified
  REGION 1..427: note = Human oral metagenome
MKQGNRVFILNMRGEPLMPCSQRKARILLKEGKAVINKYNPFTIQLTYATGETKQECHIGVDTGAKHIGIAVTSEGKVFYKAEVELRQDVSSNLGSKRIYRRSRRNRRCRYRKPRFLNRMRAKKWLPPSLQNRINHTFNWIDKFSALVPDPILHIEAGKFDTAKMINPDINGVDYQHGQTYGFFDERYFVFARDNYTCQVCGKSKGKILQTHHVIYRSNGGTDRVDNLITVCTDCHTSANHKKGGILYKWQAEHKKVKQYKEPPFMNALRRRIFDKYPDAIITYGSETTPKRKEIGLKKTHYNDAIVISGIEAIKENPNEWLLIKQFRKKKRSLHEATARKGRKEPNRTQKRNSKNTPYYKGFWLNDKVSVLGQVGYITGFTSGNAYIKNKNDKYITLPSKSYKQVGITSLRLLSHNNNWQYIRNVA

SEQ ID NO: 6856 - protein, 514 aa, Nocardiopsis sp.
MATFRTGQQTHPPVLPQQVALESESVDTPRIGHETRLRHHPTVVPGTDHVRGETGTASPDGSGVTTQPLAGEKPRERHPSVFVLDQHHTPLQPCHPARARQLLAKGRAVVARHTPFTIRLKDRSIAESEVDGVQVGIDPGSKHTGFAVFTHQAGERRGRYAIQLDHRGGRIRKKMGQRSAYRRRRRAANLRHRAPRFSNRTRPPGWLSPSLRHRVETTTAWVDRLTRWAPVTAVHVERVAFDTHSLSAGRPLEGVEYQQGTLAGYEVREYLLAKFDRTCAYCGATDTPLNLDHVHPRSRGGSDRVSNLVLACVACNQAKNDRPVEEFVTDPKTLARVLARAKAPLRDAAAVQSTRWALWRSLNERLPTRVGSGGRTKWNRTRNRLPKSHTLDALAVGEAETITQTTDRVLVAACAGRGSYSRTRPDKHGFPRLRLPRTKGFFGFATGDLVRAVVPQGKKAGVHTGRVAVRASGSFNITTAHGTVQGIGYKNMRLLQRADGYGYTWKGEGVSSRP

SEQ ID NO: 6857 - protein, 456 aa, unidentified
  REGION 1..456: note = Human gut metagenome
MSTCVCVLSNSGERLMPTFRLGKVRRLLKDGKAKIVKHHPFTIQLLYDSKTNTQPIEICEDVGYNYIGISVKSQSHEYVSAQYDTLQDEKACHDSCRKLRRTRRNRLRYRKPRFDNRKRGEGWLVPSLRHKKELNVNVVKMYCAVMPITHATVEVGSFDTMLLQAIQKGESKPEGVDYQKGPRYNLATLREAVFYRDNYTCQVCGRKIADGAILHMHHMFYWKGRHGYQLDELVTACEKCHTPANHQKGGKLFGFGEDKEFANLSGAAFMNAVRWQIVNALYATYGKEFVTITYGAMTKEKRIALQLEKTHSNDAYAMGDYYLAHRCVFRHYQKRRRNNRVLEKFYDATYIDARTGNKAKGKELFNGRINRNHKKDSENFHKYRSKKVSKGRRSIRRQRYAIQPYDTVRLEGKTYITSGCHNKGTRLLIPANGKSKSVAISKVQVVCHAGAWIQII

SEQ ID NO: 6858 - protein, 447 aa, Moorena sp.; identical to SEQ ID NO: 5316

SEQ ID NO: 6859 - protein, 442 aa, unidentified
  REGION 1..442: note = Human gut metagenome
MVTVQQSTHHLPFGRVFIRRNLFMVYVISQDSKPLMPCSNPIARLLLKQGKAKVKRREPFTIKLIYETTGYTQDLTLGVDTGSGTIGTAVSKDNGDIVYMSEVVVRNDITDKMTQRAKYRRNRRNRKTRYRKARWLNRSNSIKKDRFSPTMQSKLHSHVREIEYIQSILPITEMVFETGQFDMHLMKNPSLANPKVRPWGYQKGTNYGFENTKAMVLNRDNYTCQCCKGKHKDSKLEVHHIVFRSQGGSDEESNLITLCHTCHKDLHSGKINLKLSGKVKGNLKYATQMNSIRKQLFRLYPNAIETFGYVTKANRLHLGVDKEHYYDACTIATQGNAFNVKSNLYKKKCISDGDFQKTKGIRSEQAIVTDKICGFRKFDKVRYFGNDYFIKGRMSAGYAILMDIDGNKIDFSTMPRGYKTPKLSNCKRITARSTVMTQVKVV

SEQ ID NO: 6860 - protein, 267 aa, unidentified
  REGION 1..267: note = Human gut metagenome
VETAEFDTQRLKAMLEGKPLPVGTDYQLGEMYDEYNVRQYVLKRDHYTCQCCGAHTTTKKTVKLHVHHLESRKVGGNAPSSLITLCTTCHDALHKGKVSLDGKERGKPLRDAAFMGIMRKTLMARLRDELSIPVQGTYGYITKMRREQNDIKKSHVNDARCISKHPLAEPCSVCYRTKAIRHHNRQIHKANFSKGGIRKRSQMPYVVEGYRLWDKVLYKGQECFVSGRRASGSFTLKKLDGTRISKGVTFKKLRLLEPATNYLIERM

SEQ ID NO: 6861 - protein, 428 aa, unidentified
  REGION 1..428: note = Human gut metagenome
LKVFVLNMRGQPLMPCSPAKARHLLKAGKAVVRRRTPFTIQLRIATGETKQSVTLGVDAGAKHVGLSAATEKEEVFASEVELRQDITGLLAARLSLRRDRRHRKTRYRAPRFLNRVRSKHKGWLAPSVENRIQAHMSRIDAICGLLPVTKIVIETASFDIQKIKHPNVEGTDYQQGDQLGFWNVREYVLFRDGHVCQHCHGHSKDKILNVHHLESRQTGGDAPNNLITLCETCHKACHAGKIKLKVKRGQSFRAEAFMGIMRWTLLDRVRKAHPGLPVENTYGYLTKNTRITLGLPKAHCVDAYCIAGNLKAVRRGVHLYQRQVRKHNRQIHKCTVLSKTLKDGTKIGYRKLNQTPHLVKNFRLFDKVRCLGQTGFIFGRRSSGYFDVRRLDGVKFSSGISYRKLTLLEKRSTYLTELRKEDGASSPV

SEQ ID NO: 6862 - protein, 434 aa, unidentified
  REGION 1..434: note = Human metagenome
MLVYVLKQDGQQLMPTSRFGKVRRLLKEGKAKVVRREPFTIRLLYESETDVVQECYCGVDTGSKHVGVAVLGNDKVLYQSQTELRSTIKKKMDSRRIYRRNRRFRKTRYRKCRFLNKRNSIREDRLPPSVRHKVQAHIDEIEFCKKILPVSDLILEVSQFDTALMKNPSLINETIKRWGYQKGFNYGYSCRREVILHRDGYTCQCCGKKNCRLEVHHIVFRSDGGTDDERNLITLCEDCHKKIHKGKIVLTKKPKKMNLKDATHMNIIRSWLLRIYPQAIETFGFVTSENRNHLQLPKGHYIDACVIASGGLEFKPSDTVYYKRRVAKGDYQLCKGPCGEKKIPVGKIQGFRKFDKVKYLEKEYFIKGRQSKGGYVFLMDIFNGQIDFSCMPRGHKIPKLLDCERVSARSSALCIRMKYRTEYVEGMKYIEMLE

SEQ ID NO: 6863 - protein, 456 aa, unidentified
  REGION 1..456: note = Human gut metagenome
MSTCVCVLSNSGERLMPTIRLGKVRRLLKDGKAKIVKHHPFTIQLLYDSKTNTQPIEICEDVGYNYIGISVKSQSHEYASAQYDTLQDEKACHDSCRKLRRTRRNRLRYRKPRFDNRKRSEGWLAPSLEHKKQLNIRLIERYVSVIPITRATVEVGSFDTMLLQAIQKGESKPEGVDYQKGPRYNLATLREAVFYRDDYTCQVCGRKITDGAILHMHHMFYWKGRHGYQLDELVAVCEKCHTPANHQKGGKLYGFGKDKKFANLSGAAFMNAVRWQIVNALYATYGKEFVTITYGAMTKEKRIILGIEKTHNNDAYAMGDYHPAHRCVFRHYQKRRRNNRVLEKFYDATYIDARTGNKAKGKELFNGRINRNHKKDSENFHKYRSKKVSKGRRSIRRQRYAIQPYDTVHLEGKTYITSGCHNKGTRLLIPVNGKSKSVAISKVQVVCHAGAWIQII

SEQ ID NO: 6864 - protein, 411 aa, unidentified; identical to SEQ ID NO: 4578
  REGION 1..411: note = Human gut metagenome

SEQ ID NO: 6865 - protein, 442 aa, unidentified; identical to SEQ ID NO: 2903
  REGION 1..442: note = Human gut metagenome

SEQ ID NO: 6866 - protein, 456 aa, unidentified
  REGION 1..456: note = Human gut metagenome
MSTCVCVLSNSGERLMPTFRLGKVRRLLKDGKAKIVKHHPFTIQLLYDGKTNTQPIEICEDVGYNYIGISVKSESHEYVSAQYDTLQDEKEHHDDCRKYRRTRRNRLRYRKPRFDNRKRGEGWLAPSLRHKKELNVNVVKMYCAVMPITHATVEVGSFDTMLVKAIQEGKAIPEGADYQKGPRYNLATLREAVFYRDNYVCKVCGRKATEGAILHVHHMFYWKGRHGNSLSELITVCEKCHTPANHQKSGKLYGFGENVKFADLSGAAFVNTVRWQIVNELYAAFGKDFVTVTYGAMTKEKRIALQLEKTHSNDAYAMGNCHPAHRCEFGHYQKRCRNNRVLEKFYDATYIDARTGNKAKGKELFNGRISRNHKKDSEDLHKYRCKKVSKGRRSIRRQRYAIQPYDTVRLESKTYITSGCHNKGTRLLIPANGKSKSVAISKVQVVCHAGAWIQII

SEQ ID NO: 6867 - protein, 448 aa, unidentified; identical to SEQ ID NO: 5196
  REGION 1..448: note = Fermentation metagenome

SEQ ID NO: 6868 - protein, 421 aa, Moorena sp.; identical to SEQ ID NO: 5881

SEQ ID NO: 6869 - protein, 469 aa, unidentified
  REGION 1..469: note = Human gut metagenome
GVSCMNTCVCVLSNNGERLMPTFRLGKVRRLLKDGKAKIVKHHPFTIQLLYDSKTNKQPIEICEDVGYNYIGISVKSESHEYVSAQYDTLQDEKEHHDDCRKMRRARRNRLRYRKPRFDNRKRSEGWLAPSLKHKKELNVNVVKMYCAVMPITHATVEVGSFDTMLVKAIQEGKAIPEGADYQKGPRYNLATLREAVFYRDNYVCKVCGRKATEGAILHMHHMFYWKGRHGNSLNELLTVCEKCHTPANHQKSGKLYGFGEDVKFADLSGAAFMNTVRWQIVNELYAAFGKPFVTITYGAMTKEKRIALQLEKSHNNDAYAMGEFHPNHRCAFEHYEKVRRNNRILEKFYDSQYIDIRTGEIATGKELFNGRINRNHKKDSENLHKYRGKRTYAGHRALLRKKVNLNPGDLVSLNGEPLVVLGTHTRKNGAVNVEFETPSKSGRKSASLKKLKIVKAADSIHPAWEKVS

SEQ ID NO: 6870 - protein, 427 aa, unidentified
  REGION 1..427: note = Human gut metagenome
MVYVQDINGKPLMPTTRHGKVRRLLKDKKAVVVNLCPFTIKLMYVTSDYKQEIVLGVDAGTKHVGLSATTKSKELYSSEVILRNDIVDLLSTRRELRRARRNRLRYRKPRFNNRIKSKRPGWIAPSVKYKIDAHIRVVENVCSILPISRIVIEVAQFDTQKIKNPNISGKEYQEGDQLGFWNTREYVLARDGHKCQYCKGKSKDKILNVHHIESRKTGGDSPSNFITLCETCHKEYHKGNIDLKIKRGKSLRDAAVMGIMKWRLYEEIKSKYDRVSMTFGYVTKYNRINHGFEKSHVSDAFVISKNFNAIRLGYYYKVRLVRRHNRQIHKQKIQKGGIKRLNQSPFEVFGFRLFDRVMFENSYYFIFGRRKTGSFDIRYIDGKNQKNVTYKKLKLSRCKRFMIQMELNKKKTRTCFENERNSDRDAA

SEQ ID NO: 6871 - protein, 423 aa, unidentified; identical to SEQ ID NO: 3951
  REGION 1..423: note = Human gut metagenome

SEQ ID NO: 6872 - protein, 480 aa, unidentified
  REGION 1..480: note = Human gut metagenome
LYTKPLDNIGEGSLPPSGEINLKGMTFMVYVKSIDGKVLMPTSNAKARKLLKQKKAKVVSLRPFVVKLTYKTKTEYIQKLNLGVDSGYSNIGFSVIDAKQEYIAGEVKLLEGMKKRLLEKASYRRIRRSRLRYRKARWNNRVKSKKKGWLAPSLKHKLDTHIKFIDYLKNILPIEKITIEVANFDIQKMKDDLISGIDYQNGDMFGFWNVREFVLHRDGHKCQNPNCKHKDKKEQILKVHHIRYRSEGGSDRPENLITLCSKCHIPANHKKGKFLYDWCVNGKKVRGFKDATFMSMIRWYLVNELKSKHNNVSITYGYITKNHRIQNSIEKSHLNDAFAITKGTNQARTKDRFLVIQDRLKNRSLEKFYDSKIIDIRTGKKVSGGDLSCGRSTRNKNLNTENLRKYRGAKISKGQRRIRKQKYFYQSNDLVKYDGKVYTVKGTQNEGKYIALKEIKKVPKAELLIPYVFKKGLNWSYGLC

SEQ ID NO: 6873 - protein, 491 aa, Pseudomonas sp.
MLAKGKTPKIPTAATAGAGCRHSRGERAARLRHQARKGTVQRRIAVAVYVLDKTGTPLMPCSEKRARLLLERGRARIHRQVPFVIRLVDRRQADSALQSLTLKFDPGSKFTGIALVRQKGQRVSVLSLMELAHRGAAIRQAMQQRAAFRRRRRGQNLRHRAPRFDNRTRPEGWLPPSLRHRLDTTLGWVGRMRNWAPISDLAVERVKFDMQAIQNPEISGVQYQQGELAGYDVREYLLEKWGRCCAYCDAENTPLEIEHIVPRSAGGSDRVPNLTLACRPCNQRKGNQPVEVFLKARPELLARIKAKAKAPLRDAAAVNATRNALFRGLLDTGLSVTTGTGAQTKYNRRRLDLPKTHALDAACVGEIRAIEHWHRPTLAIKATGRGDYQRTRLTTHGFPRGYLTRQKRHFGFQTGDQVRAEVPTGKKAGTHQGRVAVRKTGSFNIQTPDGVVQGIHHRHCTLIQRADGYAYSDTPTDSAQPQKEAARAGAR

SEQ ID NO: 6874 - protein, 414 aa, unidentified
  REGION 1..414: note = Human metagenome
MPCSPAKARLLLKEKKAIVKRRTPFTIQLTIATGETKQPVGLGVDAGYKHVGLSASTDKAELYASQVELRQDITDLLSARRALRRARRNRKTRYRAPRFNNRIRTKRKGWLAPSVENRINAHLSRIEAVLRLLPVTKITVETASFDMLLLKNPDIAGKEYQEGEQLGFWNVRECVLFRDGHVCQHCYGRSKDPVLNVHHLESRRTGGDSPGNLITLCETCHEALHRGEIALKTKRGHSFRAEAFMGMMRWEVLNRLKASHSELEVNNTYGYRTKHARIVNGIDKSHCADAFCIAGNLGAERLCEFFFQKQTRRNNRQIHKLSILKGGIRKRNQAPFEIKGFRLFDKVACKGEESFIFGRRSSGYFDVRKLDGTRISAGISYKKLRLLEKRRTYLTEIRKEEALPPLPEGRGLRA

SEQ ID NO: 6875 - protein, 512 aa, unidentified
  REGION 1..512: note = Human gut metagenome
MSTVYVLNKDGKPLMPTTRGGHVRHLLKEQKARVVRTKPFTIQLLYETDDVVQLLYLGIDPGRTNIGVAVVKTDGTAVFTAHLETRNKEIPKLMKKRKNSRRARRTNGRRCRRQRRAKANGTISKKCVKQDTAQNGSVSKRAKKIGVIKRHLPGCEKEVLCIGIKNKEAKFSNRVRPEGWLTPTANQLLQTHINLVKKIQKFLPISDVVLEVNKFAFMQLDNPNIQKWQYQQGPLYQKANLEEAVSEMQEHHCLFCKKPIAHYHHVVPQSENGSDTIGNIVGLCTKHHDLVHKDTEWQKKLAKKKTGLNKKYGALSVLNQIIPALTKELSSLFPKHFFATNGKSTYDYRAAHGVSKDHWLDAYCIACSVLADDVCDNNINSHVPYELKQFRRHDRRALHKENMSRVYTLNGKSVATNRHKATEQTTDSLEEFRQCQPDDVCKLKVKEHYPEYRNPKRNFPGCVFLVGKHTHVMQGTSGSHNGKADGYYDTNGNSYSSGECKFVAKNEGIVFA

SEQ ID NO: 6876 - protein, 394 aa, unidentified; identical to SEQ ID NO: 3896
  REGION 1..394: note = Marine metagenome

SEQ ID NO: 6877 - protein, 469 aa, Streptomyces sp.
VREETVGGSPAADGDTFRPAEAGETPRERHPSVFVLDRHGAPLQPCHPARARKILGKGRAVVARHTPFVIRLKDRTIAESTVEGVELGIDPGSRHTGIAVFTATGGERRGRFAVRLDHRGAQIRRKLQQKSDFRRGRRTRNLRYRAPRHDNRARREGWLAPSLRHRVDTTVAWVDRLARWAPVTAVHVESVAFDTHAISSGGPLEGAEYQHGTLHGTEVREYLRTKWKRACGYCGATGAPLNVDHVRPTSRGGSDRVSNLVLACVPCNQEKTNRPVEEFARAKTRAARILAQAKVPLRDAAAVNATRWALRRALEARLPTHGASGGRTRWNRIRNHLPKTHTLDALAVGELGAVTETVNRVLIAGCTGRGTHARTRSDAYGFPRLRLPRRKRFFGFMTGDLVRACVPDGKNAGTHTGRVAVRASGSFAVRTQSGLFTARHTRFRLLQRADGYAYQATSEGRPGYLVPRP

SEQ ID NO: 6878 - protein, 440 aa, Ktedonobacter sp.
LSNVFVLDTNKQALNPVHPGRARRLLSLGQAAVFKRYPFTIILKSAASSPHVWPLRVKLDPGSKTTGLAIVNDASGEVVFAASLIHRGDAIRERLEKRRAARRSRRQRKSRYRQSRFDNRGTKKKGWIAPSVQSRVCNVITWVKRLVRLCPITAISQELVKFDLQQMDHPEISGVNYQQGTLSGYEVREYLLDKWGRQCAYCGAKDVPLEVEHINPRSKSGDDRVCNLTLACEPCNTRKGTQDIRVFLAHQPELLAKLLAQAKSPLKDAAAVNITRWVLHAQLKAFGLPLECGSGGRTKFNRITRGLEKTHWCDAACVGASTPEVLHIGQVRPLSIAAYGHGRRQMCLMNKSGFPRTNPKQKKFKHGFRTGDLVKAVVPPHLKHAGTHVGRMSAKASGAFTIATAGGTVTDIGKKYCRMLQRADGYGYTQKGELAFPPVP

SEQ ID NO: 6879 - protein, 442 aa, Lactobacillus sp.; identical to SEQ ID NO: 4549

SEQ ID NO: 6880 - protein, 427 aa, unidentified; identical to SEQ ID NO: 4977
  REGION 1..427: note = Human gut metagenome

SEQ ID NO: 6881 - protein, 465 aa, unidentified; identical to SEQ ID NO: 4783
  REGION 1..465: note = Human gut metagenome

SEQ ID NO: 6882 - protein, 544 aa, unidentified
  REGION 1..544: note = Human gut metagenome
MKQKKQKVMVYILNKKGKPLMPTTRCGHVRKLLDSKKAVVVNSNPFTIRLKYDTPNGIQDVFAGIDSGRENIGSGASNEDGDCLYLGELKTSNKSIKIKMAERTGFRRERRRHDRQSKQRKAKKDHTEIQNGNDDICRTTISCKSVQISYPVAEESVTHKIIRGKEGKFANRHRDEGWITPSARQLVQMHMNDLKSMCKILPISHVTLERVAFDFQKLENENIKVWEYGKGKLYGYDSPEEYIHDVQDGKCLVCGKPHIDYLHHIIPRSKGGSDKVSNIAGLCYDCHYGPMGVHNCQDTQNRLPELKNEANKQYKVSLLNSVMTVLIEEMDKFCKANSIIFSICEGHDTAKVRDMYDLQKDHCFDGFAISLVGRNVESVDVIPDRIYQKQRYKKKSKNIIQKRNCREYYDGKKLVAVNRHKGTDQKADSLEEYMNTYAETHTADECKNQFESLTVKPARRTYTFHKEGRICPFHIGDKVRYEKKNKIKGNTKVDTFICEGIYFSKDENKAEVEHNKTKSKKMKFCRTIESGCIPYIDYRKLALI

SEQ ID NO: 6883 - protein, 415 aa, unidentified
  REGION 1..415: note = Human gut metagenome
MENKIEYCFVIDKNNKPLAPTKINKGWYLIRKGRAKLKSKYPMVIQLEKEVKSDEDDESHMVCGIDDGSTHVGLAIVQKCLTKNKVVFKGTIEQRQDVKHLMDVRRGYRRYHRYHKRYRQARFNNRSSSKRTCRLAPSIKQKKDAILRVLYQLNSWIDIQEYYLEDVCIDIRAMTDDYKPYRWQYQKSNRLDENLRKATILRDGCRCQECGKSNCILEVHHIRARRYGGANTIGNLITLCKKCHDKTESREKDFEERYFNMIKSKPKRFDYAMHVMQGKTYLREKISELGILHLTNGGETANKRIEWNIVKSHSNDAICIADGIPDTCDIKEWIIKPMRRKSKAKTDNVLGIKHRDLVSYTYKSGETHTGYVTALYPEQLALNFQSKTKHCKKVNARKCRLLWKFNKIYWLEQCV

SEQ ID NO: 6884 - protein, 476 aa, unidentified
  REGION 1..476: note = Human gut metagenome
LAASGTEGVSHPGLPGKYKHKGGQLMSVAVISKTGERLMPTSEYRARKLLKSGKAIKHSYHPFTIQLTERKTGDIQPIELCMDTGYIHIGISVKSEKHEYLAEQIDTLTDERSRHDACRMYRRQRRNRKRYRQPRFNNRKKDKGWIAPSLEHKKNIHIQAISRINNVMPLTDITMEMGNFDTQVLKAKEEGNPLPQGADYQHGERYGIATLREAVFTRDDYKCQCCGRTIKDGAILHVHHIKYRSQGGTNSMSNLATVCDKCHTPKNHKPEGKLYNWKPKLPSFKGATFMTTIRWQLYNEVKTLFPDIDIHITYGAATKERRRELNIDKSHINDAFVMGQFHPRHRIKAVLYKKKRRNNRCLEKFYDAKYIDSRDGKKRSGQELFNGRINRNHKKDSENLHQYRLQKVTAGKRTVRKQHYSVQPHDIIIYESRKRETTGCHCNGARVMLLPDKKSVSIKKIKIYRYASGYFKSTFN

SEQ ID NO: 6885 - protein, 434 aa, unidentified
  REGION 1..434: note = Human gut metagenome
MSTTVFVLDKKHRPLMPCRPARARRLLRAGRARVVKRFPFVIRLVDRTVEQSEVQPALIKLDPGSRETGAAVVRDDGKKRHHALAFFVIEHRGGAIRDAPKARSAFRRRRRSQNLRCRSPRFLNRVKPKGWLPPSLRHRVETTLSFVRRMCRYLPVSGIATELVKFDSQKLQNPEVSGVEYQQGTLFEYEVREYLLEKFGRKCVYCGAEGVPLNIDHVVPRAKGGSNRVSNLVLACMSCNQKKGARSLEDFLKGKPKVLARVRRELKTPLRDAAAVNATRWVLFNELKATGLPVETGSGALTKLNRHAFGVEKEHWLDALCVGRLNGVVTRKGLNVLEIRCMGRGSRQRTRLTKYGFPRGYLMRQKCVHGFATGDMVEANVPKGKKAGLWRGRVAVRVSGSFNIQTPKGVIQGVGWKHCRLISHNDGYGYAWLG

SEQ ID NO: 6886 - protein, 420 aa, unidentified
  REGION 1..420: note = Human gut metagenome
MQYVYVLNKHGEPLMPCSPGKARLLLKQQKACVVKRTPFTIKLLHGSAGYKQPVTLGVDAGSKHVGLSASTETHELYCEEFTPRNDVVELLSTRRQNRRSRRNRKTRYRAPRFNNRVHSKHKGWLAPSVEVKIQEHITVIKRICRILPVTLVRVETAEFDTQRLKAMLAGKPLPVGTDYQLGEMYDEYNVRQYVLKRDNYTCQCCGAHTTAKKAVKLHVHHLESRKVGGNAPSNLITLCIACHNNLHKGKVTLDGKKRGKTLRDAAFMGIMRNTLLIRLRNELNIPVQNTYGYITKLLREQNDIKKSHINDARCISKHPLAVPCSVCYCTKAIRHHNRQIYKAKILKGGVRKANQATYIVKGFRLWDKVLYNGQECFISGRRSSGYFALKKLDGTTITNSISFKKLRLLEPATNYLIERK

SEQ ID NO: 6887 - protein, 424 aa, unidentified; identical to SEQ ID NO: 4955
  REGION 1..424: note = Human gut metagenome

SEQ ID NO: 6888 - protein, 431 aa, unidentified
  REGION 1..431: note = Human gut metagenome
MPNKVYVINKHGRPLMPCSPAKARHLLDEGKAKVKKRTPFTIQLVYGSSGYTQEVILGVDAGSKTIGMSASTTKEELLSAEVKPRNDVVDLLSTRREFRRARRNRKTRYRKPRFDNRVRSKHKGWLAPSVEVKIQEHITAIRRVCGILPVSKVVIETAEFDLQLLKAIEEGKPVPQGEDYQQGEMYGHYNVRQYVLWRDGYTCQCCGAHATKKKEVRLHVHHLESRKVDGDAPDNQVTLCESCHEKLHKGLIAEKDFKKRKRKSTRDATFMGIMRKTLMQRLCSELPIPVIETRGYITKATREKLLVLPKSHTNDALAIAQGKQGFNVGYLPEIAQIDKIYTIRPVRHHNRQLYKATILKGGIRKSNQTEKYVFGYCLFDKVQFNGQDCFIWGRRTTGIFTIKTINGKMIKDGISFKKLKLAEKSTSYLIA

SEQ ID NO: 6889 - protein, 427 aa, Moorena sp.; identical to SEQ ID NO: 5762

SEQ ID NO: 6890 - protein, 470 aa, Blautia sp.; identical to SEQ ID NO: 2925

SEQ ID NO: 6891 - protein, 432 aa, Moorena sp.
MQRVLVVSPEKIPLSPCRPARARWLLTQKRAAILRRYPFTIILKQPPSEYVTPPLRVKIDPGSQTTGIVMVNDATGEVIWAAELAHRGRQVKEALDTRQAQRRGRRHRHTRYRQPRFDNRRRPEGWLPPSLLSRIQNVVTWVERLRRYAPITNISYELVRFDTQLIERPDISGIEYQQGTLAGWEAREYLLLKWGYRCAYCGVQAIRWEVDHITPRSRGGSNRISNLALSCHNCNQEKGDCTAAEYGHPDVQIEAKKPLKDAAAVNSTRWALYERLQQTRLPVETGTGGRTKWNRTNRAIPKTHWLDASCIGQSTPEHLHWRHVCPLLIQAAGRHSRQMRKVNKHGFPIGSPKGTSTVLGWHTGDMVRAVVTKGKPAGTYVGRVAVKKDGYFKITGGFGVIEGVHARYCTPIHRNDGYGYTFRKEAALPPHA

SEQ ID NO: 6892 - protein, 413 aa, unidentified; identical to SEQ ID NO: 6529
  REGION 1..413: note = Human gut metagenome

SEQ ID NO: 6893 - protein, 431 aa, unidentified; identical to SEQ ID NO: 5232
  REGION 1..431: note = metagenome

SEQ ID NO: 6894 - protein, 412 aa, unidentified
  REGION 1..412: note = Human gut metagenome
MFVDMVYVQDIDGKPMMPTTRHGKVRRLLKDKKAVVVNLCPFTIRLTYVTSDYKQEIVLGVDAGTKHVGLSATTKSKELYSSEVILRNDIVDLLSTRRELRRTRRNRLRYRKHRFNNRIKSRRPGWVAPSVRYKIDAHIRVIDNVCSILPISRIVIEVAQFDTQKINNPNISGKEYQEGNKLGFWNVREYVLARDGHKCQYCKGKSKSKILNVHHLESRKTGGDSPSNLITLCETCHKEYHKGNIDLKIRRGKSLRDAAVMGIMKWRLYEKLKSKYGCVSMTFGYVTKYNRIHNNIEKSHVSDAFVISKNFNAIRLGYYYKIRLVRRHNRQIHKQKIQKGGIKRLNQSPFEVFGFRLFDRIMFENSYYFIFGRRKIGRFNIRDIDGKSQRDITYSKLKLSRCKRFMIQKEMN

SEQ ID NO: 6895 - protein, 470 aa, Anaerostipes sp.; identical to SEQ ID NO: 2825

SEQ ID NO: 6896 - protein, 431 aa, Enterobacter sp.; identical to SEQ ID NO: 3801

SEQ ID NO: 6897 - protein, 406 aa, unidentified
  REGION 1..406: note = Human gut metagenome
MVYIQDINGKPMMPTTRHGKVRRLLKDKKAVVVNLCPFTIKLMYVTSDYKQEIVLGVDAGTKHVGLSATTKSKELYSSEVILRNDIVDLLSTRRELRRTRRSRLRYRKPRFNNRIKSKKREWIAPSVKYKIDAHIRVVEKVYSILPVSHIIIEVAQFDTQKIKNPDISGKEYQEGDQLGFWNVREYVLARDGHKCQHCKGKSKDAILNVHHLESRKTGGNSPSNLITLCETCHKEYHKGNIKLKVKRGTSLRDAAAMGIMKWKLLDKLKSLFPNVSMTFGYITKHNRIKHEIKKSHISDAFVISKNFEAKRLGYYFKEKLVRRHNRQIHKTKILKGGKKKMNQAPFKVFGFRLFDKVEFQGNEYFIYARRLSGYFNIRDINSENKKDVTYKKLNHIGYGLISVETE

SEQ ID NO: 6898 - protein, 406 aa, unidentified; identical to SEQ ID NO: 3976
  REGION 1..406: note = Human gut metagenome

SEQ ID NO: 6899 - protein, 442 aa, Anaerostipes sp.; identical to SEQ ID NO: 2903

SEQ ID NO: 6900 - protein, 441 aa, unidentified
  REGION 1..441: note = Human gut metagenome
LAKVSYGLYDAGLPQKIIQKERSTYMVYVLSQNGQPLMPTIRHGKVRRLLKEGKANVVKKCPFTIRLTYPSGDQTQEISLGIDSGSKYIGISATTQKKVLYEAEVELRNDISKLLAARRQNRRSRRSRKTRYRKPRFDNRKRKEGWLAPSVQQKVDCHLKVVEDVCKLLPVTRIIAEVASFDIQKIKDPKIHGTDYQQGDQLGFWNVREYVLFRDGHTCQCCKGKSKDKILNVHHIESRQTGGNAPNNLITLCETCHKGYHKGQVKLPKKIKRGMTFKDAAFMGIMRWAFYDRLKEIYLPLGIDVSLTYGYLTKNTRIAHQLPKTHYLDARCISGHPDAISDGIYYHQKKIRCHNRQLHKANTLKGGIRKRNQAEYLVHGFRLFDKVRYQGKDYFIFGRRKSGYFDIRDLNGEKVNKGSISYKKLRLVETRRSYLTERRLA

SEQ ID NO: 6901 - protein, 411 aa, unidentified
  REGION 1..411: note = Human gut metagenome
MVYVQDIDGKPMMPTTRHGKVRRLLKDNKAVVVNTCPFTIKLTYKTSDYKQEIVLGVDSGTKHVGLSATTKSKELYASEVILRSDVVDLLSTRRGLRRTRRSRLRYRKQRFNNRVKSKKDGWIAPSVRHKIDSHIRIISFVYSILPVSKLIVEVAQFDTQKIKNPEISGKEYQEGEQLGFWNVREYVLARDGHKCQHCKGKSKDPILNIHHIESRKIGGDSPSNLITLCETCHKEFHKGNIKLKVSRGKSLRDAAVMGIMKWKLYEELKSRYDNVSMTFGYITKYNRINHGIEKSHVSDAFVISRNFNSCRLGYYYKRKLVRRHNRQIHKMKILKGGIRKRNQAPFKVFGFRLFDKVMFQGEEHFIYARRLSGQFNIRDINGENKKDVSCKKLKYVSHGLVSVKTNLFLSQ

SEQ ID NO: 6902 - protein, 386 aa, unidentified
  REGION 1..386: note = Human gut metagenome
MQYVYVLNKHGEPLMPCSPGKARLLLKQQKAHVIKRTPFTIKLLYGSTGYKQPITLGVDAGSKHVGLSASTEKRELYREEFTPRNDVVDLLSTRKQNRRSRRNRKTRYRPPRFDNRVHSKHKGWLAPSVEVKIQEHITVIKRICRILPITLVRVETAEFDTQRLKAMLEGKPLPVGTDYQLGEMYDEYNVRQYVLKRDNYTCQCCGAHTTAKKAVKLHVHHLESRKMGGNAPGNLITLCITCHDALHKGKVSLDNKKRGKPMRDAAFMGIMRRTLMSRLREELPITVQGTYGYITKMQREQNDIKKSHVNDARCISKHPLAEPCSVCYRTKAIVPRSSGLLSFEYFFGKRLQRHFFGCLFAADIFAETHRIFRRVQLRKPVQCRIP

SEQ ID NO: 6903 - protein, 431 aa, unidentified
  REGION 1..431: note = Human gut metagenome
MPNKVYVINKHGRPLMPCSPAKARHLLDEGKAKIKKRTPFTIQLVYGSSGYTQEVILGVDAGSKTIGMSASTTKEELLSAEVKPRNDVVDLQSTRREFRRARRNRKTRYRKPRFDNRVRSKHKGWLAPSVEVKIQEHITSIKMVCRILPVSKVVIETAEFDLQLLKAIADGKPVPQGEDYQKGEMYGHYNVRQYVLWRDNYTCQCCGAHATKKKEVRLHVHHLESRKVGGDAPDNQVTLCESCHEKLHKGLITEKDFKKRKRRSTRDATFMGIMRKTLMQRLCSELPIPVVKTRDYITKATREKLLVLPKSHTNDALAIAQGKQGFNVGYLPEILQIDKIYTIRPVRHHNRQLHKAAILKGGIRKSNQAGKYVFGYRLFDKVQFNEQDCFIWGRRTTGIFTIKTINGKMIKDGISFKKLKLVEKSTGYLIA

SEQ ID NO: 6904 - protein, 426 aa, unidentified
  REGION 1..426: note = coral metagenome
MQNYVFVIDADKRPLNPTSPKKARRLLDKGKAAVLRMYPFTIILKTAIANPTILPCKIKIDPGSKTTGFALVQDNQVIWAMELEHRGGLIKKKLESRGAVRRGRRNRNTRYRKPRFLNRKRPEGWIAPSLEHRVSTTETWVKRLIKFCPVDEIWIERVKFDTQKMQNPEVNGTEYQQGELAGYEVREYLLEKWGRECAYCGKQNIPLQIEHIHPKSKGGRDSAKPTLRERVSNLCLACEKCNQKKGNKPIEEFLNKKPDLLRKIKTKARQPLTDAAVVNTTRNKIVKALKAIKPVVTGTGAQTKYNRTRLGFPKQHWVDAACVGEIETLVLRTSQPLLVTCKGQGGRQKAALNKYGYPIRHNPLKPIRGWATGDIAKHQKLGIGKVTPRSKGSFGFTPLGAKGYKSCRPQDISAIHRKDGYTYSFC

SEQ ID NO: 6905 - protein, 424 aa, unidentified; identical to SEQ ID NO: 3351
  REGION 1..424: note = Human gut metagenome

SEQ ID NO: 6906 - protein, 423 aa, Moorena sp.; identical to SEQ ID NO: 6814

SEQ ID NO: 6907 - protein, 475 aa, unidentified; identical to SEQ ID NO: 4985
  REGION 1..475: note = Human gut metagenome

SEQ ID NO: 6908 - protein, 419 aa, Moorena sp.
MVYVISNENKPLMPCSNVVARLLLKQGKAKVKKREPFTIKLTYETTSYTQDLTLGVDTGSGAIGTAVSKDNGDIVYMSEVAVRNDITDKMTQRTKYRRNRRNRKTRYRKERWLNRANSIKTDRFSPTMRSKLHSHVREIEHIKSILPITELVLETGQFDTHIMKNPSLSNPKIRNWGYQKGVNYGFENTKAMVLNRDDYTCQCCKGKRKDSKFEVHHIVYRSHGGSNEADNLITLCRTCHKKIHSGDIKLNIKGNMKGTLKYATQMNSIRKQLFKVYPSAIETFGYVTKANRLNLDVEKQHYNDACVIASQGKPFKVECELYKKKCIPKGDFQKTKGIRSEQPITTGKICGFRKFDKVKYLGKEYFIKGRMSTGYAILMDIDGNKADFSKMPKGFKTPKLSNCKRVASRKSVMVTRITI

SEQ ID NO: 6909 - protein, 461 aa, unidentified
  REGION 1..461: note = Human gut metagenome
VQPLYLGIDPGRTNIGVAAVKANGTAVFTAHLETRNKEIPKLMQDRKKARRARRTNGRRCRRQRRAKANGTISKKCVKQTTAQNGSVSKRAKDIGVIKRRLPGCEKDVLCIGIKNKETKFTNRTRPEGWLTPTANQLLQTHINLVKKIQKFLPISDVVLEVNKFAFMRLDNPNIQKWQYQQGPLYKKESLESAVSEIQEHHCLFCKKPIDHYHHVVPQHKNGSNTIGNIVGLCAKHHDLVHKDSAWEKKLAKKSTGLYKKYGALGVLNQIIPTLTNELSSLFPKHSFVTNGKSTYDYRAAHGVSKDHWLDAYCIACSVLPSNVCDSNINNHMPYELKQFRRHDRRVLNNENMNRVYTLNNKAVAINRHKAKDQKTVSLEEFRKEHPDDVCKLKVKEHHPTYRNMNRNFPGSVFLVGKQIHVMQGIASSKDGKATKYNDTSATAIAAGKCKFVAKNTGILFV

SEQ ID NO: 6910 - protein, 431 aa, unidentified
  REGION 1..431: note = metagenome
MPNKVYIINKHGRPLMPCSPAKARHLLDEGKAKVKKRTPFTIQLVYGSSGYTQEVILGVDAGSKTIGMSASTTKEELLSAEVKPRNDVVDLLSTRREFRRARRNRKTRYRKPRFDNRVRSKHKGWLAPSVEVKIQEHITSIRRVCRILPVSKVVIETAEFDLQLLKAIEEGKPVPQGEDYQQGEMYGHYNVRQYVLWRDGYTCQCCGAHATKKKEVRLHVHHLESRKVGGDAPDNQVTLCESCHEKLHKGLIAEKDFKKRKRRSTRDATFMGIMRKTLMQRLCSELPIPVIETRGYITKATREKLLVLPKSHTNDALAIAQGKQGFNVGYLPGIVQINKIYTIRPVRHHNRQLHKATILKGGIRKSNQAEKYVFGYRLFDKVQFNGQDCFIWGRRTTGIFTIKTINGKMIKDGISFKKLKLVEKSTSYLIA

SEQ ID NO: 6911 - protein, 302 aa, unidentified
  REGION 1..302: note = Human gut metagenome
VKVKIQEHITSIKRVRTILPISKVVIETAEFDLQLLKAIQEGKPIPEGEDYQKGEMYGSYNVCQYVLWRDNYTCICCGVRGTPKNPVRLHVHHFESRKYGGNAPDNHGTLCDDCHKKFHLGIITDVKLKTRRRQSTRDAAFMGIMRKTLMWRLRTELFIPVAETKGYITKATREKLLVLPKSHTRDALAIAQGRHGFGIKEYAYVEPANHIYTVRPVRHHNRQLHKASILKGGIRKRNQASKYIFGFRLYDKVLYQGKACFVWGRRTSGTFLLRTIDGIKVKDGVSYRNLTLLERSSNYLIA

SEQ ID NO: 6912 - protein, 425 aa, unidentified
  REGION 1..425: note = Microcoleaceae bacterium UBA9251
MSNYALVIDANKQPLSPCHPSVARKLLGSVNAAVFRMYPFTIILKKSCPEVIVAPIQLKLDPGSKTTGIALVQGNKVIWGAELTHRGQAIKASLESRRSIRRSRRNRHTRYRRARFLNRTRSKGWLAPSLQHRFETTLTWVNKLIRFAPIGSIVQELVRFDLQQLENPEISGIEYQQGELVGYEVREYLLNKWDRKCAYCGVENVPLQIEHIHPKAKGGSDRISNLGLACEKCNLKKGTQDVEQFLAKKPDVQKCILAQAKHPLKDAAAVNSTRWTLFSRLKETGLPVSTGSGGLTKFNRTRLKLPKTHWLDAACVGQVEELSVLTNKPLLIKATGHGTRQMCRTDKFGFPSRYVPRFKNVLGFQTGDIVKAIVTKGKKIGTYIGRVAVRTTGSFNISTWAGLIQGINHKNCKPIQRKDGYSYVE

SEQ ID NO: 6913 - protein, 412 aa, unidentified
  REGION 1..412: note = Human gut metagenome
MENEVAYCFVVDKNSRPLAPTKVNKGWYLVRKGRAKIKSRYPMVIQLEKEVEYDKYDESRMIVGIDDGSAHVGLAIVQKCPTKNKVVFKGTIEQRQDVKHLMDVRRGYRRYHRYHKRYRQARFDNRYSSKRSGRLAPSIKQKKDAILRVLYQLNRWIDIQEYCLEDVCIDIRAMTDGYKPNKWQYQKSNRLDENLRKAAIIRDGCKCQECGRSNCVLEVHHIRARKYGGADTIGNLITLCSGCHQKTEGMEREFEDRYFKIIGSKPKRFDYAMHVMQGKNYLRRKISELGPLYLTNGGETANKRIDWNIEKSHSNDAICITDCVPDTCDVKEWIIRPMRRKSKAKTNNVLGIKHRDLVSYTYKNGEIHTGYVTALYPEQLALNFQSENKHCKKVNARKCRLLWRFNKIYWLE

SEQ ID NO: 6914 - protein, 414 aa, Homo sapiens
MVYVINKQGQALMPTERFGKVRRLLKNSLAHVVCRIPFTIQLDYDTTDYTQPVSLGVDAGSKHIGISATTSEKEMYAADVELRNDIVDKLSTRREQRRTRRSRLRYRKARFNNRVSSKRKGWLAPSVENKIQTHLTVVEKIHKFLPITNIVVETASFDIQKINNPSISGVEYQQGEQLDFFNVREYVLFRDNHTCQHCKGKSKDKVLNVHHIESRKTGGDSPNNLITLCETCHKAYHRGEFELNVKRGKSFRDSVFMGIMRWSFYDRLKNIYPNVSMTFGYITKNTRITNNLPKEHYVDARCISGNPTAKPLGYYFYQKKVRCQNRQIHKANFLKGGRKKLNQAPFLVKGFRLFDLVEYKKELYYIFGRRSSGSFDIRKLDGTKVNKGSINCKYLRLVDKRKSILIEKRMQVNL

SEQ ID NO: 6915 - protein, 457 aa, Lactobacillus sp.; identical to SEQ ID NO: 6126

SEQ ID NO: 6916 - protein, 430 aa, unidentified
  REGION 1..430: note = Human oral metagenome
MLVYVLKQNGQPFMPTARFGKIRRLLKAKKAKVVRREPFTIKLLYEPETDVVQECYCGVDTGSRHIGVAVVGNDKVLYQSQTELRNDIKRKMDARRAYRRNRRSRKTRYRKPRFLDRGNSTKSDRLPPSVKHKVQAHIDEIEFCKKILPISDSNLIIEVSQFDTALMKDPSLISEKIKHWGYQQGFNYGYSSRREAILHRDNYTCQCCGKKNCRLEVHHVKFKSNGGTDDEENLITLCEECHKGVHAGTVVLDKKPKKSKNLKYATHMSVIRSRLLKKYPDAIETFGFVTAENRNHLNLPKDHYIDACVIASGGLEFKELEVIFYKNRVSKGDYQLTKGIRGEQKLPTGKICGFRKFDRVEYLGNKYFIKGRMSSGFATLMDIFENQIDFSYMPRGMKTPKLSNCKRILARSSCLCISQIKKGKAIHVLS

SEQ ID NO: 6917 - protein, 323 aa, Oscillochloris sp.
MSFVFVLSSDDQPLDPCHPARARQLLDHGKAAVWRRYPFTIRLNARTAAASVTHPHRLKFDPGSKTTGIAVVAETTGRVVWAGELTHRGQAIRDALLSRRASRRSRRQRKTRYRQPRFLNRRRPEGWLAPSLPHRVDTTLTWVNRLRRFAPVTAISTELVRFDTQLRENAEISGLEYQQGMLAGYEVRQYLLEKWGRRCAYCGAKDTPLQIEHIVPRARGGSHRIPNLTLACAPCNQQKGSQTAEEFGHPEIQAQARRPMKDAAAVNTTRWAMYQRLVATGLPVEVGTGGRTKFNRTRLGLEKAHWHDTACVGDSTPEGCARC

SEQ ID NO: 6918 - protein, 456 aa, unidentified
  REGION 1..456: note = Human gut metagenome
MNTCVCVLSNSGERLMPTFRLGKVRRLLKDGKAKIVKHHPFTIQLLYDSKTNTQPIETCEDVGYNYIGISVKSESHEYVSAQYDTLQDEKEHHDDCRKYRRTRRNRLRYRKSRFDNRKRDKGWLAPSLEHKKQLNISLIERYVSVIPITHVTVEVGSFDTMLVKAIQEGKVIPEGADYQKGPRYNLATLREAVFYRDNYVCKVCGRKATEGAILHMHHMFYWKGRHGYQLDELVTVCEKCHTPANHQKGGKLYGFGKDKKFANLSGAAFMNAVRWQIVNALYATYGKEFVTITYGAMTKEKRIALQLEKTHNNDAYAMGDYHPARRCKFRHYQKRRRNNRVLEKFYDATYVDTRTGNKAKGKELFNGRISRNHKKDCENLHKYRSKKVSKGRRSIRRQHYAIQPYDTVRLEGKTYITSGCHNKGTRLLIPVNGKSKSVAISKVQVVCHAGAWIQII

SEQ ID NO: 6919 - protein, 557 aa, unidentified
  REGION 1..557: note = Human gut metagenome
MIYNLVSTRERSFMKQKKQKVMVYILNKKGKPLMPTTRCGHVRKLLNSKKAVVVNSNPFTIRLKYDTPNGVQDVFAGIDSGRENIGSGASNEDGDCLYLGELKTSNKSIKLKMTERAGFRKERRRHDRQNKQRKARKDHTEIQNGNADICRTTISCKSVQISYPAAEKSVTHKIIRGKEGKFANRHRDEGWITPSARQLVQMHMNDLKSMCKILPISHVTLERVAFDFQKLENENIKVWEYGKGKLYGYDSPEEYIHDVQNGKCLVCGKPHIDYLHHIIPRSKGGSDKVSNIAGLCYDCHYGPMGVHNCQNTQDRLPELKSEANKQYKVSLLNSVMPVLIEEMDKFCKANSIMFSICEGHDTAKVRDMYDLQKDHCIDGFAISLVDRNVKSVDVMPDRIYQKQRYKKKSKNIIQKRNCREYYDDKKLVAVNRHKGTDQKADSLEEYMNTYAETHTTDECKKHFDSLVVKPARRTYTFHKEWRICPFHIGDKVRYEKKNKIKGNTKVDTFICEGIRFVKDENKAEVKHNKTKSKKMKFCRVLESGCTPYVDYRKLALM

SEQ ID NO: 6920 - protein, 436 aa, unidentified; identical to SEQ ID NO: 4716
  REGION 1..436: note = Candidatus Thiomargarita nelsonii

SEQ ID NO: 6921 - protein, 414 aa, unidentified
  REGION 1..414: note = Human gut metagenome
MPCSPAKARLLLKEKKAIVKRRTPFTIQLTIATGETKQPVGLGVDAGYKHVGLSASTDKAELYASQVELRQDITDLLSARRALRRARRNRKTRYRAPRFNNRIRTKRKGWLAPSVENRINAHLSRIEAVLRLLPVTKITVETASFDMLLLKNPDIAGKEYQEGEQLGFWNVREYVLFRDGHVCQHCYGRSKDPVLNVHHLESRRTGGDSPGNLITLCETCHEALHRGEIALKTKRGHSFRAEAFMGMMRWEVLNRLKASHSELEVNNTYGYRTKHARIVNGIDKSHCADAFCIAGNLGAERLCEFFFQKQTRRNNRQIHKLSILKGGIRKRNQAPFEIKGFRLFDKVACKGEESFIFGRRSSGYFDVRKLDGTRISAGISYKKLRLLEKRRTYLTEIRKEEALPPLSEGRGLRA

SEQ ID NO: 6922 - protein, 390 aa, Moorena sp.
MLTYVLAADGSPLMPTYNISKVRRMLKDGRAVIAGHKPGFTIRLTYALPDQKTPHTQKIELCEDTGYQHIGVSVKSKKHEYVHLQVDTLADEKNHHDAQRRYRRNRRNRLRYRAPRFDNRTHSKKPGWIAPSLQHKADIHVRLVSTFQKVLPICDVYLEVGTFDTQVLEAKEKGLPIPEGSDYQHGTRYGIATLREAVFYRDGYKCQCCGKGIKDGRILRVHHIGYWKTPSDHTDRMGNLITVCTKCHTAANHKKGGKMNTVRWKIVQAVKDLDSNLTVHATYGADTKLSRRDHSITKTHANDAYCMGMFQPGHRAPEQLLKKKRRNNRVLSKFYDAKYIDSRDGVKKSGSDLSCGRTNRSEPRNGEQNLRIFHGKKVSKGRISVRRQRY

SEQ ID NO: 6923 - protein, 416 aa, unidentified
  REGION 1..416: note = Human gut metagenome
VSEMTSYSFVLDANGKQLAPTKEPKAWFLIRKKRAALVSKYPMVIQLKKKIQENEICKDEIRCGIDDGGLHVGIALVQKCKSKNKVVFKGTIEQRNDVKHLMEVRRNYRRYHRYHKRYRQARFDNRKSSKRKGRIAPSILQKRQATIRVINRLNKWINITNYWLEDVSIDIRVLTDGYKSYSWQYQKSNRLDENIRKATILRDGGKCMECGKSNCRLEVHHIKPRRRNGSNTLDNLITLCESCHQKTEGQEELYMDRYFSLLKSSDNKNLNYAQHVMIGKMWLRKQLSGLGVLYLTSGGDTANKRIDWNIEKSHTNDAVCITDLQPDTCDIKEWAIKPMRRQSKAKTDHVLGIHHRDLVEYTFKNGETHRGYVTALYPDQKAINFQSQTKHCKKVNARKCKLLWNYSKIYWFENAS

SEQ ID NO: 6924 - protein, 452 aa, unidentified
  REGION 1..452: note = Human gut metagenome
MTPKKRKEASRMSEYIYVLGMDGDPQMPTKRKRHVEKLLQAGRARVFRQIPFTIQLTYENKPVLQPVTIAEDPGRSNIGMAVVSLSGELLSAAVVQTRNKEIVKLMEKRKQHRRASRNGERKARQRLAKKCHTMIKTGFLMRKLPMYGKDKRVRCNVIKNTEAKFCNRKREDGWLTPSAEHLVRTHINLIHKMQKFLPITDVAIEINRFAFLSLEDPSISGVDFQNGPLKGYDDLNVAIEDLQDGHCLMCNSPIEHRHHIVPRSMQGSNTIGNIAGLCCKCHERVHKDARFEDRLKKKKAGLNKRYAAVSVLNQAIPFICKRLEQEFGKEHVHYCSGRDTSMVRRSLGYHKTKEEQLHEVDAWCIAVLSLQHVPEKAPEFDHVHEILQFRRQDRSRIKAQTSRAYYHEGKKIAKNRKKAEGQKDDSLQGWRKRQVERYGEEQTRKMISQLKV

SEQ ID NO: 6925 - protein, 415 aa, Eubacterium sp.
MVYIIDQYGRPLMPTERYGKVRRLLKNSKAKVIKRCPFTIQLMYDSTAYTQDIMLGIDAGSKHIGVSATTADKELYAADIELRNDIVELLSTRRESRRTRRNRKTRYRKPRFNNRKRGDSWLAPSVRAKVNTHLKVVSDIYKFLPISKIIVEVASFDIQKIKHPDISGTEYQQGKQLGFWNVREYVLYRDNHTCQCCKGKSNDKVLNVHHIESRKTGGDAPNNLVTLCETCHKGYHNGTVKLPKTIKRGMSFRDATFMGVMRWAFYNRLKELYPDVKLTYGYITKNTRIENNLSKEHYVDVRCISGNPLAEPLGYVYYQKKVRCHNRQIHKYKINKGGVRKRNQADYLVKGFRLFDKVKYNNKEYFIFGRRTSGFFDIRDLQGNKVNKGSISCKRLKYLYTPNTYLTERRFTGSA

SEQ ID NO: 6926 - protein, 431 aa, Escherichia sp.
MNRVFVLGKTGQALMPCHPARARQLLQSKKARVKRLYPFTIQLTQRSDGYIQPVELKFDPGSKQTGVGLVLHGKNRLSAIYAAVLTHRGQEIKSNLDSRRMIRRARRNRKTRYRQERFLNRVRSKHKGWLAPSVHSRVDNIVEWSKRFMRLSHVDFITVESVKFDMQKMESAAVEGLEYQRGTLFDYEVKEYLLEKYHYSCVYCGIKNVPFEKEHVVPRSRGGSNRISNLVLSCRSCNEKKDNLPIEEFLKDNPALLKKIKAQLKSSLKDAAAVNITRKQIVKELSDLNVPVLTGIGAEMKYNRVSQGYGKEHYIDALCAGTTGTKVYIPSKLKPLLIKKERRNNRQMCLVDKYGFPRGKAKGSKIVHGFKTGDIVKAVVLKGKKKGVYKGKVAVRSSGSFNINVKQGRIEGIGWKNCVMLHRFDGYSYTY

SEQ ID NO: 6927 - protein, 422 aa, unidentified; identical to SEQ ID NO: 6184
  REGION 1..422: note = Human gut metagenome

SEQ ID NO: 6928 - protein, 447 aa, unidentified; identical to SEQ ID NO: 5316
  REGION 1..447: note = Human gut metagenome

SEQ ID NO: 6929 - protein, 471 aa, unidentified
  REGION 1..471: note = Human gut metagenome
MSVFVVGLNGCRLMPTSERKARLLLKQGKAFVEQKVPFTIRLNYKTGSTTQLGYLGIDTGSQHIGVSVVREDGTVLHKEEIGLRDSMSKRKLLEAKASLRRGRRYRKTRYRHPKWRPKTKRVYCEVPDRKGRHWQKKEDHVHIEKTERMATAIPAVKNRSSYPMESKNYRIFFRKDTSLSIELGRFDPARMKNPEIHGDLYQKGPQYDYENVRAYVLDRDRYTCQICKKKGGKLHVHHILYRSHGATDDPQYMVTVCSDCHSAQNHLPGGILYQWMQEQKRFSRGLRDATFMNILRKRLIRAFPEAVFTYGNVTKVDREKLKLPKSHGNDATAIALVKTGITAVKDKESVICIQQVRRKKRSLHEETPRKGRKEPNRTAARNNKNTKAVTVTKRQNKKKVSMTGCLFDRVELNGKKGWISGFTGKSCYVKDADDQYLSTSPKYKQVSLSKLRILHHCGNWIIGAKKTLGKG

SEQ ID NO: 6930 - protein, 419 aa, unidentified
  REGION 1..419: note = Human metagenome
MLVYVLKQNGQPFMPTERFGKVRRLLKEGKAKVVRREPFTIRLLYEPETDVVQECYCGVDTGSKHVGVAVIGNDKVMYQSQTELRSDIKKKMDRRCTFRQNRRFRKTRYRKSRFLNRRNSIREDRLPPSVKHKVQAHIDEIEFCKKILPISDLILEVSQFDTALMKNPNLINERIRHWGYQKGFNYGYSSRRSAILHRDNYTCQCCGKKNCRLEVHHIKFKSNGGTDDEENLITLCKECHDGVHAGTVVLNKKPKKSKGLKHATNMSIIRSRLLKKYPDAIETFGFVTSENRNHLNLPKDHYIDACVIASGGLEFKQSDVIYYKRRMSKGEYQLTRKSGSKEYICKGKIFGFKSFDKVEYLGIKCFIGSRRSSGFATLVDIFRNTLDFSYLPKGRKTSKMELLKRISSRKTTAVSIVNV

SEQ ID NO: 6931 - protein, 430 aa, unidentified
  REGION 1..430: note = Human gut metagenome
MVTVQQSTHHLPFGRVFIRRNLFMVYVISQDGKPLMPCSDPIARLLLKQGKAKVKKREPFTIKLTYEAPNYTQDLTLGVDTGSGTIGTAVSKDNGDIVYMSEVIVRNDITDKMTQRVKYRRNRRNRKIRYRKARWLNRANSIKNDRFSPTMQSKLHSHVKEIEYIKSILPITEMVFETGQFDTHFMKNPSLANPKVKHWGYQKGTNYGFENTKAMVLNRDSYTCQCCKGKHKDSKLEVHHIVFRSQGGSDEESNLITLCHTCHKDLHSGKINPKLSGKVKGNLKYATQMNSIRKQLFRLYPNAIETFGYVTKANRLHLGVNKEHYYDACTIATQGNAFNVKSNLYKKKCVSDGDFQKTKGVCSEQPIVTDKICGFRKFDKVRYFGNDYFIKGRMSTGYAILMDIDGDKVDFSAMPKGYKTPKMVNWIGYN

SEQ ID NO: 6932 - protein, 461 aa, Parasutterella sp.; identical to SEQ ID NO: 3646

SEQ ID NO: 6933 - protein, 423 aa, Moorena sp.
MRVFVLNKNRQPLDPCKPARARILLSAGKAKVYRRYPFTIILTEEIKNPVTHEHQLKIDPGAKTTGLAIIQGQRVIWGAELTHRGFQIRDNLTSRRQLRRSRRSRKTRYRKPRFSNRTRPKGWLAPSLTSRVQNILTWVKKLIRFCPVTGISQELVRFDTQKLQNPEISGIEYQQGTLYGYELREYLLEKWNRKCAYCGATGTQLEIEHIKPKSRGGSNRVSNLTIACHSCNQAKSNQDIELFLSKKPSLLKRILRQAKRPLADAASVNITRWKLYYDLKSIGLPVEVGSGGLTKFNRCRQSLPKAHWLDAANVGKVETLIIEVTLPLLITAKGHGTRQLCRTNKYGFPIRHCSRIKFHKGFQTGDIVHAVVTKGKKVGTYVGRVATRKSGSFNISTKLGLVQGISHKYCQFIHRKDGYAYGI

SEQ ID NO: 6934 - protein, 424 aa, unidentified
  REGION 1..424: note = Microbial mat metagenome
MSNFVFVIDTNKRPLNPIHPCLARLLLTQGKAAVYRRFPFAIILKTTSIEATHPLQLKIDPGSQTTGLALVSNEAVIWGAELTHRGQAIKNSLESRLAIRRNRRHRKTRYRQPRFLNRTRKKGWLAPSLEHRVKTTLTWVNRLRKFAPITGISQELVRFDLQQIDRPEISGIEYQQGELFGYEVREYLLEKWERTCAYCNKKDVPLEVEHITPKSKGGTNRISNLCIACHDCNQKKGAADIKDFLNNQPEKLKKILAQSKGPLKDAAAVNSTRWELYRRLLATGLPVEVGTGGRTKFNRTKLGIPKSHWLDAACVGIVEKLKIVCAKPLLMTAKGWGNRQLCITNKHGFPIRHRTRQKAFFGFQTGDLVRAILPVGKEAGTHVGRLTVRATGVFEMVTPLGKVSPVRAKYCRGVHRVDGYSYVA

SEQ ID NO: 6935 - protein, 442 aa, unidentified; identical to SEQ ID NO: 4843
  REGION 1..442: note = Human gut metagenome

SEQ ID NO: 6936 - protein, 424 aa, unidentified
  REGION 1..424: note = Human gut metagenome
LVWNKRGKPLMPCSPAKARLLLKEKKAIVVRRTPFTIQLTIATGETKQPVSLGVDAGYKHVGLSASTEKAELYASEIELRQDITDLLSARRELRRARRNRKTRYRAPRFDNRIRTKRKGWLAPSVENRINAHLSRIEAVLRLLPVTKITVETASFDMQLLKNPDISGKEYQEGEQLGFWNVREYVLFRDGHVCQHCHGGSKDPVLNVHHLESRRTGGDSPGNLITLCETCHKALHRGEITLKAKRGQSFRAETFMGIMRWEVLDRLKASHPKLEVQNTYGYRTKHARIVNGIAKSHCADAFCIAGNLGAERLGEFFFQKQTRRNNRQIHKLSILKGGIRKRNQAPFEAKGFRLFDKVACQGEEGFIFGRRSSGFFDVRKLDGTRISAGISYKKLHLLEKRQTYITEIRKEKALPPLPEGRGLRA

SEQ ID NO: 6937 - protein, 424 aa, Moorena sp.; identical to SEQ ID NO: 2651

SEQ ID NO: 6938 - protein, 423 aa, unidentified; identical to SEQ ID NO: 3951
  REGION 1..423: note = Human gut metagenome

SEQ ID NO: 6939 - protein, 414 aa, unidentified
  REGION 1..414: note = Human gut metagenome
MVVYVLNIDNKPLMPTTRFGKVRRLLRDKKAKVIRRTPFTIKLLYETNNCIQDITLGIDSGSKYIGLSASTENKEIFSAEYELRNDIVKKLSSRRECRRTRRNRLRHRKARFNNRVSSKKKGWLAPSIRHKVNSHLKIISDVCSIIPIKKIIVEVASFDMQKIKNPDISGVEYQQGEQLGFWNIREYILFRDNHTCQHCKGKSKDPILNVHHIESRQTGGNSPNNLITLCESCHNAYHKGKIKLNIKRGKSFKDSAFMGIMRWALFNRLKEIYDDVALTYGYVTKNTRIENNLPKEHKIDAFCIANNLSAKLSDTTFYFKKVRCHNRQIHKANYFKGSIKKNNQASYLVQGFRLFDRVKYQDKEYFIFGRRSSGHFDIRDLSGNKVNKGSISCKKLEFIEPRKNVLIERRVAGN

SEQ ID NO: 6940 - protein, 420 aa, unidentified
  REGION 1..420: note = Human gut metagenome
MQYVYVLNKHGEPLMPCSQRKARLLLKQKKACVIKRTPFTVKLLHGSAGYKQPVTLGVDAGSKHIGISATTEKHELYREEATPRNDVVDLLSARRAFRRSRRNRKTRYRAPRFNNRVHSKHKGWLAPSVEVKIQEHITLIKHVFRILPVTLVRVETAEFDTQRLKAMLEGKPLPVGTDYQLGEMYDEYNVRQYVLKRDNYTCQCCGAHSTKTKGVKLHVHHIETRRTGGNAPNNLITLCKACHKALHAEKVTLDGKKRGKPLKDAAFMGIMRKTLMERLRKELKIPVQGTYGYITKYLREKNGIPKSHTNDARCISKNPLAIPCDTCYYTKAVRHHNRQLHKATILKGGIRKANQAPYIVKGYRLWDKVAYNGTECFITGRRTSGYFALKELDDTVVSNSISYKKLRLLEAATNYIIERK

SEQ ID NO: 6941 - protein, 442 aa, Anaerostipes sp.; identical to SEQ ID NO: 2903

SEQ ID NO: 6942 - protein, 415 aa, unidentified
  REGION 1..415: note = Human gut metagenome
MVYVLDKNGQPLMPTDRHRKVRLMLQSGQAKVIKRCPFTIQLNYDSGHQTQEISLGIDAGSKHIGVSATTKIKVLYEVDVELRNDIVDLLSSRRELRRGRRNRKTRYRQAKFNNRRRGNGWLAPSIRQKIGTHLTVVENICKILPISRIMVETASFDIQKIKNPDIQGAEYQQGDQLEFWNVREYVLFRDGHICQCCKGKSKDKILNVHHIESRKTGGNAPNNLITLCETCHTGYHKGTVQLPKAIKRGMRFKDAAFMGIMRWAFYEALKQQYEPVALVHNTYGYITKHTRIAYNLPKEHYVDARCISGNPEASSNGEYYYQKKVRCHNRQIHKLTVLKGGIRKQNQATYLVKGYRLFDKVSYQGKGYFVFGRRQSGFFDIRTLSGEKVNKGSLNCKKLKFIATRTYYLTERRAV

SEQ ID NO: 6943 - protein, 406 aa, unidentified
  REGION 1..406: note = Human gut metagenome
MVYVQDIYGRPLMPITRHGKVRRLLKSKKATVVNLCPFTIRLLYDTTGYKQEITLGVDTGTKHVGLSATTKSKELYASEVILRSDVVDLLSTRRELRKIRRYRLRYRKPRFMNRIKSKKRGWIAPSIRQKIDPHIRIIGFVYSILPVSKLIIEVAQFDTQKIKNPEISGKEYQEGEQLGFWNVREYVLARDEHKCQHCKGKSKDPVLNVHHIESRKTGGDSPSNLITLCKTCHKEFHKGNIKLKVNRGESLRDAAVMSIMKWELYDELKSLYPNVKMTFGYITKYNRINHGIEKSHVSDAFVISRNFDSERLGYYYKRKLVRRHNRQIHKMKAPKGGNKRMNQSPFKVFGFRLFDKVMFQGKERFIYARRLRGIFNIRDINGENKKDISYKKLEYVSHGLISIVAG

SEQ ID NO: 6944 - protein, 413 aa, unidentified; identical to SEQ ID NO: 2605
  REGION 1..413: note = Human gut metagenome

SEQ ID NO: 6945 - protein, 444 aa, Trichococcus sp.; identical to SEQ ID NO: 6645

SEQ ID NO: 6946 - protein, 419 aa, unidentified; identical to SEQ ID NO: 4877
  REGION 1..419: note = Human gut metagenome

SEQ ID NO: 6947 - protein, 456 aa, unidentified; identical to SEQ ID NO: 4609
  REGION 1..456: note = Human gut metagenome

SEQ ID NO: 6948 - protein, 418 aa, Moorena sp.
MQNYVFVIDTNKQPLNPIPPKKARRLLNKGKAAVFRMYPFTIILKTAINNPTISPCQIKIDPGSKVTGFALVQNNQVIWGMELEHRGGLIKKKLESRSAVRRRRRNRNTRYRKPRFLNRKRPEGWLPPSLEHRILTIQTWVKRLIKFCPVNEIWVERVKFDTQKMQNPEISGIQYQQGELAGYEVREYLLEKWGRECTYCGKQSVPLQIEHIHPRSLGGSDRVSNLCLACKKCNQRKGNKPIEDFLKKKPSLLQKIKSKAKQPLKDATAVNATRNKLVKVLQLIKVVVTGTGAQTKYNRTRLELPKQHWIDAACVGDIETLVLRTSQPLLVTCKGPGGRQKAALNKYGYPIRHNPLKPIKGWVTGDIAQHPLLGIGKVTPRSKGSFGFTPLGTKGYKSCKPQDISAIYRKDGYTYSFC

SEQ ID NO: 6949 - protein, 414 aa, unidentified
  REGION 1..414: note = Human gut metagenome
MVYVINKQGQALMPTERFGKVRRLLKNSLAHVVCRIPFTIQLDYDTTDYTQPVSLGVDAGSKHIGISATTSEKELYAADVELRNDIVDKLSTRRELRRTRRSRLRYRKARFNNRVSSKRKGWLAPSVENKIQTHLTVVEKIHKFLPITNIVVETASFDIQKINNPSISGSEYQQGEQLDFFNVREYVLFRDNHICQHCKGKSKDKVLNVHHIESRKTGGDSPNNLITLCETCHKAYHRGEFKLNVKRGKSFRNAAFMGIMRWSFYDRLKNIYPNVSMTFGYITKNTRITNNLPKDHYVDARCISGNPMSKPLGYYFYQKKVRCQNRQIHKANFLKGGRKKLNQAPFLVKGFRLFDLVEYKKELYYIFGRRSSGSFDIRKLDGTKVNKGSINCKYLRLIATRKSILTEKRMQVNL

SEQ ID NO: 6950 - protein, 512 aa, unidentified; identical to SEQ ID NO: 4216
  REGION 1..512: note = Human gut metagenome

SEQ ID NO: 6951 - protein, 418 aa, unidentified; identical to SEQ ID NO: 4327
  REGION 1..418: note = Human gut metagenome

SEQ ID NO: 6952 - protein, 406 aa, unidentified
  REGION 1..406: note = Human gut metagenome
MVYVQDIYGRPLMPTTRHGKVRRLLKSKKATVVNLCPFTIRLLYDTTGYKQEITLGVDTGTKHVGLSATTKSKELYASEVILRSDVVDLLSTRRELRKIRRYRLRYRKPRFMNRIKSKKRGWIAPSIRQKIDSHIRIIGFVYSILPVSKLIIEVAQFDTQKIKNPEISGKEYQEGEQLGFWNVREYVLARDEHKCQHCKGKSKDPVLNVHHIESRKTGGDSPSNLITLCKTCHKEFHKGNIKLKVNRGESLRDAAVMSIMKWELYDELKSLYPNVKMTFGYITKYNRINHGIEKSHVSDAFVISRNFNSCRLGYYYKRKLVRRHNRKIHKMKILKGGIRKRNQAPFKVFGFRLFDKVEFQGNEYFIYARRLSGYFNIRDINSENKKDVTYKKLTYIGHGLISVETE

SEQ ID NO: 6953 - protein, 477 aa, unidentified
  REGION 1..477: note = metagenome
MIIALDKYKRPLGFLTERRCRILMERKRAVLYRVFPTVVILMDVDARTIPSLPSFRIKIDPGSKYTGIAIIRNDTDEFVYAMQIEHRGDAVRAALNKRKNARRNRRSRETGYRRAKWGNRCLSEKDKRSYDSSREDGWLPPSIRSAADNVISWVRRLGRWINLTECSFEAVRFDTQLMEDPDIEGEEYQHGTLFGLEIKEYLMEKFGHTCQYCGGKSGDPVLEWEHMRPKSRGGSDRVKNALLSCSSCNKDKGNRTPEEWLELIKARLPREKGKRKELDEERVELIQKVIDGKPQGGALRYAAWVSSSRRYLEKALFGIFGNVECSSGGRTKYNRTELGYPKEHHYDALCVGTVPEKGYHDRTNGYYLYAKAAGRGTRLRGHLNKCGVIVAKWTDRKKGFFGFQTGDIVVAEVPHKTPKPYKYEGRFVGRVMVRATGSFDIKTTDGKLVTVKEQYCRLLQANSGYQYTMKRAIPLGH

SEQ ID NO: 6954 - protein, 419 aa, unidentified
  REGION 1..419: note = Human gut metagenome
MVYVISQDGKPLMPCSNSIARLLLKQSKAKVKKREPFTIKLTYETTNYTQDLTLGVDTGSGTIGTSVSKDNGDIIYMSEVVIRNDITGKMTQRAKYRRNRRNRKARYRKARWLNRANSIKNDRFSPTMQSKLHSHVKEIKYIKFILPITEMVFETGQFDTHLMKNPNLANPKIKHWGYQKGINYGFENTKAMVLNRDNYTCQYCKGKHKDSKLEVHHILFRSQGGSDEESNLITLCHTCHKDLHSGKINPKLSGKVKGNLKYATQMNSIRKQLFKLYPDAVETFGYVTKANRLLLGIDKEHYYDACTIATQGNIFTVKSNLYKKKCISDGDFQKTKGIRSEQPIITDKICGFRKFDKVRYFGNKYFIKGRMSTGYAVLMDIDGNKVDFSAMPKGYKTPKLSNCKRIMARSTEMIQTLVI

SEQ ID NO: 6955 - protein, 426 aa, unidentified; identical to SEQ ID NO: 3614
  REGION 1..426: note = Human gut metagenome

SEQ ID NO: 6956 - protein, 480 aa, unidentified; identical to SEQ ID NO: 2726
  REGION 1..480: note = Human gut metagenome

SEQ ID NO: 6957 - protein, 518 aa, unidentified
  REGION 1..518: note = Human gut metagenome
MANLKLIDELLEKTEYIYVLGIDGKPQMPTNRKVRVRKLFKLGMAKIVDTVPFTMRLLYKNEPVLQPITIAEDPGRTNIGTAVLTQLGDLVFSAVVETRNKSIKKLMADRKAHRQASRRGERKARQRLAKRHGSMIKAGMIMRKLPQYAADKFVTCKIIKNTEARFCNRKRMPDWLTPTVNHLVQTHINLIKKIEKYLPITDVAIEVNRFAFMQMENPNISGVNFQNGPLKGFDDVKAAIREQQHGKCLMCKNDIEHFHHIIPRSKGGSDTIQNQAGLCKKCHTKIHADVEFQAKLKDKKNGLIKKYGALSALNQAVPFICKELIKIYGAEHVHFCTGKDTSLIRSSLGYEKTKDNQMHEVDAYCICLAAIGADKAKRPNFNNVFKIKQFRRQDRSIVNYQRERTYYLEGKKIATNRKPRFEQKGDALSGWYSEQVKLKDKKYADKLTGRITVKKSTRGYNSKNRVMPGTVFYYNGKRLVLTGQLTGGKYYRAYGDTKINYPVNKCQIYKHNEGLVFV

SEQ ID NO: 6958 - protein, 429 aa, Parasutterella sp.; identical to SEQ ID NO: 4241

SEQ ID NO: 6959 - protein, 512 aa, unidentified
  REGION 1..512: note = Human gut metagenome
MYTVYVLNKDGKPLMPTTRGGHVRHLLKEQKARVVRTNPFTIQLLYETDDVVQPLYLGIDPGRTNIGVAVVKTDGTAVFTAHLETRNKEIPKLMQGRKKARRARRTNGRRCRRQRRAKANGTISKKCVKQTTAQNGSVSKRAKKIGVIKRHLPGCEKEVLCIGIKNKEAKFSNRTRPEGWLTPTANQLLQTHINLVKKIQKFLPISDVVLEINKFAFMRLDNPNVQKWQYQQGPLYQKASLEEAVSEMQEHHCLFCKKPIAHYHHVVPQSENGSDTIGNIVGLCTKHHDLVHKDTAWQKKLTKKKTGLNKKYGALSVLNQIIPALMKELSSLFPKRFFATNGKSTYDYRAAHGVSKDHWLDAYCIACSVLPSNVCDSNINNHMPYELKQFRRHDRRVLHKANMSRVYTLNSKAVATNRHKAIKQTTDSLEEFRQSHPDDVYKLNVKEHHPAYRNLNRNYPGSIFLVGEQAHVMQSIVASRDGKATKYKDINVNKIAARQCRFVAKNEGIVFT

SEQ ID NO: 6960 - protein, 453 aa, unidentified
  REGION 1..453: note = Human gut metagenome
MYVAVIGSTGKKLQPTSSYRARKLLNSKRAKIYSYRPIFTIRLLDREDGTTQPIELKMDTGYQHIGVSICSKKHEYVNRQYDMLPDEAERHNDCRKYRRTRRNKKRYREARWNNRKSSLVAKGKYAPSIRHKKDIHVDLYKRFQKVIPITTVVIEAGQFDTQVLKAVEEGNPLPQGTDYQQGERYGFATLKEAVLSRDNYQCICCGKGIKESKILSVHHLGYRKGDRSNRMSNLATVCTDCHTSKNHQPDGKLYDLKPRLKNFKSATFMSTVRWDMVNEFKNINPTVKIIVTYGAMTKLKRADLNIKKTHSNDAYAMGNFHPKHRTDFEHYQKCRRNNRILCKFYDAKYTDVRDNSIKTGKQIGCNRTNRRELRNSDKNERIYRGHKLKKGRNSIRQQHYSYRPGDIILYQEQKYTVAGINNKGKTVTLKEIKKVPSVKKVQLVKHVGGWRQI

SEQ ID NO: 6961 - protein, 456 aa, unidentified; identical to SEQ ID NO: 6138
  REGION 1..456: note = Human gut metagenome

SEQ ID NO: 6962 - protein, 415 aa, unidentified
  REGION 1..415: note = Human gut metagenome
MVYVLDKNGQPLMPTDRHRKVRLMLQSGQAKVIKRCPFTIQLNYDSGHQTQEISLGIDAGSKHIGVSATTKIKVLYEADVELRNDIVNLLSSRRELRRGRRNRKTRYRQAKFNNRRRGNGWLAPSIRQKIGTHLTVVENICKMLPISRIMVETASFDIQKIKNPDIQGAEYQQGDQLEFWNVREYVLFRDGHICQCCKGKSKDKILNVHHIESRKTGGNAPNNLITLCETCHTGYHKGTVQLPKAIKRGMRFKDAAFMGIMRWAFYEALKQQYEPVALVHNTYGYITKHTRIAYNLPKEHYVDARCISGNPEASSNGEYYYQKKVRCHNRQIHKLTVLKGGIRKQNQATYLVKGYRLFDKVSYQGKGYFVFGRRQSGFFDIRTLSGEKVNKGSLSCKKLKFIATRTYYLTERRAV

SEQ ID NO: 6963 - protein, 413 aa, unidentified; identical to SEQ ID NO: 2636
  REGION 1..413: note = Human gut metagenome

SEQ ID NO: 6964 - protein, 426 aa, unidentified
  REGION 1..426: note = Human gut metagenome
MVYVISQDGKPLMPCSDPIARLLLKQGKAKVKKRDPFTIKLTYETTNYTQGLTLGVDTGSGTIGTAVSKDNGDIVYMSEVVVRNDITDKMTQRAKYRRNRRNRKTRYRKARWLNRASSIKKDRFSPTMQSKLHSHVREIEYIQSILPITEMVFETGQFDMQLMKNPSLANPKVRPWGYQKGANYGFENTKAMVLNRDNYTCQCCKGKHKDSKLEVHHIVFRSQGGSDEESNLLTLCHTCHKDLHSGKINPKLSGKVKGNLKYATQMNSIRKQLFRFYPNAIETFGYVTKANRLHLGVDKEHYYDACTIATQGNAFNVKSNLYKKKCVSDGDFQKTKGIRSEEPIVTDKICGFRKFDKVRYFGNDYFIKGRMSTGYAILMDIDGNKIDFSTMPRGYKTPKLSNCKRITARKMVLFSILTVAADMQAK

SEQ ID NO: 6965 - protein, 420 aa, unidentified; identical to SEQ ID NO: 5662
  REGION 1..420: note = Human gut metagenome

SEQ ID NO: 6966 - protein, 492 aa, unidentified; identical to SEQ ID NO: 4486
  REGION 1..492: note = Human gut metagenome

SEQ ID NO: 6967 - protein, 425 aa, Aphanothece sp.; identical to SEQ ID NO: 6227

SEQ ID NO: 6968 - protein, 442 aa, unidentified
  REGION 1..442: note = Human gut metagenome
MVTVQQSTHHLPFGRVFIRRNLFMVYVISQDGKPLMPCSDPIARLLLKQGKAKVKKREPFTIKLTYETTNYTQGLTLGVDTGSGTIGTAVSKDNGDIVYMSEVVVRNDITDKMTQRTKYRRNRRNRKTRYRKARWLNRASSIKKDRFSPTMQSKLHSHVREIEYIQSILPVTEMVFETGQFDMHLMKNPSLANPKVRPWGYQKGANYGFENTKAMVLNRDNYTCQCCKGKHKDSKLEVHHIVFRSQGGSDEESNLLTLCHTCHKDLHSGKINPKLSGKVKGNLKYATQMNSIRKQLFRFYPNAIETFGYVTKANRLHLGVDKEHYYDACTIATQGNAFDVKSNLYKKKCVSDGDFQKTKGIRSEQPIVTDKICGFRKFDKVRYFGNDYFIKGRMSTGYAILMDIDGNKIDFSTMPRGYKTPKLSNCKRITARSTVMTQVKIV

SEQ ID NO: 6969 - protein, 442 aa, unidentified; identical to SEQ ID NO: 3161
  REGION 1..442: note = Human gut metagenome

SEQ ID NO: 6970 - protein, 426 aa, Pseudoflavonifractor sp.; identical to SEQ ID NO: 2797

SEQ ID NO: 6971 - protein, 431 aa, unidentified; identical to SEQ ID NO: 6230
  REGION 1..431: note = Human gut metagenome

SEQ ID NO: 6972 - protein, 451 aa, unidentified
  REGION 1..451: note = Human gut metagenome
MSVAVINKTGERLMPTSEHRARKLLKSGKAIKHNYHPFTIQLTERESGDVQPIELCMDTGYIHVGTSVKSEKHEYLAEQIDTLTDEKARHDACRMYRRQRRSRKRYRHPRFNNRKRNDRWIAPSLEHKKSIHIQAILRICKVMPVTDITLEMGNFDTQVLKAREEGKPLPHGADYQHGERYGIATLREAVFTRDDYKCQCCGMTIKDGAILHVHHIKYRSQGGTNRMSNLITVCDKCHTPANHKQGGKLYNWKPKIASFKGATYMTTIRWKLYNEVKALFPDIDIHITYGAETKERRRALDIDKSHVNDAFVMGQFHPKHRSKPICYKKKRRNNRCLEKFYDAKYIDSRDGKKRSGQELFNGRISRNHKKDSENLHQYRLQKVTPGRRAIRRQHYPIQPHDIIVYNGNKIEVSGCQHKGTRVVFSKTKKSVQISKIKLFKYAGGYSKSVFN

SEQ ID NO: 6973 - protein, 412 aa, unidentified
  REGION 1..412: note = Lachnospiraceae bacterium UBA2727
MVYVLSKTGQPLMPTENHAKVRILLKQGKAKVVHSCPFTIQLLYSSTNYTQKVTLGVDSGSKHIGLSATTKDKVLFESDVELRNDIVDLLSTRRELRRSRRSRKLRHRKPRFNNRRHSDGWLAPSVKQKVDSHITMIAKVHKILPISNIVVEVASFDIQKIKDPTISGTDYQQGEQLGFWNVREYVLFRDGHKCQCCKGKSKDKILNVHHIESRKTGGDAPNNLITLCETCHTGYHKGIVKLPKTIHRGMSFKDATFMGIMRWALYDKLKTIYPDVKLTYGYITKNTRIKNGLPKDHYIDARCISDNPNAIGNGDVYYYKKVRCHNRQIHKNTILKGGYRKRNQAPYEVKGFRLYDKVLWKGCKCFIFGRRSTGQMDLRLLDGTHINASVGYKNLKLLKMRGSYLVEQRKVG

SEQ ID NO: 6974 - protein, 426 aa, Lactobacillus sp.; identical to SEQ ID NO: 3294

SEQ ID NO: 6975 - protein, 438 aa, unidentified
  REGION 1..438: note = Human gut metagenome
LKDGKAKIVKHHPFTIQLLYDSKTNTQPIEICEDVGYNYIGISVKSQSHEYVSAQYDTLQDEKACHDSCRKLRRSRRNRLRYRKPRFDNRKRGEGWLAPSLRHKKELNVNVVKMYCAVMPITHATVEVGSFDTMLVKAIQEGKAIPEGADYQKGPRYNLATLREAVFYRDNYTCQVCGRKVADGAILHMHHMFYWKGRHGDSLDELLTVCEKCHTPANHQKSGKLYGFGENVKFADLSGAAFMNTVRWQIVNELYAAFGKGFVTITYGAMTKEKRIALQLEKTHSNDAYAMGEFHPNHRCTFEHYEKVRRNNRTIEKFYDSRYIDIRTGEIATGKELFNGRINRNHKKDSENLHRYRGKRTYAGHRALLRKKVNLNPGDLVSLNGEVLVVHGTHTNKKGAVNVEFKVPAKNGQKSASLKKLKIVKTTDSMHSAWEKIS

SEQ ID NO: 6976 - protein, 420 aa, unidentified
  REGION 1..420: note = Human gut metagenome
MQYVYVLSKHGEPLMPCSPGKARLLLKEKKARVVRRTPFTIKLLYGSAGYKQSITLGVDAGSKHVGLSASTEKRELYREEFTPRNDVVKLLSKRKQYRRSRRNRKTRYRAPRFNNRVHSKHKGWLAPSVEVKIQEHITVIKRICRIIPISLVRVETAEFDTQRLKAMLEGKSLPVGTDYQLGEMYDEYNVRQYVLKRDNYTCQCCGAHTTKKKTVKLHVHHLEGRQVGGNAPNNLITLCVDCHKALHAGKVKLDGKKRGKSFKDAAFMGIMRKTLMARLRDELPIPVQGTYGYITKMRREQNDIKKSHVNDARCISKHPLAEPCSVCYRTKAIRYHNRQTHKANFSKGSIRKRSQMPYVVEGYRLWDKVLYKGQECFVSGRRASGSFTLKKLDGTRISKGVTFKKLRLLEPATNYLIERM

SEQ ID NO: 6977 - protein, 420 aa, unidentified
  REGION 1..420: note = metagenome
MQYVYVLNKHGEPLMPCSPRKARLLLKQKKACVVKRTPFTIKLLYGSTGYKQPITLGVDAGSKHIGISAATEKYELYCEEATPRNDVVDLLSARRAFRRSRRNRKTRYRAPRFNNRVHSKHKGGLAPSVEVKIQEHITLIKRVCRILPVTFVRVETAEFDTQRLKAMLEGKPLPVGTDYQLGEMYDEYNVRQYVLKRDNYTCQCCGVHPTKTKAVKLHVHHIETRRTGGNAPNNLITLCTACHKALHAGKVTLDGKKRGRSLKDAAFMGVMRKTLMERLLKELKIPVQGTYGYITKYLREKHSIPKSHTNDARCISKNPLAIPCDTCYYTKAIRHHNRQLHKATILKGGIRKANQAPYTVKGYRLWDKVSYNGSECLITGRRTSGYFALKKLDGTVVSNSASYKKMRLLEVATNYITERR

SEQ ID NO: 6978 - protein, 420 aa, unidentified; identical to SEQ ID NO: 4369
  REGION 1..420: note = Human gut metagenome

SEQ ID NO: 6979 - protein, 461 aa, Moorena sp.; identical to SEQ ID NO: 3893

SEQ ID NO: 6980 - protein, 462 aa, unidentified
  REGION 1..462: note = Human gut metagenome
MSVLVIGSNGRALMPTNPRKARLLLKKKTASVVCRHPFTIQLLYKTGCATQEGCIGIDTGSQHIGVGVTCGDRVILKEEHELRSSMEKRSLLVARAAMRRGRRYRKVRYRKPKWRHHTKRMYFEKPNRRGQHWRKVKTTTQSPRPKGWLPPSLQSKCDHHFRIIDRYLKYLPDSITRNLVIEVGRFDMARMNDPMIHGEMYQRGPMYDAENLRAYIFARDGYQCACCKAKAGTTRKADGTTVKLVAHHILFRSRGATDNPKYMVSVCDHCHTTKAHQPGGILYSWMENNKKVTRGLRDAAFMNILRQRLFARYPQAAFTYGNITATDRKQLRLPKSHANDAVAISLFGKEASAVRDTCQTVHYKQVRKSKRSLHEAIPRKGRKNPNTKAVRNKKNTTQVNGFKLWDSVLADGKKLFICSFTGTSAYLVDKNGCYVSQPGKTYKQWPLSKLKRLHPNGNWLVT

SEQ ID NO: 6981 - protein, 420 aa, unidentified
  REGION 1..420: note = Human gut metagenome
MQYVYVLNKHGEPLMPCSPRKARLLLKQKKAYVIKRTPFTVKLLYGSAGYKQPVTLGVDAGSKHIGISATTEKHELYREEATPRNDVVDLLSARRAFRRSRRNRKTRYRAPRFNNRVHSKHKGWLAPSVEVKIQEHITLIKHACRILPVTLVRVETAEFDTQRLKAMLEGKPLPVGTDYQLGEMYDEYNVRQYVLKRDNYTCQCCGAHSTKTKAVKLHVHHIETRRTGGNAPNNLITLCKACHKALHAEKVTLDGKKRGKPLKDAAFMGIMRKTLIERLRKELKIPVQGTYGYITKYLREKNGIPKSHTNDARCISKNPLAIPCDTCYYTKAVRHHNRQLHKATILKGGIRKANQAPYIVKGYRLWDKVAYNGTECFITGRRTSGYFALKKLDGTVVSNSISYKKMRLLEAATNYIIERK

SEQ ID NO: 6982 - protein, 458 aa, Scytonema sp.
MMITNSVFVLSKNGKILKPTTPARARILQSQGKGKKLKLFPFTLILDKDVDENVEPYLELRCDPGSKFTGISLVDLNKNEVIWAMELEHRGARIKMELMKRAGVRRSRRTRRLRYRKKRFDRKKPLGWLAPSLRHRLLTIETWIKRLLKLAPIKSIAIESVKFDLQKMETPDIEGIEYQQGTLAGYTLREALLEHWGRECVYCGQTDVPLQIEHINARSQGGSDSFSNLTLSCEKCNQKKGNKPVEQFLQDKPEILKKIKSHQKQSLSDAAAVNSTRKAIFEMAHQFGLPVISGDGASTKMIRIQSGLPKAHWIDSACVGTDQIVKLRICQPLRVTCKGHGTRQVQRMNAKGFPAIASIKKNPMTGKKEVKLVAKNQKYTHATAGDYVVCTLLKHRKHIQSGIYRARVKTPTPKGVEVLISGHRISLDRQYIKLIHRADGYEYSFTTINQDLLRFKPI

SEQ ID NO: 6983 - protein, 427 aa, Nostoc sp.
MCKVFIIDSEKRPLNPIHPAQARQLLRKGKAAVFKRFPFTIIVKESSTDATVSPLRLKLDPGAKYTGIALVSDANGEVVFAAELKHRGFAIRDALTSRRQLRRSRRNRKTRYRQPRSLNRTRPQGWLTPSLQSRIENIKTWVSRLRKVAPITAISQELVKFDMQLIRKPEIEGKEYQQGTLAGYETRQYLLEKWHRECAYCGIKDVPLQIEHIHPRSKGGSNSITNLTLSCEKCNLKKGTKNIRDFLKKDKSRLEKILALTKKPLADAAAVNTTRFVLLEVLKLTVLPVETGSGGLTKFNRTQQALNKSHWLDACCVGVSTPILKIKGIKPLLITANGHGTRQSCRTDKYGFPVRHCSRYKFHFGFQTGDIVKAVVNKGKKFGTYIGRIATRATGSFNISTTQGLIQGISYKYCKTIHKKDGYAYVM

SEQ ID NO: 6984 - protein, 431 aa, unidentified
  REGION 1..431: note = Human gut metagenome
MPNKVYVINKHGRPLMPCSPAKARHLLDAGKAKVKKRTPFTIQLVYGSSGYTQEVILGVDAGSKTIGMSVSTTKEELLSAEVKPRNDVVDLLSTRREFRRARRNRKTRYRKPRFDNRVRSKHKGWLAPSVEVKIQEHITSIKRVCRILPVSKVVIETAEFDLQLLKAIADGKPVPQGEDYQKGEMYGHYNVRQYVLWRDDYTCQCCGAHATKKKEVRLHVHHLESRKVGGDAPDNQVTLCESCHEKLHKGLIAEKDFKKRKRRSTRDATFMGIMRKTLMQRLCSELPIPVVKTRGYITKATREKLLVLPKSHTNDALAIAQGKRGFNVGYLPEIAQIDKIYTIRPVRHHNRQLHKAAILKGGIRKSNQAGKYVFGYRLFDKVQFNGQDCFIWGRRTTGIFTIKTINGKMIKDGISFKKLKPVEKSTSYLIA

SEQ ID NO: 6985 - protein, 403 aa, unidentified
  REGION 1..403: note = Fermentation metagenome
MPTTPCKARKLLKQGKAKVVKREPFTIQLLYATGETKQDITLGIDAGSKIIGLSATTDKQELFSAEVELRNDIVDLLSTRREFRRTRRNRLRYRKPRFLNRVYSKNKGWLAPSVENKIQTHLKIISKIHEILPISKIIIEVASFDIQKIKNPDIEGERYQQGEQLGFWNVREYVFWRDGYKCQGKKGCKNKILNVHHIESRKTGGNSPSNLITLCESCHKDYHAGKLKLNLKRGQSFKDAAFMGIMRWTFYNRLKEIYSNVKITYGYIIKNTRIQNNLPKEHRIDALCISGNPNVKRLDYWYYIKQVRRHNRQIHKANILKGGKKKLNQAPYLVKGFRLFDKVKYKGEECFIFGRRSSGYFDLRKLDGTVIHRSANCKDLKLISKAKTLLWERRIDVAVSSHD

SEQ ID NO: 6986 - protein, 414 aa, unidentified
  REGION 1..414: note = Human gut metagenome
MPCSPAKARLLLKEKKAIVKRRTPFTIQLTIATGETKQPVGLGVDAGYKHVGLSASTDKAELYASQVELRQDITDLLSARRALRRARRNRKTRYRAPRFNNRIRTKRKGWLAPSVENRINAHLSRIEAVLRLLPITKITVETASFDMQRLKNPDISGKEYQEGEQLGFWNVREYVLFRDGHVCRHCHGRSKDPVLNVHHLESRRTGSDSPDNLITLCETCHKALHRGEITLKAKRGQSFRAQAFMGIMRREVLNRLKASYPELKVHETYGYLTKHARIANGIVKSHGADAFCIAGNLGAERLGEFFFQKQTRRNNRQIHKLSILKGGIRKRNQAPFEAKGFRLFDKVACQGEEGFIFGRRSSGSFDVRKLDGTRISAGISCKKLRLLEKRRTYLTEIRKEEALPPLPEGRGLRA

SEQ ID NO: 6987 - protein, 419 aa, unidentified
  REGION 1..419: note = Human gut metagenome
MVYVISQDGKPLMPCSDPIARLLLKQGKAKVKKREPFTIKLTYETTNYTQGLTLGVDTGSGTIGTAVSKDNGDIVYMSEVVVRNDITDKMTQRAKYRRNRRNRKTRYRKARWLNRASSIKKDRFSPTMQSKLHSHVREIEYIQSILPVTEMVFETGQFDMQLMKNPSLANPKVRPWGYQKGANYGFENTKAMVLNRDNYTCQCCKGKHKDSKLEVHHIVFRSQGGSDEESNLLTLCHTCHKDLHSGKINPKLSGKVKGNLKYATQMNSIRKQLFRFYPNAIETFGYVTKANRLHLGVDKEHYYDACTIATQGNAFNVKSNLYKKKCVSDGDFQKTKGIRSEQPIVTDKICGFRKFDKVRYFGNDYFIKGRMSTGYAILMDIDGNKIDFSTMPRGYKTPKLSNCKRITARSTVMTQVKVV

SEQ ID NO: 6988 - protein, 420 aa, unidentified; identical to SEQ ID NO: 3288
  REGION 1..420: note = Human gut metagenome

SEQ ID NO: 6989 - protein, 415 aa, unidentified
  REGION 1..415: note = Human gut metagenome
MVYVLANDGQPLMPTERHGKVCRMLKSGIAKVVKKCPFTIQLQYESERNVQPVALGIDAGSKHVGVSATTKAKVLYESDVELRDDIVKLLATRRQLRRSRRSRKTRYRPVRFDNRKRKEGWLAPSIRQKIGSHLTVVANACKILPINQIIVETASFDIQKIKDPEIQGIEYQQGEQMDFWNIREYVLFRDGHICQCCKGRFKDKILNVHHIESRKTGGNAPNNLITLCETCHKGYHNGTVTLPKNIKRGMQFKDAAFMGIMRWTFYNTLKEQYEPDIPVSMTYGYLTKNTRIEHGLPKEHYIDARCISGNPDAVSDGTYYYQKKVRCHNRQIHKQTILKGGIRKSNQAEYLVKGYRLFDKVRYQGREYFIFGRRKSGFFDIRTLSGEKVNKGSINVKRLTFVDTRKNYLTERRTV

SEQ ID NO: 6990 - protein, 456 aa, unidentified
  REGION 1..456: note = Human gut metagenome
MSTCVCVLSNNGERLMPTFRLGKVRRLLKDGKAKIVKHHPFTIQLLYDSKTNTQPIEICEDVGYNYIGISAKSKSHEYVSAQYDTLQDEKEHHDDCRKMRRTRRNRLRYRKPRFDNRKCDKGWLAPSLEHKKQLNISLIERYVSVIPITHATVEVGSFDTMLLQAIQKGKAKPESADYQKGPHYNLATLREAVFYRDNYTCQVCKRKIADGAILHMHHMFYWKGRHGYQLDELATVCEKCHTPANHQKGGKLFGFGEGKEFADLSGAAFMNTVRWQIVDALYTTYDKEFVTITYGAMTKEKRIALQLEKTHNNDAYAMGDYHPACRCKFRHYQKRRRNNRVLEKFYDATYIDARTGNKAKGKELFNGRINRNHKKDSENLHKYRSKKVSKGRRSIRRRRYAIQSYDTVRLEGKTYITSGCHNKGTRLLIPVNGKSKSVAISKVQVVCHAGAWIQIS

SEQ ID NO: 6991 - protein, 423 aa, unidentified
  REGION 1..423: note = Microcoleaceae bacterium UBA10368
MSNFVFVLDTRKRPLNPIRPGMARKLLNNGKAAVFKRYPFTLILKVEVTATQKPITLKIDPGSRTSGIALVQGENVIFGAELTHRGQTIKASLESRRSLRRGRRNRHTRYRQARFLNRTRPKGWLAPSLQHRVETTLTWVTRLMKLSPIASIIQELVRFDLQQLENPEISGIEYQQGVLCGYEVREYLLNKWDRKCAYCGVTNTPLQVEHIHPKAKGGSNRISNFCLACDACNKKKGTQGIEQFLSKKPEILKQILSQAHRPLKDATAVNSTRWALFNRLKETGLPVSTGSGGLTKFNRTRLNLGKSHWLDAACVGNVDSLEILTNKPLLIKATGHGTRQMCRTDKFGFPSRYVPRFKFVKGFQTGDIVKAIVTSGKKIGKYVGRVAVRTSGSFNISASELVSGISHKYCSVVHRKDGYSYAA

SEQ ID NO: 6992 - protein, 489 aa, unidentified
  REGION 1..489: note = Human gut metagenome
MAMVYVQNKDGKPLMPTTRYCYVRLLLKENKARVVSTTPFTIQLNYDTPDITQDLILGIDPGRTNIGVAVVKEDGQCVFSAHLETRNKDIPLLMKKRAGFRRQHRTLDRRRKRQRRARATGTTIAEGSVERLLPGYEKPVVCHYIRNKAARFNNRSRPAGWLTPTANHLLQTHINLIAKVAKFLPITKVVVELNRFAFMAMDNPNIHRWEYQQGPLYGLGSVEDAVYAQQDGHCLFCKKPIDHYHHVIPRHKGGSETLANRCGLCAKHHDLVHKDKAWADKLVTRKEGMNKKYHALSVLNQIIPFLMEYLGSETLYDVYAIDGRSIKGFRIAKNVPKEHYTDAYCIACSILDTDNKVSAPVEPFELKQFRRHDRQACIRQMVDRKYLLHGKVVAANRHKAFEQKSDSLQEFREAYSDVAVSQLTVKPHPPQYKDMSRIMPGAVMDFDGIVGVMQSSIVGQFYKSTKGHKATPKRCVLLSQNAGMVFIPT

SEQ ID NO: 6993 - protein, 499 aa, unidentified
  REGION 1..499: note = metagenome
MRYVYVLDVDGKPLMPTCRYGKVRRMLKSGQAKTVDTLPFTIQLTYQTKTKILQPVTAGQDPGRTNIGLAAAREDGTDLYRSHCETRNKEIPKLMAERLAHRRASRRGERLARKRLAKKFGTIAKKLNGRLLPGYKEPLAVKDIINTEAKFNARLRPEGWLTPTATQLLRTHLNLLERVSRILPVTDVAIEINRFAFMELADPDKKHSEIDFQHGALFGTGGLEQAIREQQQDRCLLCGKRDIEHFHHIIPRTKRGSNTIANLAGLCEECHTLVHQSEEAKSRLEEKKQGLLKQYGGTSVLNQIIPSLVKELEIRYPGHLYVTTGKDTKAFREKHGLEKDHDVDAYCIAASRMENIKPKIQTEPFEIQQFRKHNRANIHHQTERTYKLDGKVIAKNRKKRMDQKTDSLEDWFATMTEQYGLEKAMRLRARLTVKKSTRHYNTKDRIMPGLVFRYGTKRYVMTGQITGGRYYRAYGAGNQNFPAQKVTMLKQNTGLVYVA

SEQ ID NO: 6994 - protein, 427 aa, unidentified; identical to SEQ ID NO: 4946
  REGION 1..427: note = Human gut metagenome

SEQ ID NO: 6995 - protein, 418 aa, unidentified
  REGION 1..418: note = Human gut metagenome
MVYVLSQHGQPLMPTENHAKVRALLKHGKAKVIQRCPFTIQLLYESTTHTQKINLGIDAGSKTIGVSATTESKVLYESEVVLRNDIVELLSGRRALRRSRRNRKTRYRKPRLDNRRRPDGWLAPSIRQKIKTHVTVVENVMKILPVTKIIVETASFDIQKIKNPKIEGAEYQYGEQLDFWNVREYVLFRDGHTCQCCKGKSKDNILNVHHIESRKTGGNAPNNLITLCETCHKAYHKGVITLPKEIHRGMRFRDAAFMGIMRWAFYDRLKELYTPFGVEVINTYGYITKNTRIEHGLPKEHYVDARCISGNPAAKPLGHYYFQKKVRCHNRQIHKNTILKGGIRKRNQAAYLVNGYRLFDKVKYQNQEYFIFGRRSSGFFDIRTLDGTKVNKGSISCKKLQLVEKSKHYLTEQRKVAA

SEQ ID NO: 6996 - protein, 450 aa, unidentified
  REGION 1..450: note = Human gut metagenome
MSVAVISKTGVRLMPTSEYRARKLLDSGKAIIYGYRPFTIQLTERETGDVQPVELCVDTGYIHIGVSVKSEKHEYLGLQVDTLTDEKTKHDDRRMYRRQRRNRKRYRKPRFDNRKRETGWLAPSLEHKKEIHLQIITAVCEVYPIADIALEMGNFDTQVLKAQEEGKPLPQGTDYQHGERYGIATLREAVFTRDGYKCQCCNRGIKEGAILHVHHIQYRSQGGTNRMSNLITLCEKCHTPANHKPGGKLYGWKPKVASFKGATYMTAVRWQLYDKVKEISECGVHITYGAETKERRRSLDIGKSHANDAFVMGRFHPKHRSTPVLYKKKRRNNRCLEKFYDAKYIDSRNGKKRSGQELFNGRISRNHKKDSEDLHRYRKKKVSRGKRTIRVQRYKIQPHDIVLFDGKKYETTGCHNKGSRAILLPEKKSKSVEKLKIYKYAGGYYPSKFT

SEQ ID NO: 6997 - protein, 406 aa, unidentified; identical to SEQ ID NO: 3475
  REGION 1..406: note = Human gut metagenome

SEQ ID NO: 6998 - protein, 469 aa, unidentified
  REGION 1..469: note = Bioreactor metagenome
MQKVFVLDKNKQPLMPCHPARAREMLKKGKAAVFRRYPFTIILKEREGGAVQPLQTKIDPGSQTTGIALIGDFTRGKQVIWGAELHHRGKTIKKTLTDRLAIRRSRRNRKTRYRKARFNNRHPAKCVCCGRNAKHGSRYCGPCQKTRNYVDNGYRQRCLPPSLQSRVENTLTWVKRICRFAPATALSLELVRFDTQKLQNPEISGIEYQQGELAGYEIREYLLEKWGRKCAYCGKEGVPLEIEHIVPKSRGGTDRISNLTLACHECNQKKGNQFIEEFLAYDPGKLKRIKTKLKEPLKDAAAVNTVRWYLFNRLQKEGLPLECGTGGRTKYNRIKLGFPKEHWIDAAYVGESGQDVQLNLSMQALQITASGYGTRQMCNTDKYGFPRSHRQRTRMFLGFKTGDTVLAVIPKGKYKGIHIGRIAIRHRPSFKLNGFDVHPKYLKLLQRNDGYEYQIFNRKEECGNFSWKC

SEQ ID NO: 6999 - protein, 247 aa, unidentified
  REGION 1..247: note = Human gut metagenome
LKVFVLNMRGRPLMPCSPARARHLLKAGKAVVRRRTPFTIQLRIATGETKQSVTLGVDAGAKHVGLSATTEKEEVFASEVELRQDITGLLAARLSLRRDRRHRKTRYRAPRFLNRVRSKHKGWLAPSVENRIQAHMSRIDAVCRLLPVTKIVIETASFDIQKIKDPSVEGTDYQQGDQLGFWNVREYVLFRDGHVCQHCHGHAKDKILNVHHLESRQTGGDAPNNLITLCETCHKACHAGKIKLKVK

SEQ ID NO: 7000 - protein, 463 aa, unidentified
  REGION 1..463: note = Human gut metagenome
LNGCRLMPTSEREARLLLKHGKASVYRKVPFTIKLNYKTGSTTQPGYLGIDTGSQHIGVSVVREDGTVLHKEEIGLRDSMSKRKLMESRSSLRRGRRHRKTRYRHPKWRLKAKRVYYETPDRKGRHWKKQKITFASKRPQGWLPPSLQSKTDHHIQWIKKLQDLLPDGYRLSIELGRFDPARMKDTEIHGDLYQKGPQYDYENVRAYVLDRDRYTCQVCGKKGGKLHIHHILYRSHGATDNPQYMATICSDCHSTENHQPGGILYQWMQEQKKFTRGLRDATFMNILRKRLMKAFPKATFTYGNITKADREKLKIPKSHGNDATAIAIVKTGIMTVKDNEPVIYIQQVRRKKRSLHEETPRKGRKEPNRKASRYNKNTKAVTVTKRKNKKRISITGCLFDRVELNGKKGWISGFTDKSCYIKDENDQYIRISPKYKQVSLSKLKILHHCGNWVIGARRSLGKG

SEQ ID NO: 7001 - protein, 480 aa, unidentified
  REGION 1..480: note = Human gut metagenome
LYTKPLDNIGEGSLPPSGEINLKGMTFMVYVKSIDGKALMPTSNAKARKLLKQKKAKVVSLRPFVVKLTYKTKTEYTQKLNLGVDSGYSNIGFSVIDAKQEYIAGEVKLLEGMKKRLLEKASYRRIRRSRLRYRKARWNNRVKSKKKGWLAPSLKHKLDTHIKFIDYLKNILPIGKITVEVANFDIQKMKDDLISGIDYQNGDMFGFWNMREFVLHRDGHKCQNPNCKHKDKKEQILKVHHIRYRSEGGSDRPENLITLCSKCHTPVNHKKGKFLYDWCVNGKKVRGFKDATFMSMIRWYLVNELKSKHNNVSITYGYITKNHRIQNGIEKSHLNDAFAIAKGTNQARTKDRFLVIQDRLKNRSLEKFYDSKIIDIRIGKKVSGGDLNCGRSTRNKNLNTENLRKYRGIRISKGQRRIRKQKYFYQPNDLVKYDGKVYTVKGTQNEGKYIALKEIKKVPKVELLIPYVFKKGLNWSYGLC

SEQ ID NO: 7002 - protein, 346 aa, unidentified; identical to SEQ ID NO: 4983
  REGION 1..346: note = Human gut metagenome

SEQ ID NO: 7003 - protein, 556 aa, unidentified
  REGION 1..556: note = Human gut metagenome
LYIKMTSCTCTVFPACNHAKASSSQGKHNLLFRQERLIVKEVAYMPTVYVLNKDGKPLMPTTRGGHVRHLLKEQKARVVRAKPFTIQLLYETDDAVQLLYLGIDPGRTNIGVAVVKANGTAVFTAHLETRNKEIPKLMQDRKKARRARRTNGRRCRRQRRAKANGTISKKCVKQTTAQNGSVSKRAKDIGVIKRRLPGCEKDVLCIGIKNKETKFTNRTRPEGWLTPTANQLLQTHINLVKKIQKFLPISDVVLEVNKFAFMRLDNPDIQKWQYQQGPLYQKGSLENAVSEMQEHHCLLCDKPIDHYHHVVLQSENGSNTIANIVGLCSEHHNLVHKDAAWQKKLAEEKVGLNKKYGALSVLNQIIPALTNKLSVLFPKHFFVTTGKSTHDYRESHSVSKDHWLDAYCIACSVLPSNVCDSNINNHVPYELKQFRRHDRRALHKENMSRVYTLNGKAVATNRHKAIKQTTDSLEEFRQSHPGDVCKLKVKEHHPAYRNLNRNHPGSVFFVGEQAHVMQSIVASKDGKATRYKDTNVNKIAAGQCRFVAKNEGIVFT

SEQ ID NO: 7004 - protein, 442 aa, unidentified; identical to SEQ ID NO: 2903
  REGION 1..442: note = Human gut metagenome

SEQ ID NO: 7005 - protein, 447 aa, unidentified; identical to SEQ ID NO: 4762
  REGION 1..447: note = Human gut metagenome

SEQ ID NO: 7006 - protein, 518 aa, unidentified
  REGION 1..518: note = metagenome
MTPKKRKEASRMSEYIYVIGVDGDPQMPTKRKRHVEKLLQAGRARVFRQIPFTIQLTYENKPVLQPITIAEDPGRSNIGMAVVSLSGELLSAAVVQTRNKEIVKLMEKRKQHRRASRNGERKARQRLAKKCHTMIKAGSLMRKLPMYGKDKRVQCNVIRNTEARFCNRKREDGWLTPSAEHLVQTHINLIHKMQKFLPITDVAFEINRFAFLSLEDPSISGVDFQNGPLKGYDDLNAAIEDLQDGHCLMCNSPIEHRHHIVPRSMQGSNTIGNIAGLCCKCHERVHKDARFEDRLKKKKAGLNKRYAAVSALNQAIPFICKRLEQEFGKEHVHYCSGRDTAMARRSFGYHKTKEEQLHVVDAWCIAVLALQHVPEKAPEFDHVHEILQFRRQDRSRIKAQTSRAYYHEGKKIAKNRKKAEGQREDSLQEWRKRQVERYGEEQTRKMISQLKVKKSIRRYNRLDRLMPGAVFYYQGVRYVMRGQHSNGQYLQAVGMGSKDFPAKKCKIVAHNQGLVFVS

SEQ ID NO: 7007 - protein, 413 aa, unidentified
  REGION 1..413: note = Human gut metagenome
LKVFVLNMRGKPLMPCSPAKARHMLKAGKAVVVRRTPFTIKLTIATGETKQDVTLGVDAGARHVGISATTEKEEVFASEVALRQDITGLLADRLAFRRARRNRKTRYRAPRFNNRVRSKHKGWLAPSVENRIQAHMSRIEAVCRLLPVTKIVIETASFDIQKIRNPEVEGTGYQQGDQLGFWNVREYVLFRDSHICQHCRGRSKDPILNVHHLESRKTGGDAPNNLITLCETCHKAYHAGKIKLKVKRGQSFRAEAFMGIMRWTLLDRVRKTHPKLPVENTYGYLTKHKRIALGLPKTHCADAFCIAGNLKALRRGDFLFQQQTRKHNRQIHKCSILKGGVRKLNQAPFLVKGFRLFDKVRIGGQIGFVFGRRVRGTFNIRRLDKTVIGTDINCKKLSLLETRKTFLTELRKE

SEQ ID NO: 7008 - protein, 412 aa, unidentified
  REGION 1..412: note = Human gut metagenome
MADRQKSRQASRRGERKARQRLAKRYGSMVKSGMVMRKLPMYAADKFVTCKFIRNTQARFCNRKRCPDWITPTVQHLVQTHLNIIRKISRYLPVTDIAFEVNRFAFMHMENPKAMGVDFQNGPLKGYDDVKEAICTQQHGKCLMCKKPISHFHHIVPRSRGGSDTIQNLAGLCPECHTKVHTDTTFRKDFDRKKSGQLKKYGALSALNQAVPFICKKLLEEYGEEHVHFCGGLDTSLIRTAFGFEKTKKNQMHEVDAYCIGLAALEVNEVGTPAFDHTFQIRQFRRQDRSIIHHQTGRSYYQGKEKVAQNRKPGFEQKTTALSQWYKEQIRIHGEKEAEKLRSQLRVEKSCRHYNDMDRFLPGTVFLYEGKRYVLSGRITNGKYLRACGQGMKNFPAAECTFIRHNAGLVFI

SEQ ID NO: 7009 - protein, 430 aa, unidentified
  REGION 1..430: note = Cyanobacteria bacterium UBA11372
MSNFVFVLDANKQNQDPVPPGQARRLLSQGKAAVYRHYPFTIILKYAVQEPHTQPCQIKIDPGAKVTGLAVVQGDKVIWGAQLVHRGEQIKNDLLKRRAIRRSRRNRKTRYRKPRFLNRTRKPGWLPPSLESRVENIVSWVNRIRRYVPTAGLSQELVKFDTQAMQNPEISGISYQQGELAGYEVRQYLLEKWGRKCAYCGAENTRLEVEHIHPKSKGGSSRVSNLTIACRNCNQDKGDRDIKDFLAQKPDVLSRILKQARLPLKDAASVNSTSWALFHQLKQTGLPVETGTGGRTKYNRFRLGIPKTHWLDAACVGEVEKLKVLTSQPLLITAKGWGNRQMCTPNKYGFPSKHRTRCKTFKGFQTGDMARAVLPTGKFAGTHVGRLIVRESGVFEMITAKGKISPVRHKYCRSIHRNDGYMYAFSSFVS

SEQ ID NO: 7010 - protein, 408 aa, unidentified
  REGION 1..408: note = Human gut metagenome
KARLLLKEKKAIVVRRTPFTIQLTIATGESKQPVSLGVDAGYKHVGLSASTEKAELYASEVELRPDVSDLLSARRTLRQSRRNRKTRYRAPRFDNRIRTKRKGWLAPSVENRINAHLSRIGAILRLLPVTKITVETASFDTQLLKNPDISGKEYQEGEQLGFWNVREYVLFRDGHACQHCHGRSKDPVLNVHHLESRRTGGDSPGNLLTLCETCHKALHRREIKLKTKRGQSFRAEAFMGIMRWEVLNRLKASHPELEVHNTYGYRTKHTRIVNGIDKSHCADAFCIAGNLGAKRLGEFFFQKQTRRNNRQIHKLSILKHGLRKRNQAPFEIKGFRLFDKVACKGEEGFIFGRRSSGYFDVRKLDGTRISAGISYKKLHLLEKRQTYITEIRKEKALPPLPEGRGLRA

SEQ ID NO: 7011 - protein, 420 aa, unidentified
  REGION 1..420: note = Human gut metagenome
MQYVYVLNKHGEPLMPCSPGKARLLLKQQKAHVIKRTPFTIKLLYGSTGYKQPITLGVDAGSKHVGLSASTEKRELYREEFTPRNDVVDLLSTRKQNRRSRRNRKTRYRPPRFDNRVHSKHKGWLAPSVEVKIQEHITVIKRICRILPITLVRVETAEFDTQRLKAMLEGKPLPVGTDYQLGEMYDEYNVRQYVLKRDNYTCQCCGAHTTAKKAVKLHVHHLESRKMGGNAPGNLITLCITCHDALHKGKVSLDNKKRGKPMRDAAFMGIMRRTLMSRLREELPITVQGTYGYITKMQREQNDIKKSHVNDARCISKHPLAEPCSVCYRTKAIRHHNRQTHKANFSKGGIRKRSQMPYVVEGYRLWDKVLYKGQECFVSGRRASGSFTLKKLDGTRISKGVTFKKLRLLEPATNYLIERM

SEQ ID NO: 7012 - protein, 494 aa, unidentified
  REGION 1..494: note = mine drainage metagenome
MLPQSRALEAADADNREGQDETVGGKGAIPKPVANIPEGRRVERSALRPKGQCNVRFDGGFVQVFVLDKKKKPLMPCHPARARELLREGRAVVHRIAPFTIRLKDRIGGETQPIRVKLDPGSKTTGLAVVREEETDGEKTAHVLFQAEIHHRGSAIKKRLDQRRAFRRRRRSQLRDRTPRFDNRTRPDGWLPPSLRHRIDTTLAWVERLRRLVPVSELSQELVRFDMQKIENPEISGAEYQQGTLAGYEVREYLLEKWGRTCAYCGSENVPLEIDHIHPRSLGGSDRVSNLTLACRSCNLKKGNRPVGEFLAKTPERLSTILARAKAPLKDAAAVNTTRWALFQALKATGLPVETASGGRTKWNRTRLLLPKTHALDAACVGKVDRIEGWNRPCLSVKATGRGSYRRTRLDAFGFPRGSLTRTKAHFGFQTGDRVMAIVTKGKKNRNLCRTGGSEKLRQFQHPNRLRSGAGDFLQGLSASPAGRRVRIFYPSDH

SEQ ID NO: 7013 - protein, 414 aa, unidentified
  REGION 1..414: note = Human gut metagenome
MPCSPAKARLLLKEKKAIVVRRTPFTIQLTIATGETKQPVSLGVDAGYKHVGLSASTEKAELYASEVELRQDITDLLSARRALRQSRRNRKTRYRAPRFDNRIRTKRKGWLAPSVENRINAHLSRIEAVLRLLPVTKITVETASFDMQLLKNPDISGKEYQEGEQLGFWNIREYVLCRDGHVCQHCYGRSKDPVLNVHHLESRRTGGDSPGNLITLCETCHKALHRGEITLKAKRGQSFRAEAFMGIMRWEVLNRLKASHPELEVNNTYGYRTKHARIANDIAKSHCADAFCIAGNLGAERLGEFFFQKQTRRNNRQIHKLSILKGGIRKRNQAPFEVNGFRLFDKVACQGEEGFIFGRRSSGFFDVRKLDGTRISAGISYKKLHLLEKRRTYLTEIRKEEVLPPLPEGRGLRA

SEQ ID NO: 7014 - protein, 431 aa, unidentified; identical to SEQ ID NO: 4463
  REGION 1..431: note = Human gut metagenome

SEQ ID NO: 7015 - protein, 430 aa, unidentified; identical to SEQ ID NO: 4817
  REGION 1..430: note = Human gut metagenome

SEQ ID NO: 7016 - protein, 412 aa, unidentified; identical to SEQ ID NO: 6973
  REGION 1..412: note = Lachnospiraceae bacterium UBA7287

SEQ ID NO: 7017 - protein, 512 aa, unidentified
  REGION 1..512: note = Human gut metagenome
MSTIYVLNKDGKPLMPTTRGGHVRHLLKEQKARVVQSNPFTIQLLYETNDVVQPLYLGIDPGRTNIGVAVVKTDGTAVFAAHLETRNKKIPKLMQDRKKARRARRTNGRRCRRQRRAKANGTISKKCVKQATAQNGSVSKRAKEIGVIKRHLPGCKKDVLCVGIKNKEAKYTNRARLEGWLTPTANQLLQTHINLVKKIQKFLPISDAVLEVNKFAFMRLDNPNIQKWQYQQGPLYQKGSLENAVSEMQEHHCLFCEKPIEHYHHVVPKSENGSNTIANIVGLCAEHHNLVHKDVAWQEKLVEEKTGLNKKYGALSVLNQIIPALTKELSFLFPKHSFMTNGKSTHDYRAAHGISKDHWLDAYCIACSVLPIDVCDSTINNCVPYELKQFRRHDRRALNNENMNRVYTLNDKVVATNRHKATEQEAASLEEFRKEHPNDVCKLKVKEHHPTYRNMNRNYPGSVFLVGKQIHVMQGIASSKDGKATKYNDTRATTIAAGKCKFVAKNSGILFV

SEQ ID NO: 7018 - protein, 501 aa, Moorena sp.
LPTFPRGDGQKCPRHESRKGRLQEGSDLAVFVLDKRKRPLMPCSEKRARLLLERGRARVHRLVPFTIRLVDRTVEESVLQPMRIKLDPGSKTTGVALVRESEEVDGETGEVREVRKAAHVVFLAELSHRGQAIREALTARRAFRRRRRSANLRYRACRFANRRKPKGWLAPSLRHRVETTLSWVNRLCRWVPVTAISQELARFDTQAMQNPEISGVDYQRGSLFGYEVREYLLEKWKRKCAYCDAQDVPLEIDHIHPRSKGGSHRVSNLALACRTCNQKKGNRDVAAFLARDPQRLARIEAQAQAPLGDASAVNSTRWALYAALKGTGLPVEVGTGGRTKFNRVRFGIPKTHALDAVCVGHVEAVYGWSVPTLGIQCTGRGSHQRTRLTKYGFPRGYLTRRKRHFGFQTGDVVRAVVTTGRKMGTYVGRVAIRASGRFNLQTRNGLVQGIHHRFCTLIQRADGYGYAWNRTAFVKGEAGTGAACAAALSLSVLKGGVSRAI

SEQ ID NO: 7019 - protein, 442 aa, unidentified; identical to SEQ ID NO: 2903
  REGION 1..442: note = Human gut metagenome

SEQ ID NO: 7020 - protein, 582 aa, unidentified
  REGION 1..582: note = Human gut metagenome
MYLDGVFGHLKDAGTCRYSSSLQHRRVYAKSRKTIPGQCLGLQPMRKNRFFVGRYCPTLIRRQHLANLKLIDTLLEKTEYIYVLGADGKPQMPTNRKVRVRSLFKSGLAKIVDTVPFTIRLLYENNAVLQPITLAEDPGRTNIGVAVLTQFGDLVFSAVVETRNKDIKKLMSDRKAHRQASRRGERKARQRLAKKHGSMIKSGMIMRKLPRYAADKFVTCKFIKNTEARFCNRKRIPDWLTPTVNHLVETHINIIRKISKYIPVTDIAVEVNRFAFMQMENPETTGIDFQNGPLKGFNDVKAALRVQQHGKCLMCKNDISDFHHIVPRSKGGSDNIQNQVGLCPKCHKKAHTNENFKQKLADKKVGLLKKYGALSALNQAVPFICKSLLEIYGKDHVHFCTGKDTSLIRTGLGYEKTKDNQMHEVDAYCIGLAAVGADIVNLPKFENIYKIKQFRRQDRSIINYQRERTYYLDGKKIATNRKPRFEQKKDAFSDWYSKRVKSDGKEQADKLTGRVTVKKSIRGYNSKNRLMSGTIFYYNGKRLVLTGQLTGGKYYRAYGDSKTNYPAAKCQVYKQNEGLVFV

SEQ ID NO: 7021 - protein, 420 aa, unidentified; identical to SEQ ID NO: 3685
  REGION 1..420: note = Human gut metagenome

SEQ ID NO: 7022 - protein, 451 aa, unidentified
  REGION 1..451: note = Human gut metagenome
MSVAVISNIGERLMPTSEYRARKLLKSGKAVKCSYHPFTIQLTERKAGDVQPIELCMDTGYIHIGISVKSEKHEYLAEQIDTLTNERTRHDACRMYRRQRRGRKRYRQPQFNNRKRDKGWIAPSLEHKKDIHIQAISRINKVMPLTDITMEMGNFDTQVLRAKEEGKPLPQGADYQHGERYGTATLREAVFSRDNYKCQCCGRTISDGAILHVHHIKYRSHGGTNSMVNLATVCDKCHTPKNHKPGGKLYDWKPKLPDFKGTTFMTTIRWQLYSEVKSLFPDVNIHVTYGAATKEQRRELSIGKSHVNDAFAMGKFHPKHRINAVLYKKKRRNNRCLEKFYDAKYIDSRDGSKKTGQELFNGRINRNHKKDSENLHQYRLQKTTAGKRTVRKKHYSIQPHDIVIYENRKRETSGCHCNGTRVILLPDKKTATIKKVKIYKYAGGYFKSAFN

SEQ ID NO: 7023 - protein, 447 aa, unidentified
  REGION 1..447: note = Human gut metagenome
VPAYRFKHITKKEVPYMVYVLDIDGQPLMPTSRHGKVRRLLNSHLAKVVKRCPFTIQLLYQSTKETQPVSLGVDAGSRHVGLSATTEREVVYQEELVPRNDIVKLLSARRALRRSRRNRKTRYRRVRFNNRVHSKHKGWLAPSVEVKIQEHITATKRICQILPIFDIHVETAEFDLQRLKAMEEGRLLPAGTDYQLGEQYDFYNTRQYVLHRDEYTCQCCGTHDNNVKLHVHHVESRQTGGEAPNNLITLCEHCHKSIHAGKMMLPKGKKRGKSYRDAAFMGIMRNTLLERLRKEVNVPVTMTYGYITKYWREKAGLEKSHINDAICISKHPYARPLETYYLTKAVRHHNRQIHKTKFSKGGIRKRNQAPYLVKGFCLFDKVLYQGESYFIFGRRITGYFDIRTLDGTKVNKGSTSYKKLRIQDTAEAYLTEVRAIPHMNEFTCVLA

SEQ ID NO: 7024 - protein, 424 aa, Microcoleus sp.
MSNFVFVIDTNKRPLNPVHPGLARLLLTQRKAAVFRHFPFTIILKTASAEITGPIQLKIDPGSKTTGLALLSNDAVIWGAELTHRGQAIKDSLESRRAIRRNRRHRKTRYRQPRFLNRTRKKGWLAPTLEHRVKTTLTWVNRLIKWAPITGISQELVRFDTQALMNPEISGTEYHRGELAGFEVKEYLLAKWGRKCAYCGVENTSLEIEHILASSKGGTNRVSNLTLACHDCNQKKGNDPIEKFLSKKPDVLRRILAASKSPLKDAAAVNSTRWALYQRLQETGLPVSLGTGGRTKFNRVKLGVQKRHYLDAACVGVVEKLSIKITKPLLITAKGWGTRRMCTTNKYGFPIRHRTRQKAFFGFQTGDIIRAILPTGKFAGTHVGRLTVRATGVFEMVTQVGKVSPVRAKYCLAVHRVDGYSYAA

SEQ ID NO: 7025 - protein, 419 aa, unidentified
  REGION 1..419: note = Human gut metagenome
RPLMPCSPAKARHLLDEGKAKIKKRTPFTIQLVYGSSGYTQEVILGVDAGSKTIGMSASTTKEELLSAEVKPRNDVVDLLSTRREFRRARRNRKTRYRKPRFDNRVRSKHKGWLAPSVEVKIQEHITAIRRVCGILPVSKVVIETAEFDLQLLKAIADGKPVPQGEDYQQGEMYGHYNVRQYVLWRDGYTCQCCGAHATKKKEVRLHVHHLESRKVDGDAPDNQVTLCESCHEKLHKGLIAEKDFKKRKRKSTRDATFMGIMRKTLMQRLCSELPIPVIETRGYITKATREKLLVLPKSHTNDALAIAQGKQGFNVGYLPGIVQINKIYTIRPVRHHNRQLHKATILKGGIRKSNQTEKYVFGYCLFDKVQFNGQDCFIWGRRTTGIFTIKTINGKMIKDGISFKKLKPVEKSTGYLIA

SEQ ID NO: 7026 - protein, 431 aa, Moorena sp.; identical to SEQ ID NO: 2933

SEQ ID NO: 7027 - protein, 426 aa, unidentified
  REGION 1..426: note = Human metagenome
MVFVLDKSKKPLDMISHAKARILLKNRLAVVHKIYPFTIRLRDNSCVGNDKTYTVKFDPGSKHTGVAITDNKDSVVMLAEIEHRGHLIKKDLTSRRMIRRHRRNRKTRYREARFQNRTKPEDWLAPSVKSRANNVINFIKKYKKILNINKVLIERVSFDVAQMTSDTKLWGVAYQQGPLYQTKLKSYLFKKCNGRCIYCGNKAEEIEHIIPKSKGGTNSPYNLVIACKKCNKLKGKSSLKEFGELMNKDYSHLEPKKLPRDASIVQAARNYMVKEITKLVSDTTLHDAWLTKYNRDELGLPKEHYYDALSVGEVPSKFNFLTDKILLISAKGRGSRQMCRVDKYGFPRTSPKGSKSVKGFQTGDMVKAIVPKGLKQGEYLGKVAVRSSGKFDIQTKTKTIEGINHKYCHLIQRGDGYLYSYKEREF

SEQ ID NO: 7028 - protein, 428 aa, Enterococcus sp.; identical to SEQ ID NO: 4335

SEQ ID NO: 7029 - protein, 428 aa, Moorena sp.
MQRVFVLSNAKKPLMPCNPARARRLLKRGKAKVFRRIPFTILLTERKNGETQKLELKFDPGSKTTGIAIVSHGKQISKCIWAANLEHRGNSVRNALESKRASRRSRRGRKTRYRKPRFLNRIRPKGWLAPSLMSRVNNVNTWRNRIQSWCPVTSLTMELVKFDTQKMQNAEISGVEYQQGELSGYEVREYLLEKFGRKCVYCDAKDIPLEIEHVIPKSKGGSDRVSNLTIACNKCNQKKNNKPVEEFLKDKPNVLNRLSTQLKSSLKDTAAVNSTIFKTLEVLKSDGLKVSCSTGSRTKYNRIKQDYPKAHWVDAACVSESGENIFISKKHKPLLIKAMGRGSRQMCRVDKYGFPRTTAKKQKMVKGFQTGDIVLANVPSGKKKGVYQGRVAVRTSGSFNIKTNDTTVQGIGYRYCKLIQRTDGYLYN

SEQ ID NO: 7030 - protein, 427 aa, Enterococcus sp.; identical to SEQ ID NO: 2410

SEQ ID NO: 7031 - protein, 428 aa, Moorena sp.; identical to SEQ ID NO: 7029

SEQ ID NO: 7032 - protein, 418 aa, unidentified
  REGION 1..418: note = Human gut metagenome
MKVSEMTSYTFVLDADGKQLAPTKEQKAWFLIRKKRATLVSKYPMVIRLKKKIPDKETCKDEIRCGIDDGSLHVGIALVQKCQTRNKVVFMGTIEHRNDVKRLMDAKRGYRHYHRYHKRYRPARFNNRNSSKREERIAPSILQKRQAIIRVINQLNKWINITNYWLEDVAIDIRALTDGYKSYRWQYQKSNRLDENIRKAVILRDGCKCMECGKSNCKLEVHHIKPRRLKGSNTLSNLITLCKKCHQKTEGIEELYMDRYFALLNSSDNKNLNYAQHVMIGKKWLREQLSNLGMLYLTNGGDTANKRIDWNIEKSHSNDAICITNLRPDTCEIKEWTIKPMRRQSKAKTNDIFGIKHRDLVEYTFMNGETHRGYVTALYPEQNALNFQSPTKHCKKVNARKCRLLWKYSKIYWLDNVS

SEQ ID NO: 7033 - protein, 436 aa, unidentified
  REGION 1..436: note = Ga0315285_10005533
MQKLKEKNTYTPTVIPQDCSNCGLSLNSPEGRGSVAGLKTSFNSSDAALTGFRSSGTELESICRKNSFVVYVLNQRGEPLMPCSPGKAKMLLKEGKAKVVKRSPFTIQLTTSTGKAKQDIALGVDCGYSHVGLSAVSRKQELFSAEVNLRDDMVKLNSERRQYRRSRRSRKTWHRKPRFLNRKKDSGWLAPSIQHKLNSSFKLTGKVKEILPITKINVEVAAFDIQKIKDPEIEGEGYQNGVQKNFWNTREYVIFRDNHICQGCKGKSKDPVLEVHHLESRQTGGDIPDNLITLCNTCHRKVSKGKLELSLKLPEGFKAETFMNTVRWKLVNELRELGNSVSHTYGYITKSKRIELGLAKSHSNDAFIIAGGNSQKRTSGYLIQQVRKCNRKLFKGNRSHIRKILLIDLSVAFRDTIRCCGKVLSVLYLVEEKLVF

SEQ ID NO: 7034 - protein, 443 aa, Anoxybacillus sp.; identical to SEQ ID NO: 4812

SEQ ID NO: 7035 - protein, 426 aa, Lactobacillus sp.; identical to SEQ ID NO: 3294

SEQ ID NO: 7036 - protein, 413 aa, unidentified
  REGION 1..413: note = Human gut metagenome
MVYVLNENGQPLMPTENHVKVRVLLKRSKAKVVNSCPFTIQLLYSSTNYTQPVTLGVDAGSKHIGLSATTENKELYAADVELRNDIARFLAARRESRRSRRNRKTRYRKPRFNNRKQGKGWLAPSIREKTGTHLKAVDDTCKLLPVSKIIVETASFDIQKIKNPDVKGADYQQGEQLGFWNVREYVLFRDGHVCQCCKGKSKDPVLQAHHIESRKTGGNAPNNLITLCKTCHSGYHQGTVKLPAKIKRGMKFNDAMFMGIMRWSFYNQLKARYSDVSLTYGYITKNTRIENGLPKEHYVDARCISGHPLARPLGTVFYIKKVRCHNRQIHKFNILKGGRRKRNQAEYEVYGFRLYDKVSWKGQICFVFSRKSTGYITLRLLDGTCVKESVSYKKIKLLRMRSGYLIELRSVIF

SEQ ID NO: 7037 - protein, 398 aa, Geobacillus sp.
LFVYIINKHGKPLMPCSPRKARLLLKQKKAKVVRRTPFTIQLLYGSSGYKQPVSLGVDMGTRHVGISATTKKDVLFEAEAQLRTDIVELLAIRRQFRRSRRNRKTRYREARFLNRRKPEGWLPPSIQHKINSHIKLIDLVHNILPVTSVTIEVAAFDTQKLKNLNIRGVEYQQGEQMGFWNVREYVLYRDNHTCQYCKGKKKDPVLQVHHIESRKTGGDSPDNLITLCKTCHHEIHEKGLEHIFQRKRPPMRDASQMTAMRWAMFSRIREKYSHANITYGYITKCIRIANGLSKSHMVDARCISGNPLAKPSGTVYLLKFVRKNNRQLHKATILKGGKRKSNKAPRFVKGFQLFDKVVYERKECFIFGRRSSGYFDLRLLDGTKVHASASWKSMLVHC

SEQ ID NO: 7038 - protein, 488 aa, unidentified
  REGION 1..488: note = Wastewater metagenome
MTAKGKAPKVLIAARKGRSRLLTFPRGDTPQSVRYKTRKGIYWSFWKMVFVLDKRKRPLMPCSEKRARKLLDSGRARVHLLMPFCIRLTDRLAEKSEFQTLRVKLDPGSKTTGVALVRETADNGVAVINLFELVHRGKQISEALTARRGHRRMRRSHLRYRAPRFLNRCKQKSGWLAPSLQHRVDTSMAWVNRIQRYAPVSAISSELVRFDMQAMQNPEISGVEYQQGTLAGFEVKEYLLAKWDHCCAYCGDNENSLEVEHIHPKARGGSNRISNLSLACTHCNTKKGAKSIEDFLSHDPKRLAKVLAQAKRPLKDAAAVNATRWALVNALKTTGLVVETASGGRTKFNRKQFCVPKTHALDAACVGELASITGWQKPTLCIKAMGRGSYQRTRLDKYGCVRGYLTRLKSIEGFQTGDLVKAVVTKGKKTGRYTGRVAVRASGNFNIQTGTGLVQGVAHRYCTVVQRGDGYGYSLVAKKDGGRIATAA

SEQ ID NO: 7039 - protein, 442 aa, unidentified; identical to SEQ ID NO: 2903
  REGION 1..442: note = Human gut metagenome

SEQ ID NO: 7040 - protein, 416 aa, unidentified
  REGION 1..416: note = Human gut metagenome
MVYVLDKNGQPLMPTDRHRKVRLMLQSGQAKVIKRCPFTIQLNYDSGHQTQEISLGIDAGSKHIGVSATTKIKVLYEADVELRNDIVDLLSSRRELRRGRRNRKTRYRQAKFNNRRRGNGWLAPSIRQKIGTHLTVVENICKILPISRIMVETASFDIQKIKNTDIQGAEYQQGDQLGFWNIREYVLFRDNHTCQCCKGKSKDKILNVHHIGSRKTGGNAPNNLITLCETCHTGYHKGTVQLPKAIKRGMRFKDAAFMGIMRWAFYEALKQQYEPVGTPVHNTYGYITKHTRIEHNLPKEHYVDARCISGNPEASSNGEYYYQKKVRCHNRQIHKLTVLKGGIRKQNQATYLVKGYRLFDKVSYQGKGYFVFGRRQSGFFDIRTLSGEKVNKGSLSCKKLKFIATRTYYLTERRAV

SEQ ID NO: 7041 - protein, 456 aa, unidentified
  REGION 1..456: note = Human gut metagenome
MSTCVCVLTNNGERLMPTFRLGKVRHLLKDGKAKIVKHHPFTIQLLYDSKTNTQPIETCEDVGYNYIGISVKSESHEYVSAQYDTLQDEKEHHDDCRKYRRTRRNRLRYRKSRFDNRKRDKGWLAPSLEHKKHLNISLIERYVSVIPITHVTVEVGSFDTMLLQSIQKGEAKPEGADYQKGPRYNLATLREAVFYRDNYTCQVCKRKIADGAILHMHHMFYWKGRHGYQLDELVTVCEKCHTPANHQKGGKLYGFGKDKKFANLSGAAFMNAVRWQIVNALYATYGKEFVTITYGAMTKEKRIALQLEKTHNNDAYAMGDYHPACRCKFIHYQKRRRNNRVLEKFYDATYIDTRTGNKAKGKELFNGRISRNHKKDCKNLHKYRSKKVSKGRRSIRRQHYAIQPYDTVRLEGKTYITSGCHNKGTRLLIPVNGKSKSVAISKVQVVCHAGAWIQII

SEQ ID NO: 7042 - protein, 465 aa, unidentified
  REGION 1..465: note = Human gut metagenome
MSTCVCVLSNNGERLMPTIRLGRVRHLLKDGKAKIIKHHPFTIQLLYDSKTNTQPIEICEDVGYNYIGISVKSKSHEYVSAQYDTLQDEKEHHDDCRMHRRTRRNRLRYRKPRFDNRKRGEGWLAPSLIHKKELNVNVVKMYCAVMSITHATVEVGSFDTMLVKAIQEGKVIPEGADYQKGPRYNLATLREAVFYRDNYVCKICGRKATEGAILHMHHMFYWKGRHGNSLDELLTVCEKCHTPANHQKGGKLYGFGEDVKFADLSGAAFMNTVRWQIVNELYVAFGKPFVTITYGAMTKEKRIALQLEKSHNNDAYAMGEFHPNLRCMFEHYEKARRNNRILEKFYDSRYIDIRTGEIATGKELFNGRINRNHKKDSENLHKYRGKRTYAGHRALLRKKVNLNPGDLVSLNGENLIVHSTHTKKNGAVNVEFETPAKSGQKSASLKKLKIVKAANSIHPAWKKIS

SEQ ID NO: 7043 - protein, 447 aa, Moorena sp.
VSLEELPTLNKVEANLTCKKDAAMQNYVFVIDQNKQPLNLIPPARARELLTKQKAAVFRMYPFTIILKHAVANPLPKPLTIKIDPGSKVTGIAIFDGENVIWVAELEHRGGQIKNALLSRRSLRRSRRNRKTRYRPARFDNRKRKEGWLPPSLMHRVLTVETWVKRLCRYAPITQVVMELVRFDTQKMQNPEIDGVEYQQGELAGYEVREYLLEKWGHNCVYCDKQDVPLQIEHIYPRAKGGSNRVSNLTLSCEKCNSLKGILLIDEFLKKDLTRLERIKRQSKTPLKDAAAVNSTRWKLYNTLKEMLPITTGTGGQTKFNRIRFGLKKQHWIDAVCVGNIEAIKLLTQQPLRIKCTGWGTRKMCSTDEYGFPIRHRDSNQVHFGFRTGNIVKAIVTSGKKVGEYVGRVLCRKTGSFDIATKTGRVTGISHRFCTSIHKKDGYSYVF

SEQ ID NO: 7044 - protein, 431 aa, unidentified
  REGION 1..431: note = metagenome
MPNKVYVINKHGRPLMPCSPAKARHLLDEGKAKIKKRTPFTIQLVYGSSGYTQEVILGVDAGSKTIGVSASTKKEELFAANVIPRNDVVDLLSTRREFRRARRNRKTRYRKPRFDNRVRSKHKGWLAPSVEVKIQEHITSIKRVCRILPVSKVVVETAEFDLQLLKAIADGKPVPQGEDYQKGEMYGHYNVRQYVLWRDDYTCQCCGAHATKKKEVRLHVHHLESRKVGGDAPDNQVTLCESCHEKLHKGLITEDDFKKRKRKSTRDATFMGIMRKTLMQRLCSELPIPVVETRGYITKATREKLLVLPKSHTNDALAIAQGKQGFNVGYLPGIIQTDKIYTIRPVRHHNRQLHKAAILKGGIRKSNQAGKYVFGYRLFDKVQFNGQDCFIWGRRTTGIFTIKTINGKMIKDGISFKKLKPVEKSTSYLIA

SEQ ID NO: 7045 - protein, 421 aa, unidentified
  REGION 1..421: note = Human gut metagenome
MQYVYVLNMHGEPLMPCSPQKARLLLKEGKACVVKRTPFVIKLLYGSAGYKQPVVLGVDSGSRHIGLSACTESRELYKEELEPRNDVVELLSARRQYRLSRRNRKTRYRAPRFDNRVHSKHKGWLAPSVEVKIQEHITAIKRVFRILPIVLVRVETAEFDTQRLKAMLEGRPLPVGIDYQRGEMYNEYNVRQYVLKRDRYVCQHCGAHPTPEKPVRLHVHHLETRHTSGNAPNNLIVLCEHCHKELHEGKIKLDKGKKRGKSLRDAAFMGIMRNTLLARLETELSVPVQQTYGYITKLLREENHIEKSHTNDARCIAGFPEASPCDTLYCTRAIRHHNRQIHKAKILKGGIRKKNQAPYLTNGFRLWDKVRYNGEECFIAGRRSSGYFALKKYDGTVISSGASYKKLTLLEAAANYITERS

SEQ ID NO: 7046 - protein, 431 aa, unidentified
  REGION 1..431: note = metagenome
MPNKVYVINKHGRPLMPCSPAKARHLLDDGKAKVKKRAPFTIQLVYGSSGYTQEVILGVDAGSKTIGMSASTTKEELLSAEVKPRNDVVDLLSTRREFRRARRNRKTRYRKPRFDNRVRSKHKGWLAPSVEVKIQEHITAIRRVCGILPVSKVVIETAEFDLQLLKAIADGKPVPQGEDYQQGEMYGHYNVRQYVLWRDGYTCQCCGAHATKKKEVRLHVHHLESRKVDGDAPDNQVTLCESCHEKLHKGLIAEKDFKKRKRRSTRDATFMGIMRKTLMQRLCSELPIPVIETRGYITKATREKLLVLPKSHTNDALAIAQGKQGFNVGYLPEIAQIDKIYTIRPVRHHNRQLYKATILKGGIRKSNQTKKYVFGYRLFDKVQFNGQDCFIWGRRTTGIFTIKTINGKMIKDGISFKKLKLAEKSTSYLIA

SEQ ID NO: 7047 - protein, 458 aa, Lactobacillus sp.
LKGVGMMSEIKKVDYIYIVDSNGTPLMPTSRLGMVRRWLKTGQAKWFGNSRNTIQFVRPVTTNTQELTLGVDAGFHLGLSVVGNNREYYVSESLRKSEKDRITSRRELRRTRRNRLRYRKARFNNRRRKDGWLAPSIQHRLDFTIKEIKRLYKFLPITNLVVEVTPFDNQKLLNPDIQGWQYQKGKMYGFKTIKDYLLARDNYRDALDGKQYPASQLRVHHLVQRKDGGSNQPDNLVLLSDINHNQSNHNNGILAKLRENRQKTLDYRGAYFMSILATRLSNYFEHYTTTQGYLTANLRQKYEIKKSHLNDAFIIAGGTDTTLRTNNVYSRQKLRNNNRVLQKFYDAKYIDSRDGKKKTGKELSSGRTRRSRELNYTNLRQFRKEKVKKGRVSIRRGHYQLRPHDVVLNTRTNRIETVKGVQNSGTVIKFQTGKTCSIKSVVSLYHVNGILEKKMKNI

SEQ ID NO: 7048 - protein, 502 aa, unidentified; identical to SEQ ID NO: 6049
  REGION 1..502: note = Human gut metagenome

SEQ ID NO: 7049 - protein, 451 aa, unidentified; identical to SEQ ID NO: 6777
  REGION 1..451: note = Human gut metagenome

SEQ ID NO: 7050 - protein, 416 aa, Lactobacillus sp.
QARWFGNSRKIIQFVRPVTTNTQELTLGVDAGFHLGLSVVGNKREYYASESLRKSEKDRITSRRELRRTRRNRLRYRQARFDNRRRKESWLAPSVQHRLDFTIREIKRLYTFLPIAKLVVEVTPFDNQKLVNPNIKPWEYTQGKLHGFKTIKDYLLARDNYRDALDGKQYPANQLRIHHLVQRKDGGTNQPDNLVLLSDINHSQANHNNGILAKLRENRQKVLDYRGAYFMSILATRLGDYFDEYTTTQGYLTANLRQKYQLEKSHLNDAFIIAGGTDTTLRTNNVYSRQKLRNNNRVLQKFYDAKYIDNRDNKTKTGKELSSGRTRRSRELNYINLRQFRKTKIKKGRVSIRRKHYQLRPHDVVLNTKTNKIEIVKGVQNSGTVIKFQTGKTCSIKNVVSLYHVNGMLEKKIEAI

SEQ ID NO: 7051 - protein, 433 aa, unidentified
  REGION 1..433: note = Candidatus Methanolliviera sp. GoM_oil
MYVYVYVVNKNGNPLMPCKPAKARHLLDDGRAKVVRRTPFVIQLLWDCEENVQPIELGIDSGYSYIGYSATTMIDGDRRKKELISGKVILRNDIPKKLIERRQYRRNRRSRLWHREPRFLNRTHSEKKKGKGWIPPSLQHKINSHIRIIELLRNILPIAEENITIEIASFDTQKMKNPEIKGVEYQQGELQGYEVREYLLEKWGRKCAYCGKTNVPLEVEHIIPKSRGGSDRVSNLTISCHRCNQKKGNKTAEEFGYPNIQKKSKESLKATAFMNNVRRKLVDVLGCKSTYGYITKHDRIKAGLEKSHANDAFVIAGGGKSKSKGEEDRAISYIVTQRRRNNRSIQMNRKGHKPSIRRIRYDMQPGDLVRFNGKEIKKGEEIKKGLLYEVKGVFNYGKWIRLVNEIGDVINTNIKNVEMVKYGKGLQFKLKVG

SEQ ID NO: 7052 - protein, 434 aa, Lactobacillus sp.; identical to SEQ ID NO: 6197

SEQ ID NO: 7053 - protein, 431 aa, unidentified
  REGION 1..431: note = Human gut metagenome
MPNKVYIINKHGRPLMPCSPAKARHLLDAGKAKVKKRTPFTIQLVYGSSGYTQEVILGVDAGSKTIGMSASTTKEELLSAEVKPRNDVVDLLSTRREFRRARRNRKTRYRKPRFDNRVRSKHRGWLAPSVEVKIQEHITAIRRVCGILPVSKVVIETAEFDLQLLKAIEESKPVPQGEDYQQGEMYGHYNVRQYVLWRDGYTCQCCGAHTTKKKEVRLHVHHLESRKVGGDAPDNQVTLCESCHEKLHKGLIAEKDFKKRKRKSTRDATFMGIMRKTLMQRLCSELPIPVIETRGYITKATREKLLVLPKSHTNDALAIAQGKQGFNVGYLPEIAQIDKIYTIRPVRHHNRQLYKATILKGGIRKSNQTGKYVFGYRLFDKVQFNGQDCFIWGRRTTGIFTIKTINGKMIKDGISFKKLKLAEKSTSYLIA

SEQ ID NO: 7054 - protein, 521 aa, unidentified
  REGION 1..521: note = Human metagenome
MNYIDFVFVTDKDSLPCNPINEGYAGKLLRTGKAKIVNHDPLVIKRLDDYSSKNENRHTITLKVDTGFGNIGFSASDDKHEYIAGQVELLSGISDRLVTKKGYRTQRRSRLRYRRNKNIDYKTVNNPTYKNGNKDGWLAPSVIHKIESHVRVIDRIASWIPIDKVIIETANFDIQKIKATLNGTAINGIDYQKGEMYGFENAKQYVRERDNYTCQICKEKLTDKRHVVIEVHHIIPRSKGGSNKPDNMISLCHCCHKKVHENNNDNKLFRELRQRKIINTYKDATFMNTMRWELYNRLKENYDVSMSFGYITRMNRKNAGLEKYHYTDAVCISEYHKITLTKNIYLVEQKRCNDRCMESFFDAKYIDSRDGKVKKGSELCKSRVATASSKRSTKKEDIDNKRIYRQEKVSKGKRRYENHSYCLKPGDLIYINYGNHKGNIAEVTTMQKNPNGTYKIVFSYANPKCKIPSINIKEKEYVELTHNQCEKIKIVRTRRGMIWRKVNRLEFEENTTEQIDRKVKK

SEQ ID NO: 7055 - protein, 425 aa, Moorena sp.
MSVFVLDKRGKPLMPCSEKRARLLLERSRARVHRVVPFVIRLTDRLAVHSEFQPLLLKIEPGSKKTGFALVRKTEAGAAVLNLFELVHRGRQISEALAARKNFRRRRRSANLRYRSPRFHNAGRQEGWLAPSLKHRVDSTMSWVTRLSRWAHISRLASELVRFDMQVIHALEIAGTAYQHGELSAHEVREYLLEKWGHRCAYCEAEGVPFQLHRIVSQAQGGTNRVSNLTLACAPCATSCSQDTEGVTGEIRREHLLRRAKAPYTDAAVINGTRRALVERLKHTGLPVDLSSGARTKWNRVRLNIPKSQALDAACVGSVESVSGWQRPTLQIRCMGRGSYQRTRLTAQGFPRGYLTRSKRVHGFQTGDRVMAKVSAGKKAGIHVGRVAVRATGSFNIQTPQGVVQGVSHRHCVILQRADGYNYSM

SEQ ID NO: 7056 - protein, 469 aa, Moorena sp.
MVFVLDKHKKPLMPCTEKRTRLLLQRGSAVIHRMAPFTIRLKDRTLEESQLQPLRLKLDPGAKITGFAVLREDSSDRSTALILGEIRHKPGIKDRLDKRRALRRSRRSRKTRYREPKELKGRGKEGRLAPSLEARVSQTMSAVQKLCRSLPISAISTEHVKFDIQLMQNPEISGIEYQQGTLFGYEVKEYLLEKWNYRCAYCGAENVPLEVEHVIPKRPKHGPKGTDRISNLVMACRECNEAKDNRQPEEWLEKLRESKKVIDQRRAENLPKVLQQLKEPLKDTAMMNATRWRLYERLKGTSLPVECGTGARTKKQRLEHGFSKTHYYDACCVGASTPADIVINQRYVHVWSAVGRGTRKMCNTDAHGFPIGHRERKKSIFGFQTGDLVIADIPKGKYAGRWIGRVAVRASGYFDIKDGLGKRICQGISHKYMKVLQRGDGWQHEKIRVEKGGSGASSPGVNAGASGAA

SEQ ID NO: 7057 - protein, 431 aa, unidentified
  REGION 1..431: note = Human gut metagenome
MPDKVYVISRLGHPLMPCSPAKARHLLDDKKAKVVKRMPFTIRLLYGSTKYIQPIILGVDAGSKTIGLSASTAKGEVFAAEVMPRNDVVENLSTRREFRRARRNRTTRYRKPRSDNRVRSNHERWLAPSVKVKIQEHITSIKGVCTILPISKVVIETAEFDLQLLKAIQEGKPIPEGEDYQKGEMYGSYNVCQYVLWRDNYTCICCGVRGTPKNPVRLHVHHFESRKYGGNAPDNHGTLCDDCHKKFHLGIIADVKLKTRRRQSTRDAAFMGIMRKTLMWRLRTELFIPVAETKGYITKATREKLLVLPKSHTRDALAIAQGRHGFSIKEYAYVEPANHIYTVRPVRHHNRQLHKASILKGGIRKRNQASKYVFGFRLYDKVLYQGKACFVWGRRTSGTFLLRTIDGIKVKDGVSYRNLTLLERSSNYLIA

SEQ ID NO: 7058 - protein, 450 aa, Moorena sp.; identical to SEQ ID NO: 2935

SEQ ID NO: 7059 - protein, 512 aa, unidentified
  REGION 1..512: note = Human gut metagenome
MSTVYVLNKNGKPLMPTTRCGHVRRLLKEQKARAVASKPFTIQLLYETDDVVQPLYLGIDPGRTNIGVAVVKADGTAVFTAHLETRNKEIPKLMKKRKDSRRARRTNGRRCRRQRRAKANGTLSKKCVKQTTAQNGSVSKRAKKIGVIKRHLPGCEKEALCIGIKNKEAKFNNRTRPEGWLTPTANQLLQTHINLVKKIQKFLPISDVVLEVNKFAFMRLDNPNIQKWQYQQGPLYQKVSLEEAVSEMQEHHCLFCKNTIDHYHHVVPQHKNGSNTIDNIVGLCTKHHDLVHKETAWQEKLAKKKTGLNKKYGALSVLNQIILALTKGLSFLFPKHFFVTTGKNTYDYRTAHSVSKDHWLDAYCIACSVLPNDVCDSSINSHVPYELKQFRRHDRRALHKENMSRVYTLNGKKVATNRHKAIEQTTDSLEEFRQRQPNDVYKLKVKEHHPEYRNPKRNFPGCVFLVGKRTHVMQGTSGSHNGKADGYYDTNGNSYSSGKCKFVAKNEGIVFA

SEQ ID NO: 7060 - protein, 420 aa, unidentified; identical to SEQ ID NO: 6017
  REGION 1..420: note = Human gut metagenome

SEQ ID NO: 7061 - protein, 435 aa, unidentified
  REGION 1..435: note = Human metagenome
MTKTLTTRTTQACVLDQQGRPLMPTTRLGKVYRLLKTQKAHIVSYEPFTIQLDYEPDTQVIQPMTPGVDSGAIHSGYSLTNEHREYYSAEVVARNDISNRLSDRRMCRQNRRSRKTRYRQPRFNNRKNQKKGWLPPSLEQKVTVQVNEINHIHRYFPIDTIIVETAEFDIQKIKNPDISGIEYQQGTLQGYNIRNYLLEKHGRRCFYCGKAVSDFEVEHMFPKSKGGSNRIDNLTLSCHDCNEKKGTLTAEEFIQQTLPAKKATAKLKQLPQEKRLFKYMAYMNATRWALYDAIKERYPNVKMTYGYITKYNRIQAGLPKAHHIDAKCITGFPTVPSIDQTVVKVKMRRHNRQLHRATFSKGHVRKAACLPTTVFGFQLYDLVLFNNHRYYIKGRRSSGSFALVSVEGLKDENRSYKKLTLLAHTNTYLTNHYVN

SEQ ID NO: 7062 - protein, 458 aa, Lactobacillus sp.
LKGVGMMSEIKKVDYIYVVDSNGTPLMPTSRLGMVRRWLKTGQAKWFGNSRNTIQFVRLVTTNTQELTLGVDAGFHLGLSVVGNNREYYVSESLRKSEKDRITSRRELRRTRRNRLRYRKARFNNRRRKDGWLAPSIQHRLDFTIKEIKRLYKFLPITNLVVEVTPFDNQKLLNPDIQGWQYQEGKMYGFKTIKDYLLARDNYRDALDGKQYPASQLRVHHLVQRKDGGSNQPDNLVLLSDINHNQANHNNGILAKLKENRQKTLDYRGAYFMSILATRLSNYFDNYTITQGYLTANLRQKYEIKKSHLNDAFIIAGGTDTTLRTNNVYSRQKLRNNNRVLQKFYDAKYIDSRDGKKKTGKELSSGRTRRSQELNYDNLRQFRKEKVKKGRVSIRRGHYQLRPHDVVLNTRTNRIETVKGVQNSGTVIKFQTGKTCSIKSVVSLYHVNGILEKKMKNI

SEQ ID NO: 7063 - protein, 422 aa, unidentified
  REGION 1..422: note = Human gut metagenome
LNKRGKPLMPCSPAKARLLLKEKKAIVVRRTPFTIQLTIATGESKQPVSLGVDAGYKHVGLSASTEKAELYASEVELRKDITDLLSARRALRQSRRNRKTRYRAPRFDNRIRTKRKGWLAPSVENRINAHLSRIEAVLRLLPITKITVETASFDMQRLKNPDISGKEYQEGEQLGFWNVREYVLFRDGHVCRHCHGRSKDPVLNVHHLESRRPGSDSPDNLITLCVTCHKALHRGEITLKAKRGQSFRAQAFMGIMRREVLNRLKASYPELKVHETYGYLTKHARIANGIVKSHGADAFCIAGNLGAERLGEFFFQKQTRRNNRQIHKLSILKGGIRKRNQAPFEAKGFRLFDKVACQGEEGFIFGRRSSGSFDVRKLDGTRISAGISCKKLRLLEKRRTYLTEIRKEEALPPLPEGRGLRA

SEQ ID NO: 7064 - protein, 427 aa, Parasutterella sp.
LRVFVLNKRGKPLMPCSPAKARLLLKEKKAIVVRRTPFTIQLTIATGESKQPVSLGVDAGYKHVGLSASTEKAELYASEVELRPDVSDLLSARRTLRQSRRNRKTRYRAPRFDNRIRTKRKGWLAPSVENRINAHLSRIGAILRLLPVTKITVETASFDTQLLKNPDISGKEYQEGEQLGFWNVREYVLFRDGHACQHCHGRSKDPVLNVHHLESRRTGGDSPGNLLTLCETCHKALHRREIKLKTKRGQSFRAEAFMGIMRWEVLNRLKASHPELEVHNTYGYRTKHTRIVNGIDKSHCADAFCIAGNLGAKRLGEFFFQKQTRRNNRQIHKLSILKHGLRKRNQAPFEVKGFRLFDKVVCQGEEGFIFGRRSSGSFDVRKLDGTRISAGISYKKLRLLEKRRTYLKEIRKEEALPPLPEGRSLRA

SEQ ID NO: 7065 - protein, 433 aa, Anabaena sp.; identical to SEQ ID NO: 3939

SEQ ID NO: 7066 - protein, 768 aa, unidentified
  REGION 1..768: note = metagenome
MSTGLRAVQAEPAGIRKGDALKVFVLNMRGRPVMPCSPARARHLLKAGKAVVRHRTPFTIQLRIATGETKQSVTLGVDAGAKHVGLSVATEKEEVFASEVELRQDITGLLAARLSLRRDRRHRKTRYRAPRFLNRVRSKHKGWLAPSVENRIQAHMSRIDAVCRLLPVTKIVIETASFDIQKIKDPSVEGTDYQQGDQLGFWNVREYVLFRDGHVCQHCHGHSKDKILNVHHLESRQTGGDAPNNLITLCERCHKACHAGKIKLKVKRAQSFRAEAFMGIMRWTLLDRMRKAHSGLPVENTYGYLTKNTRITPGLPKTHCVDAYCIAGNLKAVRRGVYLHQRQVRKHNRQIHKCTVLSKTLKDGTKIGYRKLNQTPHLVKNFRLFDKVRCLGQTGFIFGRRSSGCFDVRRLDGVKLSSGISYRITLLEKRGTHLTELIKEDGASSSVRRQRFLRRVSMNKPCTYLLSALMASAVLAPVAASAADKSELEVRMEAAQKVLADRSYYERWSPEAALKTVEDAKAANEAGSARQKEIDGALDVMKDWCHTRFLVNACIKDARDLHHEREKEIRSVRLKADEMIRLDRVEQRRARQESQKQNVKQPMKLGGSTESPESRSESRAEEVKTKQSRAEERRALEEANVRAYEEKQARAARKAEERHDPIRVKSRVKAPSSPIEGHLGRTAADVEAGRAEAAERMAQEDANIAAFNAKQAEAKKRLEEAEATAAERKASREARQANFNKTLEERRAAQKRYEESRENKDSGLKKYF

SEQ ID NO: 7067 - protein, 440 aa, Lactobacillus sp.
MKGKKAMQNRVFVINKHGKALMPCKPRKARILLRDGKAKVLKKEPFTIQLLYGSTGYKQDISVGIDSGQRYIGLAVTSQNKVLFQGEVELRQDVKKLIDTRRTYRRSRRNRKTRYRKSRFLNRIAKKKDNWLPPSVASKVNHNINWIKRLLSVLPKADLHIEVGKFDMQKMKNPEINGEGYQQGDLYGYQTVKQFVLARDNYTCQVCKKKGGKFKIHHIIYRSLGGTNTVNNLTTVCSNCHTTKNHQTGILAKWCKDKMKVNKSYKGATFMNILKRRLFLAFPQAKFQYGSWTILQRVDLDLTKSHYNDAVAISGIRKVKAKPTSIMMFKQFRKKKRSLHEATARKGRKTPNITSKRNAKNTKYAKGFWLNDYVKIKDSNKKGYISGFMSKGTNVRLRDIFGEYVSNSDKSYTSTKNISLINHSNNWQKQVITEKQYIMG

SEQ ID NO: 7068 - protein, 422 aa, unidentified; identical to SEQ ID NO: 3542
  REGION 1..422: note = Human gut metagenome

SEQ ID NO: 7069 - protein, 442 aa, unidentified; identical to SEQ ID NO: 3791
  REGION 1..442: note = Human gut metagenome

SEQ ID NO: 7070 - protein, 443 aa, Anoxybacillus sp.
MVEENMTCFMQRKGENPMVFVLDTNKCPLAPCHEAVARKLLKQGKAAIYKRYPFTIILKEIVDNFRPKTPYRLKIDHGSKHTGLAILRGQEVVWLGQLDHRTDIKERMDKRRAFRRARRNRKTRYRKPRFLNRRRKDGWLPPSLESRVQNIQTWVNRLKKLCPIGYISYENAKFDTQLMRNPEISGIEYQQGTLQGYEVREYLLEKFGRKCCYCGKENVPLEVEHIIPKSRGGTDRVDNLCLACHDCNQRKGSKTAEEFGYPHIQKQVKESLKDASAVNSTRWKVYEVLKQSGCEVECGTGARTKMNRIRLDLPKTHYFDACCVGESTPNHLYFKTKEVLFIRAKGRGSRSRTNLDRYGFPRGYLARQKFFFGFQTGDMVKAVIPRGKYQGVWFGEVACRKTGSFDIKGKDGKRIAQGINYRYVQVIQRFDGYAYGKGVAELA

SEQ ID NO: 7071 - protein, 490 aa, unidentified
  REGION 1..490: note = Human oral metagenome
MYVVYVLDHQGKPLMPTKRFGHVRRMLKTGKAKAISTKPFVIQLQYESTDFVQPLYGGTDPGRTNIGEAVLNNKGEVVYAAYVITRNKEIPKLMADRATHRRASRRGERLRRKRRAKANGTMTCFPEGRKLSGYKDGVLKLKGIINTESRFNNRKRPTGWLTPTARQCVQTHLNMVQNICKILPVTDWTLEYNRFAFMRLEDDSVRGWDFQNGRLKGYASKEDYIYALQGGVCICCGASIEHYHHIKPRHKGGSDTPENLVGLCSVCHTEIHTGKRSLDKIGKYKEYAETSIVNIAIPFIWDGIVKMFGDKAHICEGQETAELRKANSIPKEHFADAVCIAGIGSGIIPQYDDNQPFELRQFRCHNRSSINAQVERTYLEGKTIVAKNRKPRFEQKGDALSDLQSKMTKEHGELAARRVVSKFVVKKSYRRYNASERIKPSAVFVFNNKKYLLSGQLTNGMYYRAFGEGTKNFPSRNCELVSFGCSLTYM

SEQ ID NO: 7072 - protein, 430 aa, unidentified
  REGION 1..430: note = Human gut metagenome
LETRNKEIPKLMQDRKKARRARRTNGRRCRRQRRAKANGTISKKCVKQTTAQNGSVSKRAKDIGVIKRRLPGCEKDVLCIGIKNKETKFTNRTRPEGWLTPTANQLLQTHINLVKKIQKFLPISDVVLEVNKFAFMRLDNPDIQKWQYQQGPLYKKESLESAVSEIQEHHCLFCKKPIDHYHHVVPQHKNGSNTIGNIVGLCAKHHDLVHKDSAWEKKLAKKSTGLYKKYGALGVLNQIIPTLTNELSSLFPKHSFVTNGKSTYDYRAAHGVSKDHWLDAYCIACSVLPSNVCDSNINNHMPYVLKQFRRHDRRVLNNENMNRVYTLNNKAVAINRHKAKDQKTVSLEEFRKEHPDDVCKLKVKEHHPTYRNMNRNFPGSVFLVGKQIHVMQGIASSKDGKATKYNDTSATAIAARKCKFVAKNTGILFV

SEQ ID NO: 7073 - protein, 425 aa, Moorena sp.; identical to SEQ ID NO: 4593

SEQ ID NO: 7074 - protein, 441 aa, unidentified
  REGION 1..441: note = Anaerobic digester metagenome
MLFERSKLMVYVISKSGKPLMPTKRYAKVRILLKEKKAKVVQRKPFTIQLLYETKEYTQPISLGIDSGYTYIGFSAITEKEELISGEVELLSGISERLKQRAMYRRQRRSRLRYRKPRFDNRIRPEGWLAPSIQHKYDTHIRFIEKLKKILPITDITIEVANFDTHKLKNPNISGIDYQEGEQQGFFNLREYILHRDGHKCQVCGAEDVPLEVHHVGYWKRDRSNRPANLVAVCTKCHLPKNHQRNGKLWGLKPINKGFKEATFMSTIRWRLVNEFDCKHTYGYITKSRRIELGLDKSHANDAFVIAGGENQERADMINFKQIRRNNRSLEKFYDAKYLDTRIGKKASGKELSSGRKVRNKSFNDENLRQYRGHKISKGRRSIRTKRYFYQPNDLVKYDGKIYIVKGTHNKGTRVILKETGKSVKADKLEPYKFMSGLVAI

SEQ ID NO: 7075 - protein, 442 aa, unidentified; identical to SEQ ID NO: 3234
  REGION 1..442: note = Human gut metagenome

SEQ ID NO: 7076 - protein, 423 aa, unidentified; identical to SEQ ID NO: 3538
  REGION 1..423: note = metagenome

SEQ ID NO: 7077 - protein, 468 aa, unidentified; identical to SEQ ID NO: 3693
  REGION 1..468: note = Human gut metagenome

SEQ ID NO: 7078 - protein, 420 aa, Moorena sp.
MLLREKKAAVHRKSPFTIILKDRTDGDTQPVEFKVDPGSKVTGIVVVADYGKRGKTVIWAEELQHRGQTIKDALDSSRAIRRSRRNRKTRYRAPRFDNRTRPAGWLPPSLMSRVHNVTTWALRLQRFAPLASIAVETVRFDMQKMVSPEISGVEYQQGTLAGYELKEYLLEKWGRKCAYCNKKNLPLHVEHVIPKTRGGTDRVSNLTLSCEGCNHKKDNLTAAEFGHPEVQKPALAPLKDAAAVNTTRYAIGNALKSLGLPVSFWSGGRTKFNRTQQGYPKAHWIDAACVGETGEHVKLDSSAQMIQVKATGHGSHQMCRMDRFGFPRTSAKTTRVVNGFRTGDIVRAVVPYGQKTGTYDGKIAVRASGSFNVSTATGVVQGISYKYCSVVHRADGYSYLTNTGAPLGNELPSIRAQELS

SEQ ID NO: 7079 - protein, 415 aa, unidentified
  REGION 1..415: note = Human gut metagenome
MVYVLNICMDPLMPCKEAKARKLLKSGKAKIIKRNPFTIQLLFECENVTQDIVLGVDAGSKHIGLSATTDKKELYAAEVELRNDIVDLLSTRRENRRTRRNRKTRYRKPRFENRMRNAGWLAPSVQNKVDTHLTVVRRLHEILPITRIIVEVAAFDIQKIKNPDIDGTEYQQGEQLGFWNVREYVFFRDGHTCQCCKGKSKDKILNVHHIESRKTGGNAPNNLVTLCETCHKGYHEGKVKLSKNIKRGMSFRDAAFMVIMRWAFYNQLKKLYPNVSLTYGYLTKNARIRNELPKTHCVDARCISGHPLVEPLGYYFYQKKVRCHNRQIHKNTILKGGYRKRNQAPYTVKGFRLFDKVLYNNQECFIFGRRSSGYFDLRKLDGTKIHASASYRKLKLLETRKTMLCERRLAIPPTV

SEQ ID NO: 7080 - protein, 435 aa, Moorena sp.
MQNYVFVIDTNKQPLNPISPKKARRLLDKGKAAVFRMYPFAIILKTAIENPVVTSCQLKIDPGSKVTGFALVQNNQVIWGMELEHRGGLIKKKLESRRAVRHRRRNRNTRYRKPRFLNRRRKEGWLAPSLEHRVLTIETWVKRLIKFCPVNEVWVERVKFDTQKMQNPEINGVEYQQGELAGYEVREYLLEKWGRECTYCGKQSVPLQIEHIHPKSFGGSDSAKPTLRERVSNLCLACEKCNQRKGNKPIEKFLKKKPSLLQKIKTKAKQPLKDAAAVNATRNKLLKVLYNIKSVITGTGAQTKYNRTKLGFPKEHWIDAACVGDIETLVLRTSQPLLVTCKGPGGRQKAALNKYGYPIRHNPLKPIKGWVTGDIAKHQKLGIGKVTPRSKGSFGFTPLGMKGYKSCKPQDISAIHRKDGYIYSFCKYLPEFARE

SEQ ID NO: 7081 - protein, 429 aa, Ktedonobacter sp.; identical to SEQ ID NO: 6384

SEQ ID NO: 7082 - protein, 428 aa, Enterococcus sp.; identical to SEQ ID NO: 4335

SEQ ID NO: 7083 - protein, 533 aa, unidentified
  REGION 1..533: note = Human gut metagenome
MPSLWRHCESRKQCGTVVYSHLLTRTLRKETAMPANIYVLNHDGTPLMPSHSHGRVKRMLHTGKARIAGTKPFTIRLTYQIDTPVIQPVILGMDPGRTNIGNCAVETSGKVLYASLVETRNKEIPKLMGERKGHRQMSRRGERKRLQRRAIRADKTGMARATEYWRMLTGQKKPIRCKVIRNQEVKFQNRKRPIGWLTPTAEQLARTHLNVVRKIQKILPVSAVVIEINRFDFARMENPDIENWEYQQGRLAGYADVREAVSRQQKGKCLLCGRKQIEHYHHIVPKSRGGSESIDNYAGLCMTCHEKVHQDEIARGKLQSKKKGIQKKYHALSVLNQIMPVLLRELPKLVPAFITTGYETHRIRDSVGLQEKQKDDDTHYMDAWCIAMSIVGTYETEPDFSGLYRMKQFRRHDRAKIKAQKERTYYHNGKAVAKNRHKRTGQADAKVPFPSLAEYLQEHPEHKGRLTVRKSTRSYNNIKRNLPGTVYTECGNPFVLRATQSNGTRLYGMGEGMDYHKTVRCKLSHHNAGLVYI

SEQ ID NO: 7084 - protein, 427 aa, Fischerella sp.; identical to SEQ ID NO: 3596

SEQ ID NO: 7085 - protein, 419 aa, unidentified; identical to SEQ ID NO: 4877
  REGION 1..419: note = Human gut metagenome

SEQ ID NO: 7086 - protein, 420 aa, unidentified
  REGION 1..420: note = Human gut metagenome
MQYAYVLNKRGEPLMPCSPGKARILLKQQKACVVKRTPFTIKLLHGSAGYKQPITLGVDAGSKHVGLSASTEKRELYSEEFTPRNDVVELLSTRRQNRRSRRNRKTRYRAPRFNNRVHSKHKGWLAPSVEVKIQEHITVIKRICRILPVTLVRVETAEFDMQRLKAMLAGKPLPVGTDYQLGEMYDEYNVRQYVLKRDNYTCQCCGAHTTAKKAVKLHVHHLESRKVGGNAPSNLITLCTTCHNNLHKGKITLDGKKRGKTLRDAAFMGIMRNTLLTRLRNELHIPVQNTYGYITKLLREQNDIKKSHVNDARCISKHPLAEPCSICYRTKAIRHHNRQIHKAKILKYGIRKANQAPYIVKGFRLWDKVLYNGQECFISGRRTSGYFALRKLDGTTITNSISFKKLRLLEPATNYLIERK

SEQ ID NO: 7087 - protein, 353 aa, Arthrospira sp.; identical to SEQ ID NO: 3451

SEQ ID NO: 7088 - protein, 492 aa, unidentified; identical to SEQ ID NO: 4486
  REGION 1..492: note = Human gut metagenome

SEQ ID NO: 7089 - protein, 442 aa, Anaerostipes sp.; identical to SEQ ID NO: 2903

SEQ ID NO: 7090 - protein, 456 aa, unidentified; identical to SEQ ID NO: 3342
  REGION 1..456: note = Ga0315284_10003977

SEQ ID NO: 7091 - protein, 419 aa, Anoxybacillus sp.; identical to SEQ ID NO: 5328

SEQ ID NO: 7092 - protein, 442 aa, unidentified; identical to SEQ ID NO: 2903
  REGION 1..442: note = Human gut metagenome

SEQ ID NO: 7093 - protein, 449 aa, Moorena sp.
MSTTLARGESGGSMAGEVIHQRRHKVMAYVAVLSASGKSLMPTTAYKARKLLKSGRAKIYSYRPLFTIQMQDREEGTTQPIEMKVDTGAQYIGVSVCSEKHEYWNRRYDMLPNEKEMHDEARKNRRNRRQKLRYRAPRFDNRTHGHNRKEDKWFTPSLKHRENIHIQLAAKICAVVPVTDAYFEMGQFDIQVLKAYEAGKPIPVGDDYQKDERYGYATLREAIFARDNYTCQVCGAKLDDKHHPILRMHHIGYWKHDHSNRMGNLMTVCIKCHTAANHKPGGKLYGLEPELPTFKGAAFMNTVRWNMFTQLKKTLPNVKCHITYGAMTKLKRSELNTRKTHSNDAYCMGTLHPKWRTDFQHYQKVRRNNRVLSKFYDAQYIDTRDGEKMSGSQLSCGRTKRSESRHSIKNLRGYRGHRATSKGKKPNQHRRHCNRPRQEADGFWHTALR

SEQ ID NO: 7094 - protein, 443 aa, Anoxybacillus sp.; identical to SEQ ID NO: 4812

SEQ ID NO: 7095 - protein, 442 aa, Lactobacillus sp.
MKHENANRVFLLNKDGKPLMPCRPRKARLLLKSGKAFVVKKYPFTIQLKYGSYGYKQKVSIGVDTGQRHIGFAIVSQNKVLHQSEVELRQDVHKNLYTRKIYRRSKRNRKTRYRQARFLNRVHGKRDGLWLPPSIKGKVSHNIAWIKRYLAVLPNPDLHIEVGKFDMAKMVNPRISGKQYQEGSLKDWKNYEYYVLARDEYTCQLCHKHGEGVKLVVHHIVYRSQGGTDRVDNLITLCTNCHTTKNHQPGGKLYKWMKAKKKVIKQLKGATFMNILRKRIMTAFPEASFQYGSQTYVDRKNLLLPKGHFMDAIAISGIKSVGQLSDTVTMISQFRKKKRSLHEATARKGRKQPNTSSKRNEKNTKHARGLWLNDYVRVIGNHAKGYVKGFKSNGYYVYLTDGLGNYVLNNGKNYINGQQCRLIMHNGNWQKAEQKLSLYEFK

SEQ ID NO: 7096 - protein, 457 aa, Scytonema sp.; identical to SEQ ID NO: 2701

SEQ ID NO: 7097 - protein, 442 aa, unidentified; identical to SEQ ID NO: 2903
  REGION 1..442: note = Human gut metagenome

SEQ ID NO: 7098 - protein, 413 aa, unidentified
  REGION 1..413: note = Human gut metagenome
MVYVLNIEGKPLMPCIPAKARHLLKDGKAKVVKREPFTIQLLFVCDNITQPVTLGIDAGSRHIGISASTEKKELYAADVELRNDIVELIATRRQYRRTRRSRLRYRKPRFNNRKKGDGWVSPSIEQKIQCHLKVVADVHKILPITKIVVETASFDMQKIVNPAIEGEQYQEGPQLGFWNTRKYVLWRDNYTCQHCKGKSKDPVLEVHHIESRKTGGNSPGNLVTLCRTCHEKHHREGMPLHIERGKSMRDGAFMGIMRWTFYNRLKEIYTDVHMTFGYITKNTRITKGLPKEHCIDAYCIAGNLNAERTDSYYYLKKIRCHNRQIHKVNLLKGGRKKLNQAPYNVLGFRLFDKVRLGKEECFIFGRRSSGYYDVRKLDGTRVHNAISFRKLKLIEQRKGYLQERRQAAFLSTL

SEQ ID NO: 7099 - protein, 413 aa, unidentified
  REGION 1..413: note = Human gut metagenome
MTNYVFVLDANGKHLSPTKEQKAWFFIRKKRATLVSKYPMVIQLNKEIPDDKICKDEIRCGIDDGGLHTGIALVQKCQTKNKVLFKGVIEQRNDVKHLMDVRRGYRRYHRYHKRYRPARFNNRSSSKKEGKIAPSILQKRQATIRAVAQLNKWINITDYWLEDVAIDIRALTDGFKPYKWQYQKSNRLDENIRKAVILRDGCQCVECGRTNCKLEVHHIKPRRLNGSNALSNLITLCERCHQNTEGREELFMDKYFALLNSSDNKYLNYAQHVMIGKKWLREQLSSLGILHLTNGGDTANKRIDWNIEKFHSNDAICITNLQPDTCDVKEWTIKPMCRQSKAKADNVLGIKHRDLVEYTFKSGETHRGYVTALYPKQNAINFQSPTKHCKKVSAKKCRLLWKFNKIYWLDDVS

SEQ ID NO: 7100 - protein, 426 aa, Moorena sp.; identical to SEQ ID NO: 3294

SEQ ID NO: 7101 - protein, 426 aa, Parasutterella sp.; identical to SEQ ID NO: 3045

SEQ ID NO: 7102 - protein, 515 aa, unidentified
  REGION 1..515: note = Human gut metagenome
VTDVSTIYVLNKDGKPLMPTTRCGHVRYLLKEKKARVAASKPFTIQLLYETDDIVQPLYLGIDPGRTNIGVAVVKTDGTAVFTAHLETRNKEIPKLMKKRKDSRRARRTNGRRCRRQRRAKANDTISKKCVKQDTAQSGSVSKRAKEIGVIKRHLPGCEKDVLCIGIKNKEAKFNNRTRPTGWLTPTANQLLQTHVNLAKKIQKFLPISDVVLEVNKFAFMQLDNPNIQKWQYQQGPLYRKANLEEAVSEMQEHHCLFCKKKIDHYHHVVPQHKNGSNTIDNIVGLCTEHHDLVHKETAWQEKLAKKKTGLNKKYGALSALNQIVPVLTKELGSLFLKHFYVTTGKSTYDYRAAHGVSKDHWLDAYCIACSVLPNDVCDSNINSHVPYELKQFRRHDRRALHKENINRVYTLNGKKVATNRHKAIEQTTDSLEEFRQNHPNDVCKLKVKEHHPEYRNPKRNFPGCVFLVGKHTHVMQGTSGSHNGKADGYYDTNGNSYPFGKCKFVAKNEGIVFA

SEQ ID NO: 7103 - protein, 411 aa, unidentified
  REGION 1..411: note = Human gut metagenome
MVYVQDIDGKPMMPTTRHGKVRRLLKDNKAVVVNTCPFTIKLTYKTSDYKQEIVLGVDAGTKHVGLSATTKSKELYSGEVILRNDIVELLSTRRESRRTRRNRLRYRKPRFENRVKSKRLGWVAPSVRHRIDAHIRVIDNVCSILPVSRVIIEVAQFDTQKIKNPEISGKEYQEGDQLGFWNVREYVLARDGHKCQHCKGKSKDPILNIHHIESRKTGGDSPSNLITLCETCHKEFHKGNIKLKVKRGKSLRDAAVMGIMKWRLYDKLKSLYPNVRMTFGYITKHDRINHGIEKSHVSDAFVISRNFDSERLGYYYKLKLVRRHNRQIHKMKIPKGGKKRMNQSPFKVFGFKLFDKVMFQGEERFIYARRLSGQFKIKDIDGNNERNISYKKLRYVSHGLISIKTNLFLSQ

SEQ ID NO: 7104 - protein, 442 aa, Lactobacillus sp.; identical to SEQ ID NO: 7095

SEQ ID NO: 7105 - protein, 442 aa, unidentified; identical to SEQ ID NO: 2903
  REGION 1..442: note = Human gut metagenome

SEQ ID NO: 7106 - protein, 414 aa, unidentified; identical to SEQ ID NO: 4252
  REGION 1..414: note = Human gut metagenome

SEQ ID NO: 7107 - protein, 414 aa, unidentified
  REGION 1..414: note = Human gut metagenome
MVYVLNMDGQPLMPTNRCGKVRHLLKDGMAEVVKRCPFTIKLLYRSTNYTQPVTLGVDAGSKHIGLSATTEDKELFASDVELRNDIVDLLSTRRQNRRGRRSRKTRYRKPRFLNRTGNRKSGWVAPSIENKIQTHLTVVDKVCRMLPVSKIVVETASFDIQKIKNPDICGTEYQQGEQLNFWNVREYVLFRDGHKCQCCKGKSKDKILNVHHIESRKTGGDAPNNLITLCETCHTGYHKGTVKLPKTIHRGMVFRDAAFIGIMRWAFYNELKRRYPNVSHTYGYITKNIRIENNLPKYHYIDARCISGHPLAEPSEEVFYQKKVRCHNRQIHKNTIGKGGYRKRNQAEYIVKGFRLFDKVSYKGQECFIFGRRSSGSFDIRLLDGTKISAGVTYKKLRLSQTRGSFLIERRLVG

SEQ ID NO: 7108 - protein, 504 aa, unidentified; identical to SEQ ID NO: 3854
  REGION 1..504: note = Human gut metagenome

SEQ ID NO: 7109 - protein, 462 aa, unidentified
  REGION 1..462: note = Human gut metagenome
MSVLVIGQNGRALMPTTTRKARLLLKENKASVVCRHPFTIHLWYKTGCATQEGRIGIDTGSQHIGVGVTCGDKVILKDEHELRSSMEKRSLMETRATMRRGRRYRKVRYRKPKWRHHTKRMYFEKANRKGQHWRKVKTTTQSPRPKGWLPPSLQSKCDHHFRIIDRYLKYLPDSITKNLVIEVGRFDMARMNDPTIHSEMYQRGPMYDTENLRAYIFARDGYKCACCKAKAGSIRKKDGTSVKLVAHHILFRSRGATDNPKYMISVCDHCHTTKAHQPGGILYSWMENNKKVTRGLRDATFMNILRRRLFDRYPQAAFTYGNITAVDRKRLLLPKSHANDAVAISLFGKDVSDINATCQTLRYKQVRKSKRSLHEATPRKGRKEPNVRAIRNKKNTTHVNGFKLWDSVLANGQKLFICGFTGSSAYLVDQDGHYVSPPGKTYKQWTLSNLSRLHPNGNWLMV

SEQ ID NO: 7110 - protein, 442 aa, Deinococcus sp.; identical to SEQ ID NO: 5259

SEQ ID NO: 7111 - protein, 442 aa, unidentified
  REGION 1..442: note = Human gut metagenome
MSTSVFVLDKRHRPLMPCRPARARRLLRAGRARVVKRFPFVIRLVDRTVEQSEVQPVLIKLDPGSRETGAAVVRDDEKKRHHALAFFVIKHRGGAIRDSLKARSAFRRRRRSQNFRCRSPRFLNRVKPKGWLPPSLRHRVETTLSFVRRMCRYLPVSGIATELVKFDSQKLQNPEVSGVKYQQGTLFEYEVREYLLEKFGRKCVYCGAEGVPLNIDHVVPRAKGGSNRVSNLVLACVSCNQKKGARSLEDFLKGKPEVLARVRRELKTPLRDAAAVNATRWVLFNELKATGLPVETGSGALTKLNRHAFGVEKEHWLDALCVGRLNGVVTRKGLNVLEIRCMGRGSRQRTRLTKYGFPRGYLMRQKCVHGFATGDMVEANVPKGKKAGLWRGRVAVRVSGSFNIQTPKGVIQGVGWKHCRLISHNDGYGYAWLGHAPHSSPA

SEQ ID NO: 7112 - protein, 431 aa, unidentified
  REGION 1..431: note = Human gut metagenome
MPNKVYVLNKHGRPLMPCSPAKARHLLDAGKAKVKKRTPFTIQLVYGSSGYTQEVILGVDAGSKTIGMSASTTKEELLSAEVKPRNDVVDLMSTRREFRRARRNRKIRYRKPRFDNRVRSKHRGWLAPSVEVKIQEHITSIKRVCRILPVSKVVVETAEFDLQLLKAIADGKPVPQDEDYQQGEMYGHYNVRQYVLWRDGYTCKCCGAHTTKKKEVRLHVHHLESRKVGGDAPDNQVTLCESCHEKLHKGLIAEKDFKKRKRKSTRDATFMGIMRKTLMQRLCSELPIPVVETRGYITKTTREKLLVLPKSHTNDALAIAQGKQGFNVGYLPGIVQIDKICTIRPVRHHNRQLHKAAILKGGIRKSNQAEKYVFGYRLFDKVQFNGQDCFIWGRRTTGIFTIKTINGKMIKDGISFKKLKLVEKSTGYLIA

SEQ ID NO: 7113 - protein, 354 aa, Parasutterella sp.
  SITE 303: note = misc_feature - Xaa can be any naturally occurring amino acid
MPCSPAKARLLLKEKKAIVVRRTPFTIQLTIATGESKQPVSLDVDAGYKHVGLSASTEKAELYASEVELRQDITDLLSARRALRESRRNRKTRYRAPRFDNRIRTKRKGWLAPSVENRINAHLSRIESVLRLLPVTKITVETASFDTQLLKNPDISGKEYQEGEQLGFWNIREYVLCRDRHVCQHCYGRSKDPVLNVHHLESRRTGGDSPGNLITLCETCHKALHRGEITLKAKRGQSFRAEAFMGIMRSEVPNRLKASHPELEVNNTYGYRTKHARIANDIAKSHCADAFCIAGNLGAERLXFRLAAAEESRHFRERIPGGRTARLLEHPRVCSLQRRACLPALLRQIERPGA

SEQ ID NO: 7114 - protein, 414 aa, unidentified
  REGION 1..414: note = Human gut metagenome
MPCSPAKARLLLKEKKAIVKRRTPFTIQLTIATGESKQPVTLGVDAGYKHVGLSASTEKAELYASEVELRQDVSDLLSARRALRQSRCNRKTRYRAPRFNNRLRTKRKGWLAPSVENRINAHLSRIEAVLRLLPVTKITVETASFDMQLLKNPDIAGKEYQEGEQLGFWNVREYVLFRDGHVCQHCYGRSKDPVLNVHHLESRRTGGDSPGNLITLCETCHKALHRGDITLKAKRGKSFRAEAFMGIMRWEVHNRLRALHPGIEVSNTYGYRTKHARIANGIAKSHCADAFCIAGNLGAERLCEFFFQKQTRRNNRQIHKLSILKGGIRKRNQAPFEVKGFRLFDKVACQGEESFIFGRRSSGFFDVRKLDGTRISAGISCKKLHLLEKRRTYLTEIRKEEALPPLPEGRGLRA

SEQ ID NO: 7115 - protein, 423 aa, Oscillatoria sp.; identical to SEQ ID NO: 5719

SEQ ID NO: 7116 - protein, 471 aa, Acidiferrobacter sp.; identical to SEQ ID NO: 6483

SEQ ID NO: 7117 - protein, 465 aa, unidentified
  REGION 1..465: note = Human gut metagenome
MSTCVCVLSNSGERLMPTIRLGKVRRLLKDGKAKIIKHHPFTIQLLYDSKANTQPIEICEDVGYNYIGISVKSQSHEYVSAQYDTLQDEKACHDSCRKLRRTRRNRLRYRKPRFDNRKRGEGWLAPSLKHKKELNVNVVKMYCAVMPITHATVEVGSFDTMLVKAIQEGKAIPEGADYQKGPRYNLATLREAVFYRDNYVCKVCGRKATEGAILHVHHMFYWKGRHGNSLSELITVCEKCHTPANHQKSGKLYGFGENVKFADLSGAAFMNTVRWQIVNELYAAFGKDFVTVTYGAMTKEKRIALHLEKSHNNDAYAMGSFHPVNRCAFEHYEKVKRNNRILEKFYDSQYIDTRTGELTNGKSLFNGRISRSHKKDSENLHKYRGKRICKGHRALRRKKLALNPGDLVFLNGEILVVHGTHTKKNGSVNVEFKTPSRGGKKSASLKKLKIVKTSNLMHSAWTKVS

SEQ ID NO: 7118 - protein, 421 aa, Moorena sp.; identical to SEQ ID NO: 4235

SEQ ID NO: 7119 - protein, 427 aa, Moorena sp.; identical to SEQ ID NO: 3216

SEQ ID NO: 7120 - protein, 413 aa, unidentified
  REGION 1..413: note = Human gut metagenome
MTNYVFVLDANGKHLSPTKEQKAWFFIRKKRATLVSKYPMVIQLNKEIPDDKICKDEIRCGIDDGGLHTGIALVQKCQTKNKVLFKGVIEQRNDVKHLMDVRRGYRRYHRYHKRYRPARFNNRSSSKKEGKIAPSILQKRQATIRAVAQLNKWINITNYWLEDVAIDIRALTDGFKPYKWQYQKSNRLDENIRKAVILRDGCQCVECGRTNCKLEVHHIKPRRSNGSNALSNLITLCERCHQNTEGREELFMDKYFALLNSSDNKYLNYAQHVMIGKKWLREQLSSLGILHLTNGGDTANKRIDWNIEKFHSNDAICITNLQPDTCDVKEWTIKPMRRQSKAKADNVLGIKHRDLVEYTFKSGETHRGYVTALYPKQNAINFQSPTKHCKKVSAKKCRLLWKFNKIYWLDDVS

SEQ ID NO: 7121 - protein, 414 aa, unidentified; identical to SEQ ID NO: 4924
  REGION 1..414: note = Human gut metagenome

SEQ ID NO: 7122 - protein, 425 aa, Moorena sp.; identical to SEQ ID NO: 3008

SEQ ID NO: 7123 - protein, 453 aa, Anaerotruncus sp.
MSVAVISNTGIRLMPTSEYRARHLLKAGKAVIEQYRPIFTIRLTDREKGKIQPIEYACDTGYQHVGVSIKSEKHEFVHAQYDMLSNETERHNDRRKYRRTRRNRKRYRKPRFDNRSRKNQEMAPSLRHRRENQINLFESFCKVMPITSATFEMGKFDTQLLQAIADGKPLPEGKDYQQGSKYLFQTEREAVFSRDHYTCQVCGKSIKDGVILHTHHIGYWKGYRSNRISNLLTVCEHCHTAKNHKPIGALWGLEPQSTNLAAATYMSTVRWAIYRELVLKYPEIDIHIQYGAKTSVTRKSLHLAKTHANDAYCVGSLHPRHRTAELIYQKKRRNNRILEKFYDAKYIDIRDGKKKSGSLLSCGRTNRRESRRSDKNQRIYRGKKCSSGRTSVRKNRYAYQPGDTIVFHSQTFVVNGSHCKGARVILGTGKSVKATDLTCIKKEGGWHFLPAQA

SEQ ID NO: 7124 - protein, 396 aa, Moorena sp.
MSKVFVLDTNFTPLNPIHSAQARQLLRTKKAAIFRQFPFTIILKKSRPDSPVSSLRLHIDPGAKFTGMALVNDSTGKVVFAAELKHRGFAIRDALTSRKQLRHSRRARKTRYRQPRFLNRTRPEGWLAPSLQSRVENIKTWVERLRKLAPIEAISQELVRFDMQLMANPDIQSKEYQQGTLAGYETREYLLEKWGRQCAYCGVKDVPFQVEHIHPRAKGGSNSITNLTLSCEKCNTKKGTKDIKDFLKKDPSKLEKILKQAKRPLADAAAVNTTRTALLEVLKATGLPVETGSGGLTKFNRNQQKLEKTHWIDAACVGQSTPILNIKGVKPLLITANGHGSRQSCRTDKYGFPNRHVPREKIHFGFQTGDIAKAVVTNLPPTLYIITQIQYYATNN

SEQ ID NO: 7125 - protein, 417 aa, unidentified
  REGION 1..417: note = Human gut metagenome
MPCSPAKARLLLKEKKAIVKRRTPFTIQLTIATGEAKQPVALGVDSGYKHIGLSATTEKAELYASEVELRQDITDLLSARLALRRSRRSRKTRYRAPRFDNRVASKRKGWLAPSVENRIAAHMSRVEAVMRVLPVTAITVETAAFDTQLLKNPDIAGEAYQQGEQLGFWNVREYVLFRDGHVCQHCRGKSKDPILNVHHIESRRTGGDAPNNLITLCETCHKAFHRGEIKLKVKRGKSFKAETFMGIMRWTLFERLKKAHPELRVRNTYGYLTKHKRISHGIAKSHCADAYCIADNLGAKRLEGFFFQKQTRKHNRQIHKLSILKGGLRKKNQAPYEVKGFRLFDKVICKGEEAFIFGRRTSGSFDVRRLDGTRISAGISCKKLRLLEPRTTYLTEFRKEAALPPLHECSGSRAEFR

SEQ ID NO: 7126 - protein, 509 aa, unidentified
  REGION 1..509: note = metagenome
VYALNKDGKPLMPTTRCGHVRYLLKEKKARVVKTKPFTIQLLYETNDVVQPLYLGIDPGRTNIGVAVVKADGTAVFTAHLETRNKEIPKLMKKRKDSRRARRTNGRRCRRQRRAKANGTISKKCVKQATAQNGSASKRTKKIGVIKRHLPGCEKEVLCIGIKNKEAKFNNRTRPAGWLTPTANQLLQTHINLIKKIQKLLPISDVVLEINKFAFMQLDNPNIQKWQYQQGPLYQKANLEEAVSEMQEHHCLFCKKKIDHYHHVVPQHKNGSNTIDNIVGLCTKHHDLVHKDTAWHEKLTKKKTGLNKKYGALSVLNQIIPALTKELSSIFPKHFFVTTGKSTYDYRAAHGVSKDHWLDAYCIACSVLPNDVCDSSINNRVPYELKQFRRHDRRALHKENMSRVYTLNGKKVATNRHKATEQTADSLEEFRQNHPDDVCKLKVKEHHSEYRNPKRNFPGYVFLVGKRTHVMQGTSGSHNGKADGYYDTNGNSYSSGKCKFVAKNEGIIFA

SEQ ID NO: 7127 - protein, 442 aa, unidentified; identical to SEQ ID NO: 2903
  REGION 1..442: note = Human gut metagenome

SEQ ID NO: 7128 - protein, 450 aa, Moorena sp.; identical to SEQ ID NO: 2437

SEQ ID NO: 7129 - protein, 447 aa, unidentified; identical to SEQ ID NO: 3915
  REGION 1..447: note = Human gut metagenome

SEQ ID NO: 7130 - protein, 424 aa, unidentified; identical to SEQ ID NO: 3434
  REGION 1..424: note = Human gut metagenome

SEQ ID NO: 7131 - protein, 431 aa, unidentified
  REGION 1..431: note = Human gut metagenome
MDAWDIIVVLNKRGKPLMPCSPAKARLLLKEKKAIVKRRTPFTIQLTIATGETKQPVSLGVDAGYKHVGLSASTEKAELYASEVELRQDITDLLSARRALRQSRRNCKTRYRAPRFDNRIRTKRKGWLAPSVENRINAHLSRIEAVLRLLPVTKITVETASFDMQLLKNPDISGKEYQEGEQLGFWNVREYVLFRDGHVCQHCHGRSKDPVLNVHHLESRRTGGDSPGNLITLCETCHKALHRGEITLKTKRGQSFRAEAFMGIMRWEVQNRLKASHPELEVNNTYGYRTKHARIANDIAKSHCADAFCIAGNLGAERLCEFFFQKQTRRNHRQIHKLSILKGGIRKRNQAPFEVNGFRLFDKVACKGEEGFIFGRRSSGFFDVRKLDGTRISAGISYKKLHLLEKRRTYLTEIRKEEALPPLPEGRGLRA

SEQ ID NO: 7132 - protein, 411 aa, unidentified
  REGION 1..411: note = Mouse gut metagenome
VRNLRVFVKNLRGQSLMPCSQRKARLLLKNKKAKIYSYHPFTIQLFYASGETIQMCHIGVDTGSRHIGLAITSENKVLLKGEIDLRQDVKSNLDTRRTYRRNRRNRKTRYRKARFFNRVKSKQKNWLPPSIESKIHHTFHWMNKLENLVADSNLHIEVGKFDMAKMIRPDIQGKEYSQGQCYGYFDTRYFVFARDDYTCQCCKKKNKILRTHHIRYRSNGGTDRADNLITVCTDCHTSKNHKKGGILYEWQQRHKKGKPYKEPPFMNIIRKRIYQKYPDAVISYGSQTTPKRKERNLDKTHYNDAIIISGIEDIKENPKEWLRIKQFRKKKRSLHEAAARKGRKEHNRTQKRNRKNTSYDKGWYLNDYVEVFGKKGYISGFTNSGVYIKNTNDDYITMPDKKYKQVSHHNL

SEQ ID NO: 7133 - protein, 461 aa, Parasutterella sp.; identical to SEQ ID NO: 3646

SEQ ID NO: 7134 - protein, 420 aa, unidentified
  REGION 1..420: note = Human gut metagenome
MQYVYVLNKHGEPLMPCSPGKARILLKQQKACVVKRTPFTIKLLYGSAGYKQPITLGVDAGSKHVGLSASTEKRELYSEEFTPRNDVVELLSTRRQNRRSRRNRKTRYRAPRFNNRIHSKHKGWLAPSVEVKIQEHITVIKRICRILPITLVRVETAEFDTQRLKAMLSGKPLPVGTDYQLGEMYDEYNARQYVLRRDNYTCQRCGAHTTKKKTVKLHVHHLESRKTGGNAPSNLITLCVDCHKAFHAGKVKLDGKKRGKSLKDAAFMGAMRNTLLTRLRNELNIPVQNTYGYITKLLREQNDIKKSHVNDARCISKHPLAEPCSVCYRTKAIRHHNRQTHKANFSKGGIRKRSQMPYVVEGYRLWDKVLYKGQECFVSGRRASGSFTLKKLDGTRISKGVTFKKLRLLEPATNYLIERM

SEQ ID NO: 7135 - protein, 322 aa, Parasutterella sp.
RYRAPRFDNRIRTKRKGWLAPSVENRINAHLSRIEAVLRLLPVTKITVETASFDMQLLKNPDISGKEYQEGEQLGFWNIREYVLCRDGHVCQHCYGRSKDPVLNVHHLESRRTGGDSPGNLITLCETCHKALHRGEITLKAKRGQSFRAEAFMGIMRWEVQNRLKASHPELEVNNTYGYRTKHARIANDIAKSHCADAFCIAGNLGAERLGEFFFQKQTRRNNRQSHKLSILKGGIRKRNQAPFEVNGFRLFDKVACKGEEGFIFGRRSSGFFDVRKLDGTRISAGISYKKLHLLEKRRTYLTEIRKEEVLPPLPEGRGLRA

SEQ ID NO: 7136 - protein, 414 aa, unidentified
  REGION 1..414: note = Human gut metagenome
MPCSPAKARLLLKEKKAIVKRRTPFTIQLTIATGESKQPVSLGVDAGYKHVGLSASTEKAELYASEVELRQDITDLLSARRALRQSRRNRKTRYRAPRFDNRIRTKRKGWLAPSVENRINAHLSRIEAVLRLLPVTKITVETASFDLQLLKNPDISGKEYQEGEQLGFWNIREYVLCRDGHVCQHCYGRSKDPVLNVHHLESRRTGGDSPDNLLTLCETCHKALHRGEITLKTKRGQSFRAETFMGIMRWEVLNRLKASHSELKVHNTYGYLTKHARIENGIAKSHGADAFCIAGNLGAERLGEFFFQKQTRRNNRQIHKLSILKGALRKRNQAPFEVKGFRLFDKVACQGEEGFIFGRRSSGFFDVRKLDGTRISAGISYKKLHLLEKRQTYLIEIRKEEAFPPLPEGRGLRA

SEQ ID NO: 7137 - protein, 406 aa, unidentified; identical to SEQ ID NO: 6176
  REGION 1..406: note = Human gut metagenome

SEQ ID NO: 7138 - protein, 452 aa, Petrotoga sp.
MEKKSVQRVFVLDKNKQPLMPSHPARARELLKKGKAAVFRYHPFTIILKDRAGGDTQPIQVKIDPGSKITGVALVADFKNGKKVIWSAEIHHRGQNVKKALDSRRSLRRSRRNRKTRYRKARFDNRKRSKDWLPPSLMSRVENILTWIKRIRHFAPITGISMELVRFDTQKLQNPEIKGIEYQRGTLYGYEIKEYLLEKWSRKCVYCGKENVPLEIEHIIPKSKGGSDRISNLTLACHECNQKKGNQSIEEFLDNNPERLNQIKSESKKTLKDTAAVNATRWYLFNQLQKEGLPLEVGTGGRTKYNRETQRYPKKHWIDAACVGESGQNVQIEPEMQVLEITAMGHGTRKMCNVDKYGFPRSHRRSENAPNGVKGRTYMGYKTGDIVLAVIPKGKNAGIHIGRIAIRQQPNFKLNGLDGVNPKYLKLLQRNDGYGYQISRKEGEKLLHSSHR

SEQ ID NO: 7139 - protein, 490 aa, unidentified
  REGION 1..490: note = Human gut metagenome
MNYVYVLDKKGKPLMPTTRYGKVRRMLKSGQAKPVQNLPFTIQLTYIPKTTVCQPVIVGFDPGRTNIGISAVREDGTCLNLTHCETRNREIPKLMQKRKEHRQTSRRGERLVRKRLAKRHGTVSSKPLERILPGCEKPLKVKDIINTESRFNNRLRSEGWLTPTATQLLRTHVNLLKRMCQILPATDVVMEVNRFAFMQLDQSNVKKCGIDFQHGPLFGTDGIKEAVSIQQDGRCLLCEKRTIEHYHHIVPRAYRGSDTAENIAGLCAGCHKLVHTSREASNKLKHKKDGINKKYGGISVLNQVIPFLFMEFEQMFPGHTYATNGWNTKQFREKYRLAKDHSVDAYCIAASILPEPKVELPEDTHEIVQYRRHDRARIKRQTERTYCLGKKGVCKNRHKRFEQKTDSLEEYVEKYPNFLSNLTVKKSQRSYNDLKRVLPGAVILYQGKRYILSGRSSGGKQYRMLGYGNQNFTASKCTIVQQNTGLVYVS

SEQ ID NO: 7140 - protein, 433 aa, Clostridium sp.
MVYVISNLDKPLMPTKRYAKVRILLKNKQAKVVNTKPFTIKLLYDTSNYTQPVTLGIDSGYTYIGFSAVTDTKELICGEVTLLKGMSERLKERSMYRKQRRSRLRYRKPRFDNRKRSDGWFAPSIQYKLDSHLRFIDNLKKILPITKIVVEVANFDIQKIKNPNIEGEEYQNGEQKGFYNLREYIFHRDDHTCKLCGRDDLPLQVHHIGFYKGDRSNRPGNLISLCIKCHTPKNHKEGQVLYGWKPNLKSLKEATFMSSVRWKLKNILGCEHTYGYDTKSKRIVLNLEKTHYNDAFCIAEGNTHDRVTPIYFEQIRRNNRSLEKFYDAKYIDLRTNNKASGQDLFSGRRTRNKNLNSENLHKYRGEKLSKGKRTIRKERYFYQPNDLVKYQNRIYAVKGTHNKGARVMLKENNKSIKIGDLVPYKFRKGIVAV

SEQ ID NO: 7141 - protein, 420 aa, unidentified
  REGION 1..420: note = Human gut metagenome
MQYVYVLNKHGEPLMPCSPRKARLLLKQKKACVIKRTPFTVKLLHGSAGYKQPVTLGVDAGSKHIGISATTEKHELYREEATPRNDVVDLLSARRAFRRSRRNRKTRYRAPRFNNRVHSKHKGWLAPSVEVKIQEHITLIKHVFRILPVTLVRVETAEFDTQRLKAMLEGKPLPVGTDYQLGEMYDEYNVRQYVLKRDNYTCQCCGAHSTKTKGVKLHVHHIETRRTGGNAPNNLITLCKACHKALHAEKVTLDGKKRGKPLKDAAFMGIMRKTLMERLRKELKIPVQGTYGYITKYLREKKGIPKSHTNDARCISKNPLAIPCDTCYYTKAVRHHNRQLHKATILKGGIRKANQAPYIVKGYRLWDKVAYNGTECFITGRRTSGYFALKELDGTVVSNSISYKKLRLLEAATNYIIERK

SEQ ID NO: 7142 - protein, 421 aa, unidentified
  REGION 1..421: note = Human gut metagenome
MQYVYVLNMHGEPLMPCSPRKARLLLRGGKARVVKRTPFVIKLLHGSAGYKQSVVLGVDAGSKHVGLSACTKSIELYKEEMMPRNDVVGLLSARRQYRHSRRNRKTRYRAPRFDNRVHSKHKGWLAPSVEVKIQEHITAIKRVCRILPIVLVRVETAEFDTQRLKAMLEGRPLPVGIDYQRGEMYNEYNVRQYVLKRDRYVCQHCGAHPTSEKPVRLHVHHLESRHTGGNAPNNLIILCEHCHRALHEGKIKLRNDKKRGKSLRDAAFMGIMRDALLMRLRYKLSVPIERTYGYITKLLREENKIAKSHTNDARCIAGFPKATPCDTLYRTRAIRHHNRQIHKAKILKGGIRKRNQSPYLVNGFRLWDKVRYNGEECFISGRRSSGYFAIKKYDGAVVSNSASYKKLTLIETATNYITERG

SEQ ID NO: 7143 - protein, 422 aa, unidentified
  REGION 1..422: note = Human gut metagenome
LNKRGKPLMPCSPAKARLLLKEKKAIVVRRTPFTIQLTIATGESKQPVSLGVDAGYKHVGLSASTEKAELYASEVELRKDITDLLSARRALRQSRRNCKTRYRAPRFDNRIRTKRKGWLAPSVENRINAHLSRIEAVLRLLPITKITVETASFDMQRLKNPDISGKEYQEGEQLGFWNVREYVLFRDGHVCRHCHGRSKDPVLNVHHLESRRTGSDSPDNLITLCVTCHKALHRGEITLKAKRGQTFRAQAFMGIMRREVLNRLKASYPELKVHETYGYLTKHARIANGIVKSHGADAFCIAGNLGAERLGEFFFQKQTRRNNRQIHKLSILKGGIRKRNQAPFEAKGFRLFDKVACQGEEGFIFGRRSSGSFDVRKLDGTRISAGISCKKLRLLEKRRTYLTEIRKEEALPPLPEGRGLRA

SEQ ID NO: 7144 - protein, 434 aa, unidentified
  REGION 1..434: note = metagenome
MSESIMLVYVLKQNGQPFMPTERFGKVRRLLKEGKAKVVRREPFTIRLLYEPETDIVQECYCGVDTGSKHIGVAVVGNDRVLYQSQTELRSDIKKKMDARRAFRRNRRNRKTRYRKKRFLNRKNSIRENRLPPSVKHKVQAHIDEIEFCKKILPVSDLILEVSQFDTALMKTSSLINEKIKRWGYQQGFNYGYSSRREAVLHRDNYTCQCCGKKNCRLEVHHIKFRRNGGTDDEENLITLCEDCHKGVHASTVVLNKKPKKSKNLKHTTHMSIIRSQLLKKYPNAIETFGFVTSENRHHLNLQKNHYIDACVIASGGLEFKKLDVIYRKRRVSVQDRVLTKGVRGERRLPTGKVHGFKRYDKVRYLGEVCFVKGRRVRDGFVLMDIENSSIDFRDKGGKQNPSYKSIKRVNARKSILCISQRIEREERLIPILN

SEQ ID NO: 7145 - protein, 465 aa, unidentified
  REGION 1..465: note = Human gut metagenome
MSTCVCVLSNSGERLMPTFRLGKVRRLLKDGKAKIVKHHPFTIQLLYDSKTNTQPIEICEDVGYNYIGISVKSQSHEYVSAQYDTLQDEKACHDSCRKLRRSRRNRLRYRQKRFNNRKHDKGWLAPSLRHKKELNVNVVKMYCAVMPITHATVEVGSFDTMLVKAIQEGKAIPEGADYQKGPRYNLATLREAVFYRDNYTCQVCGRKANEGAILHVHHMFYWKGRHGNSLSELVTVCEKCHTPANHQKGGKLYGFGEDIKFANLSGAAFMNTVRWQIVNELYAAFGKPFVTFTYGAMTKEKRIALHLEKSHNNDAYAMGSFHPVDRCAFEHYEKMKRNNRILEKFYVSRYINIRTGEVASGKELFNGRINRNHKKDSENLHKYRGKRIRKGYRALRRKKVALNPGDLVSLNGEILTVHGTHTKKNGSVNVKFKTPSKSGKKSVSLKKLKIIKTISPMRSAWDKVS

SEQ ID NO: 7146 - protein, 427 aa, unidentified
  REGION 1..427: note = Sutterellaceae bacterium UBA7131
LRVFILNKRGKPLMPCSPAKARLLLKEKKAVVVRRTPFTIQLTIATGETKQPVSLGVDAGYKHVGLSASTEKAELYASEVELRQDVSDLLSARRALRQSRRNRKTRYRAPRFDNRIRTKRKGWLAPSVENRINAHLSRIETVLRLLPVTKITVETASFDMQLLKNPDIAEKEYQEGEQLGFWNVREYVLFRDGHVCQYCHGRSKDPVLNVHHLESRRTGGDSPGNLITLCETCHKALHRGEIKLRAKRGQSFRAETFMGIMRWEVLNRLKASHSKLEVNNTYGYLTKHARIKSGITKSHCSDAFCIAGNLGAKRLGEFLFQKQTRRNNRQIHKLSILKGGIRKRNQAPFEINGFRLFDKVACKGEEGFIFGRRSSGSFDVRKLDGTRISAGISYKKLRLLQKRQTYLTEIRKEEALPPLPEGRDLRA

SEQ ID NO: 7147 - protein, 323 aa, unidentified
  REGION 1..323: note = Human gut metagenome
VTTILKTCFAAFNLAKVVVLMDAWDIIVVLNKRGKPLMPCSPAKARLLLKEKKAIVKRRTPFTIQLTIATGEAKQPVSLGIDAGYKHVGLSASTEKAELYASEVELRQDITDLLSARRALRQSRRNRKTRYRAPRFDNRISTKRKGWLAPSVENRINAHLSRIEAVLRLLPVTKITVETASFDLQLLKNPDISGKEYQEGEQLGFWNIREYVLCRDGHVCQHCYGRSKDPVLNVHHLESRRTGGDSPDNLLTLCETCHKALHRGEITLKAKRGQSFRAEAFMGIMRWEVLGRLKASHPELEVNNTYGYRTKHARIANDIAKSH

SEQ ID NO: 7148 - protein, 443 aa, Anoxybacillus sp.
MVEENMTCFMQRKGENPMVFVLDTNKRPLAPCHEAVARKLLKQGKAAIYRRFPFTIILKKSVDESEIKATYRLKIDYGSRHTGLAILRGQEVVWLGQLDHRTDIKERIDKRRAFRRARRNRKTRYRKPRFLNRKRKEGWLPSSLESRVQNIQTWVNRLKKLCPIGYISYENAKFDTQLMRNPEINGVEYQQGTLQGYEVREYLLEKFGRKCCYCGKENVPLEVEHIIPKSRGGTDRVDNLCLACHDCNQRKGSKTAEEFGYPHIQKQVKESLKDASAVNSTRWKVYEVLKQSGCEVECGTGARTKMNRIRLDLPKTHYFDACCVGESTPNHLYFKTKEVLFIRAKGRGSRSRTNLDRYGFPRGYLARQKFFFGFQTGDMVKAVVPRGKYQGVWFGEVACRKTGSFDIKGKDGKRIAQGINYRYVQVIQRFDGYAYGKGVAELA

SEQ ID NO: 7149 - protein, 420 aa, unidentified; identical to SEQ ID NO: 2951
  REGION 1..420: note = Human gut metagenome

SEQ ID NO: 7150 - protein, 406 aa, unidentified; identical to SEQ ID NO: 6072
  REGION 1..406: note = Human gut metagenome

SEQ ID NO: 7151 - protein, 454 aa, unidentified
  REGION 1..454: note = Human gut metagenome
LDTVAVISASGRKLMPTNSYRARRLLKSRRAVIYRYRPVFTIKLADRTDGYIQPIEYKCDTGYQNIGISICSDTKEFVNEQRDLLKDEVKQHSNSRKYRRTRRNRLRYRKKRFDNRRGMISRDGFAPSIRNKRDVHVRLYEEYYKVFPITKAVFEMGQFDTQVLKAVEAGLPVPEGTDYQRGEQYGYATLREAVFARDSYTCICCGKSAIKDGVKLRIHHIGYLSGDRSNRMANLGSVCESCHTSKNHKPGGKLYNLKPKLKTFKGATFMTTVRYSMVKKLKVTTPDVDIKVTYGAATKLARKTLNVKKTHSNDAYCMGEFHPKHRSDFKHYRKCRRNSRVLSKFYDAKYMDLRDGSVKTGSQLSCGRTNRRIPRHTELNERIYRGHKISKGKLVVRRQHYQYRPGDTVWAEGKRCTVKGIISNGTRIALNERNPVSVNKIDKTVHTGGWAKAS

SEQ ID NO: 7152 - protein, 350 aa, Aphanizomenon sp.
MSKVFVLDTNFTPLNPIHSAQARQLLRNKKAAIFRQFPFTIILKKSRPDSRISSLRLKIDPGAKFTGMALVNDSTGEVVFAAELKHRGFAIRDALTSRRQLRRSRRARKTRYRQPRFLNRTRLEGWLAPSLQSRVDNIKTWVKKLLNFAPIQAISQELVRFDMQLMANPDIQGQEYQQGTLAGYETREYLLEKWGRQCAYCGVKDVPFQVEHIHPRAKGGSNSITNLTLSCEKCNTKKGTKDIKDFLKKDFSKPLLITANGHGSRQSCRIDKYGFPNRHVPREKIHFGFQTGDIAKAVVTAGKKIGTYVGKVAIRSTGSFNISNKNGLIQGISHKFCKRIHAKDGYSYAV

SEQ ID NO: 7153 - protein, 512 aa, unidentified
  REGION 1..512: note = Human gut metagenome
MSTVYVLNKDGKPLMPTTRGGHVRHLLKEQKARVVRTKPFTIQLLYETDDVVQPLYLGIDPGRTNIGVAVVKTDGTAVFTAHLETRNKEIPKLMKKRKDSRRARRTNGRRCRRQRRAKANGTISKKCVKQTTAQNGSVSKRAKEIGVIKRHLPGCEKEVLCIGIKNKEAKFSNRVRPEGWLTPTANQLLQTHINLVKKIQKFLPISDVVLEVNKFAFMQLDNPNIQKWQYQQGPLYQKASLEEAVSEMQEHHCLFCKKPIDHYHHVVPQHKNGSNTIGNIVGLCAKHHDLVHKDTTWQKKLAKKKTGLNKKYGALSVLNQIIPALTKELSSLFSKHFFATNGKSTYDYRAAHGVSKDHWLDAYCIACSVLPNDVCDSDINNRVPYELKQFRRHDRRALHKENMSRVYTLNGKSVATNRHKATEQTTDSLEEFRQCQPDDVCKLKVKEHHPEYRNPKRNFPGCVFLVGKHTHVIQGTSGSHNGKADGYYDTNGNSYSSGKCKFVAKNEGIVFT

SEQ ID NO: 7154 - protein, 465 aa, unidentified
  REGION 1..465: note = Human gut metagenome
MSTCVCVLSNNGERLMPTIRLGKVRHLLKDGKAKIIKHHPFTIQLLYDSETNIQPIEICEDVGYNYIGISVKSQSHEYVSAQYDTLQDEKSCHDACRRMRRTRRNRLRYRQKRFDNRKRDKGWLAPSLKHKKELNVNVIKMYCEVVPITHATVEVGSFDTMLVKAIEEGKATPEGADYQKGPRYKLATLREAVFYRDNYTCQVCGREASEGAILHVHHMFYWKGRHDNSLSELITVCEKCHTPANHQKGGKLYGFGEDIKFANLSGAAFMNTVRWQIVNELYAAFGKPFVTFTYGAMTKEKRIALHLEKSHNNDAYAMGEFHPNCRCTFEHYEKVRRNNRILEKFYDSRYIDIRTGEIATGKELFNGRINRSHKKDSENLHKYRGKRIRKDYRALRRKKVALNPGDLVSLNGEILTVHGTHTKKNGSVNVEFKTPSKSGKKSTSLKKLKIIKTISPMRSAWDKVS

SEQ ID NO: 7155 - protein, 413 aa, unidentified
  REGION 1..413: note = Human gut metagenome
LKVFVLNMRGKPLMPCSPAKARHMLKAGKAVVVRRTPFTIKLTIATGETKQDVTLGVDAGARHVGISATTEKEEVFASEVALRQDITGLLADRLAFRRARRNRKTRYRAPRFNNRVRSKHKGWLAPSVENRIQAHISRIEAVCRLLPVTKIVIETASFDIQKIRNPEVEGTGYQQGDQLGFWNVREYVLFRDGHVCQHCHGRSRDKILNVHHLESRKTGGDAPNNLITLCETCHKAYHAGKIKLKARRGTSFRAEAFMGIMRWTLLDRVRRAHPELPVENTYGYLTKHNRIALALPKTHCADAFCIAGNLNALRRGDFLFQRQTRKHNRQIHKCSILKGGVRKLNQAPFLVKGFRLFDKVRIGGHIGFVFGRRVRGIFNIRRLDRTVIGTDINSKKLSLLETRKTFLTELRKE

SEQ ID NO: 7156 - protein, 507 aa, unidentified
  REGION 1..507: note = Candidatus Methanolliviera sp. GoM_oil
MHCKSKICEQQIKDLLQLSSNFKSLKGVKDGELDVKSLYGWKSKVSPSQKSKIFEDNISEEAKHFVTKKSEQDLRVPAYVFVLNMRGNPLMPTKPQKARKLLKEGKAKVVKRIPFTIQLLYPTGEARQDIILKVDAGYSFVGISATTDTRELFAEEVELRGNIPRLIEKRRMYRRNRRGRLWHRKPRFLNRTGSKKKGWFAPSIQHKLDTHIRLVDNTKKILPISRTIIEVVSFDTQKMQNPEIEGIEYQQGGLQGYAAREYLLEKWGRKCAYCGKTDIPLEIEHIIPKSRGGSNRISNLTISCHECNQEKGNKTAEEFGHPNIQKKAKKPLKAAAFMNIVRQKLVEILDCESTYGYITKYNRIKAGLEKSHINDAFSLEDGSQHDQKRTGQIFIAKQVRRQNRSLFKANLLKGGRKKRNTVREVNGFRRFDKVLYKSKDGKNKKECFIYGLRKSGYFDVRSINGEKIDASVKSKKLKLLEKAKGIILEVNRQFLPSLTEEVSLPIR

SEQ ID NO: 7157 - protein, 430 aa, unidentified
  REGION 1..430: note = Human gut metagenome
LETRNKEIPKLMQDRKKARRARRTNGRRCRRQRRAKANGTISKKCVKQTTAQNGSVSKRAKDIGVIKRRLPGCEKDVLCIGIKNKETKFTNRTRPEGWLTPTANQLLQTHINLVKKIQKFLPISDVVLEVNKFAFMRLNNPNIQKWQYQQGPLYKKESLESAVSEIQEHHCLFCKKPIDHYHHVVPQHKNGSNTIGNIVGLCAKHHDLVHKDSAWEKKLAKKSTGLYKKYGALGVLNQIIPALTNKLSVLFPKHFFVTAGKSTHDYRAAHGVSKDHWLDAYCIACSVLPSNVCDSNINNHMPYVLKQFRRHDRRVLNNENMNRVYTLNNKAVAINRHKAKDQKTVSLEEFRKEHPDDVCKLKVKEHHPTYRNMNRNFPGSVFLVGKQIHVMQGIASSKDGKATKYNDTSATAIAAGKCKFVAKNTGILFV

SEQ ID NO: 7158 - protein, 405 aa, unidentified
  REGION 1..405: note = Human gut metagenome
GRRCRRQRRAKANGTISKKCVKQDTAQSKNPSKRAKEIGIIKRRLPGYKKDVLCIGIKNKEAKYTNRTRPEGWLTPTANQLLQTHINLVRKMQKFLPISDVVLEVNKFAFMRLDNPDIQKWQYQQGPLYQKGSLENAVSEMQEHHCLFCDKPIDHYHHVVPQSENGSNTIANIVGLCAEHHNLVHKDAAWQKKLAEEKVGLNKKYGALSVLNQIIPALTNKLSVLFPKHFFVTAGKSTHDYRAAHGVSKDHWLDAYCIACSVLPSNVCDSNINNHMPYELKQFRRHDRRVLNNENMNRVYTLDNKAVAINRHKATEQEAASLEEFRKEHPNDVCKLKVKEHHPTYRNMNRNYPGSIFLVGKHVHIMQGIAGSKDGKATTYKDFNANSITASKCKFVAKNSGILFV

SEQ ID NO: 7159 - protein, 441 aa, unidentified
  REGION 1..441: note = Human oral metagenome
MTKTATQKVTQVCVLDQNGQPLMPTQRLGKVYRLLKTKKAHIVAYEPFTIKLNYEPKTHIIQPMTLGVDSGAIHSGYSLANEHREYYSAEVIARDNISKNISDKRMYRRNRRSRKTRYRKPRFNNRKNKGKGWIPPSLEQKVTVQVNEIKHLHQYFPIKDIIIEVAEFDIQKIENPEISGKEYQQGTLQGYNIRNYLLEKYNHKCFYCDKEVSTFEVEHMIPRARRGSNRIDNLTLACHDCNQKKGTLTAEEFIKQTLTPQKAAQKIRQIPKMKQLLKYMAHMNATRWVLYNTIKETYESVSLTYGYITKHNRINACLPKAHHIDAKCITGFSTVPSFDITVVKTKMRRHNRQLHRATFSKGHKRRAATLSKYVHGFQLYDIVLFNNHRYYIKSRRSFGSFKLASLEGLKDEERSYKKLTFLTHTNAYLTNHYVNDKSVNG

SEQ ID NO: 7160 - protein, 451 aa, unidentified; identical to SEQ ID NO: 2424
  REGION 1..451: note = Human gut metagenome

SEQ ID NO: 7161 - protein, 557 aa, Moorena sp.
VCREGVGQLSHIHRQNRVGNGVFRTVLVIKRKECAMGAVFVVDKNGKPLMPTYSKPKVRRMLKDGRAEIFRHEPFTIQLTQRAGGYTQPVHYDTDSGYQYAGVSVKSEKHEFLHMQADMLEDKKGRYDDRRKYRCTRRNRLRHRPPRFDNRRKGEGWIAPSLAHRLENQVRLFQTMCGVCPITEAHIEVGRFDAQALDAVEKGLPLPEGIDYQHGPRYAFDTIREAVFARDQHTCQCCGASPSKKPGTILVVHHALYWKGDHTDRLPGLLTLCTNCHTSANHQKGGKLRGLAPNAATANKAPAAFMNVVRWMMRDRFQADGVPTTITYGAATKRERLSRNVAKTHANDAYCIGEFRPKHRSLEIHIAKRRRNDRRLEKFRDATYIDARDGSIKSGKELSSGRTKRKEPRHGAKDLRRFRLKQLTKGCNAVRRKRYEIRPDDLVRTTDGRVYTVNGTQNRGATLQLRTTKTVLLTALVPKTGKEKELLPVETGQKLALKGRKEKHEVLSVDLASGKAVMRWYMGVKPENVTLLTGTYGGWTVVPAQAVNTCKKGETEK

SEQ ID NO: 7162 - protein, 427 aa, Moorena sp.
MSNFVFLIDSNKTPINPIHPAHAKKLLESNKAAVFRYYPFTLIMNRVVENIVTYPITLKIDPGSKTTGIALVNNRDEVIWGMELHHRSAAIKDSLETRKGVRRGRRARHTRYRQARFINRKRPNGRLNAPSLWHRVQTVETWVKRLCRFAPITAIVQELVRFDLQQLENPEISDVEYQQGELQGYEVREYLLNKWERKCAYCGAENIPLQVEHIKPKAKGGTNRISNLCLACQKCNEKKGTQDIEKFLAKKPEVLKRILAQAKRSLKDAAAVNTTRWALFHTLKASGLPVSTGSGGRTKFNRTRLQLPKTHWIDAACVGSVDKLQLVTSKVLEVKATGHGCRRFCRINKYGFPCTAPKQTFKHSTTGDFVKVTITKDRKNVASGIYAGRVKTPTEKGCEIVINGFRVTFSNMTDVKTIHRNDGFSYV

SEQ ID NO: 7163 - protein, 544 aa, unidentified
  REGION 1..544: note = Human gut metagenome
MKQKKQKVMVYILNKKGKPLMPTTRCGHVRKLLDSKKAVVVNSNPFTIRLKYDTPNGIQDVFAGIDSGRENIGSGASNEDGDCLYLGELKTSNKSIKLKMTERAGFRKERRRHDRQNKQRKARKDHTEIQNGKDDICRATISCKSVQISYPTAEESVTHKIIRGKEGKFANRHRDGDWITPSARQLVQMHMNDLKSICKILPISHVTLERVAFDFQKLENENIKAWEYGKGKLYGYDSPEEYIHDVQDGKCLVCGKPHIDYLHHIIPRSKGGSDKVSNIAGLCYDCHYGPIGVHNCQDTQDRLPELKNEVNKQYKVSLLNSVMPVLIEEIDKFCKANSIMFSICEGHDTAKVRDMYDLQKDHCLDGFAISLVGRNVKSVDVMPDRIHQKQRYKKKSKNIIQKRNYREYYDDKKLVAINRHKGTDQKADSLEEYMNTYAETHTTDECKKHFDSLVVKPARRTYTFHKEWRICPFHIGDKVRYEKKNKIKGNTKVDTFICEGIYFSKDENKAKVEHNKTKSKKMKFCRAIESGCIPYIDYIKLALI

SEQ ID NO: 7164 - protein, 423 aa, unidentified; identical to SEQ ID NO: 3951
  REGION 1..423: note = Human gut metagenome

SEQ ID NO: 7165 - protein, 409 aa, unidentified
  REGION 1..409: note = Ga0315281_10079981
MPCSNKKARLLLEQKKARITCYEPFTIQLLTVGGETKQEVILGVDAGSKKIGLSAVTEKEELFSAEVRLRTNIVELIATRSQLRRARRSRKTRYRKVKFLNRKKPIGWLAPSIDNKINTHLRIINKIYQILPITKIIVEVASFDIQKIKNPSIEGIGYQRGEQLDFWNVREYVLFRDGHKCQGRKGCKNKELSVHHIESRKIGGDAPNNLITFCTKCHNDYHKGLLKLNLKRGISFRDAVFMGVMRWSLYNRLKDLYSNVSLTYGYITKNIRIVNGLSKEHRIDALCITGNPLVKRLKNWLMIKQVRKKKRSLHETIPRKGRKESNVISKRNSKNTKEIIVKGKKWCLFDKVKIGEKTGYISGFSNNLVYMQDIEGNYLQNSSKYKQISVENIDLISRNNNWIYKNVFK

SEQ ID NO: 7166 - protein, 406 aa, unidentified
  REGION 1..406: note = Human gut metagenome
MVYVQDINGKPMMPTTRHGKVRRLLKDKKAVVVNLCPFTIKLMYVTSDYKQEIVLGVDAGTKHVGLSATTKSKELYSSEVILRNDIVDLLSTRRELRRARRNRLRYRKPRFNNRIKSKRPGWTAPSVKYKIDAHIRVIDNVYSILPIFRIVIEVAQFDTQKIKNPEISGKGYQEGDQLEFWNTREYVLARDGHKCQYCKGKSKDSILNVHHIESRKTGGDSPSNLITLCETCHKEYHKGNIDLKIRRGKSLRDAAVMGIMKWRLYEELKSRYDRVFMTFGYITKHNRIKYGIEKSHTSDAFVISKNINAKRIERQYLKRLIRRHNRQIHKMKILKGGKKKNNQAPFEVFGFRLFDKVLYNNKIFFVYGRRKSGSFNIRDFNGENSKDVSRKKFKLIRGKSHPIILK

SEQ ID NO: 7167 - protein, 262 aa, unidentified
  REGION 1..262: note = Human gut metagenome
MVYVLDKNGQPLMPTDRHRKVRLMLQSGQAKVIKRCPFTIQLNYDSGHQTQEISLGIDAGSKHIGVSTTTKIKVLYEVDVELRNDIVDLLSSRRELRRGRRNRKTRYRQAKFNNRRRGNGWLAPSIRQKIGTHLTVVENICKMLPISRIMVETASFDIQKIKNPDIQGAEYQQGDQLEFWNVREYVLFRDGHTCQCCKGKSKDKILNVHHIESRKTGGNAPNNLITLCEICHTGYHKGAVQLPKTVKRGMRFKDAAFMGIMR

SEQ ID NO: 7168 - protein, 420 aa, unidentified
  REGION 1..420: note = Human gut metagenome
MQYAYVLNKHGEPLMPCSPGKARILLKQQKACVVKRTPFTIKLLHGSAGYKQPITLGVDAGSKHVGLSASTEKRELYSEEFTPRNDVVELLSTRRQNRRSRRYRKTRYRAPRFNNRVHSKHNGWLAPSVEVKIQEHITVIKRICRILPITLVRVETAEFDTQRLKAMLAGKPLPVGTDYQLGKMYDEYNVRQYVLKRDNYTCQCCGAHTTAKKTVKLHVHHLESRKVGGNAPSNLITLCTTCHNNLHKGKITLDGKKRGKTLRDAAFMGIMRNTLLTRLRNELHIPVQNTYGYITKLLREQNDIKKSHVNDARCISKHPLAEPCSICYRTKAIRHHNRQIHKAKILKYGIRKANQAPYIVKGFRLWDKVLYNGQECFISGRRTSGYFALRKLDGTTITNSISFKKLRLLEPATNYLIERK

SEQ ID NO: 7169 - protein, 434 aa, Moorena sp.
MRVFVLDKNLKPLDPCRPARARLLLKQGRAKVFRRYPFTIILPDLEVENCTTHNHQLKIDPGAKTTGLAIRQGNTVIWGAEITHRGFQIRDALTSRRQLRSFRRNRKTRYRKARFLNRKRSEGWLAPSLMSRVHNILTWVKKLVRFCPITGISQELVRFDTKKMENPEISGTEYQQGTLYGYEIREYLLEKWNRKCAYCGTTNVQLEIEHIKPKSLGGSDRVSNLAIACRDCNQAKGNQEIKQFLSGKPDILKRILSQAKRSLADAAAVNSTRWKLYNELKLTGLPVKTGSGGQTKYNRRRFSLPKTHWLDAACVGDVQSIFVEDYQILSIVAKGHGTRQICRTDKFGFPKRYCSRTKIHKGFQTGDIVKAVVTKGKKIGTYVGRVATRKTGSFNILTTNGLIQGISHKYCIPIHKKDGYAYQINTLSSLSSHR

SEQ ID NO: 7170 - protein, 495 aa, Moorena sp.
LVGNPFRRKTGRKQAPRDVDPSPALCGLRLKALRGRSGASDNKPLPTLAKDHHRPQGREDGTCEVSRYPSKENTLKVFVLNMRGQPLMPCSPPKARKLLRAGKAVPVRRTPFVIQLTVPTGETKQPITLGVDAGYKHVGLSATTAKEELLASEVELRQDVTDLLSDRLALRRARRNRKTRYRAPRFDNRVRSKHKGWLAPSVENRIQAHISRIEAVCRVLPITNIVIETASFDIQKIKNPEVEGTDYQQGEQLGFWNVREYVLFRDGHVCQACKGRSKDLILNVHHIESRKTGGDAPGNLITLCEACHKAYHAGKLKQFSPRRGASFRAETFMGIMRWTVLNRLRERHPELPVTNTYGYLTKHKRIVAGLPKTHCADAFCIAGVLDAKRRGEYLFQKQMRRHNRQIHKLTILKGGVRKRHQAPYLVHGFRLFDKVLSKGEVGFIFGRRSSGAFDVRRLDGTKISAGISYKKLSLLEKRKTFLTELRKEDGDSSRV

SEQ ID NO: 7171 - protein, 469 aa, Desulfobacter sp.; identical to SEQ ID NO: 2403

SEQ ID NO: 7172 - protein, 442 aa, unidentified; identical to SEQ ID NO: 2903
  REGION 1..442: note = Human gut metagenome

SEQ ID NO: 7173 - protein, 431 aa, unidentified
  REGION 1..431: note = gut metagenome
MPDKVYVISRLGHPLMPCSPAKARHLLDDKKAKVVKRMPFTIRLLYGSTKYIQPIILGVDAGSKTIGLSASTAKEEVFAAEVMPRNDVVENLSTQREFRRARRNRTTRYRKPRSDNRVRSNHERWLAPSVKVKIQEHITSIKRVCTILPISKVVIETAEFDLQLLKAIQEGKPIPEGEDYQKGEMYGSYNVCQYVLWRDNYTCICCGVRGTPKNPVRLHVHHFESRKYGGNAPDNHGTLCDDCHKKFHLGIITDVKLKTRRRQSTRDAAFMGIMRKTLMWRLRTELFIPVAETKGYITKATREKLLVLPKSHTRDALAIAQGRHGFGIKEYAYVEPANHIYTVRPVRHHNRQLHKAFILKGGIRKRNQASKYVFGFRLYDKVLYQGKACFVWGRRTSGTFLLRTIDGIKVKDGVSYRNLTLLERSSNYLIA

SEQ ID NO: 7174 - protein, 514 aa, unidentified; identical to SEQ ID NO: 6277
  REGION 1..514: note = Human gut metagenome

SEQ ID NO: 7175 - protein, 238 aa, unidentified
  REGION 1..238: note = Human gut metagenome
MYDEYNVRQYVLKRDNYTCQCCGAHPTEKKPVRLHVHHLESRHVGGNAPNNLITLCVACHKALHEGKITLDKGKKRGKPLRDAAFMGIMRNTLLARLKDELNIPVKQTYGYITKLLREKNKIPKSHVNDARCIAKAPNAKPCDTMLYTRALRHHNRQIHKAKILNGGIRKKNQAPYLVKGFRLWDKVRYNGEECFITGRRSSGYFALKKYDGTVISNSASYKKLMLLEAATNYITERS

SEQ ID NO: 7176 - protein, 544 aa, unidentified
  REGION 1..544: note = Human gut metagenome
MKQKKQKVMVYILNKKGKPLMPTTRCGHVRKLLNSKKAVVVNSNPFTIRLKYDTPNGVQDVFAGIDSGRENIGSGASNEDGDCLYLGELKTSNKSIKLKMTERAGFRKERRRHDRQNKQRKARKDHTEIQNGNADICRTTISCKSVQISYPAAEKSVTHKIIRGKEGKFANRHRDEGWITPSARQLVQMHMNDLRSICKILPISHVTLERVAFDFQKLENENIKVWEYGKGKLYGYDSPEEYIHDVQNGKCLVCGKPHIDYLHHIIPRSKGGSDNVSNIAGLCYDCHYGPMGVHNCQDTQDRLPELKNEANKQYKVSLLNSVMPVLIEEMDKFCEANSIIFSICEGHDTAKVRDMYDLQKDHCLDGFAISLVGRNVKSVDVMPDRIYQKQRYKKKSKNIIQKRNCREYYDGKKLVAVNRHKGTDQKADSLEEYMNTYAETHTTDECKKHFDSLVVKPARRTYTFHKEWRICPFHIGDKVRYEKKNKIKGNTKVDTFICEGIRFVKDENKAEVKHNKTKSKKMKFCRVLEAGCTPYIDYRKLALM

SEQ ID NO: 7177 - protein, 386 aa, unidentified
  REGION 1..386: note = Human gut metagenome
LTIATGETKQPVSLGVDAGYKHVGLSASTEKAELYASEVELRQDITDLLSARRALRQSRRNRKTRYRAPRFDNRIRTKRKGWLAPSVENRINAHLSRIEAVLRLLPITKITVETASFDMQRLKNPDISGKEYQEGEQLGFWNVREYVLFRDGHVCRHCHGRSKDPVLNVHHLESRRTGSDSPDNLITLCETCHKALHRGEITLKAKRGQSFRAQAFMGIMRREVLNRLKASYPELKVHETYGYLTKHARIANGIVKSHGADAFCIAGNLGAERLGEFFFQKQTRRNNRQIHKLSILKGGIRKRNQAPFEAKGFRLFDKVACQGEEGFIFGRRSSGSFDVRKLDGTRISAGISCKKLRLLEKRRTYLTEIRKEEALPPLPEGRGLRA

SEQ ID NO: 7178 - protein, 406 aa, unidentified; identical to SEQ ID NO: 3415
  REGION 1..406: note = Human gut metagenome

SEQ ID NO: 7179 - protein, 346 aa, Moorena sp.
LFVYMVNCHGQPLMPCSPRKARLLLKAGKAKIVKMVPFTLQLLYGSSGYKQEVALGIDAGTQHIGVCATTEKTVLFEAEVQPRTDIQELLATRRQFRRARRKRKTRYRQARFQNRKKPQGWLAPSVRHKVDAHLKVIKLVHKLLPVRRITIEVAQFDIQKIRNPDIEGEGYQQGPQLGFWNVREYVLFRDGHACQWCKGKSKDRILNVHHIESRKTGGDRPDNLITLCETCHDLIHRTHQEYKITRKRHGFRDATQMGIIRWKIYEQARASFPHVHLTYGYITKQTRIEHGLEKSHVVDARCISGHPLAASDGTWHLVKFIRRNNRQLHKATIRKGGKRQRNTAPK

SEQ ID NO: 7180 - protein, 428 aa, unidentified; identical to SEQ ID NO: 3484
  REGION 1..428: note = Human gut metagenome

SEQ ID NO: 7181 - protein, 470 aa, unidentified
  REGION 1..470: note = Human gut metagenome
MSVFVVGLNGCRLMPVSERKARLLLKGGKASVYRKVPFTIKLNYKTGSTVQPGYLGIDTGSQHIGVSVVRKDGTVLHKEEIGLRDSMSKRKLLESRASSRRGRRYRKTRYRHPKWKPKTKRIYNEKADRKGRHWKKQKNTFTSKRQAGWLPPSLQSKTDHHIQWIRKLLDLLPEGYRLSIELGRFDPARMRDPEIHGELYQKGPQYDYENVRAYVLARDGYTCRVCKKKGGKLHVHHILYRSRGASDNPKYMAAVCSKCHTTENHLPGGILYQWMQDQKKFTRGLRDATFMNILKKRLRKAFPDAVFTYGNITKADREKLELPKSHGNDATAIALVKTEVKSVKDEEPVIHIQQVRRKKRSLHEETPRKGRKEPNRTASRSDKNTKSVTVAKGSGEKKASMTACLFDRVELDGKKGWITGFTGTSCYVKDKEDNYICTSSKYKQVSISRLRILHHCGNWAIGAEKPLGKG

SEQ ID NO: 7182 - protein, 469 aa, unidentified; identical to SEQ ID NO: 6998
  REGION 1..469: note = Bioreactor metagenome

SEQ ID NO: 7183 - protein, 423 aa, Moorena sp.
MRVFVLNKNRQPLDPCKPVRARILLSSGKAKVYRRYPFTIILTEEIKQPITHKHQLKIDPGTKTSGLAIIQGKRVIWGAELTHRGFQIRDSLTSRRQLRRSRRNRKTRYRKPRFLNRTRPEGWLAPSLMSRVQNILTWVERLSRLCPITGISQELVRFDTQKLQNPEISGIEYQQGTLYGYELREYLLEKWNRKCAYCGTTGTQLEIEHIKPKSKGGSDRVSNLAIACHPCNQAKSNQNIELFLSKKPSILRRILSQAKRPLADAASVNTTRWKLYHDLKSTGLPVEVGSGGLTKFNRCRQNLPKTHWLDAANVGKVETLIIEVTNPLIITAKGHGTRQLCRTNKYGFPTRHCSRIKFHKGFQTGDIVRAVVTKGKKIGTYIGRVATRKSGFFNISTKSGLVQGISHKYCQFIHRKDGYAYRT

SEQ ID NO: 7184 - protein, 414 aa, unidentified; identical to SEQ ID NO: 4347
  REGION 1..414: note = Human gut metagenome

SEQ ID NO: 7185 - protein, 512 aa, unidentified
  REGION 1..512: note = Human gut metagenome
MSTVYVLNKDGKPLMPTTRGGHVRHLLKEQKARVVRTNPFTIQLLYETDNLVQPLYLGIDPGRTNIGVAVVKTDGTAVFTAHLETRNKEIPKLMQGRKKARRARRTNGRRCRRQRRAKANGTISKKCVKQATAQNGSVSKRANEIGVIKRHLPGCEKEVLCIGIKNKEAKFSNRTRPEGWLTPTANQLLQTHINLVKKIQKFLPISDVVLEVNKFAFMQLDNPNIQKWQYQQGPLYQKASFEEAVSEMQEHHCLFCKNTIDHYHHVVPQSENGSNTIGNIVGLCTKHHDLVHKDTSWQEKLAKKKTGLNKRYGALSVLNQIIPALTKELSSLFPKHFFATNGKSTYDYRAAHGVSKDHWLDAYCIACSVLPNDVCDSDINNRVPYELKQFRRHDRRALHKENMSRVYTLNGKSVATNRHKATEQTTDSLEEFRQCQPDDVCKLKVKEHHPEYRNPKRNFPGCVFLVGKHTHVIQGTSGSHNGKADGYYDTNGNSYSSGKCKFVAKNEGIVFT

SEQ ID NO: 7186 - protein, 414 aa, unidentified
  REGION 1..414: note = Human gut metagenome
MPCSPAKARLLLKEKKAIVVRRTPFTIQLTIATGETKQPVSLGVDAGYNHVGLSASTEKAELYASEIELRQDITDLLSARRALRQSRRNRKTRYRAPRFDNRIRTKRKGWLAPSVENRINAHLSRIEAVLRLLPVTKITVETASFDLQLLKNPNISGKEYQEGEQLGFWNIREYVLFRDGHVCQHCHGRSKDPVLNVHHLENRRTGGDSPGNLITLCETCHKELHRGEITLKAKRGQSFRAETFMGIMRWEVLDRLKASHPKLEVQNTYGYRTKHARIVNGIAKSHCADAFCIAGNLGAERLGEFLFQKQTRRNNRQIHKLSILKGGIRKRNQVPFEVKGFRLFDKVACKGEEGFIFGRRSSGFFDVRKLDGTRISAGISYKKLHLLEKRQTYITEIRKEKALPPLPEGRGLRA

SEQ ID NO: 7187 - protein, 491 aa, unidentified
  REGION 1..491: note = Human gut metagenome
MPTKRKRHILKLLNTGKTRIAEKVPFTIQLKYENIPVLQPVTLAEDPGRTNIGVAVLSPLGNLMFAAVIETRNKEIKKLMADRKAHRQASRRGERRARQRLAKKYGTIIKAGMAMRKLPQYAADKFVACKFIRNTEARFCNRKRRTDWLTPTVNHLVQTHLNVIKKISRYLPVTDIAIEVNRFAFMQMENPNASGVDFQNGPLRGFDDVKAAIREQQNGKCLMCKNDIEHFHHMVPLSKGSSDTIQNQVGLCPKCHAKVHTDTSFRKKLEDKKSGLLKKYGALNALNQAIPFICKDLLAEYGKEHVHFCTGKETSLIRTSLGYEKTKDNQMHEVDAYCIGLASLELEDIKSQSFVNTYKIKQFRRQDRSIIHHQTERSYYLDEQKIATNRKPRFEQTGNALSDWYKKQVKACDKAKADKMLSTLKVKKSSRSYNSEGRLMPGAVFSYNGQRHVMSGQLTGGRYLRAYGDTKTNYPVSKCNILRSNEGLVFI

SEQ ID NO: 7188 - protein, 458 aa, unidentified
  REGION 1..458: note = Human gut metagenome
LTKDENRPSGRTTGLRAEQAEPAGIRKGDTLKVFVLNMRGKPLMPCSPAKARHMLKAGKAFVVRRTPFTIKLTIATGETKQDVTLGVDAGARHVGISATTEKEEVFASEVALRQDITGLLADRLAFRRARRNRKTRYRAPRFNNRVRSKHKGWLAPSVENRIQAHISRIEAVCRLLPVTKIVIETASFDIQKIRNPEVEGTGYQQGDQLGFWNVREYVLFRDSHICQHCRGRSKDPILNVHHLESRKTGGDAPNNLITLCETCHKAYHAGKIKLKVKRGQSFRAEAFMGIMRWTMLDRVRKAQPDLPVENTYGYLTKNTRITLGLPKTHCIDAYCIAGNLNARRRGVYLYQRQMRKHNRQIHKCKVLSKTLKDGTKVGYRKLNQTPYLVKNFRLFDKVRCFGQTGFIFGRRTSGHFDVRTLNRTRLSDCVNSKKLTLLEKRRTFLTELRKEDGASSPV

SEQ ID NO: 7189 - protein, 415 aa, unidentified; identical to SEQ ID NO: 2674
  REGION 1..415: note = Human gut metagenome

SEQ ID NO: 7190 - protein, 442 aa, unidentified
  REGION 1..442: note = Human gut metagenome
LEVRRAVFYRHYPAVIILKDVDARNIYKLPSYRIKIDPGAVHTGIAIVCNETNEVMYFLQIEHRGSEVKKALITRKQTRRNRRSRETRYRRCKFKNGGDFDSSRKNGWLPPSVKSTADNVIHWVEKLCRYINITECSFEAVRFDSQLMDNPEIGGEEYQQGTLSGYELREYLMEHFRHTCQYCGGESGDPVLEWEHKIPRSRGGSDSVKNASLACSCCNRDKGNRTLEEYLEDSKHISPKGKSEKALNEARISHISGILEKGTIYGSNRYSAWVNSTRRYIEKYLFLMFDDVECCSGGRTKYNRIKLKLPKDHHYDALCVGSVPKEGYTDRTNSYVLYVKATGRGTRFRGQCNSCGVITVKYKNNSKRKFGFQTGDIVQLNKPKGKDTGQYTGKVAVRSSGSFDLIRKGCKRITANYKYFRMMQYSDGYEYLGPLRPIPHSA

SEQ ID NO: 7191 - protein, 424 aa, Enterococcus sp.
MRVFVRNMQGKPLMPCSNRKARLLLKEGKAKIYQYNPFIIQLCYASREYVQECHIGIDTGAKHIGMAVTSEDKVLFKGEIELRQDVKSNLDTRRSYRRDRRNRKTRYRKARFLNRKKKESWLPPSIENRINHTFKWINKLVALLPNPKLHIEVGKFDVAKMINPNVQGVDYQHGQTYGFYNVRYFVFARDNYTCQCCKKSKNKILQTHHIIYRSNGGSNRADNLITVCTDCHTYENHQKGGILYQWQENHKKTKQYKEPPFMNVLRKRIFTQYPNAIITYGSETTPKRKELGLEKTHYNDAIVISGITKIKGNPNEWLLIKQFRKKKRSLHEATARKGRKEPNRLQKRNAKNTPYYKGFCLNDKVRVFNQVGHITGFTSSGAYIKNSKNEYITLPNKSYKQIGISNIRLLHHNNNWQYIHKHIA

SEQ ID NO: 7192 - protein, 438 aa, Moorena sp.
MRVFVLNKNRQPLDPCKPARARILLRTGKAKVLRRYPLTIILTEEVSEPITHNHQLKIDPGAKITGLAIVQSNRIIWGAELTHRGFQIRDSLTKRRTLRRSRRNRKTRYRQPRFLNRKRSSGWLPPSLMSRIQNILTWVKKLTQLCPITGISQELVRFDTQKLENPEISGVEYQQGTLFGYEIREYLLEKWHRKCAYCGATDTQLEIEHIVPKSKGGSNRVSNLAISCHSCNQAKSNQEIEQFLSRKPNVLQRILSQAKKPLADAAAVNATRWKLYNELKLTELPVEVGSGGLTKFNRCSQNLPKTHWLDAACVGISTPERLIIKEVKKPLIVIATGHGSRQMCRTDKYGFPVRYVPRFKFIKGYQTGDIVKAIVTKGKKQGVYVGRVAVRTTGSFNIKTKNGLVQGISHKYCQHIHKKDGYAYVYGSKTSPFKAQYF

SEQ ID NO: 7193 - protein, 431 aa, unidentified; identical to SEQ ID NO: 4306
  REGION 1..431: note = Human gut metagenome

SEQ ID NO: 7194 - protein, 441 aa, Moorena sp.
MSKVFVVDANKHPLNPVHPGYARLLLKQGKAAVLRHYPFVLILHAEVEMPQLEPLRVKLDPGSKTTGLALVKDATGEVIFAAEITHRGAEIKHALDGRRGVRRGRRQRDTRYRKPRFLNRRRPKGWLPPSLESRVCNVVTWVKRLRRLCPLAAISQELVRFDLQAMENPEIAGIAYQQGTLAGYEAREYLLEKWGRKCCYCGATRLPLQIEHIQCRAKGGSDRISNLCLACGPCNLKKGTVDIQVFLAKKPDLLKRILARARAPLADAAAVNSTRWALYERLQALGLPVECGSGGRTKFNRASRGLEKTHWHDAACVGASTPEILHLQGIVPLLITAQGYGCRQMCNVNEIGFPCSKPKGAKKVKGFQTGDIVRAIVTSGTKQGTYMGRVLVRATGSFDIRTKDGRVQGISHRFCTPIHRRDGYSYKQGADHAAHPTQSTR

SEQ ID NO: 7195 - protein, 465 aa, unidentified
  REGION 1..465: note = Human gut metagenome
MSTCVCVLSNSGERLMPTFRLGKVRRLLKDGKAKIVKHNPFTIQLLYDSKTNTQPIEICEDVGYNYIGISVKSQSHEYVSAQYDTLQDEKACHDSCRKLRRTRRNRLRYRKPRFDNRKRGEGWLVPSLRHKKELNVNVVKMYCAVMPITHATVEVGSFDTMLLQAIQKGESKPEGVDYQKGPRYNLATLREAVFYRDNYVCKVCGRKATEGAILHMHHMFYWKGRHGNSLDELLTVCEKCHTPANHQKSGKLYGFGENVKFADLSGAAFMNTVRWQIVNELYAAFGKDFVTVTYGAMTKEKRIALHLEKSHNNDAYAMGEFHPNCRCTFEHYEKVRRNNRILEKFYDSRYIDIRTGEIATGKELFNGRINRNHKKDSENLHKYRGKRLYKGHRALVRKKVNFNPGDLVSLNGEVLVVHGTHTNKKGTVNVEFKTPAKNGRKSANLKKLKIVKAAGSIHPAWEKVS

SEQ ID NO: 7196 - protein, 415 aa, Bacillus sp.
MLVYVINRHGKPLMPCKPRKARILLTEKKAKVVKLTPFTIQLLYGSSGYRQPVSLGVDAGTKHIGLSATTEKGVLFEAEVQLRTDIQDLLSTRREFRRARRNRKTRYRKAKFLNRKKPDGWLAPSIQHKVDSHIRIIEKVRRILPVKSITVEVAQFDSQKIKNPGIQGEEYQQGEQLGFWNVREYVLFRDKHTCQHCKGKSRDKILNVHHIESRKTGGDSPDNLITLCETCHHYIHQNGLEHLFTRKSATLRDTSQMTVMRWFIFNGLKKVFEGANITYGYITKNTRIRSGLGKSHLVDARCISGNPLAIPSHHTYFIKQVRKNNRQLHKATILKGGKRKSNKAERWVKGFQLFDKVEFVGSACFIFGRRTSGYFDLRQLDGTVIHRSACYKKLKPLERASTWLIQRREGQFLPA

SEQ ID NO: 7197 - protein, 422 aa, unidentified; identical to SEQ ID NO: 5333
  REGION 1..422: note = Human gut metagenome

SEQ ID NO: 7198 - protein, 441 aa, unidentified
  REGION 1..441: note = Human gut metagenome
LAKVSYGLYDAGLPQKIIQKERSTYMVYVLSQNGQPLMPTIRHGKVRRLLKEGKANVVKKCPFTIRLTYPSGDQTQEISLGIDSGSKYIGISATTQKKVLYEAEVELRNDISKLLAARRQNRRSRRSRKTRYRKPRFDNRKRKEGWLAPSVQQKVDCHLKVVEDVCKLLPVTRIIAEVASFDIQKIKDPKIHGTDYQQGDQLGFWNVREYVLFRDGHTCQCCKGKSKDKILNVHHIESRQTGGNAPNNLITLCETCHKGYHKGQVKLPKKIKRGMTFKDAAFMGIMRWAFYDRLKEIYLPLGIDVSLTYGYLTKNTRIAHQLPKTHYLDARCISGHPDAVSDGIYYHQKKIRCHNRQLHKANTLKGGIRKRNQAEYLVHGFRLFDKVRYQGKDYFIFGRRKSGYFDIRDLNGEKVNKGSISYKKLRLVETRRSYLTERRLA

SEQ ID NO: 7199 - protein, 438 aa, unidentified; identical to SEQ ID NO: 4848
  REGION 1..438: note = metagenome

SEQ ID NO: 7200 - protein, 430 aa, Moorena sp.; identical to SEQ ID NO: 4002

SEQ ID NO: 7201 - protein, 453 aa, Moorena sp.; identical to SEQ ID NO: 2687

SEQ ID NO: 7202 - protein, 424 aa, Tolypothrix sp.; identical to SEQ ID NO: 6304

SEQ ID NO: 7203 - protein, 326 aa, Moorena sp.
VFKGTIQLRQDVKHLMDVRRGYRRYKRSHKRYRPARFDNRASSKRKSRIAPSIKQKKDSILRVVNKLDKITPISNIVLEDVAIDIRAMTEGYKPYRWQYQKSNRLDENLRKAAILRDGNRCMMCGKTNCILEVHHIQPRRLKGSDTLGNLITLCSGCHEKVSDEELNYQNYFYSLINGKNTRFDYAQHVMQGKTYLREELSKIAPLEHTVGGDTSNRRIDWDIEKSHSNDALCITGLQPSSTDVKDWNIKPMRRKSKAKTESLNEFKHRDIVRYTKKTGESYVGYITALYPEKNQCNITTLEGKVLKRYGIKSLDIVWRFSRIYWT

SEQ ID NO: 7204 - protein, 431 aa, Moorena sp.; identical to SEQ ID NO: 2933

SEQ ID NO: 7205 - protein, 488 aa, Streptomyces sp.
VAREAENGSGDAPTHNPSSYEGGVGASRVFVLSKDGQPLMPCHPARARELLGKGRAVVARQVPFAIRCKDRTRAESAVDGVQLRIDPGSKGTGFALTDEKKETGSKGTAVTIRRGLISVELQHRGDQIHAGMQRRAGYRHRRRSANCRYRKPRSDNRTRPTGWMPPSVRHRVDTTFSLANRLCRYAPVTEIHVELVSFDTHSMSAGRPLRGAEFAQGTLAGTTARDYLRARWNNACAYCDATDVPLNIEHLRPRSRGGTNRITNLVLACTPCNSAKGSSPIEVFLAHRPERLARVLRQLKSPLRDAAAMNTTRWLLTEALNDLGIPTHTSTGQATKGIRTAMGLAKTHTLDALSVGQLDHEAGDVIVRYPEKVLVAKATGRGSYARTTPDRSGFPRLRRTRAKQHFGYITGDLVRATVPTGKRAGSWTGRISVRARGQHSLQTPTGRLNVSHRNLALLQRGDGYGYSVRSESAPPTSRKPVDRWPTGS

SEQ ID NO: 7206 - protein, 420 aa, unidentified
  REGION 1..420: note = Human gut metagenome
MQYVYVLSKHGEPLMPCSPGKARLLLKEKKARVVRRTPFTIKLLYGSAGYKQPITLGVDAGSKHVGLSASTKKRELYREEFTPRNDVVKLLSKRKQYRRSRRNRKTRYRAPRFNNRVHSKHKGWLAPSVEVKIQEHITVIKRICRILPISLVRVETAEFDTQRLKAMLEGKSLPVGTDYQLGEMYDEYNVRQYVLKRDNYTCQCCGAHTTKKKTVKLHVHHLEGRQVGGNAPNNLITLCVDCHKALHAGKVKLDGKKRGKSFKDAAFMGIMRKTLMARLRDELPIPVQGTYGYITKMRREQNDIKKSHVNDARCISKHPLAEPCSVCYRTKAIRHHNRQTHKANFSKGGTRQRSQMPYVVEGYRLWDKVLYKGQECFVSGRRASGSFTLKKLDGTRISKGVTFKKLRLLETATNYLIERM

SEQ ID NO: 7207 - protein, 391 aa, unidentified
  REGION 1..391: note = Human gut metagenome
MPIMVYVISQDGQPLMPTDRHGKIRRLLKSDKAKVVKHCPFTIQLLYGSTDYTQEISLGIDAGSKYIGISATTQNRVLYESDVELRNDIVSLLSARRQNRRTRRNRKTRYRKPRFNNRISCKKKGWLAPSVRQRVNTHLTVVAKVHQILPVTRIIVETASFDIQKIKNPTISGTDYQQGDQLGFWNVREYVLFRDGHVCQCCKGKSKDKILNVHHIESRKTGGDSPDNLITLCKTCHTGYHRGTIKLPKTIHRGTSFRDASFMGIMRWSFYDELKTLYPDVNLTFGYITKNTRIKNNLPKEHYIDARCISGHPLAVSDETYYYQKKVRCHNRQIHKNTILKGGVRKRNQAPYFVKGFRLFDKVMYQGQECFIFGRRSTGRMDLRLLDRTHI

SEQ ID NO: 7208 - protein, 465 aa, unidentified; identical to SEQ ID NO: 3287
  REGION 1..465: note = Human gut metagenome

SEQ ID NO: 7209 - protein, 421 aa, unidentified; identical to SEQ ID NO: 2738
  REGION 1..421: note = Human gut metagenome

SEQ ID NO: 7210 - protein, 408 aa, unidentified; identical to SEQ ID NO: 4142
  REGION 1..408: note = Human gut metagenome

SEQ ID NO: 7211 - protein, 428 aa, unidentified
  REGION 1..428: note = Human gut metagenome
MQYVYVLNKHGEPLMPCSPRKARLLLKQKKACVVKRTPFTIKLLYGSTGYKQPITLGVDAGSKHIGISATTEKHELYREEATPRNDVVDLLSARRAFRRSRRNRKTRYRAPRFNNRVHSKHKGWLAPSVEVKIREHITLIKRVCRILPITLIRVETAEFDTQRLKAMLESKPLPVGTDYQLGEMYDEYNVRQYVLKRDNYTCQCCGAHPTKTKAVKLHVHHIETRRTGGNAPNNLITLCTACHKALHAGKVTLDGKKRGKPLKDTAFMGIMRKTLLERLRKELKIPVQGTYGYITKYLREKHGIPKSHTNDARCISKNPLAIPCDTCYYAKAVRHHNRQLHKATILKGGIRKANQAPYIVKGYRLWDKVSYNGTECFITGRRTSGYFALKKLDGTVISNSISYKKLRLLEVATNYITERKRRGNSSHD

SEQ ID NO: 7212 - protein, 443 aa, unidentified; identical to SEQ ID NO: 4257
  REGION 1..443: note = Human gut metagenome

SEQ ID NO: 7213 - protein, 442 aa, unidentified
  REGION 1..442: note = Human gut metagenome
MVTVQQSTHHLPFGRVFIRRNLFMVYVISQDGKPLMPCSDPIARLLLKQGKAKVKKREPFTIKLTYETTNYTQGLTLGVDTGSGTIGTAVSKDNGDIVYMSEVVVRNDITDKMTQRAKYRRNRRNRKTRYRKARWLNRASSIKKDRFSPTMQSKLHSHVREIEYIQSILPVTEMVFETGQFDMHLMKNPSLANPKVRPWGYQKGANYGFENTKAMVLNRDNYTCQCCKGKHKDSKLEVHHIVFRSQGGSDEESNLLTLCHTCHKDLHSGKITPKLSGKVKGNLKYATQMNSIRKQLFRFYPNAIETFGYVTKVNRLHLGVAKEHYYDACTIATQGNAFNVKSNLYKKKCVSDGDFQKTKGIRSEQPIVTDKICGFRKFDKVRYFGNDYFIKGRMSTGYAILMDIDGNKIDFSTMPRGYKTPKLSNCKRITARSTVMTQVKVV

SEQ ID NO: 7214 - protein, 420 aa, unidentified
  REGION 1..420: note = Human oral metagenome
MLAYVLKQNGQPFMPTERFGKVRRLLKEGKAKVVRREPFTIRLLYESKTDVVQECYCGIDTGSKHIGVAVVGNDKVLYQSQTDLRSDIKRKMDARRSFRYNRRSRKTRYRKPRFLNRRNSIREDRLQPSVKHKVQAHIDEIEFCKKILPVSDIILEVSQFDTALMKNPSLINEKVKHWGYQKGFNYGYSSRRSAILHRDNYTCQCCGKKNCRLEVHHIKFRSDGGTDNEENLITLCEDCHRGIHAGTVVLNKKPKKSKGLKHATHMSIIRSRLLKEYPDAIETFGFVTAENRNHLKLEKDHYIDACVIASGGLEFKELDVIYKKRRIAKQDRILTKGIRREQKLPTGKIFGFKKFDKVEYLGETCFIKGRRSSGAFVLMDIDNNSIDFRDRGGKQNPPYRFIKRLNTRKSVLCVKERLER

SEQ ID NO: 7215 - protein, 383 aa, Moorena sp.
VSFVFLVDTKRQPLSPVHPGRARLLLKAGKAAVLKRYPFTLILKAAIEQPQVQPLRLKLDPGSRTTGIAIVNDESGQVLFAAELAHRSQQIKKALDDRRAVRRGRRARHTRYRKPRFQNRSRPPGWLAPSLQSRVCNIETWVKRLRKLCPITAISLELVRFDLQLMQNPEISGIHYQQGTLAGYECREYLLAKWGRACSYCGKQNVPLQIEHIVARANGGTDRISNLCLACEPCNTRKGTQDIAVFLAKKPDLLKQIQAQAKAPLKDATAVNSTRWALFEQLKELGLPLECGSGGMTKYNRELRNLPKTHWVDAACVGKVVPAHLKHPGVHTGRVSVRAKGAFTISTNQGTVTDIGKKYCQVLQKADGYGYIQKGEAAVSPVP

SEQ ID NO: 7216 - protein, 406 aa, unidentified; identical to SEQ ID NO: 6445
  REGION 1..406: note = Human gut metagenome

SEQ ID NO: 7217 - protein, 419 aa, unidentified
  REGION 1..419: note = Wastewater metagenome
MLIFILNKHGKPLMPCSPRQARLLLKKNLAKVIQRTPFTIKLLHGSSGYKQKIIAGMDTGSKTIGCAAIANNTVLYQSEVAIRQDISKKMQQRSMFRRTRRSRKLRYRQTRFNNRKNSLKLNRLPPSIKSKINSHLREKNFIESILPITKWIIELASFDIHKITNPQVSGSEYQQGKQLGYYNVKQYVLHRDGYKCQSGIKVKHNNKLQVHHIIYQSNGGNDAPDNLITLCKDCHSNLHKGVFSIKSKIAKTQHATQVSIIKSQLAKELTKFEITFGYETKFKREGMGLLKTHANDAIAICCNIDDKIKVDDTIYYKKHIAKGDYQQTCGSHSEKRIPTGKLFGLRKFDLVKTNKGIGFIKGKRSSGYFALMNIDGSKINDVVNVKKDCIRLAARTTTIISRKAAFPPRPEGRGFHAEV

SEQ ID NO: 7218 - protein, 529 aa, Moorena sp.; identical to SEQ ID NO: 3816

SEQ ID NO: 7219 - protein, 396 aa, unidentified
  REGION 1..396: note = Human gut metagenome
VVRRTPFTIQLTIATGESKQPVSLGVDAGYKHVGLSASTEKAELYASEVELRKDITDLLSARRALRQSRRNRKTRYRAPRFDNRIRTKRKGWLAPSVENRINAHLSRIEAVLRLLPITKITVETASFDMQRLKNPDISGKEYQEGEQLGFWNVREYVLFRDGHVCRHCHGRSKDPVLNVHHLESRRPGSDSPDNLITLCVTCHKALHRGEITLKAKRGQSFRAQAFMGIMRREVLNRLKASYPELKVHETYGYLTKHARIANGIVKSHGADAFCIAGNLGAKRLGEFFFQKQTRRNNRQIHKLSILKGGIRKRNQAPFEAKGFRLFDKVACQGEEGFIFGRRSSGSFDVRKLDGTRISAGISCKKLRLLEKRRTYLTEIRKEEALPPLPEGRGLRA

SEQ ID NO: 7220 - protein, 406 aa, unidentified; identical to SEQ ID NO: 6079
  REGION 1..406: note = Human gut metagenome

SEQ ID NO: 7221 - protein, 431 aa, unidentified; identical to SEQ ID NO: 3801
  REGION 1..431: note = Human gut metagenome

SEQ ID NO: 7222 - protein, 432 aa, Moorena sp.
MCYVFVLDRDRTPLDPCHPARARELLRDGRAAVLRRFPFTIILHDRTRAESVVHEHRLKIDPGSKTTGLALVAGARVLWAAELTHRGQRITAALLSRHAIRRGRRQRKTRYRQARFLNRTRPAGWLPPSLQSRVGNIMTWVERLARSCPLSALSQELVRFAMHQMQHAEISGVAYQHGELAGYEVREYLLEKWHRACAYCDAKDVPLEVEHILPKVRGGSNRVSNLTLACVPCNQKKGAQTAAEFGFPQVQAQARMPLKDAAAVNTTRWGLSQALQATGLPVETGTGGRTTYNRSRLGIAKSHWGDASCVGASTPDTLRVTGIQPVGIRAMGHGTRHMCRVGAHGFPQVHRARQKHYGGMQTGDIVKAVVPTGKYAGTWTSRVVVKARGWFALVIHGKKASVHQKHCTRLWAADGYTYTLPAAAGTTVSSPR

SEQ ID NO: 7223 - protein, 470 aa, unidentified
  REGION 1..470: note = Human gut metagenome
MSVFVVGLNGCRLMPVSERKARLLLKGGKASVYRKVPFTIKLNYKTGSTVQPGYLGIDTGSQHIGVSVVRQDGTVLHKEEIGLRDSMSKRKLLESRASSRRGRRYRKTRYRHPKWKPKTKRIYSEKADRKGRHWKKQKNTFTSKRRAGWLPPSLQSKTDHHIQWIRKLLHLLPEGYWLSIELGRFDPARMKDPGIHGELYQKGPQYDYENVRAYVLARDGYTCRVCKKKGGKLHVHHILYRSRGASDNPKYMAAVCSKCHTTENHLPGGILYQWMQDQKKFTRGLRDATFMNILKKRLRKAFPDAVFTYGNITKADREKLELPKSHGNDATAIALVKTEVKSVKDEEPVIHIQQVRRKKRSLHEETPRKGRKEPNRTASRNDKNTRSVTVSKGSGKKKVSMTACLFDRVELDGKKGWITGFTGTSCYVKDKEDNYICTSPKYKQVSISKLRILHHCGNWVIGAEKPLGKG

SEQ ID NO: 7224 - protein, 455 aa, unidentified
  REGION 1..455: note = Human gut metagenome
LQPVTIAEDPGRSNIGMAVVSLSGELLSAAVVQTRNKEIVKLMEKRKQHRRASRNGERKARQRLAKKCHTMIKTGFLMRKLPMYGKDKRVRCNVIKNTEAKFCNRKREDGWLTPSAEHLVRTHINLIHKMQKFLPITDVAIEINRFAFLSLEDPSISGVDFQNGPLKGYDDLNVAIEDLQDGHCLMCNSPIEHRHHIVPRSMQGSNTIGNIAGLCCKCHERVHKDARFEDRLKKKEAGLNKRYAAVSVLNQAIPFICKRLEQEFGKEHVHYCSGRDTSMVRRSLGYHKTKEEQLHEVDAWCIAVLALQHVPEKAPEFDHVHEILQFRRQDRSRIKAQTSRAYYHEGKKIAKNRKKAEGQKDDSLQGWRKRQVERYGEEQTRKMISQLKVKKSIRRYNRLDRLMPGAVFYYQGVRYVMRGQHSNGQYLQAVGMRDKDFPAKKCKIVVHNQGLVFVS

SEQ ID NO: 7225 - protein, 351 aa, unidentified
  REGION 1..351: note = Human gut metagenome
DNRKRGEGWLAPSLKHKKELNVNVVKMYCTVMPITHATVEVGSFDTMLVKAIQEGKVIPEGADYQKGPRYNLATLREAVFYRDNYVCKICGRKATEGAILHMHHMFYWKGRHGNSPDELLTVCEKCHTPANHQKSGKLYGFGGDVKFTDLSGAAFMNTVRWQIVNELYAAFGKPFVTITYGAMTKEKRIALQLEKSHNNDAYAMGEFHPNHRCTFEHYEKVRRNNRILEKFYDSRYIDIRTGEITTGKALFNGRINRNHKKDSENLHKYRGKRTYAGHRALLRKKVNLNPGDFVSLNGETLVVHSTHTKKNGAVNVEFETPAKSGQKSASLKKLKIVKAANSIHPAWKKIS

SEQ ID NO: 7226 - protein, 417 aa, unidentified
  REGION 1..417: note = Human gut metagenome
MPCSPAKARLLLKEKKAIVKRRTPFTIQFTIATGEARQPVTLGVDSGYKHIGLSATTEKAELYASQVELRQDITDLLSARLALRRSRRSRKTRYRAPRFDNRVASKREGWLAPSVENRIAAHMSRVEAVMRVLPVTAITVETAAFDTQLLKNPNIAGEAYQQGEQLGFWNVREYVLFRDGHVCQHCRGKSKDPILNVHHIESRRTGGDAPNNLITLCETCHKAFHRGENKLKVKRGKSFKAETFMGIMRWTLFERLKKAHPELRVRNTYGYLTKHKRISHGIAKSHCADAYCIADNLGAKRLEGFFFQKQTRKHNRQIHKLSILKGGLRKKNQAPYEVKGFRLFDKVICKGEEAFIFGRRTSGSFDVRRLDGTRISAGISCKKLRLLEPRTTYLTEFRKEAALPPLHECSGSRAEFR

SEQ ID NO: 7227 - protein, 420 aa, unidentified
  REGION 1..420: note = Human gut metagenome
MQYVYVLNKHGEPLMPCSPGKARLLLKQQKACVVKRTPFTVKLLFGSAGYKQPITLGVDAGSKHVGLSASTEKRELYSEEFTPRSDVVELLSTRRQNRRSRRNRKTRYRVPRFDNRVHNKHKGWLAPSVEVKIQEHITVIKHICKILPISLVRVETAEFDTQRLKAMLAGKPLPVGTDYQLGEMYDEYNVRQYVLKRDHYTCQCCGTHNTAKKVVKLHVHHLESRKTGGNAPSNLVTLCTTCHKNLHKGRVTLDGKERGKPLRDAAFMGIMRKTLMVRLKEELPIPVQGTYGYITKMRREQNNIKKSHTNDARCISKHPLAEPCSVCYRTKAIRHHNRQTHKANFSKKGIRKRSQMPYLVEGFRLWDKVLYKGQECFVSGRRSSGSFALKKLDGTSISKGVTFKKLRLLEPATNYLIERM

SEQ ID NO: 7228 - protein, 448 aa, unidentified
  REGION 1..448: note = Human gut metagenome
MSTGLRAVQAEPAGIRKGDALKVFVLNMRGRPLMPCSPAKARHLLKAGKAVVRRRTPFTIQLRIATGETKQSVTLGVDAGAKHVGLSAATEKEEVFASEVELRQDITGLLAARLSLRRDRRHRKTRYRAPRFLNRVRSKHKGWLAPSVENRIQAHMSCIDAVCRLLPVTRIVIETASFDVQKIRNLEVEGTGYQQGDQLGFWNVREYVLFRDGHVCQHCHGYSKDKILNVHHLESRQTGGDAPNNLITLCETCHKACHAGKIKLKVKRAQSFRAEAFMGIMRWTLLDRMRKAHSGLPVENTYGYLTKNTRITLGLPKTHCVDAYCIAGNLKAVRRGVCLHQRQVRKHNRQIHKCTVLSKTLKDGTKIGYRKLNQTPHLVKSFRLFDKVRCLGQTGFIFGRRSSGYFDVRRLDGVKLSSGISYRKLTLLEKRSTYLTELRKEDGASSPV

SEQ ID NO: 7229 - protein, 431 aa, unidentified
  REGION 1..431: note = metagenome
MPNKVYVINKHGRPLMPCSPAKARHLLDAGKAKVKKRTPFTIQLVYGSSGYTQEVILGVDAGSKTIGMSASTTKEELLSAEVKPRNDVVDLLSTRREFRRARRNRKTRYRKPRFDNRVRSKHKGWLAPSVEVKIQEHITSIKRVCRILPVSKVVIETAEFDLQLLKAIEEGKPVPQGEDYQQGEMYGHYNVRQYVLWRDGYTCQCCGAHATKKKEVRLHVHHLESRKVGGDAPDNQVTLCESCHEKLHKGLIAEKDFKKRKRRSTRDATFMGIMRKTLMQRLCSELPIPVVKTRGYITKATREKLLVLPKSHTNDALAIAQGKQGFNVGYLPGILQIDKIYTIRPVRHHNRQLHKATILKGGIRKSNQTEKYVFGYRLFDKVQFNGQDCFIWGRRTTGIFTIKTINGKMIKDGISFKKLKLVEKSTSYLIA

SEQ ID NO: 7230 - protein, 535 aa, unidentified; identical to SEQ ID NO: 6116
  REGION 1..535: note = Human gut metagenome

SEQ ID NO: 7231 - protein, 470 aa, Anaerostipes sp.; identical to SEQ ID NO: 2949

SEQ ID NO: 7232 - protein, 379 aa, Arthrospira sp.; identical to SEQ ID NO: 2972

SEQ ID NO: 7233 - protein, 417 aa, unidentified
  REGION 1..417: note = Human metagenome
MVYVLSIDKQPLMPIRRHGKVRRLLKEGKARVVRREPFTIQLLFETDNNVSHLVLKIDTGSKYIGAGVTDDNACVYYASEVEIRNDIHTKMVRRGMYRRARRSRKLRYRKVRFLNRRNSIKKDRFSPTMVSKYDSHQREIEFVKSILPIADLVFETGTFDTNLLNHAGEAFNRHWGYQKGPNYGYKNAQEACFNRDNYTCQCCKTKRGTLNAHHIIYRSKGGADTLDNLITLCVDCHKKLHRGELKEFELTISGKRRGNLKHATQMNSIRVQLLKHYPNAIETFGFVTKANREWLGLEKFHWMDAVSMGLNKKPTFLIDRIYKKKHVSKGQYQLYRGKNSNKKQPRGKVCGFLNRDIVKYRGQLYLIKGLISPCYCVLSDINGVEQKFKKPKTVKLSSIKRVSARSTTRCISQKIIY

SEQ ID NO: 7234 - protein, 460 aa, unidentified
  REGION 1..460: note = gut metagenome
MVITVDKNKKPLGVCTERRARILLSKRRACVYRYYPFTIIVKDADVRSLEKKEEYQIKIDPGAKTTGIAVVRTSDNAAVFFEQIEHRGEKVKSNLDARRMTRRNRRTRETRYRRPKWGSKQLPKGKKPGYDTKRPEGWLPPSVKSVADNIISWVIRLRKLFNITSCSFEAVRFDTQLIDNPDIGGVQYQQGELFGYEVKEYLLDKYGHTCQYCGGASSDPVLEWEHIVPKSKGGSDSVKNATLACRCCNQAKGSMTPQEWLSTIKGHTKLDKARQNGIHRVLSGKASGVGNRYCAWVSASRRYTEAALFAIFGDVECSTGGRTKYNRERLGLPKDHHYDALCVGTVPKGGYTDLTNGYFFYAKAIGRGSRFRGKINACGIITLKLKKGPKRRFGFQNGDIVRADVPKGKYQGQHVGRVITRASGYFDIRKTDGSLVTANSRYCKTSQKDNGFLGSYKRAS

SEQ ID NO: 7235 - protein, 414 aa, unidentified; identical to SEQ ID NO: 2588
  REGION 1..414: note = metagenome

SEQ ID NO: 7236 - protein, 417 aa, Moorena sp.
MLTYVLAADGSPLMPTYNISKVRRMLKDGRAVIAGHKPGFTIRLTYALPDQKTPHTQKIELCEDTGYQHIGVSVKSKKHEYVHLQVDTLADEKNHHDAQRRYRRNRRNRLRYRAPRFDNRTHSKKPGWIAPSLQHKADIHVRLVSTFQKVLPICDVYLEVGTFDTQVLEAKEKGLPIPEGSDYQHGTRYGIATLREAVFYRDGYKCQCCGKGIKDGRILRVHHIGYWKTPSDHTDRMGNLITVCTKCHTAANHKKGGKPKMMPLTGAAFMNTVRWKIVQAVKDLDSNLTVHATYGADTKLSRRDHSITKTHANDAYCMGMFQPGHRAPEQLLKKKRRNNRVLSKFYDAKYIDSRDGVKKSGSDLSCGRTNRSEPRNGEQNLRIFHGKKVSKGRISVRRQRYVSVSKLRILHHAGAFV

SEQ ID NO: 7237 - protein, 400 aa, unidentified
  REGION 1..400: note = Human gut metagenome
LQFYRKEHGIMQYVYVLSKHGEPMMPCSPGKARLLLKQQKACVVRRTPFTIKLLYGSAGYKQPITLGVDAGSKHVGLSASTEKRELYREEFAPRNDVVELLSTRRQNRRSRRNRKTRYRAPRFDNRVHSKHKGWLAPSVEVKIQEHITIIKRICKILPISLVRVETAEFDTQRLKAMLAGKPLPVGTDYQLGEMYDEYNVRQYVLKRDNYTCQCCGAHTTAKKLVKLHVHHLESRKTGGNAPSNLITLCTTCHKNLHKGKVTLDGKERGKPLRDAAFMGIMRKTLMARLKKELPIPVQGTYGYITKMRREQNDIKKSHTNDARCISKHPLAEPCSVCYRTKAIRHHNRQTHKANFSKKGIRKRSQMPYLVEGYRLWDKVLYKEQECFVSGRRSSGSFTLK

SEQ ID NO: 7238 - protein, 413 aa, unidentified; identical to SEQ ID NO: 3587
  REGION 1..413: note = Human gut metagenome

SEQ ID NO: 7239 - protein, 535 aa, unidentified; identical to SEQ ID NO: 6116
  REGION 1..535: note = Human gut metagenome

SEQ ID NO: 7240 - protein, 460 aa, unidentified
  REGION 1..460: note = Human gut metagenome
MVAVVDLFGKPLMPTNEYRARKLLKQKKAKIFGYRPFTIQLTERKSTEIQPIELCMDTGYIHIGISAKSERHEYLGMQIDTLTDEKLKRDDKRQYRRKRRNRKRYRAPRFDNRRRKEGWIAPSLEHKKEIHIDAIQRICKVMPITDITLEIGNFDTHVLKAVEEGKPLPQGSDYQHGERYGIATLREAVFLRDGYKCQCCEKSVKDGAILHVHHIKYRSQGGTNRMSNLITVCDKCHTQKNHKPGGKLWNWKPKLAEFKGASYMTSIRWTLYNEVTALLPNSSVHITYGAKTKESRRKLDIKKSHVNDAYVMGLFCPKHRTKPVYFKKKRRNNRVLEKFYDAKYIDSRDGKKQSGQELFNGRISRNHRKDSENLHLYRKQKVTKGKRSIRNKHYPIQPHDILLYQKKKYENAGCHNNGSRVILLPEKKSVALKQLTIYQYAGGYYRVPYESNKKEERTGS

SEQ ID NO: 7241 - protein, 422 aa, unidentified
  REGION 1..422: note = Human gut metagenome
LRVFVLNKRGKPLMPCSPAKARLLLKEKKAIVVRRTPFTIQLTIATGESKQPVSLGVDAGYKHVGLSASIEKAELYASEVELRKDITDLLSARRALRQSRRNRKTRYRAPRFDNRIRTKRKGWLAPSVENRINAHLSRIEAVLRLLPITKITVETASFDMQRLKNPDISGKEYQEGEQLGFWNVREYVLFRDGHVCRHCHGRSKDPVLNVHHLESRRTGSDSPDNLITLCETCHKALHRGEITLKAKRGQSFRAQAFMGIMRREVLNRLKASYPELKVHETYGYLTKHARIANGIVKSHGADAFCIAGNLGAERLGEFFFQKQTRRNNRQIHKLSILKGGIRKRNQAPFEAKGFRLFDKVACQGEEGFIFGRRSSGSFDVRKLDGTRISAGISCKKLRLLEKRRTYLTEIRKEEALPPLPEG

SEQ ID NO: 7242 - protein, 456 aa, unidentified; identical to SEQ ID NO: 4174
  REGION 1..456: note = Human gut metagenome

SEQ ID NO: 7243 - protein, 423 aa, Moorena sp.
MRVFVLNKKGQPLDPCKPARAIILLSTGKAKVYRRYPFTIILTEEIKEPVTHEHQLKIDPGAKTSGLAIVQGQRVIWGAELTHRGFKIREALTSRRQLRSSRRNRKTRYRKPRFLNRTRPKGWLAPSLMSRVKNILTWVKKLIRLCPVIGISQELVRFDTQKLQNPEISGVEYQQGTLYGYELREYLLEKWNRKCAYCGTTGTQLEIEHIKPKSKGGSDRVSNLAIACHPCNQAKSSQDIELFLSKKPSILKRILNQAKRPLADAASVNVTRWKLYHNLKSTGLPVEVSSGGLTKFNRCRQNLPKTHWLDAANVGKVETLIVEVTHPLLIAAKGHGTRQLCRTNKYGFPIRHCSRTKIHRGFQTGDIVRAVVTKGKKVGTYVGRVATRKSGYFNISTKSGLVQGISHKYCKFIHRKDGYAYTN

SEQ ID NO: 7244 - protein, 545 aa, unidentified
  REGION 1..545: note = Human gut metagenome
LSRTIPLTANTQPRETQPPVSAGETYSKRRVAYMPTVYMLNKDGKPLMPTTRCMHVRHLLKNGKARVVKSKPFTIQLLYETDDVVQPLYLGIDPGRTNIGVAVVKADGAAVFTAHLETRNKEVPKLMKKRKESRCARRTNGRRCRRQRRAKTNGTISKKCVKQTTAQNGSVSKRAKEIGVIKRHLPGCEKDVLCIGIKNKEAKFTNRARPEGWLTPTANQLLQTHINLVKKIQKFLPISDVVLEVNKFAFMQLDNPNIQKWQYQQGPLYQKGSLENAVSEMQEHHCLFCEKPIEHYHHVVPKSENGSNTIANIVGLCTEHHNLVHKDATWQKKLAKEKVGLVKKYSALSVLNQIIPALTKEMNSLFPKHFFVTNGKSTYDYRTAHGVSKDHWLDAYCIACSVLPNDVCDSNINSHVPYELKQFRRHDRRVLHKANMSRVYTLNGKTVATNRHKAIKQTTDSLEEFRQSHPGDVCKLKVKEHHPAYRNLNRNYPGSVFLVDGQVHVMQGVSGSHNGKADGYYNTNGNAYPYYKCKFVVKNEGIVFA

SEQ ID NO: 7245 - protein, 420 aa, unidentified
  REGION 1..420: note = Human gut metagenome
MQYVYVLSKHGEPMMPCSPGKARLLLKQQKACVVRRTPFTIKLLYGSAGYKQPITLGVDAGSKHVGLSASTEKRELYREEFTPRNDVVELLSTRRQNRRSRRNRKTRYRAPRFDNRVHSKHKGWLAPSVEVKIQEHITVIKHICRILPISLVRVETAEFDTQRLKAMLAGKPLPVGTDYQLGEMYDEYNVRQYVLKRDNYTCQCCGAHTTAKKLVKLHVHHLESRKTGGNAPSNLVTLCTTCHKNLHKGKVTLDGKERGKPLRDAAFMGIMRKTLMARLKEELPIPVQGTYGYITKMRREQNDIKKGHTNDARCISKHPLAEPCSVCYRTKAIRHHNRQTHKANFSKKGIRKRSQMPYLVEGYRLWDKVLYKEQECFVSGRRSSGSFTLKKLDGTSVSKGVTFKKLRLLEPATNYLIERM

SEQ ID NO: 7246 - protein, 406 aa, unidentified
  REGION 1..406: note = Human gut metagenome
MVYVQDIDGKPLMPTTRHGKVRRLLKSNKAVVVNLCPFTIKLMYVTSDYKQEIVLGVDAGTKHVGLSATTKSKELYSSEVILRNDIVDLLSTRRELRRTRRNRLRYRKPRFDNRIKSRRPGWVAPSVKYKVDAHIRVVENVCSILPISRIVIEVAQFDTQKIKNPNISGKEYQEGDQLGFWNVREYVLARDGHKCQYCKGKSKDHVLNVHHIESRKTGGNSPSNLITLCETCHKEYHKGNIDLKIKRGSSLRDAAVMGIMKWRLYEELRSKYDRVSMTFGYVTKYNRINHDIEKSHVSDAFVISKNFNAIRLGYYYKVRLVRRHNRQIHKQKIPKGGIKRLNQSPFEVFGFRLFDRVMFENNCYFIFARRKTGSFNIRDINGKNKRDITYKKLKLSRCKRFMIEKS

SEQ ID NO: 7247 - protein, 450 aa, Moorena sp.; identical to SEQ ID NO: 2935

SEQ ID NO: 7248 - protein, 415 aa, unidentified
  REGION 1..415: note = Human gut metagenome
MENRIEYCFVVDKNNRPLTPTKVNKGWYLVRKSRAKLKSKYPMVIQLEKEVKSDEDDESHIVCGIDDGSAHVGLAIVQKCPTKNKVVFKGTIEQRQDVKHLMDVRRGHRRYHRYHKRYRQARFNNRSSSKRTCRLAPSIKQKKDAILRVLYQLNKWVNIQEYHLEDVCIDIRALTDDYKPYRWQYQKSNRLDENLRKATILRDECRCQECGKSNCVLEVHHIRARKYGGADTIGNLITLCSGCHQKTEGRERDFEDRYFNMIKSKPKRFDYAMYVMQGKTYLREKISELGSLYLTNGGETANKRIEWNMEKSHGNDAICVTDCIPDNCDVKEWIIKPMRRKSKAKTNNLLGIRHRDLVSYTYKNGETHTGYVTALYPEQLVLNFQSKTKHCKKVNVRKCRLLWKFNKIYWLEQCV

SEQ ID NO: 7249 - protein, 408 aa, unidentified; identical to SEQ ID NO: 2950
  REGION 1..408: note = Human gut metagenome

SEQ ID NO: 7250 - protein, 413 aa, unidentified; identical to SEQ ID NO: 2815
  REGION 1..413: note = Human gut metagenome

SEQ ID NO: 7251 - protein, 456 aa, unidentified
  REGION 1..456: note = Human gut metagenome
MSTCVCVLSNSGERLMPTIRLGKVRHLLKDGKAKIVKHHPVTIQLLYDSKTNTQPIEICEDVGYNYIGISVKSESHEYVSAQYDTLQDEKEHHDDCRKYRRTRRNRLRYRKPRFDNRKRSEGWLAPSLEHKKQLNIRLIERYVSVIPITRATVEVGSFDTMLLQAIQKGESKPEGVDYQKGPRYNLATLREAVFYRDNYTCQVCGRKIADGAILHMHHMFYWKGRHGYQLDELVTACEKCHTPANHQKGGKLFGFGEDKEFANLSGAAFMNAVRWQIVNALYATYGKEFVTITYGAMTKEKRIILGIEKTHSNDAYAMGDYHPAHRCVFRHYQKRRRNNRVLEKFYDATYIDARTGNKAKGKELFNGRINRNHKKDSENFHKYRSKKVSKGRRSIRRQRYAIQPYDTVRLEGKTYITSGCHNKGTRLLIPVNGKSKSVAISKVQVVCHAGAWIQII

SEQ ID NO: 7252 - protein, 431 aa, unidentified; identical to SEQ ID NO: 4535
  REGION 1..431: note = Human gut metagenome

SEQ ID NO: 7253 - protein, 456 aa, Halomonas sp.; identical to SEQ ID NO: 2773

SEQ ID NO: 7254 - protein, 421 aa, unidentified
  REGION 1..421: note = Human gut metagenome
MRGRPLMPCSPAKARHLLKAGKAVVRRRTPFTIQLRIATGETKQSVTLGVDAGAKHVGLSAATEKEEVFASEVELRQDITGLLAARLSLRRERRQRKTRYRAPRFLNRVRSKHKGWLAPSVENRIQAHLSRIDVICGLLPVTKIVIETASFDIQKIKHPDVEGTDYQQGDQLGFWNVREYVLFRDGHVCQHCHGHAKDKILNVHHLESRQTGGDAPNNLITLCETCHKACHAGKIKLKVKRGQSFREEAFIGIMRWTLLDRVRKAHPGLPVENTYGYLTKNTRITLGLPKAHCVDAYCIAGNLKAVRRGVYLHQRQVRKHNRQIHKCTVLSKTLKDGTKIGYRKLNQTPHLVKNFRLFDKVRCLGQTGFIFGRRSSGYFDVRRLDGVKISSCINYRKLTLLEKRGTCLTELRKEDGASSPV

SEQ ID NO: 7255 - protein, 477 aa, Blautia sp.; identical to SEQ ID NO: 2707

SEQ ID NO: 7256 - protein, 413 aa, unidentified
  REGION 1..413: note = Human gut metagenome
MTSYSFVLDANGKQLAPTKEPKAWFLIRKKRAALVSKYPMVIQLMKEIPENEICQDEIRCGIDDGGLHVGIALVQKCKTKNKVVFKGTMEQRNDVKHLMEVRRGYRRYHRYHKRYRQARFDNRKSSKREGRIAPSILQKRQATIRVIHWLNKWINITNYWLEDVSVDIRALTDGYQSYRWQYQRSNRLDENIRKAAILRDGGKCMECGKSNCRLEVHHIKPRRRNGSNTLDNLITLCESCHQKTEGQEELYMDRYFSLLKSSDNKNLNYAQHVMIGKRWLRKQLSGLGVLYLTSGGDTANKRIDWNIEKSHANDAVCITDLQPDTCDMKEWTMKPMRRQSKAKTDHVLGIHHRDLVEYTFKNGETHRGYVTALYPEQKAINFQSPTKHCKKVNARKCKLLWNYSKIYWFENAS

SEQ ID NO: 7257 - protein, 422 aa, unidentified
  REGION 1..422: note = Human gut metagenome
MQYVYVVGSNGKPLMPCSPAKARKLLKSKSAAVLQRTPFTIKLLHHAGGYKQPITLGVDAGSKHVGLSACTDTEELYKEELTPRNDVVKLLSARHECRRGRRHRKTRYRAPRFNNRVHSKHKGWLAPSVEVKIQEHITAIHRICRRLPITKIVVETAEFDTQRLKAMLEGKPLPVGIDYKRGEMYDEYNVRQYVLKRDNYTCQHCGARGSAEKGIKLHVHHLETRQTGGNAPNNLITLCKDCHTALHDRKITLKLDKKKRGKPLRDSAFMGIMRKTLLSRIRKEVAIPVVETQGYITKLLREENHIRKSHTNDARCIAGCPKALPCDTTYHAKAIRHHNRKIHKTNILKGGVRKLNQAPYKVFGFRIWDKVKYKGQECFITGRRSSGYFALKKLGGTTISNSANYKKIHFLEPANHYIIERS

SEQ ID NO: 7258 - protein, 406 aa, unidentified
  REGION 1..406: note = Human gut metagenome
MVYIQDIDGKPMMPTTRHGKVRRLLKDSKAVVVNTCPFTIKLMYKTSDYKQEIVLGVDAGTKHVGLSATTKSKELYSGEVILRNDIVELLSTRRESRRTRRNRLRYRKPRFNNRIKSKRTGWVAPSVRHRIDAHIRVIDNICSILPVSRVIVEVAQFDTQKIKNPDISGDEYQEGDQLGFWNVREYILARDGHKCQHCKGKSKDPILNVHHIESRKTGGDSPSNLITLCETCHKEYHKGNIDLKVRRGRSLRDAAVMGIMKWKLYEELKSRYPNVSMTFGYITKYNRIKYGIEKSHTSDAFVISRNFNAKRIERQYLKRLIRRHNRQIHKMKILKGGKKKNNQAPFEIFRFRLFDKVLYNNEILFVYGRRKSGNFNIRDFNGENPKDVSHKKLKLIRGKRHLIILK

SEQ ID NO: 7259 - protein, 426 aa, Moorena sp.
MVFVLDANKKPLSPCHEAVARKLLKQGKAAIFKKYPFTIILKKSAEDTKNKQEYRLKIDYGSKHTGLAILQNNNVIWLAQIDHRTDIKKKLDDRRMFRRNRRNRRTRYRKPRFLNRKRKEGWIPPSLESRVNNIKTWVNRLQKLIPLTHISYENVKFDTQLMQNPEISGIEYQQGTLQGYEIREYLLEKFGRKCCYCGKENIPLEIEHIIPKSRGGTNRIDNLCLACHECNQKKGNMTAEEFGYLDIQKQVKQTLKDSSVVNSTRWKVYNLLYNSGLEVECGTGALTKMNRIKLGLPKEHYFDACCVSQSTPDKLYFKTKNVLYIKAKGRGSHCRTNLDKYGFPRGYLARQKYFFGFQTGDMVKAEIPKGKYKGIWYGEVACRKSGSFDIKDKEGQRVVQGVNHKYFSVVQHFDGYSYRKEVAILI

SEQ ID NO: 7260 - protein, 413 aa, unidentified; identical to SEQ ID NO: 5965
  REGION 1..413: note = Human gut metagenome

SEQ ID NO: 7261 - protein, 416 aa, unidentified
  REGION 1..416: note = Human gut metagenome
MVYVLSKTGQPLMPTENHAKVRVLLKQQKAKVITNCPFTIQLLYNSADYTQPVSLGLDAGSKHIGVSATTETKVLYEADVTLRNDIVDLLSARREARRTRRNRKTRYRKPRFHNRTRKDGWLAPSVQQKVDTHLTVVRKVLKILPISSITVETASFDIQKIKDPGINGTDYQQGEQLGFWNVREYVLFRDGHECQCCHGRSKDPILNVHHIESRKTGGNAPNNLITLCETCHRGYHKGTVTLPKTIHRGMRFKDATFMGIMRWAFYKRLKELYTTNGIQVELTYGYITKNTRIEHGLSKEHFVDARCISGHPDAIPPKEVFYQKKVRCHNRQIHKYKILKSGIRKRNQAAYEVKGFRLYDTVLWKGKKCFIFGRRSTGRMDLRLIDGTHINASAGYKNLKLLRKRSNYLIEQRTSG

SEQ ID NO: 7262 - protein, 433 aa, unidentified; identical to SEQ ID NO: 6520
  REGION 1..433: note = freshwater bacterium LH6-2

SEQ ID NO: 7263 - protein, 443 aa, Lactobacillus sp.
IYVVDSNGTPLMPTSRLGMVRRWLKTGQAKWFGNSRNTIQFVRPVTTNTQELTLGVEAGFHLGLSVVGNNREYYVSESLRKSEKDRITSRRELRRTRRNRLRYRKARFNNRRRKDGWLAPSIQHRLDFTIKEIKRLYKFLPITNLVVEVTPFDNQKLLNPDIQGWQYQKGKMYGFKTIKDYLLARDNYRDALDGKQYPASQLRVHHLVQRKDGGSNQPDNLVLLSDINHNQANHNNVILAKLRENRQKTLDYRGAYFMSILATRLSNYFEHYTTTQGYLTANLRQKYEIEKSHLNDAFVIAGGTDTTLRTNNVYSRQKLRNNNRVLQKFYDAKYIDSRDGKQKAGKELSSGRTRRSQELNYDNLRQLRKEKVKKGRVSIRRGHYQLRPHDVVLNTRTNRIETVKGVQNSGTVIKFQTGKTCSIKSVVSLYHVNGILEKKMKNI

SEQ ID NO: 7264 - protein, 442 aa, unidentified; identical to SEQ ID NO: 2637
  REGION 1..442: note = Human gut metagenome

SEQ ID NO: 7265 - protein, 452 aa, unidentified; identical to SEQ ID NO: 4732
  REGION 1..452: note = Sediment metagenome

SEQ ID NO: 7266 - protein, 512 aa, unidentified; identical to SEQ ID NO: 5174
  REGION 1..512: note = Human gut metagenome

SEQ ID NO: 7267 - protein, 359 aa, unidentified
  REGION 1..359: note = Human gut metagenome
MSTVYVLNKDGKPLMPTTRCWHVRRLLKEQKARVVTSKPFTIQLLYETDDVAQPLYLGIDTGRTNIGVAVVRTDGTAVFTAHLETRNKEIPKLMQERKKARRARRTNGRRCRRQRRAKANGTISKKCVKQDTAQNGSVSKRAKKIGVIKRHLPGCEKEVLCIGIKNKEAKFSNRTRPEGWLTPTANQLLQTHINLVKKIQKFLPISDVVLEINKFAFMRLDNPNVQKWQYQQGPLYQNASLEEAVSEMQEHHCLFCKKPIAHYHHVVPQSENGSNTIGNIVGLCTKHHDLVHKIPRGKKACQKENRAQQKIWCFECVEPNHSGADERVEFSFPEAFLCDQWQKYIRLSCSARRKQRPLA

SEQ ID NO: 7268 - protein, 427 aa, Moorena sp.
MRVFVLDKNRKPLDPCHPAKARKLLKSGRAKVLRRYPFTIIIKDLEVENCSTHDHQLKIDPGAKTTGLAIVQGDRVIWGAELTHRGFQIKEALTSRRQLRRSRRNRKTRYRKPRFLNRTRPKGWLPPSLMSRVHNILTWVKKLIKFCPVTGISQELVRFDTQKMLNPEISGIEYQQGTLYGYELREYLLEKWNRTCAYCGANNTRLEIEHIKPKSKGGSDRVSNLAIACHNCNQAKGNLEIEEFLSSKPNILKRILSQAKKPLADAAAVNATRWKLHDELKLIGLPVEVGSGGLTKYNRCRQNLPKTHWLDAANVGKVETLYIEDYQPLLITAKGHGTRQICRTDKFGFPRLHCSPKKIHKGFQTGDIVRAVVTKGKKIGTYMGRIATRKTGSFDITTAKGRVSGISYKYCQAIHRKDGYSYQFYGG

SEQ ID NO: 7269 - protein, 428 aa, unidentified; identical to SEQ ID NO: 4606
  REGION 1..428: note = Human gut metagenome

SEQ ID NO: 7270 - protein, 431 aa, unidentified
  REGION 1..431: note = Human gut metagenome
MNRVFVLSKTGKTLMPCHPARARQLLHDKKAVIKRLYPFTIQLTHRSEEYIQPVELKFDPGSKQTGIGIVLHGKNRLSAIYGAVLTHRGNEIKNNLDSRRMIRRSRRNRKTRYRQVRFLNRVRSKHKGWLAPSVQSRVDNIVEWSKRFIRYVTVGFITVESVKFDMQKMENADVDGIEYQRGTLFDYEVKEYLLEKYNYSCVYCGAKNVPFEKEHVVPRSRGGSNRISNLVLSCRSCNEKKDNLPIEEFLKDNPALLKKIKAQLKSSLKDAAAVNITRKQIVKELENLNVPVLTGTGAETKYNRVSQGYKKEHYIDALCAGTTGTKVYIPSTLKPLLIKKERRNNRQMCLVDKYGFPRGKAKGSKIVHGFKTGDIVKAVVLKGKKKGTYKGKVAVRSSGSFNIKVKQGVVEGIGWKNCVMLYRFDGYSYAY

SEQ ID NO: 7271 - protein, 443 aa, Ktedonobacter sp.
MNQVFVLDTTKQPLNPVHPGYARLLLKQGKAAVYRRYPFTIRLSRRVEQPILSPLRIKVDPGSKTSGLALVNDASGDVVWAAELTHRGEQIKRDLDRRRAIRRKRRQRKTRYRKPRFTNRRKRRGTLPPSLESRVCNVLTWVCRLMKVCPVTNISQELVRFDTQALETPDIEGAQYQRGQLSGYEVREYVLLKWKHQCAYCDARDVPLELDHIDPRSRHGSNRVSNLTLACTPCNQRKSNQDVRQFLRDEPERLARILAQMKAPLRDAEAVNATRWMLNARLKTLGLPVECGSGGRTKCNRITRELPKTHWLDAVCVGRSTPESLIIKNIVPLQIRATGHGSRQMCRMDKYGFPRTGSKQHKRVQGFQTGDLVRAVVTSGTKQGTYVGKVAVRSRGTFNISTAHGVVTDIPHRFCVLVARSDGYSYQQGKEAAFPPYLSGSLK

SEQ ID NO: 7272 - protein, 419 aa, unidentified; identical to SEQ ID NO: 5677
  REGION 1..419: note = Human gut metagenome

SEQ ID NO: 7273 - protein, 342 aa, unidentified
  REGION 1..342: note = Human gut metagenome
THINLVKKIQKFLPISDVVLEVNKFAFMRLDNPDIQKWQYQQGPLYKKESLESAVSEMQEHHCLFCKKPIDHYHHVVPKSENGSNTIANIVGLCAEHHNLVHKDVAWQEKLAEEKTGLNKKYGALSVLNQIIPALTNKLSVLFPKHFFVTAGKSTHDYRAAHGVSKDHWLDAYCIACSVLPSNVCDSNINNHVPYELKQFRRHDRRVLHKANMSRVYTLNGKAVATNRHKAIKQTTDSLEEFRQNYPDDVYKLKVKEHHPAYRNLNRNYPGSVFLVGKQAHVMQGIASSKDGKTTKYNDTNATTITAGKCKFVAKNSGILFVQCKFRKALSDGTTKKLQYPV

SEQ ID NO: 7274 - protein, 420 aa, unidentified; identical to SEQ ID NO: 5988
  REGION 1..420: note = Human gut metagenome

SEQ ID NO: 7275 - protein, 429 aa, Parasutterella sp.
LRVLVWNKRGKPLMPCSPAKARLLLKEKKAIVVRRTPFTIQLTIATGESKQPVSLDVDAGYKHVGLSASTEKAELYASEVELRQDITDLLSARRALRESRRNRKTRYRAPRFDNRIRTKRKGWLAPSVENRINAHLSRIESVLRLLPVTKITVETASFDTQLLKNPDISGKEYQEGEQLGFWNIREYVLCRDRHVCQHCYGRSKDPVLNVHHLESRRTGGDSPGNLITLCETCHKALHRGEITLKAKRGQSFRAEAFMGIMRSEVPNRLKASHPELEVNNTYGYRTKHARIANDIAKSHCADAFCIAGNLGAERLCEFFFQKQTRRNNRQIHKLSILKGGIRKRNQAPFEVNGFRLFDKVACQGEEGFIFGRRSSGFFDVRKLDGTRISAGISCKKLHLLEKRRTYLTEIRKEEALPPLPEGRGLRAKM

SEQ ID NO: 7276 - protein, 413 aa, unidentified; identical to SEQ ID NO: 2636
  REGION 1..413: note = Human gut metagenome

SEQ ID NO: 7277 - protein, 414 aa, unidentified
  REGION 1..414: note = Human gut metagenome
MPCSPAKARLLLKEKKAIVVRRTPFTIQLTIATGESKQPVSLGVDAGYKHVGLSASTEKAELYASEVELRPDVSDLLSARRTLRQSRRNRKTRYRAPRFDNRIRTKRKGWLAPSVENRINAHLSRIGAILRLLPVTKITVETASFDTQLLKNPDISGKEYQEGEQLGFWNVREYVLFRDGHACQHCHGRSKDPVLNVHHLESRRTGGDSPGNLLTLCETCHKALHRREIKLKTKRGQSFRAEAFMGIMRWEVLNRLKASHPELEVHNTYGYRTKHTRIVNGIDKSHCADAFCIAGNLGAKRLGEFFFQKQTRRNNRQIHKLSILKHGLRKRNQAPFEVKGFRLFDKVVCQGEEGFIFGRRSSGSFDVRKLDGTRISAGISYKKLCLLEKRRTYLKEIRKEEALPPLPEGRSLRA

SEQ ID NO: 7278 - protein, 417 aa, unidentified; identical to SEQ ID NO: 5520
  REGION 1..417: note = Human gut metagenome

SEQ ID NO: 7279 - protein, 502 aa, unidentified; identical to SEQ ID NO: 2616
  REGION 1..502: note = Human gut metagenome

SEQ ID NO: 7280 - protein, 416 aa, unidentified
  REGION 1..416: note = Human gut metagenome
MVYILNKHNEPLMPCSERKARLLLKDGMAIVYRRDIFTIKLINGSYGYKQHITLGVDCGSKHIGVSATTDKQELFSANAELRNDVVKLLSDRRMLRRSRRFRKTRYRKPRFNNRIVKNGWIAPSIKQKIQSHFNLVGFLHKLLPISNIVIETASFDMQKINNPIISGSEYQQGEQLDFFNVREYVLFRDNHICQHCNGKSKDKVLNVHHIESRKTGGDSPNNLITLCETCHKAYHRGELELNVKRGKSFRDAAFMGIMRWKLYDELKLRYDNVSMTFGYITKYKRIKLGLDKEHYNDAYCICGNLAAKMLSTHHFIRFIPRHSRVLHMQKFSKGGVRRSASASYWLNGGKPSKYGIRFTRFDKVNFNGITCFISGSSKGFAVLRDINWNKVNCCKTTVTVNKLALISRVHGCMLFG

SEQ ID NO: 7281 - protein, 406 aa, unidentified
  REGION 1..406: note = Human gut metagenome
MVYVQDINGKPMMPTTRHGKVRRLLKDKKAVVVNLCPFTIKLMYVTSDYKQEIVLGVDAGTKHVGLSATMKSKELYSSEVILRNDIVDLLSTRRELRRTRRNRLRYRKPRFDNRIKSRRPGWVAPSVKYKVDAHIRVVENVCSILPISRIVIEVAQFDTQKIKNPNISGKEYQEGDQLGFWNVREYVLARDGHKCQYCKGKSKDHVLNVHHIESRKTGGNSPSNLITLCETCHKEYHKGNIDLKIKRGSSLRDAAVMEIMKWRLYEELRSKYDRVSMTFGYVTKYNRINHDIEKSHVSDAFVISKNFNAIRLGYYYKVRLVRRHNRQIHKQKIPKGGIKRLNQSPFEVFGFRLFDRVMFENNCYFIFARRKTGSFNIRDINGKNKRDITYKKLKLSRCKRFMIEKS

SEQ ID NO: 7282 - protein, 518 aa, unidentified
  REGION 1..518: note = Human gut metagenome
LANLKLIDELLEKTEYIYVLGTDGKPQMPTNRKVRVRSLFKSGLAKIVDTVPFTIRLLYENDAVLQPITIAEDPGRTNIGAAVLTQLGDLVFSAVVETRNKSIKKLMSDRKAYRQASRRGERKARQRLAKRHGSMIKAGMIMRKLPQYAADKFVTCKIIKNTEARFCNRKRMPDWLTPTVNHLVQTHINLIKKVEKYLPITDVAIEVNRFAFMQMENPDASGVDFQNGPLKGFDDVKAAICEQQHGKCLMCKNDIEHFHHIVPRSKGGSDTIQNQAGLCKKCHAKVHTDAEFQAKFKDKKEGLIKKYGALSALNQAIPFICKELLEIYSVEHVHFCTGKDTSLIRSSLGYEKTKDNQMHEVDAYCIGLAAIGADKAKRPDFNNVFKIKQFRRQDRQLVHYQKERTYYLDGKKIATNRNPRFEQKGDALSDWYKEQIKIYGQYEAEKMRSRLTVKKSKRSYNTTKRLMPGCVFYYDGQRHVMAGQSSYGRYLRAYNCGTKDFPASKCQVIQFNAGLVFV

SEQ ID NO: 7283 - protein, 420 aa, unidentified
  REGION 1..420: note = Human gut metagenome
MQYVYVLNKHGEPLMPCSPGKARLLLKQQKAHVVKRTPFTIKLLYGSTGYKQPITLGVDAGNKHVGLSASTEKREFYCEEFTPRNDVVDLLSTRKQSRHSRRNRKTRYRAPRFDNRVHSKHKGWLAPSVEVKIQEHITVIKRICRILPVALVRVETAEFDTQRLKAMLEGKPLPVGTDYQLGEMYDKYNVRQYVLKRDHYTCQCCGAHTTTKKTVKLHVHHLESRKVGGNAPSNLITLCTTCHDALHKGKVSLDGKERGKPLRDAAFMGIMRKALMARLREELPIPVQGTYGYITKMRREQNDIKKSHVNDARCISKHPLAEPCSVCYRTKAIRHHNRQTHKANFSKGGIRKRSQMPYVVEGYRLWDKVLYKGQACFVSGRRASGSFTLKKLDGTRISKGVTFKKLRLLEPATNYLIERM

SEQ ID NO: 7284 - protein, 470 aa, unidentified
  REGION 1..470: note = Human gut metagenome
MSVFVVGLNGCRLMPTSERKARLLLKQGKAFVEQKVPFTIRLNYKTGSTTQLGYLGIDTGSQHIGVSVVREDGTVLHKEEIGLRDSMSKRKLLEAKASLRRGRRYRKTRYRHPKWRPKTKRVYCEVPDRKGRHWQKKKITFTSKRPKGWLPPSLQSKTDHHIRWIKKLQDLLPEGYRLSIELGRFDPARMKNPEIHGDLYQKGPQYDYENVRAYVLDRDRYTCQICKKKGGKLHVHHILYRSHGATDDPQYMVTVCSDCHSAQNHLPGGILYQWMQEQKRFSRGLRDATFMNILRKRLIRAFPEAVFTYGNVTKVDREKLKLPKSHGNDATAIALVKTGITAVKDKESVICIQQVRRKKRSLHEETPRKGRKEPNRTAARNNKNTKAVTVTKRQNKKKVSMTGCLFDRVELNGKKGWISGFTGKSCYVKDADDQYLSTSPKYKQVSLSKLRILHHCGNWIIGAKKTLGNG

SEQ ID NO: 7285 - protein, 319 aa, unidentified; identical to SEQ ID NO: 3180
  REGION 1..319: note = metagenome

SEQ ID NO: 7286 - protein, 426 aa, unidentified
  REGION 1..426: note = Human metagenome
MVFVLNKSKKPLDMISNAEARILLRKKLAVIHKVYPFTIRLRDNSCVSKDKSYTVKLDPGSKHTGVAITDDKNSVVMLAEIEHRGHLIKKDLDSRRAVRKSRRQRKTRYREARFLNRTKPKGWLAPSVKSRADNVINFIKKYKKLLNIDKVIIENVSFDTAQMTAGTNLVGTTYQQGNLYQQKLRNFIFNRSNNKCVYCGAKATEIDHIVARANGGTNSTYNLAASCRTCNQMKSNLTLKDFGKLVGKDFSHLKPRKLPKNAAIVQSSRSYMVKEITKLVSDTTTYDAWMTKYNRDSLGLPKEHYYDALSVGEVPTKFNFLTDKILQISAKGRGSRQMCLMDKYGFPRTSAKASKMVNGFQTGDIVKAVVTKGSKQGEYLGRVAVRSRGYFNIQTKTQVVQGIGFEYCHIVQRSDGYLYSYKERKF

SEQ ID NO: 7287 - protein, 464 aa, unidentified; identical to SEQ ID NO: 6627
  REGION 1..464: note = Human gut metagenome

SEQ ID NO: 7288 - protein, 431 aa, unidentified
  REGION 1..431: note = Human gut metagenome
MPNKVYVINKHGRPLMPCSPAKARHLLDAGKAKVKKRTPFTIQLLFGSTGYTQEVILGVDAGSKTIGLSASAETEELLSAEVKPRNDVVDLLSTRREFRRARRNRKTRYRKPRFDNRVRSKHKGWLAPSVEVKIQEHITSIKRVCRILPVSKVVIETAEFDLQLLKAIADGKPVPQGEDYQKGEMYGHYNVRQYVLWRDDYTCQCCGAHATKKKEVRLHVHHLESRKVGGDAPDNQVTLCESCHEKLHKGLITAKDFKKRKRRSTRDATFMGIMRKTLMQRLCSELPIPVVKTRGYITKATREKLLVLPKSHTNDALAIAQGKRGFNVGYLPEIAQIDKIYTIRPVRHHNRQLHKATILKGGIRKSNQTEKYVFGYRLFDKVQFNGQDCFIWGRRTTGIFTIKTINGKMIKDGISFKKLKPVEKSTSYLIA

SEQ ID NO: 7289 - protein, 465 aa, unidentified; identical to SEQ ID NO: 4016
  REGION 1..465: note = Synthetic metagenome

SEQ ID NO: 7290 - protein, 428 aa, Enterococcus sp.; identical to SEQ ID NO: 4335

SEQ ID NO: 7291 - protein, 458 aa, Lactobacillus sp.; identical to SEQ ID NO: 5912

SEQ ID NO: 7292 - protein, 502 aa, unidentified
  REGION 1..502: note = Human gut metagenome
MSIIYVQDRHGKPLAPTTRGGHVRRLLDSKQARVVCGNPFTIRLMYGVDPCTQGFILGIDPGRTNIGVTVAAADGTCVFSAKAETNNKDVPKRMKERKAHRQASRQGERKRRQRRARKNGTCFGERKRILPGCKEPITNHYITNTEARFMNRARTKGWLTPTANQLLQSTISLVRKVCKFLPVTDVVLELNEFAFMAMDDPGIQRWEYQKGPLYGYGSVEAAVYTQQDGHCIFCEQAIAHCHHVIPASKGGSDTLENRAGLCGGHHDLVHKEQSWTDKLAELKAGMNKRYAALSVVNQIIPRLADELGKMFPGHAFATNGWSTKQFRDAHGIPKDHNTDADCIACSILENPTIKLPEKVYELRKFRRHDRAQISRMEDLNYYLPGADPKTGKPKKVLAAKNRHKRTEQKTDSLEEFRAAHPNDVGRLMVARGGPKHKDPNRVLPGAIFQVETSSGNVEQLVLQGSHGRDKNGQPLYMEFVGQGNFRPNRCKYVARGRGWQFV

SEQ ID NO: 7293 - protein, 412 aa, unidentified; identical to SEQ ID NO: 3155
  REGION 1..412: note = Human gut metagenome

SEQ ID NO: 7294 - protein, 430 aa, unidentified; identical to SEQ ID NO: 6024
  REGION 1..430: note = Spirochaetales bacterium UBA6485

SEQ ID NO: 7295 - protein, 414 aa, unidentified; identical to SEQ ID NO: 4252
  REGION 1..414: note = Human gut metagenome

SEQ ID NO: 7296 - protein, 429 aa, Parasutterella sp.; identical to SEQ ID NO: 6752

SEQ ID NO: 7297 - protein, 522 aa, unidentified
  REGION 1..522: note = Human gut metagenome
MEQEFNDPVHQAPGHWRGQITSKDVPDCHVPAERKQMKVYVIGWNGLGLAPTTPRKARLLLSSGRAEVAFRQPFTIRLNYKTGCAHPDEMSLGIDTGSQHIGVSVISLAEESVISKEEYALRSTMEKRSLLETRKALRRGRRFRNIRYRHPKFRPGTKRTYLDVPIKRNGHLTHWKKESNDFDSSRPEGWLPPSMQSKLDHHVRIISRYRNALPPDTTTRIEVGRFDVQHMENPQIRGEMYQHGELYESENLKAYIFSRDHYTCQCCQKKAGTRRDDGTTVRLIVHHIDFRSNGASDNPKRLITVCDKCHTGAAHKPGGVLYDWMLKGKTVARGYRDTTVMNILRRRLWKAFPDAEFTYGNITAADRKTLGLGKAHCNDAAAIAAHGLEKIQDVPDTTYYCQIRKQKRSLHEASPRKGRKEPNCNAKRNAKNTCRAGKLYLNDKIRIAGQNGWICGFSGTSSVYIKNCEGEYIRMPGKTHKLIPAKRLTARTHCNNWAVYNTKTILYEGREEAAETMKVSSQ

SEQ ID NO: 7298 - protein, 424 aa, unidentified
  REGION 1..424: note = Human gut metagenome
MRIFVMNMRGDPLMPCTQKKARILLKEGKAVIYKYDPFTIQLTYATGETKQDCHIGIDTGSKHIGMAITSENKVLFKGEIELRQDVKSNIDTKHIYRRSRRNRKTRYRQPRFLNRKRSDKWLPPSLQNRVDHTFHWIDTFCSLVSDPILHIEVGKFDTAKMINPEINGVDYQHGQTYGFFEERYFVFARDNYTCQCCGKSKDKILQTHHIIYRSNGGTDRVDNLITVCTDCHTSKNHQKGGILYKWQEQHKKVKQYKEPPFMNAIRKRIFARYPNAHTTYGSETTPKRKAMKLDKTHYNDAIVISGINEIKENPEEWLLIKQFRKKKRSLHEATARKGRKKPNRNQTRNSKNTPYYKGFYLNDKVSVFGKSGYITGFTSNAAYIKDENNDYITLPNKTYKQVSINKMKLECHNNNWQYIIKNAV

SEQ ID NO: 7299 - protein, 396 aa, unidentified
  REGION 1..396: note = Human gut metagenome
VVRRTPFTIQLTIATGESKQPVSLGVDAGYKHVGLSASTEKAELYASEVELRKNITDLLSARRALRQSRRNRKTRYRAPRFDNRIRTKRKGWLAPSVENRINAHLSRIEAVLRLLPITKITVETASFDMQRLKNPDISGKEYQEGEQLGFWNVREYVLFRDGHVCRHCHGRSKDPVLNVHHLESRRTGSDSPDNLITLCETCHKALHRGEITLKAKRGQSFRAQAFMGIMRREVLNRLKASYPELKVHETYGYLTKHARIANGIVKSHGADAFCIAGNLGAERLGEFFFQKQTRRNNRQIHKLSILKGGIRKRNQAPFEAKGFRLFDKVACQGEEGFIFGRRSSGSFDVRKLDGTRISAGISCKKLRLLEKRRTYLTEIRKEEALPPLPEGRGLRA

SEQ ID NO: 7300 - protein, 442 aa, unidentified
  REGION 1..442: note = Human gut metagenome
MGEGLQPTERSRRQNLRVFVLNKRGQPLMPCSPAKARLLLKEKKAVVRHRTPFTIQLTQATGETVQPVTLGVDAGSKFIGLSASTEKAEHYASEAELRTEVVDLLSSRREMRRARRNRKTRYRAPRFDNRIHSKNKGWLAPSVENKINTHLSCVDNVRKCLPVTKIVVETAAFDIQKIKNPDIEGTDYQQGDQLGFWNVREYVLCRDGHQCCHCHGKSKDPILNVHHLESRKTGGNAPNNLITLCETCHKAYHDGKITLKQKRGQVFRDAAFMGIMRWTFFNRLKAQCPEIEVRNTYGYLTKNTRIRHGLEKSHHTDAFCIAGNLEAKRLGVYFFQKQTRKHNRQIHKMSILKGGVRKLQQAPYEVKGFRLFDKVRYDGREAFIFGRRSSGYFDIRLLTGEKVSAGVSYKKLVLLEKRKTFLTQLIKENAIPPATEVAGSLA

SEQ ID NO: 7301 - protein, 394 aa, unidentified
  REGION 1..394: note = Human gut metagenome
MPFTIRLLYGSTKYIQPIILGVDAGSKTIGLSASTAKEEVFAAEVMPRNDVVENLSTRREFRRARRNRTTRYRKPRSDNRVRSNHERWLAPSVKVKIQEHITSIKRVCTILPISKVVIETAEFDLQLLKAIQEGKPIPEGEDYQKGEMYGSYNVCQYVLWRDNYTCICCGVRGTPKNPVRLHVHHFESRKYGGNAPDNHGTLCDDCHKKFHLGIITDVKLKTRRRQSTRDAAFMGIMRKTLMWRLRTELFIPVAETKGYITKATREKLLVLPKSHTRDALAIAQGRRGFGIKEYAYVEPANHIYTVRPVRHHNRQLQKASILKGGIRKRNQASKYVFGFRLYDKVLYQGKACFVWGRRTSGTFLLRTIDGIKVKDGVSYRNLTLLERSSNYLIA

SEQ ID NO: 7302 - protein, 413 aa, unidentified
  REGION 1..413: note = Human gut metagenome
MTSYSFVLDANGKQLAPTKEPKAWFLIRKKRAALVSKYPMVIQLKKKIQENEICKDEIRCGIDDGGLHVGIALVQKCKSKNKVVFKGTIEQRNDVKHLMEVRRNYRRYHRYHKRYRQARFDNRKSSKREGRIAPSILQKRQATIRVIHWLNKWINITNYWLEDVSIDIRVLTDGYKSYSWQYQKSNRLDENIRKATILRDGGKCMECGKSNCRLEVHHIKPRRRNGSNTLDNLITLCESCHQKTEGQEELYMDRYFSLLKSSDNKNLNYAQHVMIGKMWLRKQLSGLGVLYLTSGGDTANKRIDWNIEKSHANDAVCITDLQPDTCDMKEWTMKPMRRQSKAKTDHVLGIHHRDLVEYTFKNGETHRGYVTALYPEQKAINFQSPTKHCKKVNARKCKLLWNYSKIYWFENAS

SEQ ID NO: 7303 - protein, 475 aa, Blautia sp.; identical to SEQ ID NO: 4128

SEQ ID NO: 7304 - protein, 424 aa, unidentified; identical to SEQ ID NO: 3434
  REGION 1..424: note = Human gut metagenome

SEQ ID NO: 7305 - protein, 424 aa, Ktedonobacter sp.
MVVMNVVYVLSPDRVPLMPCSCAIARLLLKQGKAKVVRRTPFTIKMYTQPVDTHTQPLTLGIDTGSAVIGSAVSDECGNILYVSEGEVRNDIAQTMKNRATSRRNRRYRKTRYRPARWLNRRNSLKTGRFSPTMTSKTEAHLREIRFVQSLLPIQSIVLETGTFNPHALKHPAVLQNKWMYQKGINYGLANTKAYVLTRDGYVCQRCKGQSKDRRLEVHHIVFRSQQGSDEEANLLTLCKTCHEGLHAGTVTLKQKGKRKGNLLHATQMNSIRIQLLSRVEAIETWGFVTKEHRLLAGLPKEHIFDAAMIATRGNIPVFQTTEVLLKKCISDGDYQQTKGKHSQQRIPTGKIAGFRKFDKVRYLGVEYFIKGRMSTGYAILMDLSGNKLALKPTPKFDNMKRVSARSSWIINQKAMPSFSSSPT

SEQ ID NO: 7306 - protein, 369 aa, unidentified
  REGION 1..369: note = Human gut metagenome
VDTGSGTIGTAVSNDNSDIVYMSEVIVRNDIMDKMTQRRKYRKNRRGRKTRYRKARWLNRANSTKTDRFSPTMQSKLHSHVKEIEYIKSILPITTMVFETGQFDTHLMKNPNLANPKVKHWGYQKGVNYGFENTKAMVLNRDNYTCQCCKGKHKDSKLEVHHIIFRSQGGSDEESNLITLCHTCHKDLHSGTINFKLKGKLKGNLKYATQMNSIRKQLFRIYPDAIETFGYVTKANRLVLGIDKEHYYDACTIATQGNIFTVKSNLYKKKCVSDGDFQKTKGIRSEQPIVTDKICGFRKFDKVRYFGNDYFIKDRMSTGYAILMDIDGNKADFSAMPKGYKTPKMVKLKRIEARTTWMITTVEVTPNIA

SEQ ID NO: 7307 - protein, 465 aa, unidentified
  REGION 1..465: note = Human gut metagenome
MSTCVCVLSNSGERLMPTFRLGKVRRLLKDGKAKIVKHHPFTIQLLYDSKTNTQPIEICEDVGYNYIGISVKSQSHEYVSAQYDTLQDEKACHDSCRKLRRTRRNRLRYRKPRFDNRKRGEGWLVPSLRHKKELNVNVVKMYCAVMPITHATVEVGSFDTMLLQAIQKGESKPEGVDYQKGPRYNLATLREAVFYRDNYVCKVCGRKATEGAILHMHHMFYWKGRHGNSLDELLTVCEKCHTPANHQKSGKLYGFGENVKFADLSGAAFMNTVRWQIVNELYAAFGKDFVTVTYGAMTKEKRIALHLEKSHNNDAYAMGEFHPNCRCTFEHYEKVRRNNRILEKFYDSRYIDIRTGEIATGKELFNGRINRNHKKDSENLHKYRGKRLYKGHRALVRKKVNFNPGDLVSLNGEVLVVHGTHTNKKGAVNVKFKTPAKNGRKSANLKKLKIVKAAGSIHPAWEKVS

SEQ ID NO: 7308 - protein, 431 aa, unidentified; identical to SEQ ID NO: 4463
  REGION 1..431: note = Human gut metagenome

SEQ ID NO: 7309 - protein, 424 aa, Microcoleus sp.
MSNFIFVCDTLMRPLSPCKPGVGRSLLKAGKASVFRRFPFTIILNKEVDATPEPLELKLDPGSKTTGIAIQQGDKIIFGAELQHRGQQIKQALLSRRQLRRGRRNRQTRYRQARFLNRTRPDGWLAPSLQHRVETTLTWVRKLMRFAPITSIIQELVRFDLQLIQNLEISGVLYQQGELQGYEVREYLLTKWNRQCAYCSVENVPFEIEHIQPKSRGGSDRVSNLTLACHGCNQKKGNQDVRAFLATQPDLLNRILKQAKLPLKDATAVNSTRWALFNALKETGLPVTTGTGGQTKFNRNRLGLPKSHWLDAACVGKFEALAVLTSKPLLIAASGHGTRQMCGTNKYGFPNRHKSRVQIHKGFQTGDIVSATVTAGKKVGSYIGRVLCRASGSFDIVTKSGRVAGISHKYCSPIHKKDGYSYAF

SEQ ID NO: 7310 - protein, 487 aa, unidentified
  REGION 1..487: note = Human gut metagenome
VQDVFAGIDSGRENIGSGASNEDGDCLYLGELKTSNKSIKLKMTERAGFRKERRRHDRQNKQRKARKDHTEIQNGKDDICRATISCKSVQISYPTAEESVTHKIIRGKEGKFANRHRDGDWITPSARQLVQMHMNDLKSICKILPISHVTLERVAFDFQKLENENIKAWEYGKGKLYGYDSPEEYIHDVQDGKCLVCGKPHIDYLHHIIPRSKGGSDKVSNLAGLCYDCHYGPMGVHNCRETQDRLPELKNEANKQYKVNLLNSVMPVLIEEMDKFCKANSIIFSICEGHDTAKVRDMYDLQKDHCLDGFAISLVGRNVKSVDVMPDRIYQKQRYKKKSKNIIQKRNCREYYDGKKLVAVNRHKGTDQKADSLEEYMNTYAETHTTDECKKHFDSLVVKPARRTYTFHKEWRICPFHIGDKVRYEKKNKIKGNTKVDTFICEGIRFVKDENKAEVKHNKTKSKKMKFCRVLESGCTPYVDYRKLALM

SEQ ID NO: 7311 - protein, 423 aa, Moorena sp.
MRVFVLNKNRQPLDPCKPARARILLSTGKAKVYRRYPFTIILTEEIKDPVTHEHQLKIDPVAKTSGLAIVQGTRLIWGAELTHRGFQIRVALNYRRQLRRSRRNRKTRYRKPRFLNRTRPKGWLAPSLISRVQNILTWVKKLIRFCPVTGISQELVRFDTQKLQNPEISGIEYQQGTLYGYELREYLLEKWNRQCVYCGVTGTQLEIEHIKPKSKGGSNRVSNLAIACRPCNQAKSNQDIELFLSKKPSLLKRILCQAKRPLADAASVNTTRWKLYHVLKSIGLPVEVGSGGLTKFNRCRQSLPKTHWLDAANVGKVETLIIEVTLPLLITAKGHGTRQLCRTNKYGFPTRHCSRIKFHKGFQTGDIVRAVVTKGKKIGTYVGRVATRKSGSFNVSTKSGLVQGISHKYCQFIHRKDGYAYTN

SEQ ID NO: 7312 - protein, 427 aa, Anabaena sp.; identical to SEQ ID NO: 2799

SEQ ID NO: 7313 - protein, 421 aa, unidentified
  REGION 1..421: note = Bioreactor metagenome
MLVFVKNKHGENLMPCKPSKARKLLKQKKAKIISYKPFTIQLLYGSSGYKQPVTLGVDLGSKHIGIAVTSEDKVLIKGEIELRDDIKENLDIRRQYRRSRRYRKTRYRKPRFNNRKRPEDWLPPSIQSRIDNTFRWIDNFINLLPSPKLCIEVGKFDVQKMMNPDIEGVEYQQGETYGYYDVRYYVFARDNYTCQVCKKKDKILQTHHIVYKSKGGTDRPSNLITVCTDCHTHKNHQEGGIFYKWMMEKKKMPSYKETPLMNIMRRRVFEKYPEANIVYGSYTTIRRKELGLEKTHYNDAIAITGIESIKHNPDNYFKIKQFRKKKRSLHEAIPRKGRKEPNRTQKRNSKNTKYRNGFYLNDKVKVFGKVGFITGFTNGGAYIQDIEGNYITIPNKSYKQVSFKYIEFINHNNNWQFISHL

SEQ ID NO: 7314 - protein, 411 aa, unidentified
  REGION 1..411: note = Human gut metagenome
MENRIEYCFVVDKNNRPLAPTKVNKGWYLIRKGRAKLKSKYPMVIQLEKEVESDEDGESHMVCGIDDGSVHVGLAIVQKCLTKNKVVFKGTIEQRQDVKHLMDVRRGYRRYHRYHKRYRQAKFNNRSSSKRTGRLAPSIKQKKDAVLRVLYQLNRWIDIQEYYLEDVCIDIRAMTDDYKPYRRQYQKSNRLDENLRKATILRDGCRCQECGKSNCMLEVHHIRARRYGGADTIGNLITLCEKCHDKTKGREKDFEERYFNMIKSKPKRFDYAMHVMQGKAYLREKISGLGILHLTNGGETANKRIEWNIAKTHSNDAICIADGIPDTCDIKEWIIKPMRRKSRAKTDNVLGIKHRDLVSYTYKNGETHTGYVTALYPEQLALNFQSKTKHCKKVNARKCRLLWKFNKIYWL

SEQ ID NO: 7315 - protein, 406 aa, unidentified; identical to SEQ ID NO: 6079
  REGION 1..406: note = Human gut metagenome

SEQ ID NO: 7316 - protein, 490 aa, unidentified; identical to SEQ ID NO: 6170
  REGION 1..490: note = Human gut metagenome

SEQ ID NO: 7317 - protein, 516 aa, Desulfotignum sp.
LHRELKTNGGMLPQSRPLEAWVADNLQGCGRNGSGHTAAVQQSRGESSTDARVEPSPAFAVNGVSRVFVLDKKGKPLMPCHPARARKFLAQGRARVHQMFPFTIRLVDRIREDSDVQPVNVKLDPGAKTTGMAVVRQDGGHIQILHLSELTHRGAAIRKKLDQRSNYRRRRRTANLWYRKKRFDNRTQPKGWLPPSLKSRVDNTLSWVKKYQRFCPFTGIVLERVRFDTQKLQNPDISGIEYQQGTLFGYEVKEYLLEKYKRTCAYCNGLSKDPFLEIEHFIPRNPSKGDKGSNRISNLAIACKTCNQESKKNLQPADWISLLSRSRKKIDQVRVKNATRFLEGRRPSLASTAAVNATRNAIFFELRDLGLPVECSTGGRTKYNRSRLDIPKTHCLDAACTGHVESVSGWKQNVFLIKAMGRGSYQRTRVDKYGFPRGTLMAQKTVKGFATGDMVKAIVPTGKKKGTYIGRVAVRKSGSFNIQTNTETVQGISWKYCKIISRQNGYNFASQVSSPT

SEQ ID NO: 7318 - protein, 438 aa, unidentified
  REGION 1..438: note = Fermentation metagenome
MVYVLSKSGSPLMPTKRYGKVRRILKDGKAKVVKAKPFTIQLTYETTQYTQPITLGVDAGYQTIGISSITEDEELISGECQLLQGQVERNKERRMYRRQRRNKLRHRKPRFNNRKKPKGWLAPSIQHKLDSHIRLINQIKTILPITQIIIEVANFDIQAIKNPSISGKDYQQGEQLGYWNLREYILHRDNHQCQYCKSQGILEVHHIGYWKNDRTDRPGNLITLCISCHTPENHKGFLYGWQPKLKPFKAETFMSTVRWKLVNILNCTHTYGYLTKSKRIDLGLEKTHANDAFCIAGGTTQTRSTLFTIQQVRRNNRSLEKFYDAKYIDIRTSKKASGQELNNGRHTRNTNLNTKNLRQYRGKKLSKGRRQIRKSRYPFQPGDVVLCEGRKYTVKGTQNLGAYVKLTDLPKPVRTDRLKHLHFGKGFSWHSSPTYAIA

SEQ ID NO: 7319 - protein, 544 aa, unidentified; identical to SEQ ID NO: 3572
  REGION 1..544: note = Human gut metagenome

SEQ ID NO: 7320 - protein, 313 aa, unidentified
  REGION 1..313: note = Human gut metagenome
LRVFVLNKRGKPLMPCSPAKARLLLKEKKAIVVRRTPFTIQLTIATGEAKQPVSLGVDAGYKHVGLSASTEKAELYASEVELRQDITDLLSARRALRQSRRNRKTRYRAPRFDNRIRTKRKGWLAPSVENRIDAHLSRIEAVLRLLPVTKITVETASFDLQLLKNPDISGKEYQEGEQLGFWNIREYVLCRDGHVCQHCYGRSKDPVLNVHHLESRRTGGDSPGNLITLCETCHKALHRGEITLKAKRGQSFRAEAFMGIMRWEVLNRLKASHPELEVNNTYGYRTKHARISNGIAKSHCADAFCIAGNLGAK

SEQ ID NO: 7321 - protein, 393 aa, Exiguobacterium sp.
MFVFVLNHHGEPLMPCKPSKARKLLHNSKAKLVKQTPFTIQLLFGSSGYKQEISLGVDAGTKHIGFSATTSTKVLLEGEVQLRTDIQDLLATRRAMRSARRSRKTRYRQARFLNRKKPKGWLAPSVQHKVDAHLKLIRMIHRLLPIKHLTIEVAQFDIQKIKSPDISGDLYQKGDQLGFWNVREYVFFRDKHICQHCKGKSKDKILNVHHIESRRTGGDAPDNLLTLCETCHKKIHKEKLEHLFQRKSRSFRDASQMTVMRWFIYNAVKETYPYVKLTYGFLTKNIRIQNGLEKRHAVDARCISGNPLPEEPKVSYLFRQVRANNRQLHKMTIGKKGKRKANKAERFVHGYQLFDKVHYEGQTCFVFGRRKTGYFDLRTLQGVRVHKSASIRN

SEQ ID NO: 7322 - protein, 472 aa, unidentified; identical to SEQ ID NO: 4432
  REGION 1..472: note = Human gut metagenome

SEQ ID NO: 7323 - protein, 557 aa, Moorena sp.; identical to SEQ ID NO: 7161

SEQ ID NO: 7324 - protein, 408 aa, unidentified; identical to SEQ ID NO: 5694
  REGION 1..408: note = Human gut metagenome

SEQ ID NO: 7325 - protein, 423 aa, unidentified
  REGION 1..423: note = Human gut metagenome
MQVVYVLNKDGLPLMPMHKLGKVRHFLKDGKAKVVKRSPFTIQLNYDCGNHTQSITLGVDAGSKHIGLSASTKKQELYCSDVELRDDVVELLSTRRENRRTRRNHLRYRQPRFDNRKKEDSWLAPSIRQKIDSHLKVIEEVHKILPITNIIVEVASFDIQKIKNPNINGIEYQQGEQLDFWNIREYVLFRDNHTCQCCKGKSKDKVLNVHHIESRKTGGNAPNNLITLCETCHNGYHKGTIQLPKTIKRGMSFKDATFMGIMRWAFYNKVKEVYEPKGISVSLTFGYITKNNRIKYGLAKEHYNDAYCITQNFKSKPLDTIIYQKKVRCHNRQIHKANFLKSGIKKLNQAPYIVKDFRLFDKVRYHGQDCFVFGRRISGYFDIRLLDGTKIHSSVNYKKLELLNTRKSYLQEERSRQFLPLIN

SEQ ID NO: 7326 - protein, 512 aa, unidentified
  REGION 1..512: note = Human gut metagenome
MSTVYVLNKDGKPLMPTTRCGHVRRLLKEQKARVVTSKPFTIQLLYETNDVVQPLYLGIDPGRTNIGVAAVKTDGTAVFTAHLETRNKEIPKLMQGRKKARRARRTNGRRCRRQRRAKANGTISKKCVKQTTAQNGSVSKRAKEIGVIKRHLPGCEKELLCIGIKNKEAKFSNRTRPEGWLTPTANQLLQTHINLVKKIQKFLPISDVVLEINKFAFMQLDNPNIQKWQYQQGPLYQKASLEEAVSEMQEHHCLFCKKPIAHYHHVVPQSENGSNTIGNILGLCTKHHDLVHKDATWQKKLAKKKTGLNKKYGALSVLNQIIPALTKELSSLFPKHFFATNGKSTYDYRAAHGVSKDHWLDAYCIACSVLANDVCDSNINSHVPYELKQFRRHDRRALHKENMSRVYTLNGKSVATNRHKAIKQTTDSLEEFRQRQPNDVYKLKVKEHHPEYRNPKRNFPGCVFLVGKHTHVVQGTSGSHNSKADGYYDTNGNSYSSGKCKFVAKNKGIVFA

SEQ ID NO: 7327 - protein, 434 aa, Solobacterium sp.; identical to SEQ ID NO: 6847

SEQ ID NO: 7328 - protein, 420 aa, unidentified
  REGION 1..420: note = Human gut metagenome
MQYVYVLNKHGEPLMPCSPRKARLLLKQKKACVIKRTPFTIKLLYGSTGYKQPVTLGVDAGSKHIGISATTEKHELYREEATPRNDVVDLLSARRAFRRSRRNRKTRYRAPRFDNRVHSKHKGWLAPSVEVKIQEHITLVEHVCRILPVTLVRVETAEFDTQRLKAMLEGKPLPVGTDYQLGEMYDEYNVRQYVLKRDNYTCQCCGAHSTKTKGVKLHVHHIETRRTGGNAPNNLITLCTACHKALHAGKVTLDGKKRGKPLKDAAFMGIMRKTLMERLRKELKIPVQGTYGYITKCLREKNGIHKSHTNDARCISKNPLAIPCDTCYYTKAVRHHNRQLHKATILKGGIRKANQAPYIVKGYRLWDKVAYNGTECFITGRRTSGYFALKELDGTVVSNSISYKKLRLLEAATNYITERK

SEQ ID NO: 7329 - protein, 424 aa, Moorena sp.
MSNYVFVIDPDKQPCNPVHPAKARLLLNQKKAAVFRRYPFTIILNEKQKDVEANPLTLKIDLGSQTTGIAILNGENVVWGAELAHRGQQIKSDLESRRAIRRNRRNRKTRYRPARFLNRKREKGWLAPSLQHRVDTTLTWIKKLIRYCPVTNIVQELVRFDLQKMENPEISGIEYQQGELQGYEVREYLLEKWNRQCAYCGAKNIPLQIEHIHPKSKGGTNRISNLCITCEPCNLAKGTQDIKDFLSGKPSILKRVLSQAKSPLKDAAAVNSTRWALLNALKSIGLPISTGSGGQTKFNRTRLNLPKTHWIDAACVGTIESLRIITKQPLLIKATGHGCRQMCRTDKFGFPSRYVPRLKFIKGFQTGDIVKAIVTSGKKIGTYVGRVAVRCSGSFNISTPQLIQGIGHKYCRAIHRKDGYSYSF

SEQ ID NO: 7330 - protein, 439 aa, unidentified
  REGION 1..439: note = Human metagenome
MVFVLDKSKKPLNMISHAQARILLKNRLAVVHKIYPFTIRLRDNSCVDRNKTYIVKIDPGSRTTGVAITDNNDAVVMLTEIEHRGHIVKKKLSSRKAVRRNRRNRKTRYRESRFLNRTRPEGWLAPSVKSRADNVINFIKKYKKLLNIDKVMIENVSFDTAQMTSNTKLWGNNYQKGNLYQQKLRSFIFSRSNSKCVYCGAKATEIDHVVPRSKGGTNSVCNLVASCKSCNKKKSNKTLKEFGKIMNKNFSHLEPKKLPKDAAIVQSARNYMVREITKLVSDTTLHDAWLTKYNRDQLGLPKEHYYDALSVGNIQDYKFLTDKVLQISAKGRGSRQMCRMDSHGFPRTSAKASKSVKGFQTGDMVKAIVPKGLKRGEYLGKVAVRSNGYFNIQTKTQVVQGIGYEYCHIIQRSDGYLYDYKECDFLSDIHNRVSIAKLL

SEQ ID NO: 7331 - protein, 442 aa, unidentified; identical to SEQ ID NO: 2903
  REGION 1..442: note = Human gut metagenome

SEQ ID NO: 7332 - protein, 516 aa, unidentified
  REGION 1..516: note = Human gut metagenome
MATVYVLNKDSKPLMPTTRCGHVRHLLKEKKARVVRTNPFTIKLLYETNDVVQPLYLGIDPGRTNIGVAVVKWDGAAVFTAHLETRNKEIPKLMAKRKEYRQGRRHYRRCKRQRRAASHGTLSKKCKKQSTAQGCNISKRAQKIGVFERNLPGCEKPVLCIGIKNKEARFNNRARPAGWLTPTANHLLLTHINLVKKIGKFLPINDVVLEINKFAFMALDNPNIQKWQYQQGPLYQKDSLESAVSEQQDHHCLFCKKTIEHYHHVIPRSENGSNTITNIVGLCTKHHDLVHKDDKLKEELAKKKQGLNKKYGALSVLNQIIPALTKELGSLFQGHFYVKTGKSTYDYREAHGVSKDHWLDAYCIVCSVLPGGCFDNTINSRVPYELKQFRRHDRQVCQQQNAKKKYYLDEKLVATNRHKAIKQETDSLEEYRNNGGVTDKLVVKEHKPTNKRLNRILPGALMTANGKLNIMVASRGLHNGIPDYYVFADDSKARPTKCTLINKNNGIVFVSNSVPQ

SEQ ID NO: 7333 - protein, 416 aa, unidentified
  REGION 1..416: note = Human gut metagenome
MVYVLDKNGQPLMPTDRHRKVRLMLQSGQAKVIKRCPFTIQLNYDSGHQTQEISLGIDAGSKHIGVSATTKIKVLYEVDVELRNDIVDLLSSRRELRRGRRNRKTRYRQAKFNNRRRGNGRLAPSIRQKIGTHLTVVENICKMLPISRIMVETASFDIQKIKNPDIQGAEYQQGDQLEFWNVREYVLFRDGHTCQCCKGKSKDKILNVHHIESRKTGGNAPNNLITLCETCHTGYYKGTVQLPKAIKRGMRFKDAAFMGIMRWAFYEALKQQYEPVGTPVHNTYGYITKHTRIAYNLPKEHYVDARCISGNPEASSNGEYYYQKKVRCHNRQIHKLTILKGGIRKQNQATYLVKGYRLFDKVSYQGKGYFVFGRRQSGFFDIRTLSGEKVNKGSLSCKKLKFIATRTYYLTERRAV

SEQ ID NO: 7334 - protein, 419 aa, unidentified
  REGION 1..419: note = Human gut metagenome
MVYVISQDGKPLMPCSDPIARLLLKQGKAKVKKRDPFTIKLTYETTNYTQGLTLGVDTGSGTIGTAVSKDNGDIVYMSEVVVRNDITDKMTQRAKYRRNRRNRKTRYRKARWLNRASSIKKDRFSPTMQSKLHSHVREIEYIQSILPVTEMVFETGQFDMHLMKNPSLANPKVRPWGYQKGANYGFENTKAMVLNRDNYTCQCCKGKHKDSKLEVHHIVFRSQGGSDEESNLLTLCHTCHKDLHSGKINPKLSGKVKGNLKYATQMNSIRKQLFRFYPNAIETFGYVTKANRLHLGVDKEHYYDACTIATQGNAFNVKSNLYKKKCVSDGDFQKTKGIRSEQPIVTDKICGFRKFDKVRYFGNDYFIKGRMSTGYAILMDIDGNKIDFSTMPRGYKTPKLSNCKRITARSTVMTQVKVV

SEQ ID NO: 7335 - protein, 462 aa, unidentified
  REGION 1..462: note = Human gut metagenome
MSVLVIGRNGRALMPTNPRKARLLLKKKTASVVCRHPFTIQLLYKTGCATQEGCIGIDTGSQHIGVGITCGDRVILKDEHALRSSMEKRSLLATRAVMRRGRRYRKVRYRKPKWRHHTKRMYFEKANRRGQHWRKVKTTTQSPRLKGWLPPSLQSKCDHHFRIIDRYLKYLPDPITRNLVIEAGRFDMARMNDPTIHGEMYQRGPMYDAENLRAYIFARDNYQCVCCKAKAGTTRKADGTTVKLVAHHILFRSRGATDNPKYIISVCDHCHTTKAHQPGGILYSWMENNKKVARGLRDATFMNILRKRLFARYPQAAFTYGNITAADRKQLRLPKSHANDAVAISLFGKEASTVKNICQTMHYKQIRKSKRSLHEAIPRKGRKNPNTKAVRNKKNTTQVNGFKLWDSVLADGKKLFICSFTGTSAYLIDKNGCYISQPGKTYKQWPLSKLKRLHPNGNWLMA

SEQ ID NO: 7336 - protein, 340 aa, Anoxybacillus sp.
MVFVLDTNKCPLAPCHEAVARKLLKQGKAAIYKRYPFTIILKEIVDNFRPKTPYRLKIDHGSKHTGLAILRGQEVVWLGQLDHRTDIKERIDKRRAFRRARRNRKTRYRKPRFLNRKRKEGWLPPSLESRVQNIQTWVSRLKKLCPIGHISYENAKFDTQLMRNPEINGVEYQQGTLQGYEVREYLLEKFGRKCCYCGKENVPLEVEHIIPKSRGGTDRVDNLCLACHDCNQRKGSKTAEEFGYPHIQKQVKESLKDASAINSTRWKAYEVLKQTGLDVECGTGARTKMNRIRLDLPKTHYFDACCVGESTTNHLYFKTKEVLFIKAKGRGSRSRTNLDR

SEQ ID NO: 7337 - protein, 465 aa, unidentified
  REGION 1..465: note = Human gut metagenome
MSTCACVLSKNGERLMPTIRLGKVRHLLKDGKAEIVKHHPFTIQLLYESGTNTQPIEICEDVGYNYIGISVKSESHEYVSAQYDTLQDEKKCHDDCRRMRRTRRNRLRHRQARFDNRKRDKGWLAPSLEHKKELNINVIKMYCEVMPITHATVEVGSFDTMLVKAIQEGKATPEGAGYQKGPRYNLATLREAVFYRDNYTCQVCGRKANEGAILHVHHMFYWKGRHGNSLSELITVCEKCHTPANHQKGGKLYGFGEDIKFANLSGAAFMNTVRWQIVNVLYAAFGKPFVTFTYGAMTKEKRIALHLEKSHNNDAYAMGSFHPVNRCAFEHYEKVKRNNRILEKFYDSQYIDTRTGELTNGKSLFNGRINRSHKKDSENLHKYRGKRIRKGYRALRRKKVALNRGDLVSLNGEFLVVYGTHTRKNGSVNVEFETPSKNGKKSADLKKLKIINASNPMHSAWKKAS

SEQ ID NO: 7338 - protein, 431 aa, unidentified; identical to SEQ ID NO: 6230
  REGION 1..431: note = Human gut metagenome

SEQ ID NO: 7339 - protein, 506 aa, unidentified
  REGION 1..506: note = Human gut metagenome
MVCVVSNTGKRLMPTTEYKARKLMEKGRAKIYQYDPFTIIILDREDGYTQSIELKCDTGDKHIGMSICSEKHEYVSVEVNPLKDEKEKHNDQKKYRRTRRNRKRYRAPRFNNRKRKEGWLAPSLEHKVEIHKHWIERYLKVMPIEKVILETGTFDTQRLKAINDDKTLPVGTDYQRGEQYDFYTMRDAVFSRDHYTCQCCKKSMNTNKNMVLKTHHIGYWKGDRSNRVSNLLTVCNKCHTQVNHQPSGKLYGLQPKSKKLPEAAFMNSVRYILVDEIYNLQEKLNVSFEIETTYGSMTKLKRKELGIEKSHVNDAYVMGEFHPKHRCQSEHYQKKRRNNRILSKFYDAKYIDSRDNSIKTGKELSSGRTSRNHKKDSENLHQYRKQKVAKGRTSIRKNHYPFQPKDIVLYDGKKYKVNGTNNKGKSVQLYIEERVSIEEITLYKKKKNLQTAEIECGDKVIYEKKIYTVKNIINTKHVLLSGLISTKPENLRHLKYSNGYDKVEIV

SEQ ID NO: 7340 - protein, 431 aa, unidentified
  REGION 1..431: note = Human gut metagenome
MPNKVYVINKHGRPLMPCSPAKARHLLDAGKAKVKKRTPFTIQLVYGSSGYTQEVILGVDAGSKTIGMSASTTKEELLSAEVKPRNDVVDLLSTRREFRRARRNRKTRYRKPRFDNRVRSKHKGWLAPSEEVKIQEHITAIKMVCRILPVSKVVIETAEFDLQLLKAIADGKPVPQGEDYQKGEMYGHYNVRQYVLWRDNYTCQCCGAHATKKKEVRLHVHHLESRKVGGDAPDNQVTLCESCHEKLHKGLIAEKDFKKRKRRSTRDATFMGIMRKTLMQRLCSELPIHVVETRGYITKATREKLLVLPKSHTNDALAIAQGKQGFNVGYLPGILQIDKIYTIRPVRHHNRQLHKAAILKGGIRKSNQTGKYVFGYRLFDKVQFNGQDCFIWGRRTTGIFTIKTINGKMIKDGISFKKLKLVEKSTGYLIA

SEQ ID NO: 7341 - protein, 512 aa, unidentified
  REGION 1..512: note = Human gut metagenome
MPTVYVLNKDGKPLMPTTRGGHVRHLLKEQKARVVRAKPFTIQLLYETDDAVQLLYLGIDPGRTNIGVAVVKANGTAVFTAHLESRNKEILKLMQDRKKARRARRTNGRRHRRQRRAKANGTISKKCVKQTTAQNGSVSKRAKDIGVIKRRLPGCEKDVLCIGIKNKEAKYTNRARPEGWLTPTANQLLQTHINLVKKIQKFLPISDVVLEVNKFAFMRLDNPDIQKWQYQQGPLYQKGSLENAVSEMQEHHCLFCDKPIDHYHHVVPQSENGSNTIANIVGLCSEHHNLVHKDAAWQKKLAEEKVGLNKKYGALSVLNQIIPALTNKLSVLFPKHFFVTTGKSTHDYRESHSVSKDHWLDAYCIACSVLPSNVCDSNINNHVPYELKQFRRHDRRALHKENMSRVYTLNGKAVATNRHKAIKQTTDSLEEFRQSHPGDVCKLKVKEHHPAYRNLNRNHPGSVFFVGEQAHVMQSIVASKDGKATRYKDTNVNKIAAGQCRFVAKNEGIVFT

SEQ ID NO: 7342 - protein, 278 aa, unidentified
  REGION 1..278: note = Human gut metagenome
CRILPITLVRVETAEFDTQRLKAMLKGKPLPVGTDYQLGEMYDEYNVRQYVLKRDNYTCQCCGAHPTEKKPIRLHVHHIESRHVGGNAPNNLITLCVACHKALHEGKITLDKGKKRGKPLRDAAFMGIMRNTLLARLKDELNIPVKQTYGYITKLLREKNKIPKSHVNDARCIAKAPNAKPCDTMLYTRALRHHNRQIHKAKILKGGIRKKNQAPYLVKGFRLWDKVRYNGEECFITGRRSSGYFALKKYDGTVISNSASYKKLMLLEAATNYITERS

SEQ ID NO: 7343 - protein, 407 aa, unidentified
  REGION 1..407: note = Human gut metagenome
QPLMPTDRHRKVRLMLQSGQAKVIKRCPFTIQLNYDSGHQTQEISLGIDAGSKHIGVSATTKIKVLYEADVELRNDIVDLLSSRRELRRGRRNRKTRYRQAKFNNRRRGNGWLAPSIRQKIGTHLTVVENICKILPISRIMVETASFDIQKIKNPDIQGAEYQQGDQLEFWNVREYVLFRDGHTCQCCKGKSKDKILNVHHIESRKTGGNAPNNLITLCETCHTGYHKGTVQLPKAIKRGMRFKDAAFMGIMRWAFYEALKQQYEPVGTPVHNTYGYITKHTRIAYNLPKEHYVDARCISGNPEASSNGEYYYQKKVRCHNRQIHKLTVLKGGIRKQNQATYLVKGYRLFDKVSYQGKGYFVFGRRQSGFFDIRTLSGEKVNKGSLSCKKLKFIATRTYYLTERRAV

SEQ ID NO: 7344 - protein, 512 aa, unidentified
  REGION 1..512: note = Human gut metagenome
MSTVYVLNKDGKPLMPTTRCGHVRRLLKEQKARVVTSKPFTIQLLYETNDVVQPLYLGIDPGRTNIGVAAVKTDGTAVFTAHLETRNKEIPKLMQGRKKARRARRTNGRRCRRQRRAKANGTISKKCVKQTTAQNGSVSKRAKKIGVIKRHLPGCEKKVLCIGIKNKEAKFSNRTRPEGWLTPTANQLLQTHINLVKKIQKFLPISDVVLEINKFAFMQLDNPNIQKWQYQQGPLYQKASLEEAVSEMQEHHCLFCKKSIVHYHHVVPQSENGSDTIGNIVGLCTKHHDLVHKDTAWQKKLAKKKTGLNKKYGALSVLNQIIPALTKELSSLFPKHFFATNGKSTHDYRAAHDVSKDHWLDAYCIACSILPNDTCDKNINGRVPYKLKQFRRHDRRALHKENMSRVYTLNGKSVATNRHKAIKQTTDSLEEFRQRQPNDVYKLKVKEHHPEYRNPKRNFPGCVFLVGKHTHVMQGTSGSHNGKADGYYDTNGNSYPSGKCKFVAKNKGIVFA

SEQ ID NO: 7345 - protein, 475 aa, Blautia sp.; identical to SEQ ID NO: 4128

SEQ ID NO: 7346 - protein, 324 aa, unidentified; identical to SEQ ID NO: 5319
  REGION 1..324: note = Human gut metagenome

SEQ ID NO: 7347 - protein, 406 aa, unidentified
  REGION 1..406: note = Human gut metagenome
MPCSPRKAKLLLKNKKAKVKHRMPFTIQLIYGSSGYKQPVSLGVDAGSKVIGLSATTEKKELFASEVVLRDDIVKLLSVRREFRRARRNRKKRYRAPRFNNRVHSKNKGWLAPSVENKIETHLKAVHHVFLILPIAKIIVETAAFDIQMLRAKELGLPLPEGVDYQQGEQLYSYNVREYVLFRDNHTCQHCKGKSKDPVLQVHHIESREVGGDAPNNLITLCKTCHAKYHAGLIKLQIKRGASFRDAAFMGIMRWAFYDRLKQIYPNVSMTFGYITKHTRIKHQLEKKHYIDARCISGHPNALPTENLYLQKAVRKRNRQLHKATINKGGIRKSNQSPKYVYGFQLFDKVFYDNKECFIFGRRATGYFDIRMLDGTKLSAGVSYRKLKLLERRKTILIQRVEDFAV

SEQ ID NO: 7348 - protein, 412 aa, unidentified; identical to SEQ ID NO: 6913
  REGION 1..412: note = Human gut metagenome

SEQ ID NO: 7349 - protein, 386 aa, Ktedonobacter sp.; identical to SEQ ID NO: 5256

SEQ ID NO: 7350 - protein, 456 aa, unidentified; identical to SEQ ID NO: 5876
  REGION 1..456: note = gut metagenome

SEQ ID NO: 7351 - protein, 418 aa, unidentified
  REGION 1..418: note = metagenome
MVYVLNIDGQPLMPTTRHGKVKHLLKDGKAKVVKRCPFTIKLLYETPNCTQDLTLGVDTGSGAIGTAVSTDDGEIVYMSEVVVRNDITDKMTQRAKYRRNRRSRKTRYRKARWLNRKNSIKKDRFSPTMVSKLHSHVKEIEYIKSILPITTIVFETGTFDTYLMKNPSLVDENVRHWGYQKGTNYGFENTKAMVLNRDNYTCQYCKGKHKDSKLEVHHIVFRSKHGSDEESNLITLCHTCHKALHSGKISLKLEGKVKGNLKYATQMNSIRKQLFRIYPEAIETFGYITKANRLKLGVDKEHFYDACVIATHGNKFSVRCNLYKKKCVSDGDFQQTKGVRSEQRIPTCKIQGFRKFDKVRYFGKEYFIKGRLSTGYAILMDIDGNKSDFSYMPKGFKTPKIINLKRLEARSSWIVIFK

SEQ ID NO: 7352 - protein, 512 aa, unidentified
  REGION 1..512: note = Human gut metagenome
MSTVYVLNKDGKPLMPTTCGGHVRHLLKEQKARVVRAKPFTIQLLYETNDVVQPLYLGIDPGRTNIGVAVVKANGTAVFTAHLETRNKEVPKLMQDRKKARRARRTNGRRCRRQRRAKANGTISKKCVKQDTAQSKNPSKRAKEIGIIKRRLPGYKKDVLCIGIKNKEAKYTNRTRPEGWLTPTANQLLQTHINLVRKIQKFLPISDVVLEVNKFAFMRLDNPDIQKWQYQQGPLYQKGSLENAVSEMQEHHCLFCDKPIDHYHHVVPQSENGSNTIANIVGLCAEHHNLVHKDAAWQKKLAEEKVGLNKKYGALSVLNQIIPALTNKLSVLFPKHFFVTAGKSTHDYRATHGVSKDHWLDAYCIACSVLPSDVCDSNINNHMPYELKQFRRHARRALNNENMNRVYTLNDKAVAINRHKATEQEAASLEEFRKEHPNDVCKLKVKEHHPTYRNMNRNYPGSIFLVGKHVHIMQGIAGSKDGKATTYKDSNANSITASKCKFVAKNSGILFV

SEQ ID NO: 7353 - protein, 279 aa, unidentified
  REGION 1..279: note = metagenome
KYKVDAHIRVVENVCSILPISRIVIEVAQFDTQKIKNPEISGKEYQEGDQLEFWNTREYVLARDGHKCQYCKGKSKDSILNVHHIESRKTGGDSPSNLITLCETCHKEYHKGNIDLKIRRGKSLRDAAVMGIMKWRLYEELKSRYDRVFMTFGYITKHNRIKYGIEKSHTSDAFVISKNINAKRIERQYLKRLIRRHNRQIHKMKILKGGKKKNNQAPFEVFGFRLFDKVLYNNKIFFVYGRRKSGSFNIRDFNGENSKDVSRKKFKLIRGKRHPIILK

SEQ ID NO: 7354 - protein, 376 aa, Oscillatoria sp.
MAFRPASYEIKLDPGSKTTGIALLKGENIIFVGELNHRGQAIKASLDSRRAIRRSRRARHTRYRQARFLNRIRPKGWLAPSLKHRVDTTLTWVNKFIKFAPVNSIAMELVRFDLQQLEKPEIYGVGYQQGELLGYEIREYLLNKWERKCTYCKVENIPLQVEHIHPKAKGGSNRISNLCLACEKCNLKKGTQDINDFLLKKPDLLKQIMAQVKQPLKDATAVNSTRWALFNQLKLTGLPVTTGSGGQTKYNRIRLELPKTHYFDAACVGKVDKLIVLTTQPLLIKANGHGTRQMCRTDKFGFPSRYVPRDKFVKGFQTGDIVKAVVTSGKKVGQYIGRVAVRSSGSFNISAKELVQGISHKYCHILQRKDGYSYQF

SEQ ID NO: 7355 - protein, 442 aa, Anaerostipes sp.; identical to SEQ ID NO: 3218

SEQ ID NO: 7356 - protein, 408 aa, unidentified
  REGION 1..408: note = metagenome
MVYVQDIDGKPMMPTTRHGKVRRLLKANKATVVNLCPFTIRLTYATSGYKQEIVLGVDAGTKHVGLSATTKSKELYSSEVILRSDIVELLSTRRELRRTRRNRLRYRKPRFGNRVKSKHHGWVAPSVRHKVDAHIRVIDNICSTLPISRIIVEIAQFDTQKIKNPDISGNEYQEGDQLGFWNVREYVLARDGHKCQHCKGKSKDPILNVHHIESRKTGGDSPSNLITLCETCHKEYHKGNIDWKVKRGKSLRDAAVMGIMKWKLYEELKSRYPNVSITFGYITKYNRIKYGIEKYHISDAFVISKNFNALRLEYHYKVRLVRRHNRQIHKQKVLKGGAKKPNQSPFEVFGFRLFDRVMFEGNYYFIFGRRKSGSFNIRDINGGNQRNVTYKKLKLSIGKRFMIQKEMN

SEQ ID NO: 7357 - protein, 415 aa, unidentified
  REGION 1..415: note = Human gut metagenome
MENRIEYCFVVDKNNRPLTPTKVNKGWYLVRKSRAKLKSKYPMVIQLEKEVKSDEDDESHIVCGIDDGSAHVGLAIVQKCPTKNKVVFKGTIEQRQDVKHLMDVRRGHRRYHRYHKRYRQARFNNRSSSKRTCRLVPSIKQKKDAILRVLYQLNKWVNIQEYHLEDVCIDIRALTDDYKPYRWQYQKSNRLDENLRKATILRDECRCQECGKSNCVLEVHHIRARKYGGADTIGNLITLCSGCHQKTEGRERDFEDRYFNMIKSKPKRFDYAMHVMQGKTYLREKISELGSLHLTNGGETANKRIEWNMEKSHGNDAICVTDCIPDNCDVKEWIIKPMRRKSKAKTNNLLGIRHRDLVSYTYKNGETHTGYVTALYPEQLVLNFQSKTKHCKKVNARKCRLLWKFNKIYWLEQCV

SEQ ID NO: 7358 - protein, 429 aa, unidentified
  REGION 1..429: note = Human gut metagenome
LKDGKAKIVKHHPFTIQLLYDSKANTQPIEICEDVGYNYIGISVKSESHEYVSAQYDTLQDEKEHHDDCRKYRRTRRNRLRYRKPRFDNRKRSEGWLAPSLEHKKQLNIRLIERYVSVIPITRATVEVGSFDTMLLQAIQKGESKPEGADYQKGPRYNLATLREAVFYRDNYTCQVCGRKIADGAILHMHHMFYWKGRHGYQLDELVTACEKCHTPSNHQKGGKLYGFGKDKKFANLSGAAFMNAVRWRIVDALHATYGKEFVTITYGAMTKEKRIILGIEKTHNNDAYAMGDYHPAHRCVFRHYQKRRRNNRVLEKFYDATYIDARTGNKAKGKELFNGRINRNHKKDSENFHKYRNKKVSKGRRSIRRQRYAIQPYDTVRLEGKTYITSGCHNKGTRLLIPANGKSKSVAISKVQVVCHAGAWIQII

SEQ ID NO: 7359 - protein, 518 aa, unidentified
  REGION 1..518: note = Human gut metagenome
MTPKKRKEASRMSEYIYVLGIDGNPQMPTKRKRHVEQLLQTGRARIFRQVPFTIQLTYKNEPVLQPVTIAEDPGRSNIGMAVVSLSGELLSAAVVQTRNKEIVKLMEKRKQHRRASRNGERKARQRLAKKCHTMIKTGFLMRKLPMYGKDKRVRCNVIKNTEAKFCNRKREDGWLTPSAEHLVRTHINLIHKMQKFLPITDVAIEINRFAFLSLEDPSISGVDFQNGPLKGYDDLNAAIEDLQDGHCLMCNSPIEHRHHIVPRNMQGSNTIGNIAGLCCKCHERVHKDARFEDRLKKKKAGLNKRYAAVSVLNQAIPFICKRLEQEFGKEHVHYCSGRDTSMVRRSLGYHKTKEKQLHEVDAWCIAVLALQHVPEKAPEFDHVHEILQFRRQDRSRIKAQTSRAYYHEGKKIAKNRKKAEGQREDSLQEWRKRQVERYGKEQTRKMISQLEVKENIRRYNRLDRLMPGAVFYYQGVRYVMRGQHSNGQYLQAVGMGDKDFPAKKCKIVVHNQGLVFVS

SEQ ID NO: 7360 - protein, 420 aa, unidentified
  REGION 1..420: note = Human gut metagenome
MQYVYVLNKHGKPLMPCSPGKARLLLKQQKAHVVKRTPFTIKLLYGSAGYKQHITLGVDAGSKHVGLSASTEKLELYCEEFTPRNDVVDLLSTRRAFRRSRRNRKTRYREPRFDNRVHSKHKGWLAPSVEVKIQEHITVIKHICKILPITLVRVETAEFDTQRLKTMLEGKPLPVGKDYQLGEMYDEYNVRQYVLKRDNYTCQCCGVHTTAEKMVKLHVHHLESRKTGGNAPSNLITLCTTCHDALHKGKVSLDGKERGKPLRDAAFMGIMRKTLMGRLREELPISVQGTYGYITKMRREQNDIKKSHMNDALCIAKHPKAQHCENSYRSKAVRHHNRQIHKAKMLKGGIRKLNQAPYIVKGFRLWDKVLYNGQECFISGRRSSGYFALRKLDGTAITNSASFKKLQLLEATSSYLIERM

SEQ ID NO: 7361 - protein, 451 aa, unidentified; identical to SEQ ID NO: 6972
  REGION 1..451: note = Human gut metagenome

SEQ ID NO: 7362 - protein, 426 aa, Lactobacillus sp.
LKGVGMMSEIKKVDYIYVVDSNGTPLMPTSRLGMVRRWLKTGQAKWFGNSRNTIQFVRPVNTNTQELTLGVDAGFHLGLSVVGNNREYYVSESLRKSEKDRITSRRELRRTRRNRLRYRKARFNNRRRKDGWLAPSIQHRLDFTIKEIKRLYKFLPITNLVVEVTPFDNQKLLNPDIQGWQYQKGKMYGFKTIKDYLLARDNYRDALDGKQYPASQLRVHHLVQRKDGGSNQPDNLVLLSDINHNQANHNNGILAKLRENRQKTLDYRGAYFMSILATRLSNYFEHYTTTQGYLTANLRQKLRNNNRVLQKFYDAKYIDSRDGKQKAGKELSSGRTRRSQELNYDNLRQLRKEKVKKGRVSIRRGHYQLRPHDVVLNTRTNRIETVKGVQNSGTVIKFQTGKTCSIKSVVSLYHVNGILEKKMKNI

SEQ ID NO: 7363 - protein, 494 aa, unidentified
  REGION 1..494: note = Human gut metagenome
MAMVYVQNKDGKPLMPTTRYCYVRLLLKEKKARVVCTTPFTIRLNYDTPNVTQDLILGIDPGRTNIGVAVVKEDGSCVFSAHLETRNKDVPLLMQKRADFRRQHRTLDRRRKRQRRAKAAGTTIAEGSVERLLPGYEKPVVCHYIRNKEARFNNRKRPKGWLTPTANHLLQTHINLIAKVAKFLPITKVVVELNRFAFMAMDNPNIRRWEYQQGPLYGLGSVEDAVYAQQDGHCLFCKKPIDHYHHVVPRHKGGSETLANRCGLCEKHHALVHKDKAWAEKLVTRKGGMNKKYHALSVLNQIIPHLMEYLGSETPYDVYATDGKSTKGFRIAKNVPKEHYTDAYCIACSILDADTKVSAPAEPFKLKQFRRHDRQSCIRQMVDRKYLLDGKVVATNRHKAIEQKSDSLEEFREAYGDAAVSQLTVRPHSPQYKDMARIMPGAVMDFDGIVGVFKGSSGRNNGTPNYYNSTKGARVLTKRCALLAKNVGMVFIPA

SEQ ID NO: 7364 - protein, 458 aa, Halomonas sp.
MAVFVLDKQKQPLMPCSEKRARLLLERGRAVVHKHYPFCIRLKDRVGGETQPLRLGLDPGSKTTGLALMRESDGEQRHVLCLFDLVHRGFQIKKALAQRAAFRRRRRSKNLRYRAPRFDNRKRKADWLPPSLQHRVDTVMAWVERLSRLAPVTGISQELVRFDTQKLENPEISGVEYQQGTLLGYEVREYLLEKWGRECAYCGAADTPLEIEHVVPSSSGGSNRVSNLTMACHDCNQAKDSLPLADFFARDKGLKKRFKANGLLADARLERVQRELKRPLRDASAVNAPRWVLFTALNAPGLPVAVGTGGRTKYNRQRLDIPKTHALDAACVGVFDSLHDWVVPTLAIQCTGRGSYQRTRLTKHGFPRGHLMHQKQVHGFQTGDMVKAIVPAGKKAGTHNGRVAVRKTGSFNIQTDQGAVQGISHRHCTLIQRGDGYGYYVMPTIHQPTKGEARQAVA

SEQ ID NO: 7365 - protein, 426 aa, unidentified
  REGION 1..426: note = Anaerobic digester metagenome
MQYVFVLDKDRKPLDPCHPARARQMLSEGRAAVIRRHPFTIILTDRTQAESVVHEHRVKIDPGSKTTGLAVVREGDGKVVWAGEITHRGQVIRDALLSRRAIRRGRRHRHCRYRPARFNNRRRKEGWQPPSLESRLSNVQTWVKRLLRCAAVTAISLELVKFDTQSMQNPEISGVEYQQGELAGYEVREYLLEKWGRKCAYCGKTDTPLEVEHIIPHTRGGTNRVSNLTLACRECNMRKGRQTAAEYGHPNIQSAARLPLKDAAAVNATRWELWRRLAQIGLPVECGTGGRTKYNRVHQGLPKTHWMDAACVGRTGEKVFVPNNLTALGIKSCGHGRRQMCLVDKYGFPRTSAKKSGRIYGFKTGDIVEARVPKGKYAGVHYGRVVVRASGWFQIGNANVSHRGCRIVQRADHFEYTRKECGSSTR

SEQ ID NO: 7366 - protein, 428 aa, Enterococcus sp.; identical to SEQ ID NO: 4335

SEQ ID NO: 7367 - protein, 292 aa, unidentified
  REGION 1..292: note = Human gut metagenome
LSRIEAVLRLLPVTKITVETASFDLQLLKNPDISGKEYQEGEQLGFWNIREYVLCRDGHVCQHCYGRSKDPVLNVHHLESRRTGGDSPGNLITLCETCHKALHRGEITLKAKRGQSFRAEAFMGIMRWEVLGRLKASHPELEVNNTYGYRTKHARIANDIAKSHCADAFCIAGNLGAERLGEFFFQKQTRRNNRQIHKLSILKGGIRKRNQAPFEVNGFRLFDKVACKGEEGFIFGRRSSGFFDVRKLDGTRISAGISCKKLHLLEKRRTYLTEIRKEEALPPLPEGRGLRA

SEQ ID NO: 7368 - protein, 423 aa, unidentified
  REGION 1..423: note = Human gut metagenome
VWNKRRKPLMPCSPAKARHLLKEKKAAVVRRTPFTIQLTIATGESKQPVTLGVDAGYKHVGLSASTEKAELYASEVELRQDVSDLLSARRALRQSRRNRKTRYRAPRFDNRIRTKRKSWLAPSVENRINAHLSRIEAVLRLLPVTKITVETASFDMQLLKNPDISGKEYQEGEQLGFWNVREYVLFRDGHVCQHCHGRSKDPVLNVHHLESRRTGGDSPGNLITLCETCHKALHRSEITLKTKRGQSFRAEAYMGLMRWEVLNRLKTSHPGLEVHNTYGYRTKYTRIVNGIDKSHCADAFCIAGNLGAERLGEFFFQKQTRRNNRQIHKLSILKGDIRKRNQAPFEVNGFRLFDKVACKGEEGFIFGRRSSGFFDVRKLDGTCISAGISYKKLHLLEKRRTYLTEIRKEEALPPLPEGSGLRA

SEQ ID NO: 7369 - protein, 423 aa, Microcoleus sp.
MSNHVFLIDSNKTPLNPVHPAQARKLLDSEKAAVFQCYPFTLILKRVIENPNVYPLTLKIDPGSKFTGIALVTNQGNVVWAMELQHRGQQIKDALLHRRAVRRGRRNRNTRYRQARFLNRKRPDGWLAPSLRHRILTIETWVKRLQKFAPLDSIAQELVKFDTQAIQNPEISGIEYQQGTLKGYECREYLLEKWNRQCAYCGVKDVPLEIEHIQPKSQGGSDRISNLCLACHKCNQRKGNRDIKDFLKGKSDVLKRVLKQAKTTLKDAASVNSTRWALFNTLKSFGLPVSTGTGGQTKFNRIRFSLPKAHWIDAACVGVVNAIKLVTTKILKVKATGFGGRQRCQTDKFGYPQKHRPLRPILGFCTGDIVRANVPKGKYKGTFTARVCPMSHGYGEFVIDKKRRSIKLDYLTSIHRKDGYEYA

SEQ ID NO: 7370 - protein, 456 aa, unidentified; identical to SEQ ID NO: 4017
  REGION 1..456: note = Human gut metagenome

SEQ ID NO: 7371 - protein, 407 aa, unidentified
  REGION 1..407: note = Human gut metagenome
MVYVQDINGNPLMPTTRHGKVRRLLKNNKAVVVNLCPFTIRLTYETTNYKQEIVLGVDAGTKHVGLSATTKSKELYSSEVILRNDIVDLLSTRRELRRTRRNRLRYRKPRFNNRIKSRRPGWIAPSVQHRIDAHIRVIDNVCSILPISRIVIEVAQFGTQKINNPEMSGKEYQEGDQLGFWNVREYVLARDGHKCQYCKGKSKSKILNVHHIESRKTGGDSPSNLITLCETCHKEYHKGNIDLKIKRGKSLRDAAVMGIMKWRLYEELKYKYDRVSMTFGYVTKYNRINHGIEKSHVSDAFVISKNFNAKRLNFSYKIKLVRRHNRQIHKMKIQKGGTKRPNQSPFEIFGFRLFDRVRFDSKFYFIYGRRKTGSFNIRDINGENKKDVIYKKLKLSRCKRFMIQIEM

SEQ ID NO: 7372 - protein, 413 aa, unidentified
  REGION 1..413: note = Human gut metagenome
LKVFVLNMRGKPLMPCSPAKARHMLKAGKAVVVRRTPFTIKLTIATGETKQDVTLGVDAGARHVGISATTEKEEVFASEVALRQDITGLLADRLAFRRARRNRKTRYRAPRFNNRVRSKHKGWLAPSVENRIQAHISRIEAVCRLLPVTKIVIETASFDIQKIRNPEVEGTGYQQGDQLGFWNVREYVLFRDGHVCQHCHGRSRDKILNVHHLESRKTGGDAPNNLITLCETCHKAYHAGKIKLKVKRGQSFRAEAFMGIMRWTLLDRVRKTHPKLPVENTYGYLTKHKRIALGLPKTHCADAFCIAGNLKALRRGDFLFQQQTRKHNRQIHKCSILKGGVRKLNQAPFLVKGFRLFDKVRIGGQIGFVFGRRVRGTFNIRRLDKTVIGTDINCKKLSLLETRKTFLTELRKE

SEQ ID NO: 7373 - protein, 502 aa, unidentified; identical to SEQ ID NO: 6341
  REGION 1..502: note = Human gut metagenome

SEQ ID NO: 7374 - protein, 356 aa, unidentified
  REGION 1..356: note = Human gut metagenome
RKPRFDNRKRGEGWLAPSLKHKKELNVNVVKMYCTVMPITHATVEVGSFDTMLVKAIQEGKAIPEGADYQKGPRYNLATLREAVFYRDNYVCKICGRKATEGAILHMHHMFYWKGRHGNSLNELLTVCEKCHTPANHQKSGKLYGFGEKIKFADLSGAAFMNTVRWQIVNELYVAFGKPFVTITYGAMTKEKRIALQLEKSHNNDAYAMGEFHPNLRCMFEHYEKARRNNRILEKFYDSRYIDIRTGEIATGKELFNGRINRNHKKDSENLHKYRGKRTYAGHRALLRKKVNLNPGDLVSLNGEVLVVHSTHTNKKGAVNVEFKTPGKSGQKSASLKKLKIVKAADSMHSAWEKIS

SEQ ID NO: 7375 - protein, 440 aa, unidentified
  REGION 1..440: note = uncultured proteobacterium
MAVFVLDKHQQPLMPASEKRARLLLSCGRAVVVKRYPFTIRLKDRVGGEVQPIRLKLDTGSKFTGIALARVSEAIEASTGEIKTTLSILNLFQLNHRGHAISEKLSARAAMRGRRRGNLRYRPARFDNRTRAKGWLAPSLQHRVDTTMSWVNKLCRLAPVTALSQELVRFDMQKLENPEISGVEYQQGELLGYEVKQYLLAKWGHQCVYCGKGDRPLEVEHILAKANGGSNRVSNLTIACRPCNQDKDTKLIASFLAKKPELLKRLLSQAKRPLKDAAAVNSTRWALAEQLKLTKLPVELASGGKTKFNRIQHDIPKSHALDAACVGDFSAIKRWTIPVIVIKCMGRGSYQRTRLDKYGFPRGYLMRQKSVKGFQTGDMAKASITKGKKVGDYTGRIAVRASGSFNITTLDSVIQGLSYKNFTLIARNDGYGYSHQAKIA

SEQ ID NO: 7376 - protein, 338 aa, unidentified
  REGION 1..338: note = Human gut metagenome
VLHVYKLRNDIVKLLATRRTSRRSRRNRKTRYRKPRFNNRKRDKDWLAPSIREKIGTHLKVVDDTCKLLPVSKIIVETASFDIQKIKNPDVKGIDYQQGEQLGFWNVREYVLFRDGHKCQCCKGKTKDKILNVHHIESRQTGGNAPNNLITLCETCHTGYHKGTVELPAKIKRGMKFKDATFMGIMRWAFYGELKKRYPDVSLTYGYITKNTRIKNGLPKEHYVDARCISGHPLARPLGTVFYIKKVRCHNRQIHKFNILKKGVRKRNQAEYEVYGFRLYDKVSWKGQTCFVFSRKSTGYIILRLLDGTRVKESASYKKIKLLRMRSGYLIESRSVAF

SEQ ID NO: 7377 - protein, 428 aa, unidentified
  REGION 1..428: note = Human gut metagenome
LKVFVLNMRGRPLMPCSPAKARHLLKAGKAVVRRRTPFTIQLRIATGETKQNVTLGVDAGAKHVGLSAATEKEEVFASEVELRQDITGLLAARLSLRRERRQRKTRYRAPRFLNRVRSKHNGWLPPSVENRIQAHLSRIDAICGLLPVTKIVIETASFDIQKIKHPDVEGTDYQQGDQLGFWNVREYVLFRDGHVCQHCHGHAKDKILNVHHLESRQTGGDAPNNLITLCERCHKACHAGKIKLKVKRGQSFREEAFMGIMRWTLLDRVRKAHPGLPVENTYGYLTKNTRITQGLPKAHCVDAYCIAGNLKAVRRGVHLYQRQVRKHNRQIHKCTVLSKTLKDGTKIGYRKLNQTPHLVKNFRLFDKVRCLGQTGFIFGRRSSGYFDVRRLDGVKISSCINYRKLTLLEKRGTCLTELRKEDGASSPV

SEQ ID NO: 7378 - protein, 478 aa, unidentified
  REGION 1..478: note = Human gut metagenome
LLRQGRLIVKEVAYMSTVYVLNKDGKPLMPTTRGGHVRHLLKEQKARVVRTKPFTIQLLYETDDVVQLLYLGIDPGRTNIGVAVVKTDGTAVFTAHLETRNKEIPKLMKKRKNSRRARRTNGRRCRRQRRAKANGTISKKCVKQDTAQNGSVSKRAKKIGVIKRHLPGCEKEVLCIGIKNKEAKFSNRVRPEGWLTPTANQLLQTHINLVKKIQKFLPISDVVLEVNKFAFMQLDNPNIQKWQYQQGPLYQKANLEEAVSEMQEHHCLFCKKPIDHYHHVVPQHKNGSNTIGNIVGLCTKHHDLVHKEAAWQEKLAKKKTGLNKKYGALSVLNQIIPALTKELSSLFPKHFFATNGKSTYDYRAAHGVSKDHWLDAYCIACSVLADDVCDNNINSHVPYELKQFRRHDRRALHKENMSRVFTLNGKSVATNRHKATEQTTDSLEEFRQCQPDDVCKLKVKEHYPEYRNPKRNFPGCVF

SEQ ID NO: 7379 - protein, 420 aa, unidentified; identical to SEQ ID NO: 3884
  REGION 1..420: note = Human gut metagenome

SEQ ID NO: 7380 - protein, 417 aa, Ktedonobacter sp.
MNAVYVLTPERRPLMPCSPAIARLLLKQHKARVVRRTPFTILLLSPPATTYTQPMTLGVDTGSCVVGSAAADEQGHIFYLSHVELRNDIATTMKERAVKRRNRRNRKTRYRPARWLNRKKSIQHGRFSPTMRSKIDAHLREIRFVQSLLPITSIVLETGTFDPHALKHPEVLRHKWLYQKGINYGYANTKAYVLTRDEYTCQHCRGKSKDRRLEVHHIIFRSQWGSDEEANLLTLCKTCHDGLHAGALTLKKSGKKKGVLAHATLMNSIRTQLLKRIEGAEETWGFVTKEHRLLAGLPKEHCFDATMIATRGTTPTFCTARVLTKRCVPDGDYQQTKGVRSEQRIPTGKLGGFRKFDKVRYQGREYFIKGRMSTGYAILMDGAFSKIDLKPIPKFEKLKRVSARSSWMISQRTMPSF

SEQ ID NO: 7381 - protein, 452 aa, unidentified; identical to SEQ ID NO: 3042
  REGION 1..452: note = uncultured beta proteobacterium

SEQ ID NO: 7382 - protein, 435 aa, unidentified
  REGION 1..435: note = Anaerobic digester metagenome
MVFVLDKHKKPLMPCSEKRARQMLERKRAVIHRMEPFTIRLKDRTAEESKIQPLRLKLDPGSRVTGMAALDESIPEHGKVIFLGEIHHKKGIKQRLDSRRALRSGRRGRKTRYRKPRFLNRVKPKGWLPPSLEARVNQTMNAVAKLRKLLPITAISTEHVKFDTQLMQNPNMSGIEYQQGELMGYEVREYLLEKWKRKCAYCGKENVPLEVEHIIPRARGGSDRISNLAIACTKCNQKKGTKTAEEFGYPEVQKQAKKPLRDAAMMNATRWKLFERLKETGLPVECGTGARTKKQRIEHGLPKTHYYDACCVGASTPDKLTIEPRYVSIWMAMGRGLRQMCRTDKYGFPRAHRSNKKLRFGFQTGDIVVANVPKGKYKGKWRGRVTCRASGSFDIRNGERKMICNTNHKNFRVIQRGDGWDYAKAIAQRCCQDLS

SEQ ID NO: 7383 - protein, 428 aa, unidentified
  REGION 1..428: note = Candidatus Margulisbacteria bacterium
MRTQYQKPKGVEPKGSHELAVGDDMLVKPTLGGVAKDALQGNAPALNPATVEEEYSSHESEKGKHSVTNANVSTEMAPLNIGKGLYIYGIDEGAKEAGIAIVEAITGEVVFKGVIHLRDDVKRLMRYRREHRRERRRHLRYRANRFNNRRRKEGWIPPSIKVKKDNILRVIRELAKRYPPSKFVYEEASFNIRKLVEPNVNGKEYQKNLWNALIYRAGNKCEVCGKVDRKLQMHHIVPLSKGGSNSVTNILIVCEQCHKGIHEGRIKIEKKDLQVRYPAVAQAGKTYLKNELSKLAPVEVVYGYQTKEWREKMGLEKTHWDDAIAIIAKGKKVIDKTQPSFCFAKRHRPYREAQRRPDIKEIGGLRRGDVVNYYRRDGTVLNGYIYGFNANGTVRINNWNGKRIIKFSKISPKRCERVLRDPVVVVVS

SEQ ID NO: 7384 - protein, 434 aa, Moorena sp.
MPCHPARARELLRKGRAAVYRRFPFTIIIKDREGGATQPTVLKFDPGSKKTGIAVVADFQRGKRCIFAAELEHRGEQIKKALEKRRNIRRSRRSRKTRYRKARFENRRKPKGWLAPSLQSRVDNIESWTRKFRALIPVSSLSVENVRFDTHKLVNPEVQGVEYQQGTLFGYQVREYLLEKWGRKCAYCGKQNVPLQVEHMTPKSRGGSNRVDNLTLACEMCNQKKGSKTAGGFGFPGLCKKADRPLRAVAVVNSTRPAILEVLKSTGLSVETGSGGQTKFNRSQQGYAKEHWIDAMCVGDSGRHVFVEKCHEVLEIKAMGRGTRQMCRVDRFGFPRTGAKKKEKRVDGFQTGDIVKAIVTKGKKKGTYVGRVAVRSSGNFNIKEGKKTTQGIAAKYCKMVQKIDGYNYNNRMGVSSPLLRRGSPRLGKMEAFDR

SEQ ID NO: 7385 - protein, 420 aa, unidentified
  REGION 1..420: note = Human gut metagenome
LRVFVLNKRGQPLMPCSPVKARLLLKEKKAIVKRRTPFTIQLTIATGEAKQPITLGVDSGYKHIGLSATTEKAELYASQVELRQDITDLLSARLALRRSRRSRKTRYRAPRFNNRVASKRKGWLAPSVENRIAAHMSRVEAVMRVLPVTAITVETAAFDTQLLKNPNIAGAAYQQGEQLGFWNVREYVLFRDGHVCQHCRGKSKDPILNVHHIESRRTGGDAPNNLITLCETCHKAFHRGEIELKVRRGKSFKAETFMGIMRWTLFERLKKAHPELRVRNTYGYLTKHKRISYGIAKSHCADAYCIADNLGAKRLEGFFFQKQTRKHNRQIHKLSILKGGLRKKNQAPYEVKGFRLFDKVICKGEEAFIFGRRTSGSFDVRRLDGTRISAGINYKKLRLLEPRTTYLTEFRKEAALPPLH

SEQ ID NO: 7386 - protein, 493 aa, unidentified
  REGION 1..493: note = Human gut metagenome
MAVVYVISASGKPLMPTTRCGHVRGLLNEGKARVVEREPFTIQLKYETPDVTQPLYLDIDPGRTNVGAAVVCEDGECVFTAQLTTRNKDVPKLMKARKQFRMAHRRLKRRCKRQRRAKAAGTLSQKGEFQRLLPGYEKPILCKGIRNKEARFNNRQRPVGWLTPTANHLLLTHLNMVKKLQKLLPITDVVLEVNRFAFMAMENPSIRRWQYQRGPLYGKDCVEDAVYAQQDGHCLFCGRPIAHYHHVVPQHKNGSDTLENRVGLCNEHHDLVHKDRAWEAKMKETKAGLNKKYHALSVLNQIIPALTEQLTELFPQHAFVTTGKDTADFREDHGIAKEHYLDAYCIACSVLTEPDRVSAPTAKPYRLMQFRRHDRQVCHKENIKRVYLLDGKAVATNRHKAIEQKDDSLEEFRRTHTQQEVSSLTVKDHQPIYKDMQRFMPGGVFLCNGKVHTLLGSQGRYKGMPYYYIGTDGSRNNATRCIFLQQNCGLRWV

SEQ ID NO: 7387 - protein, 416 aa, Moorena sp.
MVYVISKSGKPLMPTKRHGKVRRMLKSGMAKVVRRTPFTIQLLYDSEEYTQDVTVGMDIGSRHAGASAISGNKELFAGQFDMRTDIHDLMTERRMYRRDRRSYKTRYREARFLNRKKDKWLAPSVRWKVEAHIRIIHFLSKILPIARVVVEIAPFDTQKIMNPEISGVEYQNGVQKGFSDVREYCLWRAGYKSEYSGKKGILEVHHIIPKSMGGTDTPENLIVLTADEHKQIHEGKIKITKRVNQKIKGLKDASHVSTIGQFIVSGLRIRYLTEVTFGNITKGKRMASNLSKTHDTDALIIAGGDATTTRTESSFFAKFVRRQNRSLHKANMLNGGRKKVNTIKSAKGYKRFDKVLYNDEECFIYGLRTSGYFDLRKLDGSKIHVSANWKQLKKLESAKTLLIERQVNVAIPLQLT

SEQ ID NO: 7388 - protein, 442 aa, Deinococcus sp.; identical to SEQ ID NO: 5259

SEQ ID NO: 7389 - protein, 442 aa, unidentified; identical to SEQ ID NO: 2903
  REGION 1..442: note = Human gut metagenome

SEQ ID NO: 7390 - protein, 424 aa, Enterococcus sp.; identical to SEQ ID NO: 4034

SEQ ID NO: 7391 - protein, 442 aa, unidentified
  REGION 1..442: note = Human gut metagenome
MSTSVFVLDKKHRPLMPCRPARARRLLRAGRARVVKRFPFVIRLVDRTVEQSEVQPVLIKLDPGSRETGAAVVRDDGKKRHHALAFFVIKHRGGAIRDALKARSAFRRRRRSQNFRCRSPRFLNRVKPKGWLPPSLRHRVETTLSFVRRMCRYLPVSGIAAELVKFDSQKLQTPEVSGIEYQQGTLFEYEVREYLLEKFGRKCVYCGAEGVPLNIDHVVPRAKGGSNRVSNLVLACVSCNQKKGARSLEDFLKGKPEVLARVRRELKTPLRDAAAVNATRWVLFNELKATGLPVETGSGALTKFNRHAFGVEKEHWLDALCVGRLNGVVTRKGLNVLEIRCMGRGSRQRTRLTKYGFPRGYLMRQKCVHGFATGDMVEANVPKGKKAGLWRGRVAVRVSGSFNIQTPKGVIQGVGWKHCRLISHNDGYGYAWLGHAPHSSPA

SEQ ID NO: 7392 - protein, 430 aa, unidentified
  REGION 1..430: note = Human oral metagenome
MLVYVLKQNGQPFMPTARFGKIRRLLKAKKAKVVRREPFTIKLLYEPETDVVQECYCGVDTGSRHIGVAVVSNDKVLYQSQTELRSDIKRKMDARRAYRRNRRQRKTRYRKPRFLNRSNSIKNDRLPPSVNHKVQAHIGEIEFCKKILPISDSNLIIEVSQFDTALMKDPSLISEKIKHWGYQQGFNYGYSSRREAILHRDNYTCQCCGKKNCRLEVHHVKFKSDGGTDDEENLITLCEDCHKGVHAGTVVLNKKPKKSKNLKYATHMSIIRSYLLKKYPNAIETFGFVTSENRNHLNLEKDHYIDACVVASGGLEFKELDVIYYKHRVSKGNYQLTKGFRGEQKIPKGKICGFKKFDKVEYLGREYFIKSRMSSGFATLMDIFGNKIDFSYMPKGMKTPKLSNCRRISTRKSCLCIGQTRKERAIYMLS

SEQ ID NO: 7393 - protein, 464 aa, unidentified; identical to SEQ ID NO: 6330
  REGION 1..464: note = Human gut metagenome

SEQ ID NO: 7394 - protein, 515 aa, unidentified
  REGION 1..515: note = Human gut metagenome
MTALEEKLSKTEYIYVLGFDGKPQMPTRRKRHVLKLLKTGRARIAEDIPFTIRLTYRHAPVLQPVTLAEDPGRTNIGAAVLSPLGDLLFAAVIETRNKEIKKLMADRQKSRQASRRGERKARQRLAKRYGSMVKSGMVMRKLPMYAADKFVICKFIRNTQARFCNRKRCPDWITPTVQHLVQTHLNIIRKISRYLPVTDIAFEVNRFAFMHMENPEAMGVDFQNGPLKGYGDVKEAIRTQQHGKCLMCKKPITHFHHIVPRSRGGSDTIQNLAGLCTECHTKVHTDTAFRKDFDEKKSGQLKKYGALSALNQAVPFICKKLLEEYGEEHVHFCRGLDTSLIRTAFGFEKTKKNQMHEVDAYCIGLAALEVNEVETPAFDHTFQIRQFRRQDRSIIHHQTGRSYYQGKEKVAQNRKPGFEQKTTALSQWYKEQIRIHGEKEAEKLRSQLRVEKSCRHYNDMDRFLPGAVFLYEGKRYVLSGRITNGKYLRACGQGMKNFPAAECTFIRHNAGLVFI

SEQ ID NO: 7395 - protein, 557 aa, Blautia sp.
MIYNLVSIRERSFMKQKKQKVMVYILNKKGKPLMPTTRCGHVRKLLDSKKAVVVSSNPFTIRLKYDTPNGVQDVFAGIDSGRENIGSGASNEDGDCLYLGELKTSNKSIKMKITERAGFRKERRRHDRQNKQRKARKDHTEIQNGNADICRTTISCKSVQISYPAAEKSVTHKIIRGKEGKFANRHRDEGWITPSARQLVQMHMNDLKSMCKILPISHVTLERVAFDFQKLENENIKAWEYGKGKLYGYDSPEEYIHDVQGGKCLICGKPHIDYLHHIIPRSKGGSNKVSNLAGLCYDCHYGPMGVHNCQNTQDRLPELKNEANKQYKVSLLNSVMPVLIEEMDKFCKANSIIFSICEGHDTAKVRDIYDLQKDHCVDGFAISLVGRNVKSVDVMPDRIHQKQRYKKKSKNIIKKRNCREYYDGKKLVAVNRHKGTDQKADSLEEYMNTYAETHTADECKKHFESLTVKPARRTYTFHKEGRICPFHIGDKVRYEKKNKIKGNTKVETFICEGIRFPKDENKAKVEHNKTKSKKMKFCRVLEPGCTPYIDYRKLVLI

SEQ ID NO: 7396 - protein, 442 aa, unidentified
  REGION 1..442: note = Human gut metagenome
MSTSVFVLDKKHRPLMPCRPARARRLLRAGRARVVKRFPFVIRLVDRTVEQSEVQPVLIKLDPGSRETGAAVVRDDGKKRHHALAFFVIEHRGGAIRDALKARSAFRRRRRSQNLRCRSPRFLNRVKPKGWLPPSLRHRVETTLSFVRRMCRYLPVSGIATELVKFDSQKLQNPEVSGVKYQQGTLFEYEVREYLLEKFGRKCVYCGAEGVPLNIDHVVPRAKGGSNRVSNLVLACVSCNQKKGARSLEDFLKGKPEVLARVRRELKTPLRDAAAVNATRWVLFNELKATGLPVETGSGALTKFNRHAFGVEKEHWLDALCVGRLNGAVTRKGLNVLEIRCMGRGSRQRTRLTKYGFPRGYLMRQKCVHGFATGDMVEANVPKGKKAGLWRGRVAVRVSGSFNIQTPKGVIQGVGWKHCRLISHNDGYGYAWLGHAPHSSPA

SEQ ID NO: 7397 - protein, 557 aa, Streptomyces sp.
MRKFSALAENSPLPAPAITEKEVTSMATFHAGQQTDRAVLPQQLALEFASADTPGNRNETGRERRTMQHRAASGVEHVRGETSCSAPAAGRVTPDRPVREQGRKAHPAVFVLDRHGKPLQPTTPARARRLLGEGRAVVHRHTPFVIRVKDRHVDLSTVEGVQLGVDPGSRQTGISVFSTVHTKEGDVRRGLYAIELTHRGGQIRDKLAQRAACRRSRRSRNTRYRAPRFLNRSRPKGWLAPSLRHRVDTVVSWGSRLARWAPVTVVYMEKVAFDTHVLSAEGPVDHQRGMLQSLEIREYLRVKWDRACAYCGTRAVPLNIEHLHPRSRGGSDRVANLVLACIPCNQAKGKRPVEEFLAARPEALAKVLVQAEASLRDTAAANTTNWALWRSFTARFPAVCSASGVRTKWNRTHAGLPKTHTLDALCVGALDGVVQYSAAVLAVTATGRGTYARTRSDKHGFPRLRLPRNKRVHGYATGDLARAVVPRGKKAGTHTGRVAVRSSGNFNVRTRHGLVQGIRHTHFRLLQRADGYGYTTRLEAAIPPPSEAEGSYARRFR

SEQ ID NO: 7398 - protein, 333 aa, unidentified
  REGION 1..333: note = Human gut metagenome
LRVFVLNKRGKPLMPCSPAKARLLLKEKKAIVKRRTPFTIQLTIATGETKQPGSLGVDAGYEHVGLSASTEKAELYASEVELRQDVSDLLSARRALRQCRRNRKTRYRTPRFGNRIRTKRKGWLAPSVENRINAHLSRIESVLRLLPVTKITVETASFDTQLLKNPDISGKEYQEGEQLGFWNIREYVLCRDGHVCQHCYGRSKDPVLNVHHLESRRTGGDSPGNLITLCETCHKALHRGEIKLKAKRGRSFRAETFMGIMRWGVLNRLKASHPKLEVHNTYGYRTKHARIANGIAKSHCADAFCIAGNFGAKRLGEFFFQKQTRRNNRQIHK

SEQ ID NO: 7399 - protein, 475 aa, unidentified
  REGION 1..475: note = Human gut metagenome
MVAVVTSTGKPLMPTSAYRARKLLKKRRAVIFKYRPYFTIQLVDRADGEVQEVEYKSDTGSVHVGISVCTEKKELLSEQRDLLENEPEHHNDRKKNRRTRRNRKRYRKPRFDNRKKKPQESHEKWLPPTLLHKMEVQVRLFREFCRVVPVTSACFEMGKFDTQALKAVSKGEPVPEGEGYQKGERYGTDTLRAAVFLRDGHTCRFCGRSVKDGAILHVHHVGYWKGDRTDRLANLASACEQCHTPANHGKNGILYGKEPEFKTLKDASYMTSVRWIMLDEIKKVAPGVQVSVTYGVTTKRKRQELHLPKSHVNDAFSMASFHPKKRSDTEYWKKIPRHDRVLQRFYDAVYLDTRDGSEKKGSELSNGRISRNHKKDSENLHRYRGYKVSKGHNSIRRGASSLKPGSIVMYKGEKMTVHGTHTRYVTDKDGKTVKKVNVQFTRPASDGKKSASLKKCTPVSRVYNTGWKRYWPDKK

SEQ ID NO: 7400 - protein, 422 aa, unidentified; identical to SEQ ID NO: 5333
  REGION 1..422: note = Human gut metagenome

SEQ ID NO: 7401 - protein, 461 aa, Parasutterella sp.; identical to SEQ ID NO: 3646

SEQ ID NO: 7402 - protein, 289 aa, Parasutterella sp.
IEAVLRLLPVTKITVETASFDLQLLKNPDISGKEYQEGEQLGFWNIREYVLCRDGHVCQHCYGRSKDPVLNVHHLESRRTGGDSPGNLITLCETCHKALHRGEITLKVKRGQSFRAEAFMRIMRWEVLNRLKASHPELEVNNTYGYRTKHARIANDIANSHCADAFCIAGNLGAERLSEFFFQKQTRRNNRPIHKLSILKGGLRKRNQAPYEIKGFRLFDKVACQGEEGFIFGRRSSGYFDVRKLNGTHISAGISYKKLRLLEKRQTYLIEIRKEEALPPLPEGRGLRA

SEQ ID NO: 7403 - protein, 485 aa, unidentified
  REGION 1..485: note = Human gut metagenome
LYIKMTSCTCTVFPACNHAKASSSQGKHNLLLRQERLIVKEVAYMSTIYVLNKDGKPLMPTTRGGHVRHLLKEQKARVVQSNPFTIQLLYETNDVVQPLYLGIDPGRTNIGVAVVKADGTAVFAAHLETRNKKIPKLMQDRKKARRARRTNGRRCRRQRRAKANGTISKKCVKQDTAQSKNPSKRAKEIGVIKRHLPGCKKDVLCVGIKNKEAKYTNRARLEGWLTPTANQLLQTHINLVKKIQKFLPISDAVLEVNKFAFMRLDNPNIQKWQYQQGPLYQKGSLENAVSEMQEHHCLFCEKPIEHYHHVVPKSENGSNTIANIVGLCAEHHNLVHKDVAWQEKLVEEKTGLNKKYGALSVLNQIIPALTKELSFLFPKHSFMTNGKSTHDYRAAHGISKDHWLDAYCIACSVLPIDVCDSTINNCVPYELKQFRRHDRRALNNENMNRVYTLNDKVVATNRHKATEQEAASLEEFRKEHPNDVC

SEQ ID NO: 7404 - protein, 414 aa, unidentified
  REGION 1..414: note = Human gut metagenome
MPCSPAKARLLLKEKKAIVKRRTPFTIQLTIATGEAKQPVSLGIDAGYKHVGLSASTEKAELYASEVELRQDITDLLSARRALRQSRRNRKTRYRAPRFDNRISTKRKGWLAPSVENRINAHLSRIEAVLRLLPVTKITVETASFDLQLLKNPDISGKEYQEGEQLGFWNIREYVLCRDGHVCQHCYGRSKDPVLNVHHLESRRTGGDSPGNLITLCETCHKALHRGEITLKPKRGQSFRAEAFMGIMRWEVLGRLKASHPELEVNNTYGYRTKHARIANDIAKSHCADAFCIAGNLGAERLGEFFFQKQTRRNNRQIHKLSILKGGIRKRNQAPYEIKGFRLFDKVACQGEEGFIFGRRSSGFFDVRKVDGTRISAGISYKKLHLLEKRRTYLTEIRKEEALPPLPEGRGLRA

SEQ ID NO: 7405 - protein, 420 aa, unidentified
  REGION 1..420: note = Human gut metagenome
MRYVYVLNKHGEPLMPCSPRKARLLLKQKKACVIKRTPFTVKLLYGSAGYKQPVTLGVDAGSKHIGISATTEKHELCREEATPRNDVVDLLSARRAFRRSRRNRKTRYRAPRFNNRVHSKHKGWLAPSVEVKIQEHITLIKHACRILPVTLVRVETAEFDTQRLKAMLEGKPLPVGTDYQLGEIYDEYNVRQYVLKRDNYTCQCCGAHSTKTKGVKLHVHHIETRRTGGNAPNNLITLCKACHKALHAEKVTLDGKKRGKPLKDAAFMGIMRKTLIERLRKELKIPVQGTYGYITKYLREKNCIPKSHTNDALCISKNPLAIPCDTCYYTKAVRHHNRQLHKATILKGGIRKANQAPYIVKGYRLWDKVAYNGTECFITGRRTSGYFALKKLDGTVVSNSISYKKLRLLEAATNYIIERK

SEQ ID NO: 7406 - protein, 406 aa, unidentified
  REGION 1..406: note = Human gut metagenome
MVYIKDIDGRPLMPTKRHGKVRWLLKENKAVVINLCPFTIQLTYKSTDHKQPVTLGIDAGAKHIGFSATAEKEELFACETTLRTDIVDLLSTRLQNRRTRRSRLRYRKPRFNNRGSSKKKGWVAPSVKQRIDSHLNEVNEIHKILPITKIVIEVAQFDTQKMKNHDISGSDYQNGEQLGFWNVREYVLFRDGHKCSHCKGKSKDPVLNVHHLESRKTGGDSPSNLVTLCESCHKAFHKGEIELKKKRGKSLRDAAVMGIMKWKLYEELKSRYDNVSMTFGYITKYNRIKYGIEKSHTSDAFVISRNFNAKRIERQYLKRLVRRHNRQIHKMKILKGGKKKNNQAPFGVFRFRLFDKVLYNNEICFIYGRRKSGNFNIRDFNGENPKDVSYKKLKLIRGKMHPIILK

SEQ ID NO: 7407 - protein, 434 aa, unidentified; identical to SEQ ID NO: 5659
  REGION 1..434: note = Fermentation metagenome

SEQ ID NO: 7408 - protein, 413 aa, Beggiatoa sp.
MMMKVYVINKNGNPLMPCKPAKARKLLRDGKAKPVKQVPFTIQLMWDCEENIQPITIGIDKGSKITGYSAIANGEILISGYINHRTDVTKKMEARAANRRQRRSRLWHRPPRFNNRTSSKRSGRLPPSIKANADEVIRVINKLPLPITSVIIEDVLIDIAMLNDLKLKGKEYQKSNRLHENLRLATLLRDDFRCQQCHIKNTRLEAHHIKLTSEGGKNTINNLITLCSECHNKVHSGKIRLKTKGVSGFKDKIAQRTMQGKHYIETNVRQKYGFERVYGYQTAEFRKKIGLPKNHDSDALAIATLGTGEIIRFHRDNFYNINFRPVQTRRRYLDLPKKGRGRVKYQINENSSGFRKGDIVLVKDKYVKQVNSIYSAGTLAFKRIKGEPNNSMPKNCRLLERQSSIVFSNGIWK

SEQ ID NO: 7409 - protein, 448 aa, Deinococcus sp.
MQSDKPEHAPLGELYMALMRNKETMSNRVFVLNPDKTPLMPCTAKRARKMLEAGKAAIWRRYPFTIILKSEAAKQSQPLALKLDPGSKTTGMALVMEGKTGRQVVWGAELQHRGRAIRDALTSRRQLRSSRRSRKLRHRPARFLNRTKPTGWLPPSLMHRVLTVISWAKRLDRFTMLNSFSMELVSFDTQKMMNPDIQRQDYQRGTLFGTEVRAYLMHKWEGKCAYCQKEGSLEVEHLVPRSRGGSNRISNLIMSCRKCNEAKGAQHLEAFLKRKPAQLRRIQAQQQASLADTAAVNATKYRLLDELKSFGYPVETGSGAQTSFNRQQQGYDKAHWIDAACVGASGEKVQVKPLEPLNITCMGRGSRQMCGTNKYGFPIRHRTRQKVFFGFQTGDIVRGVVTTGKKAGVYTGRVSVRATGSFKLPQVDGVHHRFFSILHKADGYGYNF

SEQ ID NO: 7410 - protein, 518 aa, Moorena sp.
METLLPDVSALQATAPESYERRHHDMPKTKLEQELSEADYIYVLSAYGDPLMPTRRRGHVKRLLNKGKARIVSHVPFVIQLKYDGSKNTQPLFGGIDPGRTNIGAAVVTPEGKCVYRSHTASRNRDVPKKMEARKSHRQASRRGERLRRKRRARANGTTTEFPDGRMLPGYKKPVMVKDIINTTAKFNYRKRPEKWLTPTANQLVQTHENLICRISAILPVTDWTIEANKFAFMQMDNGKCYGTDFQNGRMKGYKNSHEYVYIRQNGVCPMCGAPIEHYHHIIPRSRGGSDLPENILGVCMKCHAQIHKGELRSDMKGVMKKYGSLSVLNQAIPYIWQWMTETYGEDHAHFCTGVETQTVRDDSGLPKDHDIDALCIACIGSGITPVRRLPRTFEIVQFCRHSRANINNQRERTYRLDGRIVCRNRHKRFEQKGDSIEEFRQKYPDQVSRLTVTKSTRYYNDADRLMPGAVFLFDGERYVLQSQLTGGRYYRAVGCEKRNFPAAKCTIIRENAGLVYV

SEQ ID NO: 7411 - protein, 458 aa, Halomonas sp.
MAVFVLDKQKQPLMPCSEKRARLLLERGRAVVHKRYPFCIRLKDRVGGETQPLRLGLDPGSKTTGLALMRESDGEQRHVLCLFDLVHRGFQIKKALAQRAAFRRRRRSKNLRYRAPRFDNRKRKAGWLPPSLQHRVDTVMAWVERLSRLAPITGISQELVRFDTQKLENPEISGVEYQQGTLLGYEVREYLLEKWGRECAYCGTAETALEIEHVVPRSRGGSNRVSNLTLSCHACNQAKDSLPLADFFARDKGLKKRFKANGLLADARLERVQRELKRPLRDASAVNATRWALFTALNATGLPVAVGTGGRTKYNRQRLDIPKTHALDAACVGVFETLHDWAVPTLAIQCTGRGSYQRTRLTKHGFPRGHLMHQKQVHGFQTGDMVRAVVPTGKKAGTHTGRVAVRKTGSFNIQTDQGAVQGISHRHCTLIQRGDGYGYYVTPTIHQPTKGEAGQAVA

SEQ ID NO: 7412 - protein, 413 aa, unidentified; identical to SEQ ID NO: 2636
  REGION 1..413: note = Human gut metagenome

SEQ ID NO: 7413 - protein, 456 aa, unidentified; identical to SEQ ID NO: 4017
  REGION 1..456: note = Human gut metagenome

SEQ ID NO: 7414 - protein, 414 aa, unidentified
  REGION 1..414: note = Human gut metagenome
MPCSPAKARLLLKEKKAIVKRRTPFTIQLTIATGETKQPVSLGVDAGYKHVGLSASTEKAELYASEVELRQDITDLLSARRALRQSRRNRKTRYRAPRFDNRIRTKRKGWLAPSVENRINAHLSRIEAVLRLLPVTKITVETASFDLQLLKNPDISGKEYQEGEQLGFWNIREYVLFRDGHVCQHCHGRSKDPVLNVHHLESRRTGGDSPGNLITLCETCHKALHRGEITLKAKRGQSFRAEAFMGIMRWEVLNRLKASHPELEVNNTYGYRTKHARIANDIAKSHCADAFCIAGNLGAERLGEFFFQKQTRRNNRQIHKLSILKGGIRKRNQAPFEVKGFRLFDKVACKGEEGFIFGRRSSGFFDVRKLDGTRISAGISCKKLHLLEKRRTYLTEIRKEEALPPLPEGRGLRA

SEQ ID NO: 7415 - protein, 507 aa, unidentified; identical to SEQ ID NO: 6546
  REGION 1..507: note = Human gut metagenome

SEQ ID NO: 7416 - protein, 559 aa, Streptomyces sp.
MTTLPVGEQTHQAVLPQQPALESVGADTPGSRDETAHGHPADARGTGGRHGRGETGGHGTRARRRHAETAAPAAREAEKGDGDVPTDTDAYAGGIGAGRVFVLSKDGKPLMPCHPARARELLGKGRAAVARQVPFTIRLRDRTLTESEVDGVQLRIDPGSRGTGLVLTDEKKETKGEGRTVTVRRGLISVELRHRGSQIHLCMLQRAGYRHRRRSTNCRYRARRSQNRVAALGRLPRSLRHRVDTTVSIATRMCRYAPITEIHVESVAFDTHSMSADSTPRGVEYRHGPLAGTDARAYLRTRWGSACAYCGATGVPLNIDHLQPRSRGGSDRVSNLVLACAPCNQAKGSQPVRIFLAHRPELLAEILRQARAPLHDAAAMNSTRLRLLESLARLGRPVHGWPGVLTQRMRITAGLRKTHTLDALCVGAPDHEGGSTVVRVPRHVLVVKATGRGSYARTTPDRFGFPRLRRARGKQHFGYATGDLVRASVPSGKWAGTWTGRISVRARGQHSLATPRGRINVNHRNLRLLQRGDGYGYGRRDDIADDSLGKSLERLPVAS

SEQ ID NO: 7417 - protein, 512 aa, unidentified; identical to SEQ ID NO: 4031
  REGION 1..512: note = Human gut metagenome

SEQ ID NO: 7418 - protein, 442 aa, unidentified; identical to SEQ ID NO: 2903
  REGION 1..442: note = Human gut metagenome

SEQ ID NO: 7419 - protein, 452 aa, Lactobacillus sp.; identical to SEQ ID NO: 3322

SEQ ID NO: 7420 - protein, 453 aa, Lactobacillus sp.
MMSEIKKVDYIYVVDSNGTPLMPTSRLGMVRRWLKTGQAKWFGNSRNTIQFVRPVTTNTQELTLGVDAGFHLGLSVVGNNREYYVSESLRKSEKDRITSRRELRRTRRNRLRYRKARFNNRRRKDGWLAPSIQHRLDFTIKEIKRLYKFLPITNLVVEVTPFDNQKLLNPDIQGWQYQKGKMYGFKTIKDYLLARDNYRDALDGKQYPASQLRVHHLVQRKDGGSNQPDNLVLLSDINHNQANHNNGILAKLRENRQKTLDYRGAYFMSILATRLSNYFEHYTTTQGYLTANLRQKYEIEKSHLNDAFVIAGGTDTTLRTNNVYSRQKLRNNNRVLQKFYDAKYIDSRDGKQKAGKELSSGRTRRSQELNYDNLRQLRKEKVKKGRVSIRRGHYQLRPHDVVLNTRTNRIETVKGVQNSGTVIKFQTGKTCSIKSVVSLYHVNGILEKKMKNI

SEQ ID NO: 7421 - protein, 512 aa, unidentified
  REGION 1..512: note = Human gut metagenome
MSTVYVLNKDGKPLMPTTRCWHVRRLLKEQKARVVTSKPFTIQLLYETDDVAQPLYLGIDTGRTNIGVAVVRTDGTAVFTAHLETRNKEIPKLMQERKKARRARRTNGRRCRRQRRAKANGTISKKCVKQDTAQNGSVSKRAKKIGVIKRHLPGCEKEVLCIGIKNKEAKFSNRTRPEGWLTPTANQLLQTHINLVKKIQKFLPISDVVLEINKFAFMRLDNPNVQKWQYQQGPLYQNASLEEAVSEMQEHHCLFCKKPIAHYHHVVPQSENGSNTIGNIVGLCTKHHDLVHKDTAWQKKLAKKKTGLNKKYGALSVLNQIIPALTKELSSLFPKHFFATNGKSTYDYRAAHGVSKDHWLDAYCIACSVLPNDVCDSNINSRVPYELKQFRRHDKRALHKANMNRVYTLDGKKVATNRHKAIKQTTDSLEEFRQRQPDDVCKLKVKEHHPEYRNPERNFPGCVFLVGKHTHVMQGTSGSHNGQADGYYDTNGNSYSSGKCKFVAKNKGIVFA

SEQ ID NO: 7422 - protein, 419 aa, Anoxybacillus sp.; identical to SEQ ID NO: 5328

SEQ ID NO: 7423 - protein, 456 aa, unidentified
  REGION 1..456: note = Human gut metagenome
MSTCVCVLTNNGERLMPTFRLGKVRHLLKDGKAKIVKHHPFTIQLLYDSKTNTQPIETCEDVGYNYIGISVKSESHEYVSAQYDTLQDEKEHHDDCRKYRRTRRNRLRYRKSRFDNRKRDKGWLAPSLEHKKHLNISLIERYVSVIPITHVTVEVGSFDTMLLQSIQKGEAKPEGADYQKGPRYNLATLREAVFYRDNYTCQVCKRKIADGAILHMHHMFYWKGRHGYQLDELVTVCEKCHTPANHQKGGKLYGFGKDKKFANLSGAAFMNAVRWQIVNALYATYGKEFVTITYGAMTKEKRIALQLEKTHNNDAYAMGDYHPARRCKFRHYQKRRRNNRVLEKFYDATYVDTRTGNKAKGKELFNGRISRNHKKDCKNLHKYRSKKVSKGRRSIRRQHYAIQPYDTVRLEGKTYITSGCHNKGTRLLIPVNGKSKSVAISKVQVVCHAGAWIQII

SEQ ID NO: 7424 - protein, 413 aa, unidentified; identical to SEQ ID NO: 2636
  REGION 1..413: note = Human gut metagenome

SEQ ID NO: 7425 - protein, 494 aa, unidentified
  REGION 1..494: note = Human gut metagenome
MDMVYVLNKDGKPLMATTRGGRVRYLLKEKKARVVSSTPFTIQLNYDTPDATQDLILGIDPGRTNIGVAVVKEDGQCVFSAHLETRNKEVPLLMKKRAAFRRQHRTQDRRRKRQRRAIAAGTTVESNTIERLLPGYEKPIVCHHIRNKEARFNNRSRPAGWLTPTANHLLQAHINLIAKAAKFLPITKVVVELNRFAFMAMDNPNIRRWEYQQGPLYGLGSVKDAVYAQQDGHCLFCKKPIDHYHHVVPRHKGGSETLANRCGLCEKHHALVHKDKAWAEKLVTRKGGMNKKYHALSVLNQIIPHLMEYIGSETLYDAYATDGRSTKGFRIAKNVPKEHYTDAYCIACSILDADTKVSTPVEPFELKQFRRHDRQACIRQMVDRKYLLHGKVVAANRHKAIEQKSDSLEEFREAHGNAAVSQLTVKPHHSQCKDMARIMPGAMMDFDGIVGVFKGSSGRNNGTPNYYNSTKGERFLTRSCVLLAQNAGMVFIPA

SEQ ID NO: 7426 - protein, 346 aa, Arthrospira sp.; identical to SEQ ID NO: 2872

SEQ ID NO: 7427 - protein, 418 aa, unidentified; identical to SEQ ID NO: 6419
  REGION 1..418: note = Human gut metagenome

SEQ ID NO: 7428 - protein, 397 aa, unidentified
  REGION 1..397: note = Human gut metagenome
EDVGYNYIGISVKSESHEYVSAQYDTLQDEKEHHDDCRKYRRTRRNRLRYRKPRFDNRKRSEGWLAPSLEHKKQLNIRLIERYVSVIPITRATVEVGSFDTMLLQAIQKGESKPEGVDYQKGPRYNLATLREAVFYRDNYTCQVCGRKIADGAILHMHHMFYWKGRHGYQLDELVTACEKCHTPANHQKGGKLYGFGKDKKFANLSGAAFMNAVRWQIVDALHATYGKEFVTITYGAMTKEKRIALQLEKTHNNDAYAMGDYHPACRCKFRHYQKRRRNNRVLEKFYDATYIDARTGNKAKGKELFNGRISRNHKKDSENLHKYRSKKVSKGRRSIRRQRYAIQPYDTVRLENKTYITSGCHNKGTRLLIPANGKSKSVAISKVQVVCHAGAWIQII

SEQ ID NO: 7429 - protein, 456 aa, unidentified
  REGION 1..456: note = Human gut metagenome
MNTCVCVLSNNGERLMPTFRLSKVRRLLKDGKAKIVKHHPFTIQLLYDSKTNTQPIEICEDVGYNYIGISAKSKSREYVSTQYDTLQDEKEHHDDCRKMRRSRRNRLRYRKPRFDNRKRDEGWLAPSLEHKKQLNISLIERYVSVIPITHATVEVGSFDTMLLQSIQKGEAKPEGADYQKGPRYNLATLREAVFYRDNYTCQVCKRKITDGAILHMHHMFYWKGRHGYQLDELVTACEKCHTPANHQKGGKLFGFGKDKKFANLTGAAFMNAIRWQIVNALYATYGKEFVTITYGAMTKEKRIALQLEKSHNNDAYAMGKLHPSRRCTFVHYEKIKRNNRVLEKFYDATYIDARTGNKAKGKELFNGRISRDHKKDSENLHKYRNKKVSRGRRSIRRQRYAIQPYDTVRLEGKTYITSGCHNKGTRLLIPVNGKSKSVAISKVQVVCHAGAWIQII

SEQ ID NO: 7430 - protein, 368 aa, Moorena sp.; identical to SEQ ID NO: 2621

SEQ ID NO: 7431 - protein, 323 aa, unidentified
  REGION 1..323: note = Cyanobacteria bacterium UBA11371
VPEALANITCKKDAAMQNYVFVLDTNFQPLNPVSPKRARELLTKQKAAVFRMYPFTIILKHALPNPLPKSLTIKLDPGSRFSGIAVLDGKNVIWVAELEHRSWQIKDSLLTRRSLRRSRRNRKTRYRQARFNNRKRKQGWLAPSLMHRVLTIETWVKRLCRYAPIASIAMELVKFDAQKLQNPEIDGVEYQQGELAGYEVRQYLLEKWGRKCAYCDKERVPLQIEHIHPRAKGGSNRVSNLTLSCERCNTKKGTKSIDEFLKKDGSRLEKIKQQAKQPLKDAAAVNTTRWELFRTLKNILPTTTGTGGQTKYNRTKLELPKQH

SEQ ID NO: 7432 - protein, 414 aa, unidentified
  REGION 1..414: note = Human gut metagenome
MPCSPAKARLLLKEKKAIVKRRTPFTIQLTIATGETKQPVSLGVDAGYEHVGLSASTEKAELYASEVELRQDVSDLLSARRALRQSRRNRKTRYRAPRFDNRIRTKRKGWLAPSVENRINAHLSRIEAVLRLLPVTKITVETASFDLQLLKNPDISGKEYQEGEQLGFWNIREYVLCRDGHVCQHCYGRSKDPVLNVHHLESRRTGGDSPGNLITLCETCHKALHRGEITLKAKRGQSFRAEAFMGIMRWEVLNRLKASHPELEVNNTYGYRTKHARISNGIAKSHCADAFCIAGNLGAERLGEFFFQKQTRRNNRQIHKLSILKGGIRKRNQAPFEIKGFRLFDKVACKGEEGFIFGRRSSGFFDVRKLDGTRISAGISYKKLHLLEKRQTYLTEIRKEEALPPLPEGRGLRA

SEQ ID NO: 7433 - protein, 430 aa, unidentified
  REGION 1..430: note = Human gut metagenome
MYRLTTEAGIPLIPERLHDTKKKKGTSRMSEYIYVLGMDGNPQMPTKRKRHVEQLLQTGRAHVFRQVPFTIQLTYKNQPVLQPVTIAEDPGRSNIGMAVVSLSGELLSAAVVQTRNKEIVKLMEKRKQYRRASRNGERKARQRLAKKCHTMIKAGFLMRKLPMYGKDKRVKCLVIKNTEARFCNRKREDGWLTPSAEHLARTHINLIHKMQKFLPITDVAIEINRFAFLSLEDPSISGVDFQNGPLKGYDDLNAAIEDLQDGHCLMCNSPIEHRHHIVPRSMQGSNTIGNIAGLCCKCHEKVHKSTAFEDSLKKKKAGLNKRYGAISTLNQAIPIICKRLEQEFGKEHVHYCSGRDTSMVRRSFGYHKTKEEQLHEVDAWCIAVLSLQQIPEKAPEFDHMHEILQFRRQDRSRIKAQTSRAYYHEGKKIA

SEQ ID NO: 7434 - protein, 423 aa, unidentified
  REGION 1..423: note = Cyanobacteria bacterium UBA12227
MSNYVFLIDQNKTPLNPVHPSHARKLLLSGKAAVFRRYPFTLILKRVVLEPKVYPLTLKIDPGSKFTGIALVTNQDNVIWAMELQHRGQQIKDALEHRSSVRRGRRNRNTRYRQARFLNRKRPHDWLAPSLRHRVLTTETWVKRLQKFVPIGSLVQELVKFDTQAIQNPEISGTQYQQGTLHGYECREYLLEKWNRQCTYCGVKDVPLEIEHIQPKSQGGSDRISNLCLACHKCNQRKGNKDIKDFLKGKPDVLSRILKGAKAPLKDAASVNSTRWTLFNTLKSLGIPISTGTGGQTKFNRIRFKLPLSHWIDAACVGVVETIKLVTTKILKVKATGFGGRQRCQTDKFGYPQKHRPLRPIRGFCTGDIVRADVPKGKYAGTFTARVCPMSHGYGEFVIDKKRRSIKLEYLTPVHRKDGYDYA

SEQ ID NO: 7435 - protein, 452 aa, Moorena sp.; identical to SEQ ID NO: 3322

SEQ ID NO: 7436 - protein, 430 aa, unidentified
  REGION 1..430: note = Human gut metagenome
MPKVYVLNRHGRPLMPCTPAKARHLLDAGKAKVRQRTPFTIQLLYGSTGYTQEVILGVDAGSKTIGLSASTETEELFSTEVKPRSDVVELMSARRQFRRARRSRKTRHRKPRFNNRVRSKHKGWLAPSVEVKIQEHMTAIRRVCVILPISRVVVETAEFDLQLLKAVAEGKPVPQGEDYQKGEMYGHYNVRQYVLWRDGYTCRVCGAHGSVKKGVPLHVHHLESRKVGGDAPDNLVTLCTACHDKLHKGIITAADLKKRKRRSTRDATFMGIMRMTLLRRLREQLPVPVVETRGYITKATREKLLVLPKSHTNDALAIAHGPQGFRAGYLPNIRQADRLYTIRPVRHHNRQLHKATILKSGVRKANQAETYICGFRLYDKVLYNGIECFVWGRRTSGSFLLRQLNGEKVKDGVSHKHLKLLERSQSYLVA

SEQ ID NO: 7437 - protein, 386 aa, unidentified
  REGION 1..386: note = Human gut metagenome
VKSESHEYVSAQYDTLQDEKEHHDDCRKYRRTRRNRLRYRKSRFDNRKRDKGWLAPSLEHKKHLNISLIERYVSVIPITHVTVEVGSFDTMLLQSIQKGEAKPEGADYQKGPRYNLATLREAVFYRDNYTCQVCKRKIADGAILHMHHMFYWKGRHGYQLDELVTVCEKCHTPANHQKGGKLYGFGKDKKFANLSGAAFMNAVRWQIVNALYATYGKEFVTITYGAMTKEKRIALQLEKTHNNDAYAMGDYHPARRCKFRHYQKRRRNNRVLEKFYDATYVDTRTGNKAKGKELFNGRISRNHKKDCKNLHKYRSKKVSKGRRSIRRQHYAIQPYDTVRLEGKTYITSGCHNKGTRLLIPVNGKSKSVAISKVQVVCHAGAWIQII

SEQ ID NO: 7438 - protein, 460 aa, unidentified
  REGION 1..460: note = Human gut metagenome
MVAVVDLFGKPLMPTNEYRARKLLKQKKAKIFGYRPFTIQLTERKSAEIQPIELCMDTGYIHIGISAKSERHEYLGMQIDTLTDEKLKRDDKRQYRRQRRNRKRYRAPRFDNRRRKEGWIAPSLEHKKEIHIDAIQRICKVMPITDITLEIGNFDTHVLKAVEEGKPLPQGSDYQHGERYGIATLREAVFFRDGYKCQCCEKSVKDGAILHVHHIKYRSQGGTNRMSNLITVCDKCHTPKNHKPGGKLWNWKPKLAEFKGASYMTSIRWTLYNEVTALLPNSSVHITYGAKTKESRRKLDIKKSHVNDAYVMGLFCPKHRTKPVYFKKKRRNNRVLEKFYDAKYIDSRDGKKRSGQELFNGRINRNHRKDSENLHLYRKQKVTKGKRSIRNKHYPIQPHDILLYQKKKYENAGCHNNGSRVILLPEKKSVALKQLTIYQYAGGYYRVPYESNKKEERTGS

SEQ ID NO: 7439 - protein, 270 aa, unidentified
  REGION 1..270: note = Human gut metagenome
LQLLKAIADGKPVPQGEDYQKGEMYGHYNVRQYVLWRDDYTCQCCGAHATKKKEVRLHVHHLESRKVGGDAPDNQVTLCESCHEKLHKGLITEKDFKKRKRRSTRDATFMGIMRKTLMQRLCSELPIPVVETRGYITKATREKLLVLPKSHTNDALAIAQGKRGFNVGYLPGIIQTDKIYTIRPVRHHNRQLHKAAILKGGIRKSNQAGKYVFGYRLFDKVQFNGQDCFIWGRRTSGYFVVKTIDGKVIHNSASFKKLRLVERASNYLIA

SEQ ID NO: 7440 - protein, 401 aa, Moorena sp.
VARKLLNTEKAAVFRRYPFTIILKEVKTEIVTQPIELKLDPGSKTTGIALVTNNKVIWGAQLQHRGQQIKDSLETRKAVRRSRRNRHTRYRKPRFLNRKRPNGWLAPSLLHRVLTTLTWLKRLCKYTPITNIAQELVKFDLQKLQNPEISGLEYQQGELQGYEIREYLLEKWGRNCVYCGKKDIPLEIEHIKPKSLGGTNRISNLTLACRNCNEKKGSRQIEDFLSGKFDLLNKIKKQAKQPLKDATAVNSTRWKLFNSLKELGLPVTTSSGGKTKFNRIKFGLPKTHWLEAACVGNINDLKILTNKPLIITAKGRSTRRLCRINKYGFPISKPRQKYQHGWQTGDIAKVVKNGVSYTGKIVVQSATRLEVRTQGKRIGGQLSLFQRIHLLDGYIYGFESN

SEQ ID NO: 7441 - protein, 424 aa, Moorena sp.
MSNYALVLDTNKQPLSPCHPSVARKLLDSGKAALFRMYPFTIILNKSCSDIVNQAIELKIDPGSKTTGIALVQGEKIIFGAELSHRGSAIKASLESRRSLRRGRRNRHTRYRQARFLNRTRTKNWLAPSLQHRVETTLTWVNKLIKFIPITRISQELVRFDLQQIDNPEISGIEYQQGTLSGYEVREYLLEKWQRKCAYCGIENVPLQVEHIHPQARGGTNRISNLCLACEKCNIKKGTQDIKDFLAKKPDLLKCILAQAKRPLKDAAAVNSTRWALFSRLQETGLPVFTGSGGQTKFNRTRLNFPKTHWLDAACVGQIGELEILTNKPLLIKATGHGTRQMCRTDKFGFPSRYVPRIKFVKGFQTGDIVKAIVTTGKKIGKYIGRVAVRATGSFNISASKLVQGISYKYCKIIHRKDGYDYAF

SEQ ID NO: 7442 - protein, 430 aa, Desulfobacter sp.
LSVFVLDTNKKPQNPVHPAKARLLLTEGKAAVFRQFPFTIILKEKVLDVASNPLRIKIDPGSRETGIAVINDDSGEIVFAMELRHRGQQIKNNLESRRAIRRSRRNRKTRYRKPRFDNRTRAEGWLPPSLKSRVHNIETWVKRLCRFCNIQAISMELVRFDMQKIQNPEISGVEYQQGELMGYEVREYLLEKWDRTCAYCGKTDIPLEIEHIVPKSKGGSNRISNLTLACTACNRKKGNKPLELFLSRKPGLLKRIQKQSRVPLKDAGAVNATRWDLFRTLKKTGLPVETGSGGLTKFNRTTRGLHKTHWLDAACVGESTPEKMFQVDKTVLIVKADGHGSRQMCRVNKFGFPRTTAKSTEKKVKGFQTGDIVKAVVTSGKKVGTYTGRVAVRKSGSFNIKTVDKTVQGISWKYCRLLHASDGYSYNTTC

SEQ ID NO: 7443 - protein, 419 aa, unidentified
  REGION 1..419: note = Human gut metagenome
MVYVISQDGKPLMPCSDPIARLLLKQGKAKVKKREPFTIKLTYETTNHTQGLTLGVDTGSGTIGTAVSKDNGDIVYMSEVVVRNDITDKMTQRAKYRRNRRNRKTRYRKARWLNRASSIKKDRFSPTMQSKLHSHVREIEYIQSILPITEMVFETGQFDMQLMKNPSLANPKVRPWGYQKGANYGFENTKAMVLNRDNYTCQCCKGKHKDSKLEVHHIVFRSQGGSDEESNLLTLCHTCHKDLHSGKINPKLSGKVKGNLKYATQMNSIRKQLFRFYPNAIETFGYVTKANRLHLGVDKEHYYDACTIATQGNAFNVKSNLYKKKCVSDGDFQKTKGIRSEQPIVTDKICGFRKFDKVRYFGNDYFIKGRMSTGYAILMDIDGNKIDFSTMPRGYKTPKLSNCKRITARSTVMTQVKVV

SEQ ID NO: 7444 - protein, 465 aa, unidentified
  REGION 1..465: note = Human gut metagenome
MSTCVCVLSNSGERLMPTFRLGKVRRLLKDGKAKIVKHHPFTIQLLYNSKTNTQPIEICEDVGYNYIGISVKSKSCEYVSAQYDTLQDEKEHHDDCRKYRRTRRNRLRYRKPRFDNRKRSEGWLAPSLKHKKELNVNVVKMYCAVMPITHATVEVGSFDTMLVKAIQEGKAIPEGADYQKGPRYNLATLREAVFYRDNYVCKVCGRKATEGAILHMHHMFYWKGRHGNSLDELLTVCEKCHTPANHQKSGKLYGFGEKIKFADLSGAAFMNTVRWQIVNELYTAFGKPFVTITYGAMTKEKRIALRLEKTHNNDAYAMGEFHPNFRCTFEHYEKVRRNNRILEKFYDSQYIDIRTGEIATGKELFNGRINRNLKKNSESLHKYRGKRTYAGHRALLRKKVNLNPGDLVSFNGEVLIVHGTHTDKKGAINVEFKTPAKNGRKSASLKKLKIVKAAGSIHPAWEKVS

SEQ ID NO: 7445 - protein, 451 aa, unidentified
  REGION 1..451: note = Human gut metagenome
MSVAVISKTGERLMPTSEYRARKLLKSGKAIKYSYHPFTIQLTERKTGNIQPIELCMDTGYIHIGISVKSEKHEYLTEQIDTLTDERSRHNARRMYRSQRRNRKRYRQPRFNNRKKDKGRIAPSLEHKKNIHVQTISRINNVMPLTDITMEMGNFDTQVLKAKEEGRPLPQGVDYQHGERYSIATLREAVFARDGYKCQCCGRTIKDGAILHVHHIKYRSQGGTNSISNLATVCDKCHTPKNHKPGGKLYGWKPTLPSFKGATFMTTIRWQLYNEAKALFPDIDIHITYGAATKERRRELNIDKSHINDAFVMGQFHPRHRIKAVLYKKKRRNNRCLEKFYDAKYIDSRDGKKRSGQELFNGRINRNHKKDSENLHQYRLQKVTAGKRTVRKQHYSVQPHDIIIYESRKRETTGCHCNGARVMLLPDKKSVSIKKIKIYRYAGGYFKSTFN

SEQ ID NO: 7446 - protein, 423 aa, Moorena sp.
MSNHVFVLDTNRKPLTPCKPGVARSLLKAGKASVFRRYPFTIILNKEVDANPEPLELKLDPGSKVTGIALKQGNHIIFAAELQHRGQQIKEALLSRRQLRRSRRNRKTRYRPARFLNRTRSKGWLAPSLQHRVDTLMTWVHRFRRLAPVGRITQELVRFDLQLMENPEISGVEYQQGELQGYEVREYLLEKWGRTCAYCGAQNVLLEVEHIQPRSKGGSDRVSNLTMACHSCNQAKGNGDIRDFLSGQPDVLSRLLRQAKSPLKDAAAVNSTRWALFKALKATGLPVTTGTGGQTKFNRLRLNLPKAHWLDAACVGPVESLEVLTSKPLLILAKGHGTRQMCGTNKYGFPNRHRSRRQIHKGFQTGDMVTALVTAGKKIGSYLGRVLCRASGSFDITTASVRVAGISHKYCQPIHSTDGYAYA

SEQ ID NO: 7447 - protein, 429 aa, unidentified
  REGION 1..429: note = Human gut metagenome
LKDGKAKIVKHHPFTIQLLYDSKTNTQPIEICEDVGYNYIGISVKSQSHEYVSAQYDTLQDEKACHDSCRKLRRSRRNRLRYRQKRFNNRKHDKGWLAPSLEHKKELNVNVIKMYCEVMPITHATVEVGSFDTMLLQAIQKGKSKPEGVDYQKGPRYNLATLREAVFYRDNYTCQVCGRKIADGAILHMHHMFYWKGRHGYQLDELVTACEKCHTPANHQKGGKLFGFGEDKEFANLSGAAFMNAVRWQIVDALHATYGKEFVTITYGAMTKEKRIILGIEKTHNNDAYAMGDYHPVHRCVFRHYQKRCRNNRMLEKFYDATYIDTRTGNKAKGKELFNGRISRNHKKDSEDLHKYRSKKVSKGRRSIRRQRYAIQPYDTVRLESKTYITSGCHNKGTRLLIPANGKSKSVAVSKVQVVCHAGAWIQII

SEQ ID NO: 7448 - protein, 570 aa, Streptomyces sp.; identical to SEQ ID NO: 3191

SEQ ID NO: 7449 - protein, 425 aa, Planktothrix sp.; identical to SEQ ID NO: 3728

SEQ ID NO: 7450 - protein, 414 aa, Parasutterella sp.; identical to SEQ ID NO: 3876

SEQ ID NO: 7451 - protein, 409 aa, unidentified
  REGION 1..409: note = Human gut metagenome
MVYVQDINGKPMMPTTRHGKVRRLLKENKAVVVNLCPFTIKLTYVTSDYKQEIVLGVDAGTKHVGLSATTKSKELYSSEVILRNDIVDLLSTRRELRRTRRNRLRYRKPRFDNRIKSRRPGWIAPSVRYKIDAHIRVIDNVCSILPIFRIVIEVAQFDTQKIKNPNISGKEYQEGNQLGFWNVREYVLARDGHKCQYCKGKSKDSILNVHHIESRKTGGDSPSNLITLCETCHKEYHKGNIDLKIRRGKSLRDAAVMGIMKWRLYEELRSKYNRVSMTFGYVTKYNRIKHGIEKSHVSDAFVISKNFNAIRLGYYYKVRLVRRHNRQIHKQKIQKGGIKRLNQSPFEVFGFRLFDRVMFENNCYFIFARRKTGSFNIRDINGKNKRDITYKKLKLSRCKRFMIEKKLIY

SEQ ID NO: 7452 - protein, 413 aa, unidentified; identical to SEQ ID NO: 5215
  REGION 1..413: note = Human gut metagenome

SEQ ID NO: 7453 - protein, 492 aa, unidentified; identical to SEQ ID NO: 4486
  REGION 1..492: note = Human gut metagenome

SEQ ID NO: 7454 - protein, 433 aa, unidentified
  REGION 1..433: note = Human oral metagenome
MFVYVLDKNGQPLMPTSRFGKVRRMLRDKKAKVVQSCPFTIRLLYEPKTKIVQDVVLGVDTGSKYVGVACVGNDKVLYQSQVELRDDIKKKMDSRRMYRRNRRFRKTRYRKVRFLNRGNSIKKDRYCPTLVSKYFGHEREIEFCKKILPIKDTVLEVGKFDTQLMEKPWIQEYKWAYQKGVNYGYVNAREHALVRDNYTCQCCGKKNCRLEVHHIVFQSNDGSDDLENLVTLCKDCHDTIHHDGKELKLRGKRRSTLRYATQMSIIRSMLLKKYPDAIETHGFVTKANREHLGLPKYHYIDACVIASGGLVFEQSDVLYRKRCVSKQDRQLCKGIRGERKIPTGKIFGFKKFDKVEYLGKVCFIKGRRSRGYFILMDINNNALDFREKGGKREPTYQHLKRISVRRSNLCISSRLWRNSTDGCIQADIEYLCS

SEQ ID NO: 7455 - protein, 451 aa, Microcoleus sp.
MDTTSPQNIGEETITPTGRTFMSNFVFVVDTNLQPLNPIPSGQARRLLAQQKAAIYRRYPFTLVLKRAVRVPQTQPHQLKIDPGSKVSGLAIVRDRKVIWGAELTHRGQQIKNDLESRSNLRRNRRNRKTRYRKPRFLNRNRKPGWLPPSLESRVKNIVTWVSRIRRYVPITGISQELVKFDTQAIQNPEISGVEYQQGELAGYEVREYLLAKWGRKCAYCGVENVPFEVEHIYPKSKGGSDRVSNLTLACRQCNQAKGDRYLREFLSGKPDILSRILQQAKQPLKDAAAVNSTRPSLFQQLKQTGLPIEVSTGGRTKYNRTRLGLPKTHWLDAACVGNQEVLQVVTKQPLLIAAKGWGSRQMCTTNKYGFPVKHKTRCKTFFGFGTGDMVSAILPSGKFAGTHAGRLTVRQSGVFSMTTPLGKISPVRHKYCKLIHRNDGYMYALSAVVH

SEQ ID NO: 7456 - protein, 441 aa, unidentified
  REGION 1..441: note = Fermentation metagenome
MELRITYCKVEYFQGVDTLVYVISIDGKPLMPCKPVIARLLLKQHKAKVIKKYPFTIKLLYKTKTEYTQPLTLGIDTGSSKIGSAVVDENNNVLYLSQVEVRNDITDKMKQRAKYRRNRRNRKTRYRKARWLNRKNSIKEDRFSPTIVSKINSHLKEINFVKSILPIQNVILETATFDPYALKNPAVLHNKWLYQKGVNYGFANTRAYVLGRDNYTCQYCNGKSKDSKLEVHHIIFRSQGGSDESKNLITLCKTCHGKLHNGKINLKKNGKVKGQLKHATQMNSIRQQLLRLLPEATETFGFITKEHRQLMKLPKEHYYDAIAIACLNNIENTGLIGVNFKTKNILFKRCIADGDFQQTKGVRSEQRIITGKIQGFRKLDKVEYQGKEYFIKGRMSTGYAILMDIEGNKINLKPIPKFEKMKRMQARKSWIISQETIRNIC

SEQ ID NO: 7457 - protein, 415 aa, unidentified
  REGION 1..415: note = Human gut metagenome
MVYVLDKNGQPLMPTDRHRKVRLMLQSGQAKVIKRCPFTIQLNYDSGHQTQEISLGIDAGSKHIGVSTTTKIKVLYEVDVELRNDIVDLLSSRRELRRGRRNRKTRYRQAKFNNRRRGNGWLAPSIRQKIGTHLTVVENICKMLPISRIMVETASFDIQKIKNPDIQGAEYQQGDQLGFWNVREYVLFRDGHTCQCCKGKSKDKILNVHHIGSRKTGGNAPNNLITLCETCHTGYHKGTVQLPKAIKRGMRFKDAAFMGIMRWAFYEALKQQYEPVALVHNTYGYITKHTRIAYNLPKEHYVDARCISGNPEASSNGEYYYQKKVRCHNRQIHKLTVLKGGIRKQNQATYLVKGYRLFDKVSYQGKGYFVFGRRQSGFFDIRTLSGEKVNKGSLSCKKLKFIATRTYYLTERRAV

SEQ ID NO: 7458 - protein, 419 aa, unidentified; identical to SEQ ID NO: 3670
  REGION 1..419: note = Human gut metagenome

SEQ ID NO: 7459 - protein, 465 aa, unidentified
  REGION 1..465: note = Human gut metagenome
MSTCVCVLSNSGERLMPTFRLGKVRRLLKDGKAKIVKHHPFTIQLLYDSKTNTQPIEICEDVGYNYIGISVKSESHEYVSAQYDTLQDDKEHHDDCRKYRRTRRNRLCYRKPRFDNRKRSEGWLAPSLRHKKELNVNVVKMYCAVMPITHATVEVGSFDTMLVKAIQEGKAIPEGADYQKGPRYNLATLREAVFYRDNYVCKVCGRKATEGAILHMHHMFYWKGRHGNSLSELITVCEKCHTPANHQKGGKLYGFGENVKFADLSGVAFMNTVRWQIVNEFYAAFGKPFVTITYGAMTKEKRIALRLEKSHNNDAYAMGEFHPNHRCTFEYYEKVRRNNRILEKFYDSRYIDIRTGEKASGKALFNGRINRNHKKDSENLHKYRGKRLYKGHRALVRKKVNLNPGDLVSLNGEVLVVHGTHTNKKGAINVEFKVPSKSGKKSASLKKLEIIKTSNSMRSVWKKVS

SEQ ID NO: 7460 - protein, 427 aa, Moorena sp.
MRVFVLDKNRKPLDPCHPARARKLLKSGRAKVLRRYPFTIIIKDLEEENCSTHDHQLKIDPGAKTTGLAIIQGNRVIWGAELTHRGFQIRDALTSRRQLRRSRRNRKTRYRQPRFLNRKKPKSWLAPSLMSRVHNILTWVNKLIKFCLVTGISQELVRFDTQKMLNPEISGIEYQQGTLYGYELREYLMEKWNRTCAYCGAKNTRLEIEHIKPKSKGGDHRVSNLAIACHNCNQAKGNLEIEEFLSSKPNILKRILSQAKKPLADAAAVNATRWKLHNELKLIGLPVEVGSGGLTKYNRCRQNLPKTHWLDAANVGKVSTLYIEDYQPLLIAAKGHGKRQICGTNKYGFPIRHNSKKKIHKGFQTGDIVKAVVTKGKKIGTYIGRVATRKTGSFDITTAKGRVSGISYKYCQAIHRKDGYSYQFHGG

SEQ ID NO: 7461 - protein, 431 aa, unidentified
  REGION 1..431: note = Human gut metagenome
MPNKVYIINKHGRPLMPCSPAKARHLLDEGKAKVKKRTPFTIQLVYGSSGYTQEVILGVDAGSKTIGMSASTTKEELLSAEVKPRNDVVDLLSTRREFRRAQRNRKTRYRKPRFDNRVRSKHKGWLAPSVEVKIQEHITAIRRVCGILPVSKVVVETAEFDLQLLKAIADGKPVPQGEDYQQGEMYGHYNVRQYVLWRDGYTCQCCGAHATKKKEVRLHVHHLESRKVGGDAPDNQVTLCESCHEKLHKGLIAEKDFKKRKRKSTRDATFMGIMRKTLMQRLCSELPIPVIETRGYITKATREKLLVLPKSHTNDALAIAQGKQGFNVGYLPGIVQINKIYTIRPVRHHNRQLHKATILKGGIRKSNQTEKYVFGYRLFDKVQFNGQDCFIWGRRTTGIFTIKTINGKMIKDGISFKKLKLVEKSTSYLIA

SEQ ID NO: 7462 - protein, 453 aa, Moorena sp.
MQRVFVVDANKQPLMPCLPTRARQLLKKGKAAVLKLHPFTIVLKEKEKGDLQEIELKIDPGSKVSGIALTCSFLREKVVLWAANLEHKGMAIRSALESRRSLRRGRRYRKTRYRKVRFDNRRRKEGWIPPSLESRVHNILTFVQRLQRIAPISSISLESVRFDMQKIQDPEITGSEYQQGALFGYEVREYLLEKWERCCAYCGAKQVRLEIDHILPKSKGGSDRVSNLTIACRDCNCKKSNYSLQEFLKGKSGLQSQILEKAKKPLADASAVNSSRKEIVNRLSILNLPLSCSTGGRTKFNRTLQGYPKDHWIDAACVGESGEDVYIPSSLIPLTIKAIGRGSRQFCRMDKYGFPRTSPKDQKRIHGFATGDFVKAIVPKGKRIGTYSGRVAVRSSGNFCIDTSFGKVDGISFRFCKNLQHADGYQYSQQSQQQEERHFLPRLKSRVSMSSVL

SEQ ID NO: 7463 - protein, 465 aa, unidentified
  REGION 1..465: note = Human gut metagenome
MSTCVCVLSNSGERLMPTIRLGKVRHLLKDGKAKIVKHHPFTIQLLYDSKTNTQPIEICEDVGYNYIGISVKSESHEYVSAQYDTLQDEKEHHDDCRKMRRARRNRLRYRKPRFGNRKCDKGWLAPSLEHKKQLNIRLIERYVSVIPITRATVEVGSFDTMLLQAIQKGESKLEGADYQKGPRYNLATLREAVFYRDNYTCQVCGRKATEGAILHVHHMFYWKGRHGNSLDELLTVCEKCHTPANHQKGGKLYGFGENVKFADLSGAAFMNAVRWQIVNELYAAFGKPFVTITYGAMTKEKRIALRLEKSHNNDAYAMGELHPNCRCTFEHYEKVRRNNRTLEKFYDSRYIDIRTGEIATGKELFNGRINRNHKKDSENLHKCRGKRTYAGHRALLRKKVNLNPGDLVSLNGEVLIVHGTHTNKKGAVNVEFKVPAKNGQKSANLKKLKIVKAAGSIHPAWEKVS

SEQ ID NO: 7464 - protein, 485 aa, unidentified
  REGION 1..485: note = Human gut metagenome
MPDGRRKPERKLMVAVVGNTGKPMMPTSEYRARKLLKKGRAIIYRYRPYFTIQLLDREDGEVQEVEYKSDTGSQHVGISVCTEKKELLSEQRDLPQMEPEAHNDRKKNRRTRRNRKRYRAPRFDNRKKRVQEGHTKWFAPTNLHKLEVQVSLFRELVKVIPVTKAVFEMGKFDTQVLKAVLEGKPLPHGKDYQRGEQYGTDTLRAAVFLRDGHTCQFCGRSIKDGAFLHVHHVGYWKGDRTNRPANLATACEQCHTPANHGKNGILYGRQPKYGSLKDASYMTMVRWAMLEELKAAAPGVEIHVTYGVATKRKRQGLHLSKSHVNDAYSMEMFHPKKRADTVYWKKVRRHDRILQKFYDATYVDTRDGKTKKGKELFNGRISRNHKKDSENLHKYRGHKASKGRVSIRRDGDKLKPGSMVLYNGERLTVHATHTTYRKNEKGETMKNVNIQFTHPASNGRKSASSKKCRVLTRNYNTGWKRYRPA

SEQ ID NO: 7465 - protein, 430 aa, Moorena sp.
MVYVLSKNGAPLMPCSPRKARLLLAGNKAKVVRKTPFIIKLVYGSTEYRQTVVAGLDTGSTVVGCAAVANGCVVYQSETILRNDITGKLKSRSSYRRTRRGRKTRYRAARFDNRSASCRKDRLPPSLNSKITSHQREVAAVNSILPVSEWIFELAAFDIHKITNPEVTGVGYQQGALMQFYNVKQFVYARDSYRCQSGQKIKHSTRLHAHHKLFKSQGGADTQDNLITLCETCHADLHKGLFSLKAKTSRSKTKHATEMGVIKSRLAKDAIAHTVTYGYETKFKREQHLKLDKTHANDAIAICVKEGASVLPMANILIKRHLSKGDYQQTSGKRSQLTIPTGKLFGFRKGDKVATSRGMGFVKGKRSSGYFSISDIDGGIIHASEKVTNCVRLAARSTTQVEEIKLTKLIERRKEASLNKQLKKPTKAQA

SEQ ID NO: 7466 - protein, 427 aa, Enterococcus sp.; identical to SEQ ID NO: 5630

SEQ ID NO: 7467 - protein, 442 aa, unidentified; identical to SEQ ID NO: 2903
  REGION 1..442: note = Human gut metagenome

SEQ ID NO: 7468 - protein, 518 aa, unidentified
  REGION 1..518: note = Human gut metagenome
LANLKLIDELLEKTEYIYVLGTDGKPQMPTNRKVRVRSLFKSGLAKIVDTVPFTIRLLYENDAVLQPITIAEDPGRTNIGAAVLTQLGDLVFSAVVETRNKSIKKLMSDRKAYRQASRRGERKARQRLAKRHGSMIKAGMIMRKLPQYAADKFVTCKIIKNTEARFCNRKRMPDWLTPTVNHLVQTHINLIKKVEKYLPITDIAIEVNRFAFMQMENPDASGVDFQNGPLKGFDDVKAAICEQQHGKCLMCKNDIEHFHHIVPRSKGGSDTIQNQAGLCKKCHAKVHTDAEFQAKFKDKKEGLIKKYGALSALNQAIPFICKELLEIYSVEHVHFCTGKDTSLIRSSLGYEKTKDNQMHEVDAYCIGLAAIGADKAKRPDFNNVFKIKQFRRQDRQLVHYQKERTYYLDGKKIATNRNPRFEQKGDALSDWYKEQIKIYGQYEAEKMRSRLTVKKSKRSYNTTKRLMPGCVFYYDGQRHVMTGQSSYGRYLRAYNCGTKDFPASKCQVIQFNAGLVFV

SEQ ID NO: 7469 - protein, 415 aa, unidentified
  REGION 1..415: note = Human gut metagenome
MVYIVSIDNKPLMPTSRHGKVRRLLRENKAEIIKRVPFTIKLLYRTETEITQNITLGVDAGSKVIGLSATTENQEVFKAEYELRNDISKKLTSKREIRQTRRNRLRYRKPRFNNRVSTKKKGWLAPSIEHKINSHLKIVEDLNKIMPINKIIVEVASFDVQKIKNPNIQGKEYQEGEQLGFWNVREYVLFRDDHVCQHCKGKSKDPILNVHHIVQRKDGGSNAPSNLITLCETCHNDYHKGKIDLKIKKAKSFKDSAFMGIMRWAFYNKLKEKYPDVSLTYGYKTKNKRIELGLDKTHYNDAYCIANNLKAKKLDVYYYYKKVRCHNRHIHKANYLKGGIKKNNQAPYQVKGFRLFDKVRYQDKEYFIFGRRSSGQFDIRDLSGNKVNKGSISCKKLEFIEPRKTVLVERRIAGS

SEQ ID NO: 7470 - protein, 456 aa, unidentified
  REGION 1..456: note = Human gut metagenome
MSTCVCVLSNSGERLMPTFRLGKVRRLLKDGKAKIVKHHPFTIQLLYDSKTNTQPIEICEDVGYNYIGISVKSESHEYVSAQYDTLQDEKEHHDDCRKYRRTRRNRLRYRKPRFDNRKRSEGWLAPSLEHKKQLNIRLIERYVSVIPITRATVEVGSFDTMLLQAIQKGESKPEGVDYQKGPRYNLATMREAVFYRDNYTCQVCGRKIADGAILHMHHMFYWKGRHGYQLDELVTACEKCHTPANHQKGGKLFGFGENKEFANLSGAAFMNAVRWQIVNALYATYGKEFVTITYGAMTKEKRIILGIEKTHNNDAYAMGDYHPAHRCVFRHYQKRRRNNRVLEKFYDATYIDARTGNKAKGKELFNGRINRNHKKDSENFHKYRSKKVSKGRRSIRRQRYAIQPYDTVRLEGKTYITSGCHNKGTRLLIPANGKSKSVAISKVQVVCHAGAWIQII

SEQ ID NO: 7471 - protein, 470 aa, unidentified; identical to SEQ ID NO: 2949
  REGION 1..470: note = Human gut metagenome

SEQ ID NO: 7472 - protein, 442 aa, unidentified
  REGION 1..442: note = Human gut metagenome
MSTSVFVLDKKHRPLMPCRPARARRLLRAGRARGVKRFPFVIRLVDRTVEQSEVQPVLIKLDPGSRETGAAVVRDDEKKRHHALAFFVIKHRGGAIRDALKARSAFRRRRRSQNFRCRSPRFLNRVKPKGWLPPSLRHRVETTLSFVRRMCRSLPVSGIATELVKFDSQKLQNPEVSGVKYQQGTLFEYEVREYLLEKFGRKCVYCGAEGVPLNIDHVVPRAKGGSNRVSNLVLACVSCNQKKGARSLEDFLKGKPEVLARVRRELKTPLRDAAAVNATRWVLFNELKATGLPVETGSGALTKLNRHAFGVEKEHWLDALCVGRLNGVVTRKGLNVLEIRCMGRGSRQRTRLTKYGFPRGYLMRQKCVHGFATGDMVEANVPKGKKAGLWRGRVAVRVSGSFNIQTPKGVIQGVGWKHCRLISHNDGYGYAWLGHAPHSSPA

SEQ ID NO: 7473 - protein, 402 aa, unidentified
  REGION 1..402: note = Human gut metagenome
VLTLKGSSAVKACVVKRTPFTIKLLYGSAGYKQPITLGVDAGSKHVGLSASTEKRELYREEFTPRNDVVDLLSTRRQNRRSRRNRKTRYRAPRFDNRVHSKHKGWLAPSVEVKIQEHITVIKRICRILPITLVRVETAEFDTQRLKAMLKGKPLPVGTDYQLGEMYDEYNVRQYVLKRDNYTCQCCGAHPTEKKPVRLHVHHLESRHVGGNAPNNLITLCVACHKALHEGKITLDKGKKRGKPLRDAAFMGIMRNTLLARLKDELNIPVKQTYGYITKLLREKNKIPKSHVNDARCIAKAPNAKPCDTMLYTRALRHHNRQIHKAKILNGGIRKKNQAPYLVKGFRLWDKVRYNGEECFITGRRSSGYFALKKYDGTVISNSASYKKLMLLEAATNYITERS

SEQ ID NO: 7474 - protein, 451 aa, Ruminococcus sp.; identical to SEQ ID NO: 2436

SEQ ID NO: 7475 - protein, 406 aa, unidentified
  REGION 1..406: note = Chicken gut metagenome
MPCSPRKAKLLLKNKKAKVKHRMPFTIQLIYGSSGYKQPVSLGVDAGSKVIGLSATTEKKELFASEVVLRDDIVKLLSVRREFRRARRNRKKRYRAPRFNNRVHSKNKGWLAPSVENKIETHLKAVRHVFLILPIAKIIVETATFDLQMLRAKELGLPLPEGVDYQQGEQLYSYNVREYVLFRDNHTCQHCKGKSKDLVLQVHHIESRVVGGDAPNNLITLCKTCHAKYHAGLIKLQIKRGASFRDAAFMGIMRWAFYDRLKQIYPNVSMTFGYITKHARIEHQLEKKHHIDARCISGHPNALPTENLYLQKAVRKRNRQLHKATINKGGIRKSNQSPKYVYGFQLFDKVFYDNKECFIFGRRATGYFDIRMLDGTKLSAGVSYKKLKLLERRKTILMQRVEDFAV

SEQ ID NO: 7476 - protein, 418 aa, unidentified; identical to SEQ ID NO: 4424
  REGION 1..418: note = Human gut metagenome

SEQ ID NO: 7477 - protein, 430 aa, Moorena sp.
MSNFVFVLDTNKQPLEPVTPGLARRMLNQGKAAVYKRYPFTIILNYSCDKPLTKSHEIKIDPGSKTTGLAVLQGDKIIWAAELVHRGNHITCDLASRSAIRRNRRNRKTRYRQPRFLNRTRTPGWLPPSLASRVSNIVTWVNRLRRYVPVTAISQELVKFDTQAMQFPEISGIEYTQGELAGYEIRQYLLEKWGRKCAYCGIKNTPLEVEHIHPKSKGGSSRVSNLTLACRNCNLAKGNRDITDFLSGKPDILSRVLKFACLPLKDAAAVNSTRRALFEKLQQTGLPVTTGTGGQTQYNRTRMGLPKTHWLDAACVGKVEQLAVLSRQPLLITAKGWGNRQMCTPNKYGFPSKHRTRCKTFFGFQTGDMVKAILPIGKFAGTHVGRLAVRESGVFDLRTAWGKISPVRHKYCTIVHRNDGYMYGFSTLVR

SEQ ID NO: 7478 - protein, 420 aa, unidentified; identical to SEQ ID NO: 5662
  REGION 1..420: note = Human gut metagenome

SEQ ID NO: 7479 - protein, 427 aa, Moorena sp.; identical to SEQ ID NO: 5764

SEQ ID NO: 7480 - protein, 420 aa, unidentified
  REGION 1..420: note = Human gut metagenome
MQYVYVLSKHGKPMMPCSPGKARLLLKQQKACVVRRTPFTIKLLYGSAGYKQPITLGVDAGSKHVGLSASTEKRELYREEFAPRNDVVELLSTRRQNRRSRRNRKTRYRAPRFNNRVHSKHKGWLAPSVEVKIQEHITVIKRICRILPVTLVRVETAEFDTQRLKAMLAGKPLPVGTDYQLGEMYDEYNVRQYVLKRDNYTCQCCGAHTTAKKAVKLHVHHLESRKVGGNAPSNLITLCTTCHNNLHKGKITLDGKERGKPLRDAAFMGIMRKTLMARLKKELPIPVQGTYGYITKMRREQNDIKKSHTNDARCISKHPLAEPCSVCYRTKAIRHHNRQTHKANFSKKGIRKRSQMPYLVEGYRLWDKVLYKEQECFVSGRRSSGSFTLKKLDGTSVSKGVTFKKLRLLEPATNYLIERM

SEQ ID NO: 7481 - protein, 416 aa, unidentified
  REGION 1..416: note = Human gut metagenome
MVYVLSQHGQPLMPTGNHAKVRVLLNQRKAKVIKRCPFTIQLQYESTTHTQKINLGIDAGSKTIGVSATTDSKVLYESEVVLRNDIVELLSGRRALRNSRRSRKTRYRKPRFDNRKKPDGWLAPSIRQKIETHVTVVGNVMKILPVTKIIVETASFDIQKIKNPEIEGEGYQHGEQLDFWNVREYVLFRDGHTCQCCKGKSKDNILNVHHIESRKTGGNAPNNLITLCETCHKAYHKGIITLPKEIHRGMRFRDAAFMGIMRWAFYDRLKELYNPLGAEVINTYGYITKNTRIEHGLPKEHYVDARCISDNPAAKPLDHYYFQKKVRCHNRQIHKNTILKGGIRKRNQASYEVKGFRLYDQVLWKGQKCFIFGRRSTGRMDLRLLDGTHINASVGHKNLKLLSMRKNYLIEQRKAG

SEQ ID NO: 7482 - protein, 442 aa, Moorena sp.
MVTVQQSTHHLPFGRVFIRRNLFMVYVISQDGKPLMPCSDPIARLLLKQGKAKVKKREPFTIKLTYETTNYTQSLTLGVDTGSGTIGTAVSKDNGDIVYMSEVVVRNDITDKMTQRAKYRRNRRNRKTRYRKARWLNRASSIKKDRFSPTMQSKLHSHVREIEYIQSILPVTEMVFETGQFDMHLMKNPSLANPKVRPWGYQKGANYGFENTKAMVLNRDNYTCQCCKGKHKDSKLEVHHIVFRSQGGSDEESNLLTLCHTCHKDLHSGKINPKLSGKVKGNLKYATQMNSIRKQLFRFYPNAIETFGYVTKVNRLHLGVAKEHYYDACTIATQGNAFNVKSNLYKKKCVSDGDFQKTKGIRSEQPIVTDKICGFRKFDKVRYFGNDYFIKGRMSTGYAILMDIDGNKIDFSTMPRGYKTPKLSNCKRITARSTVMTQVKVV

SEQ ID NO: 7483 - protein, 300 aa, unidentified
  REGION 1..300: note = Human gut metagenome
TVSETSSDNRVRSNHERWLAPSVKVKIQEHITSIKRVCTILPISKVVIETAEFDLQLLKAIQEGKPIPEGEDYQKGEMYGSYNVCQYVLWRDNYTCICCGVRGTPKNPVRLHVHHFESRKYGGNAPDNHGTLCDDCHKKFHLGIIADVKLKTRRRQSTRDAAFMGIMRKTLMWRLRTELFIPVAETKGYITKATREKLLVLPKSHTRDALAIAQGRHGFSIKEYAYVEPANHIYTVRPVRHHNRQLHKASILKGGIRKRNQASKYVFGFRLYDKVLYQGKACFVWGAENKRTFFFEQLTV

SEQ ID NO: 7484 - protein, 512 aa, unidentified
  REGION 1..512: note = Human gut metagenome
MSTVYVLNKDGKPLMPTTRGGHVRHLLKEQKARVVRAKPFTIQLLYETNDVVQPLYLGIDPGRTNIGVAVVKANGTAVFTAHLEARNKEVPKLMQDRKKARRARRTNGRRCRRQRRAKANGTISKKCVKQDTAQSKNPSKRAKEIGIIKRRLPGYKKDVLCIGIKNKEAKYTNRTRPEGWLTPTANQLLQTHINLVRKIQKFLPISDVVLEVNKFAFMRLDNPDIQKWQYQQGPLYQKGSLENAVSEMQEHHCLFCDKPIDHYHHVVPQSENGSNTIANIVGLCAEHHNLVHKDAAWQKKLAEEKVGLNKKYGALSVLNQIIPALTNKLSVLFPKHFFVTAGKSTHDYRATHGVSKDHWLDAYCIACSVLPSDVCDSNINNHMPYELKQFRRHARRALNNENMNRVYTLNDKAVAINRHKATEQEAASLEEFRKEHPNDVCKLKVKEHHPTYRNMNRNYPGSIFLVGKHVHIMQGIAGSKDGKATTYKDSNANSITASKCKFVAKNSGILFV

SEQ ID NO: 7485 - protein, 454 aa, unidentified; identical to SEQ ID NO: 5869
  REGION 1..454: note = Human gut metagenome

SEQ ID NO: 7486 - protein, 507 aa, unidentified
  REGION 1..507: note = Human gut metagenome
MSEYIYVIGMDGDPQMPTKRKRHVEQLLQTGRARVFRQVPFTIQLTYKNEPVLQPVTIAEDPGRSNIGMAVVSLSGELLSAAVVQTRNKEIVKLMDKRKQHRRASRNGERKARQRLAKKCHTMVKAGSLMRKLPMYGKDKRVRCNVIKNTEARFCNRKREDGWLTPSAEHLVRTQINLIHKMQKFLPITDVAIEINRFAFLSLEDPSISGVDFQNGPLKGYDDLNAAVEDLQDGHCLMCNSPIEHRHHIVPRSMQGSNSIGNIAGLCCKCHERVHKDSAFEDSLKKKKAGLNKRYAAVSVLNQAIPFICKRLEQEFRKEHVHYCSGRDTSMVRRSLGYHKTKEEQLHEVDAWCIAVLSLQQIPEKAPSFDHVHEILQFRRQDRSRIKAQTSRAYYHERKKIAKNRKKAEGQREDSLQEWRKRQVERYGKEQTRKMISQLEVKESIRRYNRLDRLMPGAVFYYQGVRYVMRGQHSNGQYLQAVGMGDKDFPAKKCKIVVHNQGLVFVS

SEQ ID NO: 7487 - protein, 430 aa, unidentified
  REGION 1..430: note = Human gut metagenome
MPKVYVLNRHGRPLMPCTPAKARHLLDAGKAKVRHRTPFTIQQLYGSTGYTQEVILGVDAGSKTIGLSAATETEELFSAEVKPRNDVVELMSARRQFRRARRNRTTRYRKPRFDNRVRSKHKGWLAPSVEVKIQEHMTAIRRACAILPVSKVVVETAEFDLQLLKAVAEGKPVPQGEDYQKGEMYGHYNVRQYVLWRDSYTCRICGVHGSVRKGVPLHVHHLESRRVGGDAPDNLVTLCTACHDKLHKGIIMAADIKKRKRRSTRDATFMGIMRMTLLRRLREQLPVPVVETRGYITKATREKLLVLPKSHTNDALAIAHGPQGFRAEYLPNIRQADRLYTIRPVRHHNRQLHKATILKGGVRKANQAEKYICGFRLYDKVLYNGIECFVWGRRTSGSFLLRQLNGEKVKDGVSYKHLKLLERSQSYLVA

SEQ ID NO: 7488 - protein, 464 aa, Ktedonobacter sp.; identical to SEQ ID NO: 6151

SEQ ID NO: 7489 - protein, 516 aa, Eubacterium sp.
MKYLDYTFVVDNNNVPCMPVTNNEAGYLIRCGLAKVINHDPFVIQRLDDYISESEIRDEITMKMDMGYMNVGFSVGTKDHEYLSGQVKLLNGISERLEQRASYRRTRRGRIRYRKNKNVDYKTIHNPTYKNGNEDNWIAPSVQHKIDSHVRLYRKIASWIPIDKVIIEIANFDIQAIKALKDGKEISGVDYQRGEMYGFENVKQYVRERDNYTCQICEIDTIKKGTGLEVHHIIPRSQGGSNKPSNLISLCKKCHNKVHSNNNNNKYFRELQTRKINDTYKDATFMNTSRWRIYESIGSKCPTYISYGYITSLNRKTNNLPKFHYVDAACIQKFTYKTLTKNIYLVEQKRCNDRCMSAFWDAKYIDNRDGKEKKGSELSYKRLPSATSKRTTRKEDVENDRVYRQRKTKKGEFRFVCNSRCLKAGDLIRINIGKRKGIIGEVTNSQIERNKYKVRFTYNGQDVKYPSISISKDEYNILKETGKCDSISIVRTRRGMIWRKYDRAKYESENVDQYSS

SEQ ID NO: 7490 - protein, 420 aa, unidentified
  REGION 1..420: note = Human gut metagenome
MQYVYVLNKHGEPLMPCSPGKARILLKQQKACVVKRTPFTIKLLYGSAGYKQPITVGVDAGSKHVGLSASTEKRELYSEEFTPRNDVVELLSTRRQNRRSRRNRKTRYRAPRFNNRIHSKHKGWLAPSVEVKIQEHITVIKRICRILPITLVRVETAEFDTQRLKAMLSGKPLPVGTDYQLGEMYDEYNARQYVLRRDNYTCQRCGAHTTKKKTVKLHVHHLESRKTGGNAPSNLITLCVDCHKAFHAGKVKLDGKKRGKSLKDAAFMGAMRNTLLTRLRNELNIPVQNTYGYITKLLREQNDIKKSHVNDARCISKHPLAEPCSVCYRTKAIRHHNRQTHKANFSKGGIRKRSQMPYVVEGYRLWDKVLYKGQECFVSGRRASGSFTLKKLDGTRISKGVTFKKLRLLEPATNYLIERM

SEQ ID NO: 7491 - protein, 406 aa, unidentified
  REGION 1..406: note = Human gut metagenome
LQKVHIMRVFVFNMRGEPLMPCTQRKARLLLKAGKAKIYKYNPFTIQLKYATGENKQECHVGIDTGSKHIGLAVTSENKVLFKGEVELRQDVKSKIDTKRIYRRSRRNRKTRYRRCRFLNRKRFGKWLPPSLQNRINHTFKWIDKLCSFIPESILHIEVGKFDIAKMINPEVHSMDYSQGQTYGYQGERYFIFARDNYTCQVCGERNKPLQTHHIIYVSNGGTNRVDNQITVCKNCHNSTNHKNGGIFYKWQKEHKKVKQYKEPPFMNVLRQQILNQYPQALITYGFETTIKRKNIGLEKTHYNDAIVISGISTISENLDEWLLIKQFRKKKRSLHEGVPRKGRKEPNRIQKRNSKNTPYYRGFYLNDKVSVFGKSGYITGFTNSGAYVKGVDGEYIVLPNKSYKR

SEQ ID NO: 7492 - protein, 411 aa, Orenia sp.
MTKNYAFVIDKNGKSLAPTNINKAWILIRKKKATLANKYPMLIQLNYEVEEDKQECQFICGIDDGSNHVGIAIVQKCKTRNKAVFKGTIEQRKDVKGLIDTRRGYRRYKRSHKRYRQPRFDNRSSSTRKGRVAPSILQKKEAIIRVINKLKKWINITEFHLEDVAIDIRALTEGKKLYKWQYQKSNRLDENIRKAVILRDKCKCMECAKSNCMLEVHHIVPKRLQGANSLSNLITLCSKCHDKTKGIEEKYIEHYQKMIDGNNVRFDYAQHVMQGKTWLRKELSKLGKLILSTGGDTANKRIDWNIEKSHSNDAIVVADLKVNNDECDIKDWIIKPMRRKSKTKVEELKGFRHRDLVKYTKRNGESYIAYITALYPNKKQCNMTTIEGKVLKRYGVKPLKLLWRFNKIYWF

SEQ ID NO: 7493 - protein, 453 aa, Lactobacillus sp.; identical to SEQ ID NO: 2687

SEQ ID NO: 7494 - protein, 414 aa, unidentified
  REGION 1..414: note = Human gut metagenome
MPCSPAKARHLLKEKKAIVVRRTPFTIQLTIATGETKQPVSLGVDAGYKHVGLSASTEKAELYASEVELRQDITDLLSARRALRQSRRNRKTRYRAPRFDNRIRTKRKGWLAPSVENRINAHLSRIEAVLRLLPVTKITVETASFDMQLLKNPDIAGKEYQEGEQLGFWNVREYVLFRDGHVCQHCHGRSKDPVLNVHHLESRRTGGDSPGNLITLCETCHKALHHGEITLKTKRGQSFRAEAFMGIMRWEVLNRLKVSHPELEVNNTYGYRTKHVRIANGIAKSHCADAFCIAGNLGAKRLGEFFFQKQTRRNNRQIHKLSILKGGIRKRNQAPFEVKGFRLFDKVACKGEEGFIFGRRSSGFFDVRKLDGTRISAGISCKTLHLLEKRQTYLTEIRKEEALPPLPEGRGLRA

SEQ ID NO: 7495 - protein, 420 aa, unidentified; identical to SEQ ID NO: 5136
  REGION 1..420: note = Human gut metagenome

SEQ ID NO: 7496 - protein, 442 aa, unidentified
  REGION 1..442: note = Human gut metagenome
MSTSVFVLDKKHRPLMPCRPARARRLLRAGRARVVKRFPFVIRLVDRTVEQSEVQPVLIKLDPGSRETGAAVVRDDEKKRHHALAFFVIEHRGGAIRDALKARSAFRRRRRSQNLRCRSPRFLNRVKPKGWLPPSLRHRVETTLSFVRRMCRYLPVSGIAAELVKFDSQKLQTPEVSGIEYQQGTLFEYEVREYLLEKFGRKCVYCGAEGVPLNIDHVVPRAKGGSNRVSNLVLACVSCNQKKGARSLEDFLKGKPEVLARVRRELKTPLRDAAAVNATRWVLFNELKATGLPVETGSGALTKLNRHAFGVEKEHWLDALCVGRLNGAVTRKGLNVLEIRCMGRGSRQRTRLTKYGFPRGYLMRQKCVHGFATGDMVEANVPKGKKAGLWRGRVAVRVSGSFNIQTPKGVIQGVGWKHCRLISHNDGYGYAWLGHAPHSSPA

SEQ ID NO: 7497 - protein, 425 aa, unidentified
  REGION 1..425: note = Human gut metagenome
MVYVLNKNGQSLMPTNRHGKVKHLLKDGKAKVVKRCPFTIKLTYETTNYTQDLTLGVDTGSGTIGTAVSKDSGDIIYMSEIVVRNDITDKMSQRAKYRRNRRNRKTRYRQARWLNRRNSIRKDRFSPTMQSKLHSHVKEIEYIKSILPITTMVFETGQFDMHLMKNPMLANPKVKHWGYQKGTNYGFENTKAMVLNRDNYTCQYCKGKHKDSKLEVHHIIFRSQGGSDEDSNLITLCHTCHKNLHDGKIAPNFKGKAKGTLKYATQMNSIRKQLFRLYPEVIETFGYVTKANRLAIGIEKEHYYDACTIATQGKPFIVKTNLYKKKCVSDGDFQKTKGIRSEQPIVTDKIYGFRKFDKVKYFGKEYFIKGRMSTGYAILMDIEGNKVDFLTMPKGFKTPKMINLKRLEARSSWMVTTVEVTPNIV

SEQ ID NO: 7498 - protein, 470 aa, unidentified; identical to SEQ ID NO: 2825
  REGION 1..470: note = Human gut metagenome

SEQ ID NO: 7499 - protein, 430 aa, unidentified
  REGION 1..430: note = Human gut metagenome
MPKVYVLNWHGRPLMPCTPAKARHLLDAGKAKVRRRTPFTIQLLYGSTGYTQEVILGVDAGSKTIGLSAATETEELFSAEVKPRNDVVELMSARRQFRRARRNRATRYRKPRFDNRVRSKHKGWLAPSVEVKIQEHMTAIRRACAILPVSKVVVETAEFDLQLLKAVAEGKPVPQGEDYQKGEMYGHYNVRQYVLWRDSYTCRICGAHGSVRKGVPLHVHHLESRKVGGDAPDNLVTLCTACHDKLHKGIIMAADIKKRKRRSTRDATFMGIMRMTLLRRLREQLPVPVVETRGYITKATRENLLVLPKSHTNDALAIAHGPQGFRAEYLPNIRQADRLYTIRPVRHHNRQLHKATILKGGVRKANQAEKYICGFRLYDKVLYNGIECFVWGRRTSGSFLLRQLNGEKVKDGVSYKHLKLLERSQSYLVA

SEQ ID NO: 7500 - protein, 421 aa, Moorena sp.
MQNRVFVIDVNKQPLNPIHPGRARKLLKQGKAAVFRTYPFTIILKKTVRDPVNEPHRIKLDPGAKVTGMALVNQRTDAVVWAAELTHRGDMIRQKLADRRRVRRNRRHRKTRYRPARFDHRKRPDGWLAPSLQHRVETTMTWVERLGKCCSITDLSMELVRFDTQKLQNPEISGVQYQQGVLFGYELREYLLTKWRHECAYCGAQKVPLEIEHIHPKSKGGSDRVSNLAIACHQCNQKKGNKPVEQFLKKKPEVLKRLLAQANAPLKDAAAVNSTRWALFNRLQETGLAIEIGTGGLTKYNRTLQGLPKTHWLDAACVGKSTPMLNIATSQPLLITCTGRGGRQKAAINKYGYPIRHNPLKPIKGWQTGDIAKHRVHGIGRITPRSRGSFVLSKPDKTKKSVKPIDLKPVFRRDGYSYKWA

SEQ ID NO: 7501 - protein, 414 aa, unidentified; identical to SEQ ID NO: 2588
  REGION 1..414: note = gut metagenome

SEQ ID NO: 7502 - protein, 512 aa, unidentified
  REGION 1..512: note = Human gut metagenome
MPTVYVLNKDGKPLMPTTRCMHVRHLLKNGKARVVKSKPFTIQLLYETDDVVQPLYLGIDPGRTNIGIAVVKADGAAVFTAHLETRNKEVPKLMKKRKESRCARRTNGRRCRRQRRAKTNGTISKKCVKQTTAQNGSVSKRAKEIGVIKRHLPGCEKDVLCIGIKNKEAKFTNRARPEGWLTPTANQLLQTHINLVKKIQKFLPISDVVLEVNKFAFMQLDNPNIQKWQYQQGPLYQKGSLENAVSEMQEHHCLFCEKPIEHYHHVVPKSENGSNTIANIVGLCTEHHNLVHKDATWQKKLAKEKVGLVKKYSALSVLNQIIPALTKEMNSLFPKHFFVTNGKSTYDYRTAHGVSKDHWLDAYCIACSVLPNDVCDSNINSHVPYELKQFRRHDRRVLHKANMSRVYTLNGKTVATNRHKAIKQTTDSLEEFRQSHPGDVCKLKVKEHHPAYRNLNRNYPGSVFLVDGQVHVMQGVSGSHNGKADGYYNTNGNAYPYYKCKFVVKNEGIVFA

SEQ ID NO: 7503 - protein, 431 aa, unidentified
  REGION 1..431: note = Human gut metagenome
MPNKVYVINKHGRPLMPCSPAKARHLLDEGKAKIKKRTPFTIQLVYGSSGYTQEVILGVDAGSKTIGLSASAETEELLSAEVKPRNDVVDLLSTRREFRRARRNRKTRYRKPRFDNRVRSKHKGWLAPSVEVKIQEHITSIRRVCRILPVSKVVVETAEFDLQLLKAIADGKPVPQGEDYQKGEMYGHYNVRQYVLWRDNYTCQCCGTHPSKKKEVRLHVHHLESRKVGGDAPDNQVTLCESCHEKLHKGLIAEKDFKKRKRRSTRDATFMGIMRKTLMQRLCSELPIPVVKTRGYITKATREKLLVLPKSHTNDALAIAQGKRGFNVGYLPGIAQIDKIYTIRPVRHHNRQLHKATILKGGIRKSNQTEKYVFGYRLFDKVQFNGQDCFIWGRRTTGIFTIKTINGKMIKDGISFKKLKLVEKSTSYLIA

SEQ ID NO: 7504 - protein, 529 aa, unidentified; identical to SEQ ID NO: 6786
  REGION 1..529: note = metagenome

SEQ ID NO: 7505 - protein, 465 aa, unidentified; identical to SEQ ID NO: 3070
  REGION 1..465: note = Human gut metagenome

SEQ ID NO: 7506 - protein, 427 aa, Moorena sp.; identical to SEQ ID NO: 2799

SEQ ID NO: 7507 - protein, 444 aa, Moorena sp.
MQKVFVVDANKQALDMCHAGQARRMLKAGKAAVYKLYPFTIILKGEVTDPEPQPYQIKLDPGSKTTGVAIVNQATGEVVFAAEIEHRGEIIKGSLDSRRGVRRSRRARNTRYRKPRFNNRTRSSGWLVPSLLSRVANVETWVRRLIKLCPISGISLELVKFDTQLMQNAEINGVLYQQGTLAGYETRQYLLEKFQRKCAYCSKKDIALQIEHIVPRSRGGSNSVTNLTLACEKCNQKKGTKTASEFGYPQAQAQARLPLKDAAAVNTTRWALYNRLKSFGLPLEIGSGGLTKFNRSSQALPKAHWIDAACVGSSTPSKLDVSKVNPLQIKATGHGCRQMCLMDKFGFPRTKAKAGKKFFGFTTGDMVKALVTSGKKIGIYRGKVAVRASGSFNITCGKTTIQGINHKYCKLLHSCDGYSYSYLAQSKTAIPPTPKVVGFLAGDL

SEQ ID NO: 7508 - protein, 364 aa, unidentified
  REGION 1..364: note = mine drainage metagenome
MAVFVLDRKKKPLMPCSEKRARLLLERKKAVVHRMAPFTIRLKDRIGGETQPIRIKLDPGSKTTGIALVREEEILSPEIGEAETAAHVLFLGEIGHRGGRIRDRLSARRAFRRRRRSKLRHRKPRFDNRTKPEGWLPPSLQHRVDTTASWVERLRRLVPVSSISMELVRFDMQKIENPETSGVEYQQGALAGYEVREYLLEKWDRTCAYCGKKDVPLEIDHIHPRSKGGSDRISNLTLACRPCNEKKGNRPVEAFLVGKPELLKKILSRAKAPLRDAAAVNATRWALFERLNQTGLPVETGSGGRTKWNRTRLGIPKTHALDAACVGKVDRVEGGTRPVLEIKTMGRGSYQRPASTPSGSRGGS

SEQ ID NO: 7509 - protein, 466 aa, unidentified
  REGION 1..466: note = Human gut metagenome
MSTCACVFSKSGKRLMPTIRLGKVRHLLKDGKAKIIKHHPFTIQLLYDSETNIQPIEICEDVGYNYIGISVKSQSHEYVSVQYDTLQDEKDCHDSCRKMRRIRRNRLRYRKPRFDNRKRDKGWLAPSLEHKKELNVNVIKMYCKVVPITHVTVEVGSFDTMLVKAIEEGKAAPEGVDYQKGPRYNLATLREAVFYRDNYTCQVCGREAQKDSAILHVHHMFYWKGRHGNSLSELLTVCEKCHTPANHQKGGKLYGFGENIKFANLSGAAFMNTVRWQIVNELCAAFGKPFVTFTYGAMTKEKRIALHLEKSHNNDAYAMGSFHPVGRCAFEHYEKVKRNNRILERFYDSQYIDIRTGKVTNGKSLFNGRINRNHKKDSENLHKYRGKRIRKGYRALRRKKVALNPGDLVFLNGEILVVHGTHTDKKGAVRVEFKVAAKNGKKSANLKKLKIIKTSNLTYSAWKKVF

SEQ ID NO: 7510 - protein, 421 aa, unidentified
  REGION 1..421: note = Human oral metagenome
MFVYVISKTGQPLMPTRRFGNVRRLLKNKQAKVIRRCPFTIRLLYEPETEIVQEVVLGQDTGSKHVGTACVANNKVLYQSQVQLRTDIKSKMDSRRSSRRSRRNRKTRYRKPRFLNRANLTKKDRLSPSVRHKVQAHIDEIEFCKKILPVSKIILEVSQFDTTLMKNPELIDEKIKHWGYQKGFNYGYASRREAVLHRDNYTCQCCGKKHARLEVHHITYRSKGGTDDEKNLITLCEKCHKAIHDGLIILTVKLKKLNLKYATHMSIIRSQLLKVYPHAIETFGFVTKENRNHLNLSKEHFIDACVIASGGVKFEPSDVLYQKRRVARQDRQLCKGIRGEKKIPTGKIFGFKKFDLVEYLKELCFIKGRRSRGSFVLMDIDNNIIDLRDKGGKKEPSYKYLKRVNTRRSILCIRKEVVYGF

SEQ ID NO: 7511 - protein, 442 aa, unidentified; identical to SEQ ID NO: 2903
  REGION 1..442: note = Human gut metagenome

SEQ ID NO: 7512 - protein, 512 aa, unidentified
  REGION 1..512: note = Human gut metagenome
MSTVYVLNKDGKPLMPTTRGGHVRHLLKEQKARVVRTNPFTIQLLYETDNLVQPLYLGIDPGRTNIGVAVVKTDGTAVFTAHLETRNKEIPKLMQGRKKARRARRTNGRRCRRQRRAKANGTISKKCVKQATAQNGSVSKRANEIGVIKRHLPGCEKEVLCIGIKNKEAKFSNRTRPEGWLTPTANQLLQTHINLVKKIQKFLPISDVVLEINKFAFMRLDNPNVQKWQYQQGPLYQKASLEEAVSEMQERHCLFCKNTIDHYHHVVPQHKNGSNTIGNIVGLCAKHHDLVHKDTSWQEKLAKKKTGLNKRYGALSVLNQIIPALTKELSSLFPKHFFATNGKSTYDYRAAHGVSKDHWLDAYCIAGSVLPNEACDNNINNRVPYELKQFRRHDRRALHKENMSRVYTLNGKKVATNRHKAVEQATDSLEEFCQNHPDDVCKLKVKEHHPEYRNPKRNFPGCVFLVGKHTHVMQGTSGSHNGKADGYYDTNGNSYSSGKCKFVVKNEGIVFT

SEQ ID NO: 7513 - protein, 428 aa, unidentified
  REGION 1..428: note = Human gut metagenome
LKVFVLNMRGQPLMPCSPAKARHLLKAGKAVVKRRTPFTIQLRIATGETKQNVTLGVDAGAKHVGLSATTEKEEVFASEVELRQDITGLLAARLSLRRDRRHRKTRYRAPRFLNRVRSKHKGWLAPSVENRIQAHMSRIDAVCRLLPVTKIVIETASFDIQKIKDPSVEGTDYQQGDQLGFWNVREYVLFRDGHVCQHCHGHAKDKILNVHHLESRQTGGDAPNNLITLCETCHKACHAGKIKLKVKRGQSFRAEAFMGIMRWTLLDRVRKAHPGLPVENTYGYLTKNTRITLGLPKAHCVDAYCIAGNLKAVRRGVYLHQRQVRKHNRQIHKCTVLSKTLKDGTKIGYRKLNQTPHLVKNFRLFDKVRCLGQTGFIFGRRSSGYFDVRRLDGVKISSCISYRKLTLLEKRSTCLTELRKEDGASSTV

SEQ ID NO: 7514 - protein, 406 aa, unidentified; identical to SEQ ID NO: 2752
  REGION 1..406: note = Human gut metagenome

SEQ ID NO: 7515 - protein, 419 aa, Moorena sp.; identical to SEQ ID NO: 3991

SEQ ID NO: 7516 - protein, 346 aa, unidentified
  REGION 1..346: note = Human gut metagenome
LRQDITDLLSARRALRQSRRNRKTRYRAPRFDNRIRTKRKGWLAPSVENRINAHLSRIEAVLRLLPVTKITVETASFDLQLLKNPDISGKEYQEGEQLGFWNIREYVLCRDGHVCQHCYGRSKDPVLNVHHLESRRTGGDSPGNLITLCETCHKALHRGEITLKAKRGQSFRAEAFMGIMRWEVHSRLRALHPGIEVSNTYGYRTKHARIANGIAKSHCADAFCIAGNLGAERLCEFFFQKQTRRNNRQIHKLSILKGGIRKRNQAPFEVKGFRLFDKVACQGEEGFIFGRRSSGFFDVRKLDGTRISAGISCKKLHLLEKRRTYLTEIRKEEALPPLREGRGLRA

SEQ ID NO: 7517 - protein, 406 aa, unidentified
  REGION 1..406: note = Human gut metagenome
QPLMPTDRHRKVRLMLQSGQAKVIKRCPFTIQLTYNTGHQAQEISLGIDAGSKHIGVSATTKTRVLYEADVELRNDIVDLLSSRRELRRGRRNRKTRYRPARFDNRRREDGWLAPSIRQKIGTHLTVVENICKILPISRITVETASFDIQKIKNPDIQGAEYQQGDQLGFWNIREYVLFRDNHTCQCCKGKSKDKILNVHHIESRKTGGNAPNNLITLCEICHTGYHKGAIQLPKTVKRGMRFKDAAFMGIMRWAFYEALKQQYEPVALVHNTYGYITKHTRIEHNLPKEHYVDARCISGNPDAFPNGEYYYQKKVCCHNRQMHKLTILKGGIRKQNQATYLVKGYRLFDKVSYQRKEYFVFGRRKSGFFDIRTLSGKQVNKGSLSCKKLKFIATRMYYLIERRAV

SEQ ID NO: 7518 - protein, 411 aa, unidentified
  REGION 1..411: note = Human gut metagenome
MVYVQDIDGKPLMPTTRHGKVRRLLKDNKAVVVNTCPFTIKLTYKTSDYKQEIVLGVDAGTKHVGLSATTKSKELYSGEVILRNDIVELLSTRRESRRTRRNRLRYRKPRFENRVKSKRLGWVAPSVRHRIDAHIRVIDNVCSILPVSRVIIEVAQFDTQKIKNPEISGKEYQEGDQLGFWNVREYVLARDGHKCQHCKGKSKDPILNIHHIESRKTGGDSPSNLITLCETCHKEFHKGNIKLKVKRGKSLRDAAVMGIMKWRLYDKLKSLYPNVRMTFGYITKHDRINHGIEKSHVSDAFVISRNFDSERLGYYYKLKLVRRHNRQIHKMKIPKGGKKRMNQSPFKVFGFKLFDKVMFQGEERFIYARRLSGQFKIKDIDGNNERNISYKKLRYVSHGLISIKTNLFLSQ

SEQ ID NO: 7519 - protein, 456 aa, unidentified; identical to SEQ ID NO: 7423
  REGION 1..456: note = Human gut metagenome

SEQ ID NO: 7520 - protein, 442 aa, unidentified; identical to SEQ ID NO: 3234
  REGION 1..442: note = Human gut metagenome

SEQ ID NO: 7521 - protein, 424 aa, Caldicoprobacter sp.
MVYVISKTGKPLMPTERYGKVRRLLKHRLAKVVKREPFTIQLLYDTTTYTQPVTVGLDIGSKIAGVSAVTEKKEIFSAEIELRDDIKGLLLERRQYRRMRRYRKVRYRKPRFLNRARDDGWLAPSLQWKVDAHIRIVEMLSMIMPIGKVVIEVAPFDTQKILNPGIEGEDYQNGVQKGFWDVREYCLWRSGYKSELSGKRGTLEVHHIVPRSEGGTDTPSNLIVLTAEEHKAVHEGRIKIPKSKIERIKLLKDAAHVATIGWYIVNRLRERYSVEVTYGSITKAKRLGCGMTKLHRNDAFVIADGTLQERVKEWYLGKFLRRQNRSLHRANFIKGGVRPVNTIKEAYGFRRYDRVEYEGIIGIIAGLRSSGYFAVRNLSGEKIHDSAKHSRLRLVERAKTLMLERMEERIPLHLEEDGVSCVRL

SEQ ID NO: 7522 - protein, 471 aa, Acidiferrobacter sp.; identical to SEQ ID NO: 6601

SEQ ID NO: 7523 - protein, 462 aa, Burkholderia sp.
MSAFVLDRSGRPLMPCSEKRARLLLARGRARVHRVMPFVIRLVDRMADSCALQPLRIKLDPGSKVTGVALVREADRGIAVINLFELIPRGRQISEALIARRNFRRRRRCANLRYRAPRFLNREKPEGWLPPSLQHRVDTTMAWVQRIRRWAPVTALSSELVRFDLQQLENPEISGLEYQQGTLAGYEVREYLLEKWKRTCIYCDAKGRPLQIEHLTSRARCGSNRVGNLGLACSDCNQEKGALDVRAYVKDPKRLARILATASQPLRDAAAVNATRWALIDALRATGLPLELASGGRTKFNRISHGLPKTHALDAVCVGQVEAIAGWERPSLSVEASGRGSYQRTRLTRHGFPRGYLMRHKRVQGFQTGDRVRADVPNGKKAGIHVGRVAVRATGSFNIQTASAVVQGISHRHCRLIQRGDGYAYSLQSVDSYRQGDAGVWRAAHAALSLPGLEPGVSRAFG

SEQ ID NO: 7524 - protein, 442 aa, unidentified; identical to SEQ ID NO: 2939
  REGION 1..442: note = Human gut metagenome

SEQ ID NO: 7525 - protein, 465 aa, unidentified
  REGION 1..465: note = Human gut metagenome
MSTYACVLSKNGERLMPTIRLGKVRHLLKDGKAKIIKHHPFTIQLLYDSKTNIQPIEICEDVGYNYIGISVKSESHEYVSAQYDTLQDEKDCRDDCRRMRRSRRNRLRHRQVRFNNRKRDKNWLAPSLKHKKELNVNVIKMYCEVMPITHATVEVGSFDTMLVKAIEEGKVRPESTDYQKGPRYNLATLREAVFYRDNYTCQVCGRKANEGAILHVHHMFYWKGRHGNSLSELLTVCEKCHTPANHQKGGKLYRFGEDKKFANLSGAAFMNTVRWQIVNELYAAFGKPFVTFTYGAMTKEKRIALHLDKSHSNDAYAMGNFHPVDRCAFEHYEKVKRNNRILEKFHDSRYIDIRTGKEAKGKELFNGRISRSHKKDSENLHKYRGKRIRKGYRALRRKKVTLNSGDLVSLNGETLIVHGTHTNKKGNVRVEFKVAALNGKKSASLKKIKIVKTSIPMHSAWAKVS

SEQ ID NO: 7526 - protein, 451 aa, unidentified
  REGION 1..451: note = Human gut metagenome
MSVAVISKTGERLMPTSEYRARKLLKSGKAIKYSYHPFTIQLTERKTGNIQPIELCMDTGYIHIGISVKSEKHEYLTEQIDTLTDERSRHNARRMYRSQRRNRKRYRQPRFNNRKKDKGWIAPSLEHKKNIHVQAISRINNVMPLTDITMEMGNFDTQVLKAKEEGRPLPQGVDYQHGERYSIATLREAVFARDGYKCQCCGRTIKDGAILHVHHIKYRSQGGTNSISNLATVCDKCHTPKNHKPGGKLYGWKPKLPSFKGATFMTTIRWQLYNEAKALFPDIDIHITYGAATKERRRELNIDKSHINDAFVMGQFHPRHRIKAVLYKKKRRNNRCLEKFYDAKYIDSRDGKKRSGQELFNGRINRNHKKDSENLHQYRLQKVTAGKRTVRKQHYSVQPHDIIIYESRKRETTGCHCNGARVMLLPDKKSVSIKKIKIYRYAGGYFKSTFN

SEQ ID NO: 7527 - protein, 424 aa, unidentified
  REGION 1..424: note = Human gut metagenome
MRVFVFNMRGRPLMPCSQRKARLLLRENKAMIYKYHPFTIQLTYTTGETKQDCHIGIDTGSKYIGAAVRSEDKVFWKGEIELRQDIRSNLDTKRIYRRSRRNRKTRYRKPRFLNRKRRDEWLPLSLQSRINHTFHWIDTLSSLVPNPILHIEVGKFDVAKMINPEIHGVDYQHGQTYGFFDERYFVFARDNYTCQCCGKSKNKILNTHHIIYRSNGGTNRVDNLITVCTDCHTSQNHRKGGIFYQWQEQHKKVKQYKEPPFMNTLRKRIFVAYPDAEITYGSETTPKRKAMKLDKTHYNDAIVISGINEIKENPEEWLLIKQFRKKKRSLHEATARKGRKKPNRNQTRNSKNTPYYKGFYLNDKVSVFGKSGYITGFTSNAAYIKDENNDYITLPNKTYKQVSINKMKLECHNNNWQYIIKNAV

SEQ ID NO: 7528 - protein, 428 aa, unidentified
  REGION 1..428: note = Human gut metagenome
LKVFVLNMRGQPLMPCSPAKARHLLKAGKAVVKRRTPFTIQLRIATGETKQNVTLGVDAGAKHVGLSAATEKEEVFASEVELRQDITGLLAARLSLRRDRRHRKTRYRAPRFLNRVRSKHKGWLAPSVENRIQAHMSRIDAVCRLLPVTKIVIETASFDIQKIKDPSVEGTDYQQGDQLGFWNVREYVLFRDGHVCQHCHGRSKDKILNVHHLESRQTGGDAPNNLITLCETCHKAYHAGKIKLKVKRRQSFRAEAFMGIMRWTLLDRVRKAHPGLPVENTYGYLTKHTRITHGLPKTHCVDAYCIAGNLKAVRRGVYLHQRQMRKHNRQIHKFTVLSKRLEDGTKIGYRKLNQSPYLVHGFRLFDKVRCLGQIGFIFGRRSSGYFDVRRLDGVKLSPSISWRKLTLLEKRSTYLTELRKQDGASSPV

SEQ ID NO: 7529 - protein, 442 aa, unidentified
  REGION 1..442: note = Human gut metagenome
MSTTVFVLDKKHRPLMPCRPARARRLLRAGRARVVKRFPFVIRLVDRTVEQSEVQPVLIKLDPGSRETGAAVVRDDGKKRHHALAFFVIEHRGGAIRDALKARSAFRRRRRSQNLRCRSPRFLNRVKPKGWLPPSLRHRVETTLSFVRRMCRYLPVSGIATELVKFDSQKLQNPEVSGVEYQQGTLFKYEVREYLLEKFGRKCVYCGAEGVLLNIDHVVPRAKGGSNRVSNLVLACMSCNQKKGARSLEDFLKGKPKVLARVRRELKTLLRDAAAVNATRWVLFNELKATGLPVETGSGALTKLNRHAFGVEKEHWLDALCVGRLNGVVTRKGLNVLEIRCMGRGSRQRTRLTKYGFPRGYLMRQKCVHGFATGDMVEANVPKGKKAGLWRGRVAVRVSGSFNIQTPKGVIQGVGWKHCRLISHNDGYGYAWLGHAPHSSPA

SEQ ID NO: 7530 - protein, 423 aa, unidentified
  REGION 1..423: note = Cyanobacteria bacterium UBA11166
VFRLYPFAIILNKEVVEIPEPLTLKIDPGSKTTGLAILSGCNLLWVAELTHRGQTIKASLESRHSLRRGRRNRHTRYRQARFLNRTRFNGWLAPSLQHRVETTLTWVKKLTRSGPINVVAQELVRFDLQQMDNPEISGIEYQQGGLAGYEVREYLLNKWERKCAYCGIENIPLQIEHIHPKAKGGTNRVSNLCLACEPCNIKKGTKNIEEFLKKKPDVLKKVLAQAKQPLKDAAAVNSTRWSLFNRLKKTGLEVATGSGGLTKFNRTRLQLSKTHFFDAACVGDTPELLVLANQPLLIKATGHGSRQMCRTDKFGFPSRYVTQFKFVKGFQTGDIVKAIVTSGKKIGTYTGRVAVRSTGSFNISTTNGLVQGISYKHCQQIHQKDGYGYGFSRLEANKFAAALSSPVSHTRSFQRRRYSDEST

SEQ ID NO: 7531 - protein, 456 aa, unidentified
  REGION 1..456: note = Human gut metagenome
MSTCVCVLSNNGERLMPTFRLGKVRHLLKDGKAKIVKHHPFTIQLLYDGKTNTQPIEICEDVGYNYIGISVKSESHEYVSAQYDTLQDEKEHHDSCRKYRRARRNRLRYRKPRFDNRRRGEGWLAPSLKHKKQLNISLIERYVFVIPITHATVEVGSFDTMLLQAIQKGEAKPEGADYQKGPRYNLAMLREAVFYRDNYTCQVCGRKITDGAILQMHHMFYWKGRHGYQLDELATVCEKCHTPANHQEGGKLFGFGKEKKFAYLSGAAFMNAVRWQIVNELYAAFGKPFVTITYGAMTKEKRIALQLEKSHNNDAYAMGDYHPAHRCKFRHYQKRRRNNRVLEKFYDATYIDVRTGNKAKGKELFNGRISRNHKKDSENLHKYRSKKVSKGRRSIRRQRYAIQPYDTVRFKGKTYFTSGCHNKGTRLLIPVNGKSKSVAISKVQVVRHAEAWIQII

SEQ ID NO: 7532 - protein, 460 aa, unidentified
  REGION 1..460: note = uncultured archaeon
MKMQTLEKRNTCTPPNASQVRCNCDPALNREETLSVPGLKTSSNNSEVNQLPIHKEKERQNPRVSVYVCVLNMRGQPLMPTTPRKARILLKQGKAKVVQRKPFTIQLKYANGETKQPIRLGIDPNYTKIGYSAVTDNKELISGEVSLRDDIPDKLIERKQYRRGRRNKLRYRQPRFDNRKRTETLSPSIKQKLQTFVNFVTKIKRILPITSTWVEVSSFDTQKLVNSEISGVEYQQGELQGYEVREYLLEKYARTCVYCGKTNIPLEVEHIVPRSKGGSDKVSNLTISCHKCNQKKGNKTAKEFGHPEVQKQAKESLKATAFMNTVRWKFVNLLNCEYTYGYITKCKRIKLNIEKSHANDAFVIAGGTDQERTRQYQGKQTRRNNRALQTNRNGFKPSIRRKKYGLGPSDIVYFRSLICTVKGVFSYGKRIRVVDSIGTIINTNIKNVELIKYGKGLQFE

SEQ ID NO: 7533 - protein, 361 aa, unidentified
  REGION 1..361: note = Human gut metagenome
MDRRKARFCNRKHPKDWVTPTVEQLIRTHINLMHKMQKFLPITDVAIEVNRFAFMLLENPTIAGVDFQQGLLKGYHGIQDAVFDQQDGECLLCGKPIEQYHHIVPKSKNGSNTLGNIVGLCRNCHDAVHKDEDVQKALKDKKSGLMKKYTALSALNQAIPFIYKRLVEEFGEEHIFTCTGRETAMVRKSLGYTKTKTDQLHEVDAYCIALLAHGDIDAENPTFEHVYQMKQFRRQNRANINNQRERSYYYKGKLVAKNRKDRIEQKDDSLEVWYQKMVKQYGEKEAERRRSVLQVKKSTRHYNTPGRVMPGTVFYYNGARHVLNGQITNGQYFKATGDARSNYPAKKCRIVKQNEGLVFLG

SEQ ID NO: 7534 - protein, 434 aa, Mitsuokella sp.
MGFLTTWARRKILPKGKVAEMPKIKKYAFVLDAKRKQLDPTIEQNAWRLVRQYKARLVSKFPMIIQLNKVMDNPNNDEIRCGIDDGANHVGMALVQKCQTRNKVLFKGTIEQRKDVKHLLTVRRGYRRYHRYHKQYRPARFLNRASSRRSGRLMPSIIQRKQAILRVIDRLRQWVRIDGYWLEDVKIDIRALTDGYKPYRWQYQKSNRLDNNLRLAAIHRDGCKCVECGKTKTRFEVHHITPRKTGGADTISNLITLCPKCHAKTFGRESQFADRYYALIGSTGHVEGIDDAQRVMQGKHWFREQLQQRGSLVLTTGGNTANKREDWDIAKTHSNDAVCITDLKPENIDIEEWTIKPMRRKNKAGVDEVCGFHHRDYVTYTYRNGETHTGYVTAMYPDKNQLNFQSPTKHCKRVNALKARLLWRYDKIYWFKCA

SEQ ID NO: 7535 - protein, 414 aa, unidentified
  REGION 1..414: note = Human gut metagenome
MPCSPAKARLLLKEKKAIVKRRTPFTIQLTIATGEAKQPVSLGIDAGYKHVGLSASTEKAELYASEVELRQDITDLLSARRALRQSRRNRKTRYRAPRFDNCISTKRKGWLAPSVENRINAHLSRIEAVLRLLPVTKITVETASFDLQLLKNPDISGKEYQEGEQLGFWNIREYVLCRDGHVCQHCYGRSKDPVLNVHHLESRRTGGDSPGNLITLCETCHKALHRGEITLKARRGQSFRAEAFVGIMRWEVHNRLRALHPGIEVSNTYGYRTKHARIANGIAKSHCADAFCIAGNLGAERLCEFFFQKQTRRNNRQIHKLSILKGALRKRNQAPFEVKGFRLFDKVACQGEEGFIFGRRSSGFFDVRKLDGTRISAGISYKKLHLLEKRQTYLIEIRKEEAFPPLPEGRGLRA

SEQ ID NO: 7536 - protein, 472 aa, unidentified
  REGION 1..472: note = Human gut metagenome
VVDNRLLSIKPLINIGEGVIYSSICTGLSLQTYQKRKEVPCMVYVLDINGQPLMPTTRHGKVRRLLNSHLAKVVKRCPFTIQLLYQSTKEIQPVSLGVDAGSKHIGMAATTEKKVVYQEELSPRNDVVKLLSARRTLRRTRRNRKTRYRKPRFNNRVHSKHKGWLAPSVEVKIQEHITAIKRICQILPISEIHVEISEFDLQRLKAMEEGRTLPVGTDYQLGEQYDFYNTRQYVLHRDGYTFQCCGTHDNNIKLHVHHIESRQTGGDAPSNLITLCEHCHKALHKGKFELPKGKKRGKTYRDATFMGIMRKTLLERLKKEIDVPVAGTYGYITKYWRERAGLEKSHINDAICISKYPYAKPLDTYYLTKAVRNHNRQIHKSNFSKGGIRKRNQAPYLVKGFRLFDKVLYQGKEYFIFGRRATGYFDIRTLDGTKVNKGSISYKKLRIQDTAKAYLKEARAIPHMNKFTCVLA

SEQ ID NO: 7537 - protein, 439 aa, unidentified
  REGION 1..439: note = metagenome
MVFVLNRSKKPLDMISHAKARILLKNRLAVVHKIYPFTIRLKDNSCVSKDKPYTVKIDPGSRTTGVAIVDDKDSVVMLAEIEHRGHIVKKKLSSRKAVRRNRRNRKTRYRESRFLNRTRPEGWLAPSVKSRADNVINFIKKYKKLINIDKVMIENVSFDTAQMTSNTKLWGSNYQKGNLYQQKLRSFIFSRSDGKCVYCGAKATEIDHVVPRSSGGTNSVCNLVASCKSCNKKKSNKTLKEFGKIMNKDFSHLEPKKLPKDAAIVQSARNYMVREITKLVSDTTLYDSWLTKYNRDQLGLPKEHYYDALSVGNIQDYKFLTDKVLQISAKGRGSRQMCRMDSHGFPRTSAKASKSVKGFQTGDMVKAIVPKGLKRGEYLGKVAVRSNGYFNIQTKTQVVQGIGYEYCHIIQRSDGYLYDYKECDFLSDIHNRVSIAKFL

SEQ ID NO: 7538 - protein, 427 aa, Nostoc sp.
MCKVFVLDTERRPLNPIHPAQARQLLSNGKAAIFRRFPFTIILKEARADLPVTALRLKLDPGAKTTGIALVNDSTGEVVFAAELKHRGFAIRDALISRRQLRSSRRNRKTRYRKPRFLNRTRPEGWLAPSLMSRVHNVETWVNRLRKFAPITAISTELVKFDMQLMRNPEIEGKEYQQGTLAGYEAREYLLEKWNRQCAYCGIKDIPLQIEHIHPRSKGGSNSITNLTLSCEKCNVKKGTKDIKDFLKKDPTKLQKILAQAKKPLADAAAVNATRYKLLEVLKSTGLPVECGSGGLTKFNRTRQQLIKTHWLDAACVGQSTPILIIKGIKPLLITANGHGTRQMCRTDKFGFPNRYVPKLKFIKGFQTGDIVKAVVTNGKKIGEYIGRVAVRSTGSFNISAQKGLIQGINYKFCKSIHKKDGYSYSS

SEQ ID NO: 7539 - protein, 431 aa, unidentified
  REGION 1..431: note = Human gut metagenome
MPNKVYVINKHGRPLMPCSPAKARHLLDDGKAKVKKRTPFTIQLVYGSSGYTQEVILGVDAGSKTIGMSVSTTKEELLSAEVKPRNDVVDLLSARREFRRARRNRKTRYRKPRFDNRVRSKHKGWLAPSVEVKIQEHITSIKRVCRILPVSKVVVETAEFDLQLLKAIADGKPVPQGEDYQKGEMYGHYNVRQYVLWRDNYTCQCCGTHPSKKKEVRLHVHHLESRKVGGDAPDNQVTLCESCHEKLHKGLIAEKDFKKRKRRSTRDATFMGIMRKTLMQRLCSELPIPVVKTRGYITKATREKLLVLPKSHINDALAIAQGKHGFNVGYLPGILQIDKIYTIRPVRHHNRQLHKATILKGGIRKSNQTEKYVFGYRLFDKVQFNGQDCFIWGRRTSGYFVVKTIDGKVIHNSASFKKLNLVERASNYLIA

SEQ ID NO: 7540 - protein, 413 aa, unidentified
  REGION 1..413: note = Human gut metagenome
MTSYAFVLDANGKQLAPTKEQKAWFLIRKKRAALVSKYPMVIQLKKEIQENEICKDEIRCGIDDGGLHVGIALVQKCKTKNKVVFKGTIEQRNDVKHLMEVRRGYRRYHRYHKRYRQARFNNRKSSKREGRIAPSILQKRQATIRVINQLNKWINITNYWLEDVSIDIRVLTDGYKSYRWQYQKSNRLDENIRKATILRDGGKCMECGKSNCRLEVHHIKPKRQNGSNTLDNLITLCESCHQKTEGQEELYMDRYFSLLKSSDNKNLNYAQHVMIGKMWLRKQLSGLGVLYLTSGGDTANKRIDWNIEKSHANDAVCITDLQPDTYDMKEWTMKPMRRQSKAKTDHVLGIKHRDLVEYTFKNGETHRGYVTALYPEQKAINFQSPTKHCKKVNARKCKLLWKYSKIYWFENAS

SEQ ID NO: 7541 - protein, 413 aa, unidentified
  REGION 1..413: note = Human gut metagenome
MTNYVFVLDANGKHLSPTKEQKAWFFIRKKRATLVSKYPMVIQLNKEIPDDKICKDEIRCGIDDGGLHTGIALVQKCQTKNKVLFKGVIEQRNDVKHLMDVRRGYRRYHRYHKRYRPARFNNRSSSKKEGKIAPSILQKRQATIRAVAQLNKWINITDYWLEDVAIDIRALTDGFKPYKWQYQKSNRLDENIRKAVILRDGCQCVECGRTNCKLEVHHIKPRRLNGSNALSNLITLCERCHQNTEGREELFMDKYFALLNSSDNKYLNYAQHVMIGKKWLREQLSSLGILHLTNGGDTANKRIDWNIEKFHSNDAICITNLQPDTCDVKEWTIKPMRRQSKAKADNVLGIKHRDLVEYTFKSGETHRGYVTALYPKQNAINFQSPTKHCKKVSAKKCRLLWKFNKIYWLDDVS

SEQ ID NO: 7542 - protein, 547 aa, Streptomyces sp.
MTTFFTGEQTHQAVLPQQPALEFVGADTPGGRDETAHGSPGKDRDTGREHGRGETGERSTVTRRRHAKSAATAAKAAENGSGDAPTPDRDYAAGAGAARVFVLSSDGKPLMPCHPARARELLARGRAVVARRVPFVIRMKDRTRAESGVHGLQLRIDPGSEGTGLVLTDEKTEVGERGAVVTVRRGLFAIELRHRGDQIRTCMQQRAGYRRRRRSANNRYRAPRSRNRTHPAGWLSPSVRHRVDTTFSLAARLSRYAPVTEIHVERVAFSMRQEEHQTRGTVRTRLRAKWNSTCAYCGATGVRLNVEHVRPLSRGGSSRISNLVLACVPCNRAKGSESVEDFLAHRPEQLATVLGQIESPLDDAAAMNALSPRLSEALNALGKPVHCWSGRLTKTNRDFCGMRKTHTLDALSVGRLDRESGDRIVRFAGRVLVAKATGRGSYARTTPDRYGFPRLRRSRTKQHFGFVTGDLVRATLPTGTWAGTWTGRVSVRARGQHSVTVPVGRINVSHKHLSLLQRGDGYQYSACAESGALPLSKKEVDRSPVRS

SEQ ID NO: 7543 - protein, 431 aa, unidentified
  REGION 1..431: note = Human gut metagenome
MDAWDIIVILNKRGKPLMPCSPAKARLLLKEKKAIVVRRTPFTIQLTIATGEAKQPVSLGVDAGYKHVGLSASTEKAELYASEVELRQDVSDLLSARRALRQSRRSRNTRYRAPRFDNRIRTKRKGWLAPTVENRINVHLSRIETVLRLLPVTKITVETASFDTQLLKNPDIAGKEYQEGEQLGFWNVREYVLFRDGHVCQHCHGRSKDPVLNVHHLESRRTGGDSPGNLITLCETCHKALHRGEIKLKAKRGRSFRAETFMGIMRWGVLNRLKASHPKLEVHNTYGYRTKHARIANGIAKSHCADAFCIAGNFGAKRLGEFFFQKQTRRNNRQIHKLSILKGGIRKRNQAPFEVKGFRLFDKVAYQGEEGFIFGRRSTGYFDVRKLDGTCISAGISYKKLHLLEKRRTYLTEIRKEEALPPPPEGRGLRA

SEQ ID NO: 7544 - protein, 464 aa, unidentified; identical to SEQ ID NO: 6330
  REGION 1..464: note = Human gut metagenome

SEQ ID NO: 7545 - protein, 498 aa, unidentified
  REGION 1..498: note = Human gut metagenome
MPTTRCGHVRYLLKEKVARVAASKPFTIQLLYETNDVVQPLYLCIDPGRTNIGVAVVKTDGTAVFTAHLETRNKEIPKLMQGRKKARRARRTNGRRCRRQRRAKANGTISKKCVKQTTAQNGSVSKRAKEIGVIKRHLPGCEKDVLCIGIKNKEAKFNNRTRPTGWLTPTANQLLQTHINLVKKIQKFLPISDVVLEVNKFAFMQLDNPNIQKWQYQKGPLYQKESLKSAVSEMQEHHCLFCKKKIDHYHHVVPQHKNGSNTIDNIVGLCTQHHDLVHKDATWQKRLAKKKTGLNKKYGALSVLNQIVPVLTKELGSLFLKHFYVTTGKSTYDYRAAHGVSKDHWLDAYCIACSVLPNDVCDSNINSHVPYELKQFRRHDRRALHKENINRVYTLNGKKVATNRHKAIEQTTDSLEEFRQNHPNDVCKLKVKEHHPEYRNPKRNFPGCVFLVGKHTHVMQGTSGSHNGKADGYYDTNGNSYPFGKCKFVAKNEGIVFA

SEQ ID NO: 7546 - protein, 470 aa, unidentified
  REGION 1..470: note = Human gut metagenome
MSVFVVGLNGCRLMPVSERKARLLLKGGKASVYRKVPFTIKLNYKTGSTVQPGYLGIDTGSQHIGVSVVRKDGTVLHKEEIGLRDSMSKRKLLESRASSRRGRRYRKTRYRHPKWKPKTKRIYNEKADRKGRHWKKQKNTFTSKRQAGWLPPSLQSKTGHHIQWIRKLLDLLPEGYRLSIELGRFDPARMKDPEIHGELYQKGPQYDYENVRAYVLARDGYTCRVCKKKGGKLHVHHILYRSRGASDNPKYMAAVCSKCHTTENHLPGGILYQWMQDQKKFTRGLRDATFMNILKKRLRKAFPDAVFTYGNITKADREKLELPKSHGNDATAIALVKTEVKSVKDEEPVIHIQQVRRKKRSLHEETPRKGRKEPNRTASRSDKNTKSVTVTKGSGEKKASMTACLFDRVELDGKKGWITGFTGTSCYVKDKEDNYICTSPKYKQVSISRLRILHHCGNWAIGAEKPLGKG

SEQ ID NO: 7547 - protein, 407 aa, unidentified
  REGION 1..407: note = Human gut metagenome
TNGRRCRRQRRAKANGTISKKCVKQDTAQSKNPSKRAKKIGVIKRHLPGCKKDVLCVGIKNKEAKYTNRARLEGWLTPTANQLLQTHINLVKKIQKFLPISDVVLEVNKFAFMRLDNPNIQKWQYQRGPLYQKGSLENAVSEMQEHHCLFCEKPIEHYHHVVPKSENGSNTIANIVGLCAEHHNLVHKDVAWQEKLVEEKTGLNKKYGALSVLNQIIPALTKELSFLFPKHSFMTNGKSTHDYRAAHGISKDHWLDAYCIACSVLPIDVCDSTINNCVPYELKQFRRHDRRALNNENMNRVYTLNDKVVATNRHKATEQEAASLEEFRKEHPNDVCKLKVKEHHPTYRNMNRNYPGSVFLVGKQIHVMQGIASSKDGKATKYNDTRATTIAAGKCKFVAKNSGILFV

SEQ ID NO: 7548 - protein, 458 aa, unidentified
  REGION 1..458: note = Human gut metagenome
LTKDENRPSGRTTGLRAEQAEPAGIRKGDTLKVFVLNMRGQPLMPCSPAKARHLLKAGKAVVKRRTPFTIQLRIATGETKQNVTLGVDAGAKHVGLSATTEKEEVFASEVELRQDITGLLAARLSLRRDRRHRKTRYRAPRFLNRVRSKHKGWLAPSVENRIQAHMSRIDAVCRLLPVTKIVIETASFDVQKIKNPTIEGTDYQQGDQLGFWNVREYVLFRDGHICQHCRGRSKDPILNVHHLESRKTGGDAPNNLITLCETCHKAYHAGKIKLKVKRGQSFRAEAFMGIMRWTLLDRVRKAHPGLPVENTYGYLTKHTRITHGLPKTHCVDAYCIAGNLKAVRRGVYLHQRQMRKHNRQIHKFTVLSKRLEDGTKIGYRKLNQSPYLVHDFRLFDKVRCLGQTGFIFGRRSSGYFDVRRLDGVKLSSGISYRKLTLLEKRSTYLTELRKEDGASSPV

SEQ ID NO: 7549 - protein, 425 aa, unidentified
  REGION 1..425: note = Human gut metagenome
MVYVLNKNGQSLMPTNRHGKVKHLLKDGKAKVVKRCPFTIKLTYETTNYTQDLTLGVDTGSGTIGTAVSKDSGNIIYMSEIVVRNDITNKMSQRAKYRRNRRNRKTRYRQARWLNRRNSIRKDRFSPTMQSKLHSHVKEIEYIKSILPITTMVFETGQFDMHLMKNPMLANPKVKHWGYQKGTNYGFENTKAMVLNRDNYTCQYCKGKHKDSKLEVHHIIFRSQGGSDEDSNLITLCHTCHKNLHDGKIAPNFKGKAKGTLKYATQMNSIRKQLFRLYPEVIETFGYVTKANRLAIGIEKEHYYDACTIATQGKPFIVKTNLYKKKCISDGDFQKTKGIRSEQPIVTDKIYGFRKFDKVKYFGKEYFIKGRMSTGYAILMDIEGNKADFSTMPKGFKTPKMINLKRLEARSSWMVTIVEVTPNIA

SEQ ID NO: 7550 - protein, 420 aa, unidentified
  REGION 1..420: note = Human gut metagenome
MQYVYVLNKHGEPLMPCSPRKARLLLKQKKACVIKRTPFTVKLLYGSAGYKQPVTLGVDAGSKHIGISATTEKHELYREEATPRNDVVDLLSARRAFRRSRRNRKTRYRAPRFNNRVHSKHKGWLAPSVEVKIQEHITLIKHVFRILPVTLVRVETAEFDTQRLKAMLEGKPLPVGTDYQLGEMYDEYNVRQYVLKRDNYTCQCCGAHSTKTKGVKLHVHHIETRRTGGNAPNNLITLCKACHKALHAEKVTLDGKKRGKPLKDAAFMGIMRKTLMERLRKKLKIPVQGTYGYITKYLREKNGIPKSHTNDARCISKNPLAIPCDTCYYTKAVRHHNRQLHKATILKGGIRKANQAPYIVKGYRLWDKVAYNGTECFITGRRTSGYFALKELDGTAVSNSISYKKLRLLEAATNYIIERK

SEQ ID NO: 7551 - protein, 442 aa, unidentified
  REGION 1..442: note = Human gut metagenome
MVTVQQSTHHLPFGRVFIRRNLFMVYVISQDGKPLMPCSDPIARLLLKQGKAKVKKREPFTIKLTYETTNYTQGLTLGVDTGSGTIGTAVSKDNGDIVYMSEVVVRNDITDKMTQRAKYRRNRRNRKTRYRKARWLNRASSIKKDRFSPTMQSKLHSHVREIEYIQSILPVTEMVFETGQFDMHLMKNPSLANPKVRPWGYQKGANYGFENTKAMVLNRDNYTCQCCKGKHKDSKLEVHHIVFRSQGGSDEESNLLTLCHTCHKDLHSGKINPKLSGKVKGNLKYATQMNSIRKQLFRFYPNAIETFGYVTKVNRLHLGVAKEHYYDACTIATQGNAFNVKSNLYKKKCVSDGDFQKTKGIHSEQPIVTDKICGFRKFDKVRYFGNDYFIKGRMSTGYAILMDIDGNKIDFSTMPRGYKTPKLSNCKRITARSTIMTQVKVV

SEQ ID NO: 7552 - protein, 439 aa, Tolypothrix sp.; identical to SEQ ID NO: 2044

SEQ ID NO: 7553 - protein, 425 aa, unidentified
  REGION 1..425: note = Human gut metagenome
MVYVLNKNGQSLMPTNRHGKVKHLLKDGKAKVVKRCPFTIKLTYETTNYTQDLTLGVDTGSGTIGTAVSKDSGDIIYMSEIVVRNDITDKMSQRAKYRRNRRNRKTRYRQARWLNRRNSIRKDRFSPTMQSKLHSHVKEIEYIKSILPITTMVFETGQFDMHLMKNPMLANPKVKHWGYQKGTNYGFENTKAMVLNRDNYTCQYCKGKHKDSKLEVHHIIFRSQGGSDEDSNLITLCHTCHKNLHDGKIAPNFKGKAKGTLKYATQMNSIRKQLFRLYPEVIETFGYVTKANRLTIGIEKEHYYDACTIATQGKPFIVKTNLYKKKCISDGDFQKTKGIRSEQPIVTDKIYGFRKFDKVKYFGKEYFIKGRMSTGYAILMDIEGNKVDFLTMPKGFKTPKMINLKRLEARSSWMVTTVEVTPNIV

SEQ ID NO: 7554 - protein, 427 aa, Scytonema sp.
MSKVFVLDTDKRPLNPIHSAQARQLLRNKKAAIYRRFPFTILLKESRPDSPVSPLRLKLDPGAKTTGIALVNDTTREVVFAAELKHRGFAIRDALTSRRQLRRGRRARKTRYRQPRFLNRTRPKGWLAPSLQSRVENIKTWVERLRKLAPIATISQELVRFDMQLMRNPEIQGKEYQQGTLAGYETREYLLEKWGRQCAYCGAGDVPLQIEHIHPRAKGGSNSIRNLTLSCEKCNTKKGTKDIKEFLKKDPSKLQKILAQAKRPLADAAAVNTTRWTLFRTLKETGLPIETGSGGLTKFNRNQQALPKTHWLDAACVGKSTPFLKIKGIKPLLITANGHGTRQMAGTDKFGFPTRHRSNKQIHYGFSTGDIVKAMVINGKKVGEYLGRVLCRATGSFDIATNAGRISGISHKYCSAIHKKDGYSYAF

SEQ ID NO: 7555 - protein, 421 aa, unidentified; identical to SEQ ID NO: 2610
  REGION 1..421: note = Human gut metagenome

SEQ ID NO: 7556 - protein, 451 aa, unidentified
  REGION 1..451: note = Human metagenome
MSVAVISKTGERLMPTSEYRARKLLKLGKAVKYSYHPFTIQLTEREDGDVQPIELCMDTGYIHIGISVKSEKHEYLAEQIDTLTDERARHDACRMYRRQRRGRKRYRQPRFNNRKRDKGWIAPSLEHKKDIHVQAISRINKVMPLTNITMEMGNFDTQVLKAKEEGKPLPHGADYQHGERYGIATLREAVFSRDGYKCQCCGKTISDGAILHVHHIKYRSRGGTNSMTNLATVCDKCHTPKNHKPGGKLYNWKPKLPNFKGATFMTTIRWQLYNEVKSLFLDINIHVTYGAATKEQRRKLNIGKSHVNDAFVMGKFYPKHRANAVLYKKKRRNNRCLEKFYDAKYIDSRDGSKKTGQELFNGRINRNHKKDSENLHQYRLQKTTAGKRTVRKKHYSIQPHDIVIYENRKRETSGCHCNGTRVILLPDKKTATIKKVKIYKYAGGYFKSAFN

SEQ ID NO: 7557 - protein, 451 aa, Moorena sp.; identical to SEQ ID NO: 3199

SEQ ID NO: 7558 - protein, 470 aa, Thermoanaerobacterium sp.; identical to SEQ ID NO: 6736

SEQ ID NO: 7559 - protein, 292 aa, Moorena sp.
RLLDKGKAAVFRMYPFTIILKTAIRQSRRCANNNPTISPCQIKIDPGSKITGFALVQDGQVIWGMELYHRGGLIKKRLESRRAVRRGRRNRHTRYRKPRFLYRKRPEGWLPPSLEHRILTTQTWVKRLIKFCPVNEVWIERVKFDTQKMRNPEISGVEYQQGELAGYEVREYLLEKWGRECTYCGKQNAPLQIEHIHPKSKGGSNRVSNLCLACEKCNQRKGDKPVEDFLKKKPNLLQKIKTKAKQPLKDAAAVNATRNKLVKVLRSVKPLVTGTGAQTKYNRTKLGLPKQH

SEQ ID NO: 7560 - protein, 514 aa, unidentified
  REGION 1..514: note = Human gut metagenome
MSTVYVLNKNGKPLMPTTRCGRVRHLLKEQKARVVTSNPFTIQLLYETDDVVQPLYLGIDPGRTNIGVAVVKTEGTAVFTAHLETRNKEIPKLMQGRKKARRARRTNGRRCRRQRRAKANDTISKKCVKQDTAQSGSASKRAKKIGVIKRHLPGCEKGVLCIGIKNKEAKFSNRTRPEGWLTPTANQLLQTHINLVKKIRKFLPISDVVLEINKFAFMQLDNPNIQKWQYQQGPLYQKASLEEAVSEMQEHHCLFCKKPIAHYHHVVPQSENGSDTIGNIIGLCTKHHDLVHKDTAWQKKLAKKKTGLNKKYGALSVLNQIIPALTKGLGSRFQGYFYVTTGKSTYDYREVHGVSKDHWLDAYCIACSVLPNDVCDSDINNRVPYELKQFRRHDRRALHKANINRVYTLNGKSVATNRHKAIKQTTDSLEEFRQCQPDDVCKLKVKEHHPEYRNPERNFPGCVFLVGKHTHVMQGTRGSHNGQADGYYDTNGNSYSSGKCKFVAKNEGIVFTLN

SEQ ID NO: 7561 - protein, 431 aa, Klebsiella sp.; identical to SEQ ID NO: 2435

SEQ ID NO: 7562 - protein, 415 aa, Moorena sp.; identical to SEQ ID NO: 3370

SEQ ID NO: 7563 - protein, 413 aa, unidentified; identical to SEQ ID NO: 2636
  REGION 1..413: note = Human gut metagenome

SEQ ID NO: 7564 - protein, 456 aa, unidentified
  REGION 1..456: note = Human gut metagenome
MNTCVCVLSNNGERLMPTFRLGKVRRLLKDGKAKIVKHHPFTIQLLYDSKTNKQPIEICEDVGYNYIGISVKSESHEYVSAQYDTLQDEKEHHDDCRKMRRARRNRLRYRKPRFDNRKRSEGWLAPSLEHKKQLNISLVERYVSVIPITHATVEVGSFDTMLLQAIQKGETKPEGADYQEGPRYNLATLREAVFYRDNYTCQICGRKITDGAILHMHHMFYWKGRHGYKLDELVTACEKCHTPANHQKGGKLFGFGEDKEFADLSGAAFMNAVRWQIVNALHTTYSKEFVTITYGAMTKEKRIALQLEKSHNNDAYAMGDFHPVHRCGFRHYQKRRRNNRVLEKFYDATYIDARTGNKAKGKELFNGRISRNHKKDSENLHKYRSEKVSKGRRSIRKRRYAIQPYDTVRLKGKTYITSGCHNKGTRLLIPVNGKSKSVTISKVQVVCHAGPWIQII

SEQ ID NO: 7565 - protein, 413 aa, unidentified; identical to SEQ ID NO: 3220
  REGION 1..413: note = Human gut metagenome

SEQ ID NO: 7566 - protein, 418 aa, unidentified
  REGION 1..418: note = Human oral metagenome
MFVYVLDKNGQPLMPTQRFGKVRRLLRDKRAKVVKRCPFTIRLLYEPETKIVQDIVLGVDTGSKYVGVACVGNDKVLYQAQVELRDDIKKKMDSRRMCRRNRRFRKTRYRKCRFLNRRNSIRKDRYCPTLVSKFYGHVREIEFCKKILPIKDTVLETGKFDTQLMEKPWLQEHKWAYQKGVNYGYANAREHALVRDKYTCQCCGKKNCRVEAHHIVFRSKCGSNDLENYVTLCEDCHKAVHSGEIDLKLKGKRRGTLRYATQMSIIRNMLLKKYSDAIETFGFVTKENRENLGLKKDHYLDACVIASGGVKFEQSDVLYRKRCVSRQDRQLCKGIRGEKRMPTGKVFGFKKFDKVKYLGKECFIKGRRRNGAFVLMTIDGNPIDFRNMGGKQNPYYKSIDRLNTRKSVLCVSRSVEWR

SEQ ID NO: 7567 - protein, 457 aa, unidentified; identical to SEQ ID NO: 5177
  REGION 1..457: note = Human gut metagenome

SEQ ID NO: 7568 - protein, 512 aa, unidentified
  REGION 1..512: note = Human gut metagenome
MSTVYVLNKDGKPLMPTTRCGHVRHLLKEQKARVVASKPFTIQLLYETDDVVQPLYLGIDPGRTNIGVAVVKTDGTAVFTAHLETRNKEIPKLMKKRKESRRARRTNGRRCRRQRRAKANGTISKKCVKHDTAQNGSVSKHAKEIGVIKRHLPGCEKDVLCIGIKNKEAKFSNRTRPEGWLTPTANQLLQTHINLVKKIQKFLPISDVVLEINKFAFMRLDNPNVQKWQYQQGPLYQKANLEETVSEMQEHHCLFCKKKIDHYHHVVPQHKNGSNTIDNIIGLCTQHHDLVHKDATWQKRLAKKKTGLNKKYGALSVLNQIIPALTKELSSLFPKHFFVTNGKSTYDYRAAHGVSKDHWLDAYCIACSVLPNDTCDKTINSRVPYELKQFRRHDRRALNNENMSRVYMFNGKMVATNRHKATEQTTDSLEEFRQRQPNDVCNLKVKEHHPTYRNMNRNYPGSVFLVGNQVHVMQGIAGSKDGEATTYKDTNANSIAAGKCKFVAKNSGILFV

SEQ ID NO: 7569 - protein, 431 aa, Klebsiella sp.; identical to SEQ ID NO: 4152

SEQ ID NO: 7570 - protein, 408 aa, unidentified
  REGION 1..408: note = Human gut metagenome
LKVFVLNMRGKPLMPCSPAKARHMLKAGKAFVVRRTPFTIKLTIATGETKQDVTLGVDAGARHVGISATTEKEEVFASEVALRQDITGLLADRLAFRRARRNRKTRYRAPRFNNRVRSKHKGWLASSVENRIQAHMSRIEAVCRLLPVTKIVIETASFDIQKIRNPEVEGTGYQQGDQLGFWNVREYVLFRDGHICQHCRGRSKDPILNVHHLESRKTGGDAPNNLITLCETCHKAYHAGKIKLKVKRGQSFRAEAFMGIMRWTLLNRMRKAHPSLPVENTYGYLTKHKRIALGLPKTHCADAFCIAGNLKALRRGDFLFLQQTRKHNRQIHKCSILKGGVRKLNQAPFLVKGFRLFDKVRIGGQIGFVFGRRVRGTFNIRRLDKTVIGTDINCKKTESSRNTQNFFD

SEQ ID NO: 7571 - protein, 428 aa, Enterococcus sp.; identical to SEQ ID NO: 4335

SEQ ID NO: 7572 - protein, 479 aa, unidentified
  REGION 1..479: note = Human gut metagenome
MPTTRCGHVRGLLNERKARVVEQNPFTIQLNYETKEMTQPLSLGIDPGRTNVGAAVVREDGECVFTAQLTTRNKDVSKLMKARKQFRMAHRRLKRRCKRQRRAKAAGTISQKRELQRLLPGCEEPILCKGIRNKEARFNNRQRPAGWLTPTANHLLLTHLNMVKKLQKFLPITDVVLEVNRFAFMAMENPNIRRWQYQRGPLYGKGSVEDAVYAQQDGHCLFCGKPITHYHHVVPQHKNGSDTLENRVGLCIEHHDLVHKDRAWEAKMKEVKAGMNKKYHALSVLNQIIPALAEQLAELFPQHAFATTGKDTADFREDHGVTKEHHLDAYCIACSVLTEPGRVSAPTAKPHRLMQFRRHDRQVCHKENIKRVYLLDGKAVATNRHKAIEQKDNSLEEFRKTHTQQEVSSLTVKDHKPIYKDMRRSMPGGVFLCNGKVHTLLGSQGRYKGMPQYYHGTDRSRNNATRCIFLQLNCGLRWV

SEQ ID NO: 7573 - protein, 512 aa, unidentified; identical to SEQ ID NO: 4350
  REGION 1..512: note = Human gut metagenome

SEQ ID NO: 7574 - protein, 279 aa, unidentified
  REGION 1..279: note = Human gut metagenome
VVVETAEFDLQLLKAIADGKPVPQGEDYQKGEMYGHYNVRQYVLWRDDYTCQCCGAHATKKKEVRLHVHHLESRKVGGDAPDNQVTLCESCHEKLHKGLIAEKDFKKRKRRSTRDATFMGIMRKTLMQRLCSELPIPVIETRGYITKATREKLLVLPKSHTNDALAIAQGKQGFNVGYLPGIVQINKIYTIRPVRHHNRQLHKATILKGGIRKSNQVGKYVFGYRLFDKVQFNEQDCFIWGRRTTGIFTIKTINGKMIKDGISFKKLKPVEKSTSYLIA

SEQ ID NO: 7575 - protein, 427 aa, Moorena sp.
MQNYVFVIDTNKQPLNPISPKKARRLLDKGKAAVFRMYPFTIILKTAISAPTISPSQIKIDPGSKTTGFALVQNGQVIWAMELEHRGSLIKKKLESRSAVRRGRRNRNTRYRKPRFLNHKPSLGWIAPSLEHRVLTTETWVKRLIKFCPVDEIWIERVKFDTQKMQNPEVSGVEYQQGNLAGYEVREYLLEKWGRECAYCGKQNTPLQIEHIHPKSKGGSDRVSNLCLACEKCNQKKGNKPIEEFLTLKPDLLRKILAIAKQPLTDAAAMNTTRNKILKALKAIKPVATGTGAQTKYNRTRLRLPKQHWIDAACVGNLKTLTLRTSQPLLVTCKGHGGRQKAALNKYGYPIRHNPLRPIKGWITGDIAKHQKLGIGKVTPRSRGSFGFTPLGEKGYKSCKPQDISAVHRKDGYTYRFCKNLPGFAWK

SEQ ID NO: 7576 - protein, 420 aa, unidentified; identical to SEQ ID NO: 3504
  REGION 1..420: note = Human gut metagenome

SEQ ID NO: 7577 - protein, 438 aa, Calothrix sp.
MTTNFVFVLDSDKKPLTMCTAGLARKLLDSQKAAMFKWYPATIILKKSVVELPLAYLELRIDPGSRYTGFALVEIATETVIWAMELEHRGLLISESLIKRNSIRRARRSRKTRYRKYRQNRKKPSGWLPPSLQHRVLTTVTWVKRILKLAPIKSIAVERVKFDMQQLENPDIQGVEYQQGTLHGYTLREALLEHWGRKCAYCDTSNTPLEIEHIHPKSKGGSDRFSNLTLSCHKCNQEKSNMLIDEFLKHDPARLDNIKKHKKQSLRDAAAVNSTRNKLFNTVLNLNLPVSSGNGAATKMMRIKSNLPKAHFIDAGCVNASKQVTLKTFQPLQVKSNGHGNRRFVTVDKHGFPRKNYAPKQVRKDWKAGDIIKVRKKDGTSVLGRVLKAAKTLAFIPKGGKETTFHPKKTKPIHRSDGYRYSFTTIDSVNVNVNEVFP

SEQ ID NO: 7578 - protein, 482 aa, unidentified
  REGION 1..482: note = metagenome
HYYFTKGVSCMSTCVCVLSNNGERLMPTFRLGKVRRLLKDGKAKIVKHHPFTIQLLYDSKTNKQPIEICEDVGYNYIGISVKSESHEYVSAQYDTLQDEKEHHDDCRKMRRARRNRLRYRKPRFDNRKRSEGWLAPSLKHKKELNVNVVKMYCAVMPITHATVEVGSFDTMLVKAIQEGKAIPEGADYQKGPRYNLATLREAVFYRDNYVCKVCGRKATEGAILHMHHMFYWKGRHGNSLNELLTVCEKCHTPANHQKSGKLYGFGEDVKFADLSGAAFMNTVRWQIVNELYAAFGKPFVTITYGAMTKEKRIALQLEKSHNNDAYAMGEFHPNHRCAFEHYEKVRRNNRILEKFYDSQYIDIRTGEIATGKELFNGRINRNHKKDSENLHKYRGKRTYAGHRALLRKKVNLNPGDLVSLNGEPLVVLGTHTRKNGAVNVEFETPSKSGRKSASLKKLKIVKAADSIHPAWEKVSQIIQRKE

SEQ ID NO: 7579 - protein, 477 aa, Acidithiobacillus sp.; identical to SEQ ID NO: 4655

SEQ ID NO: 7580 - protein, 419 aa, unidentified; identical to SEQ ID NO: 3628
  REGION 1..419: note = Human gut metagenome

SEQ ID NO: 7581 - protein, 442 aa, unidentified; identical to SEQ ID NO: 2903
  REGION 1..442: note = Human gut metagenome

SEQ ID NO: 7582 - protein, 465 aa, unidentified
  REGION 1..465: note = Human gut metagenome
MSTCVCVLSNSGERLMPTFRLGKVRRLLKDGKAKIVKHHPFTIQLLYDSKTNTQPIEICEDVGYNYIGISVKSEFHEYVSVQYDTLQDEKEHHDDCRKYRRTRRNRLRYRQARFDNRKRDDGWLAPSLEHKKELNVNVIKMYCEVMPITHAIVEVGSFDTMLVKAIEEGKATPESADYQKGPRYKLATLREAVFYRDNYTCQVCGCKANEGAILHVHHMFYWKGRHGNSLSELITVCEKCHTPANHQKGGKLFGFGEDKEFANLSGAAFMNAVRWQIVNALYATYGKEFVTITYGAMTKEKRIALHLEKSHNNDAYAMGSFHPVNRCAFEHYEKVKRNNRILEKFYDSQYIDIRTGEIATGKELFNGRISRSHKKDSENLHKYRGKRICKGHRALRRKKVALNPGDLVSLNGEILVVHGTHTKKNGSVNVEFKTPSRGGKKSASLKKLKIVKTTDSMHSAWEKVS

SEQ ID NO: 7583 - protein, 426 aa, unidentified; identical to SEQ ID NO: 6904
  REGION 1..426: note = coral metagenome

SEQ ID NO: 7584 - protein, 450 aa, unidentified
  REGION 1..450: note = Human gut metagenome
MPTIRLGKVCHLLKDGKAKIIKHHPFTIQLLYDSKTNTQPIEICEDVGYNYIGISVKSQSHEYVSAQYDTLQDEKACHDSCRKLRRTRRNRLRYRKPRFDNRKRGEGWLAPSLRHKKELNVNVVKMYCAVMPITHATVEVGSFDTMLLQAIQKGESKPEGVDYQKGPRYNLATLREAVFYRDNYVCKVCGRKATEGAILHMHHMFYWKGRHGNSLDELLTVCEKCHTPANHQKSGKLYGFGENVKFADLSGAAFMNTVRWQIVNELYAAFGKDFVTVTYGAMTKEKRIALHLEKSHNNDAYAMGEFHPNCRCTFEHYEKVRRNNRILEKFYDSRYIDIRTGEIATGKELFNGRINRNHKKDSKNLHKYRGKRLYKGHRALVRKKVNFNPGDLVSLNGEVLVVHGTHTNKKGAVNVEFKTPAKNGRKSANLKKLKIVKAAGSIHPAWEKVS

SEQ ID NO: 7585 - protein, 512 aa, unidentified
  REGION 1..512: note = Human gut metagenome
MSTVYVLNKDGKPLMPTTRGGHVRYLLKEKKARVVTSKPFTIQLLYETDDVVQPLYLGIDPGRTNIGVAVVKTDGTAVFTAHLETRNKEIPKLMQGRKKARRARRTNGRRCRRQRRAKANGTISKKCVKQTTAQNGSVSKRAKKIGVIKRHLPGCEKKVLCIGIKNKEAKFSNRTRPEGWLTPTANQLLQTHINLIKKIRKFLPVNDVVLEINKFAFMQLDNPNIQKWQYQQGPLYQKASLEEAVSEMQEHHCLFCKQSIVHYHHVVPQSENGSDTIGNIVGLCTKHHDLVHKDTAWQKKLAKKKTGLNKKYGALSVLNQIIPALTKELSSLFPKHFFATNGKSTNDYRIAHGVSKDHWLDAYCIACSVLPNDTCDRTINSRVPYELKQFRRHDRRALHKENMSRVYTLNGKSVATNRHKAAEQTTDSLEEFRQRQPNDVCKLKVKEHHPTYRNMNRNYPGSIFLIGKQVHVMQGIAGSKDGEATTYKDTNANSIAAGKCKFVAKNSGILFV

SEQ ID NO: 7586 - protein, 420 aa, unidentified; identical to SEQ ID NO: 4538
  REGION 1..420: note = Human gut metagenome

SEQ ID NO: 7587 - protein, 429 aa, Salipiger sp.
MSNYVFVLDDARRPLSPTSPARARQLLRNGKAAVFRRYPFTIILKRKVPDAEPAPVEVKIDPGSKVTGLALVQGDKVLWGGELTHRGHQIRERLQMRRERRRGRRNKLRYRKPRYRTKAQINNAGRKRQKGWLAPSLMHRVETIMTWMDRFRRYAPASSIAMELVRFDLQQMQNPEISGVEYQQGELAGFEVKEYLLAKWGRKCAYCGAEGRPLEVEHIQPRSRGGSNRVSNLTLACTKCNQAKGNKPVEAFLSSKPDLLARIMKQAKQPLRDAASVNSTRWALFTALKMTGLPVTTGTGGRTKYNRKRMGWAKAHWLDAAAVGNVDALTLRTDKPLVIYAKGQGGRQKGVFDKHGQPRRNKAGAAQIRPLKPIHGWRSGDIAKARGLEGRISPRTRGNFELRAAGQKPRSFPPRDFKAIHRNDGYAYQ

SEQ ID NO: 7588 - protein, 437 aa, unidentified
  REGION 1..437: note = Wastewater metagenome
MPCSEKRARLLLARGRACVHRLVPFVIRLTDRQLDTCTLQPLRIKLDPGSKTTGLALVRDTEHLNTDTGEIQRGVAVLSLIELVHRGRQISEALTARRQMRRRRRGCLRYRAPRFLNRGNKARGWLAPSLQHRINTTMAWVARIRRWSPITAISSELVRFDMQRLQNPEISGVEYQQGTLAGYEVREYLLAKWSRKCAYCGVENVPLQIDHVHPKAKGGTNRVSNLTLACGPCNARKSAQSVDAFLAKDPKRLTALLAQAKRPLKDAAAVNATRWALVGALKATGLPVETASGGCTKFNRSRLAIPKTHALDAVCVGAVSVVTNWQKPSLTIKCTGRGSYQRTRLDKYGFPRGYLMREKSVKGFKTGDLVRAIVPTGKKAGRHTGRVAIRKSGSFNIQTLAGVVQGIGYRHCRLLQRADGYGYFFNKAACDTAQKRE

SEQ ID NO: 7589 - protein, 406 aa, unidentified
  REGION 1..406: note = Human gut metagenome
MVYVQDIDGKPMMPTTRHGKVRRLIKANKATVVNLCPFTIQLTYKSTDHKQPVTLGIDAGAKHIGFSATTEKEELFACETTLRTDIVDLLSMRLQNRRTRRSRLRYRKSRFNNRGSSKKKGWVAPSVKQRIDSHLNEVNEIHKILPITKIVIEVAQFDTQKMKNHDISGADYQNGEQLGFWNVREYVLFRDGHKCSHCKGKSKDPVLNVHHLESRKTGGDSPSNLITLCESCHKAFHKGEIELKKKRGKSLRDAAVMGIMKWKLYEELKSRYDNVSMTFGYITKHNRIKYGIEKNHTSDAFVISKNFNAKRIERQYLKRLIRRHNRQIHKMKILKGGKKKNNQAPFEVFGFRLFDKVLYNNEINFIYGRRKSGNFNIRDFNGENPKDVSHKKFKLIRGKRHPIILK

SEQ ID NO: 7590 - protein, 465 aa, unidentified; identical to SEQ ID NO: 6446
  REGION 1..465: note = Human gut metagenome

SEQ ID NO: 7591 - protein, 413 aa, unidentified; identical to SEQ ID NO: 3295
  REGION 1..413: note = Human gut metagenome

SEQ ID NO: 7592 - protein, 456 aa, Clostridium sp.
MAYTYVLDMNKNPLMPCHNGGFIRTLLKKKKAKVVRNKPFTVQLLFEVRNKYKQDMTLGVDAGYKHIGFSVSTSKAEVFSAELEQECGMVERNKERRMYRRQRRSRLRYRKPRFNNRIASKQKGWIAPSLKRKRDTHLRFIMMLKSIIPITKITVEIGLFDPALMKAIAEGRTLEGEDYQHGEAEGFENTKSYIRYRDGYTCQNPDCKCHRMPASDREKLKLAVHHIGYYRNDRSNRPGNLITLCELSHNPENHQPGHLLYGWKPKIKSLKETAFMNIIRKEIVDTLKVIYPTTEIRYTYGYRTNMTRNEWHIKKSHHDDAFCIAGNYSKNRCNTLYFHQKRRNNRSLEIFYDAKYIDRRDRKKKSGKELFCGRTTRNKNYAGENLHKYRIKKISKGKRSIRRQHYFYQPKDIILFKGIKHVIKGSHCNGSRLILDTGKSVSVKKVRIHKFSGGIY

SEQ ID NO: 7593 - protein, 465 aa, unidentified; identical to SEQ ID NO: 3603
  REGION 1..465: note = Human gut metagenome

SEQ ID NO: 7594 - protein, 460 aa, unidentified
  REGION 1..460: note = metagenome
MVVYVLNKNNKPLMPCKPQRARKLIKEKKAKIVNYKPFTIKLIYGSYGYTQNTNLGVDLGSKNIGIAVTTQNKVLAKGEIELRQDVSSLIETKKILRRGRRSRKTRYRRCKFNFRNKRVFNAPKGAKLKTLKKGSDSKKNWRTLSTNIDSNRPVGWLPPSIQSKIDNTFFWIDKYYNLLPKCNLSIEVGKFDMAKMINPEIEGADYQQGEAFGFYNTRYFVFARDNYTCQVCKKNKDKVLHTHHVIYKSKGGSDRADNLATICTDCHTSENHKPGGILYEWMIKKKKMKTYKEPPFMNSMRVKVFKKYPQANITYGSITTPRRKELGLEKTHYNDAIAISKVECINQNCDEVFKIKQFRKKKRSLHEATARKGRKTKNTESKRNEKNTSFANGFYLNDKVEIFGQIGYITGFSGKSSAYVKNINDEYITIPGKKYKQVSISALKFINHNNNWQYESNFAI

SEQ ID NO: 7595 - protein, 415 aa, unidentified; identical to SEQ ID NO: 5047
  REGION 1..415: note = Human gut metagenome

SEQ ID NO: 7596 - protein, 451 aa, unidentified; identical to SEQ ID NO: 2424
  REGION 1..451: note = Human gut metagenome

SEQ ID NO: 7597 - protein, 416 aa, unidentified; identical to SEQ ID NO: 3087
  REGION 1..416: note = Human gut metagenome

SEQ ID NO: 7598 - protein, 415 aa, Bacillus sp.; identical to SEQ ID NO: 2431

SEQ ID NO: 7599 - protein, 451 aa, unidentified
  REGION 1..451: note = Human gut metagenome
VTTILKTCFAASNLAKIVVLMDAWDIIVVLNKRGKPLMPCSPAKARLLLKEKKAIVKRRTPFTIQLTIATGESKQPVTLGVDAGYKHVGLSASTEKAELYASEVELRQDVSDLLSARRALRQSRRNRKTRYRAPRFNNRLRTKRKGWLAPSVENRINAHLSRIEAVLRLLPVTKITVETASFDMQLLKNPDIAGKEYQEGEQLGFWNVREYVLFRDRHVCQHCYGRSKDPVLNVHHLESRRTGGDSPGNLITLCETCHKALHRGDITLKAKRGKSFRAEAFMGIMRWEVHNRLRALHPGIEVSNTYGYRTKHARIANGIAKSHCADAFCIAGNLGAERLCEFFFQKQTRRNNRQIHKLSILKGGIRKRNQAPFEVKGFRLFDKVACQGEEGFIFGRRSSGFFDVRKLDGTRISAGISCKKLHLLEKRRTYLTEIRKEEALPPLPEGRGLRA

SEQ ID NO: 7600 - protein, 464 aa, unidentified
  REGION 1..464: note = Human gut metagenome
MVIALDKNKRPAGFLTEKRCRKLFEQKRAVRYRMFPMVVILKDIDVRTFTQTLPEYRLKIDPGAKYDGFAIIDPVRDAVVFTLQVEHRAGQVKQNLDARRQARRNRRSRETVYRKNKFAQGGTFTQTGNEGKLPPSIQSILANTETWVKRLSRWVNLTSVSLEAVRFDTQLLDDPVIEGKEYQQGTLQGTEIREYLLDRYQHTCQYCGGVSGDPVLEWEHIRPRSRGGSDSIKNATLACHRCNQDKGSMTPEEWAGQLKTQKTKLSRARLQGIEKVLAGKRNGGSSRYCAWVNITRKELERFLFACFGKVECASGGRTKYNRTRLGFPKDHQYDAACVGKVPEQGYTDLTHGYYTLAKAVGHGSHFRGKINSCGIIIQKLPPREKNVFGFMNGDIVAADIPKREKRPYKYEGHHVGRVMTRARGEFDIRTTDGRLIGANHRYVTKIQNADGYQYAQYRTPGVSG

SEQ ID NO: 7601 - protein, 494 aa, unidentified
  REGION 1..494: note = Human gut metagenome
MTMVYVQNKDGKPLMPTTRYCYVRLLLKEKKARVVCTTPFTIQLNYDTPDITQDLILGIDPGRTNIGVAVVKEDGQCVFSAHLETRNKDVPLLMKKRAGFRKQHRTLDRRRKRQRRAKATGNTVKNETIERLLPCYQRPIVCHYIRNKEARFNNRSRPAGWLTPTANHLLQTHINLIAKVAKFLPITKVVVELNRFAFMAMDNPNIRRWEYQQGPLYGLGSVEDAVYAQQDGHCLFCDKPIDHYHHVVPRHKGGSETLANRCGLCAKHHDLVHKDKAWAEKLVTRKGGMNKKYHALSVLNQIISFLMEYLGRETPYDVYATDGKSTKGFRIAKNVPKEHYTDAYYIACSILDTAIEVSAPTSPFKLKQFRRHDRQSCIRQMVDRKYILDSKVVATNRHKAIEQKSDSLQEFREVYGDAAVSQLTVRPHSPQYKDMTRIMPGAVMDFNGTIGVMQCSGGRNNGKVEFFKSTKGNKTPPKKCVLLAQNAGMVFIPA

SEQ ID NO: 7602 - protein, 420 aa, unidentified; identical to SEQ ID NO: 3195
  REGION 1..420: note = Human gut metagenome

SEQ ID NO: 7603 - protein, 417 aa, unidentified
  REGION 1..417: note = Human gut metagenome
MPCSPAKARLLLKERKAIVKRRTPFTIQLTIATGEAKQPVALGVDSGYKHIGLSATTEKAELYASEVELRQDITDLLSARLALRRSRRSRKTRYRAPRFDNRVASKREGWLAPSVENRIVAHMSRVEAVMRVLPVTAITVETAAFDTQLLKNPDITGAAYQQGEQLGFWNVREYVLFRDGHVCQHCSGKSKDPILNVHHIESRRTGGDAPNNLITLCETCHKAFHRGEIKLKVKRWKSFKAETFMGIMRWTLFERLKKAHPELSVRHTHGYLTKHKRISHGIAKSHCADAYCIAGNLGAMRLNSYLFQKQTRKHNRQIHKLSILKGGLRKKNQAPYEVKGFRLFDKVICKDEEAFIFGRRSSGSFDVRRLDGTRISAGISYKKLRLLEPRTTYLTEFRKEAALPPLHKCRGFRAEFL

SEQ ID NO: 7604 - protein, 442 aa, unidentified; identical to SEQ ID NO: 3037
  REGION 1..442: note = Human gut metagenome

SEQ ID NO: 7605 - protein, 418 aa, unidentified
  REGION 1..418: note = metagenome
MVYVLSQNGQPLMPTVNHAKVRVLLNQRKAKVIKRCPFTIQLQYESTTHTQKINLGIDAGSKTIGVSATTETKVLYESEVALRNDIVELISGRRALRSSRRNRKTRYRKPRFDNRKRPDGWLAPSVRQKIETHITVVENVMKILPVTKIIVETASFDIQKIKNPEIEGVGYQHGEQLDFWNVREYVLFRDGHTCQCCKGKSKDNILNVHHIESRKTGGNAPNNLITLCETCHQAYHKGIITLPKEIHRGMRFRDASFMGIMRWAFYDRLKELYTPLDVEVVNTYGYITKNTRIEHGLPKVHYVDARCISDNPASKPMDHYYFQKKVRCHNRQIHKNTILKGGIRKRNQAAYLVNGFRLFDKVKYQNQEYFIFGRRSSGFFDIRTLDGTKVNKGSISCKKFQLVEKSKHYLTEQRKVTA

SEQ ID NO: 7606 - protein, 423 aa, unidentified; identical to SEQ ID NO: 3951
  REGION 1..423: note = Human gut metagenome

SEQ ID NO: 7607 - protein, 431 aa, Moorena sp.; identical to SEQ ID NO: 2831

SEQ ID NO: 7608 - protein, 470 aa, unidentified; identical to SEQ ID NO: 2925
  REGION 1..470: note = Human gut metagenome

SEQ ID NO: 7609 - protein, 472 aa, unidentified
  REGION 1..472: note = Human gut metagenome
VVDNRLLSIKPLINIGEGVIYSSICTGLSLQTYQKRKEVPCMVYVLDINGQPLMPTTRHGKVRRLLNSHLAKVVKRCPFTIQLLYQSTKEIQPVSLGVDAGSKHIGMAATTEKKVVYQEELSPRNDVVKLLSLRRASRSSRRSRKTRYRKPKFNNRVHSKHKGWLAPSVEVKIQEHITAIKRICQILPISEIQVETAEFDFQRLKAMKEWKPLPVGTDYQLGEQYDLYNTRQYVLHRDGYTCQCCGTHDNNIKLHVHHIESRQTGGDAPSNLITLCEHCHKALHKGKLELPKGKKRGKTYRDATFMGIMRKTLLERLRKEVDVPVSGTYGYITKYLREKTDLEKSHINDAICISKYPYAKPLDTYYLTKVVRNHNRQIHKSNFSKGGIRKRNQAPYLIKGFRLFDKVLYQGKEYFIFGRRATGYFDIRTLDGTKVNKGSISYKKLRIQDTAKAYLKEARAIPHMNKFTCVLA

SEQ ID NO: 7610 - protein, 512 aa, unidentified
  REGION 1..512: note = Human gut metagenome
MSTVYVLNKDGKPLMPTTRGGHVRHLLKEQKARVVRTNPFTIQLLYETDNLVQPLYLGIDPGRTNIGVAVIKTDGTAVFTAHLETRNKEIPKLMQGRKKARRARRTNGRRCRRQRRAKANGTISKKCVKQATAQNGSVSKRANEIGVIKRHLPGCEKEVLCIGIKNKEAKFSNRTRPEGWLTPTANQLLQTHINLVKKIQKFLPISDVVLEINKFAFMRLDNPNVQKWQYQQGPLYQKASLEEAVSEMQEHHCLFCKNTIDHYHHVVPQHKNGSNTIGNIVGLCVKHHDLVHKDTSWQEKLAKKKTGLNKRYGALSVLNQIIPALTKELSSLFPKHFFATNGKSTYDYRAAHGVSKDHWLDAYCIAGSVLPNDACDNNINNRVPYELKQFRRHNRRALHKENMSRVYTLNGKKVATNRHKAVEQATDSLEEFCQNHPDDVCKLKVKEHHPEYRNPKRNFPGCVFLVGKHTHVMQGTSGSHNGKADGYYDTNGNSYSSGKCKFVVKNEGIVFS

SEQ ID NO: 7611 - protein, 431 aa, Escherichia sp.; identical to SEQ ID NO: 3801

SEQ ID NO: 7612 - protein, 420 aa, unidentified
  REGION 1..420: note = Human gut metagenome
LMQDRKKARRARRTNGRRCRRQRRAKANGTISKKCVKQTTAQNGSVSKRAKDIGVIKRRLPGCEKDVLCIGIKNKETKFTNRTRPEGWLTPTANQLLQTHINLVKKIQKFLPISDVVLEVNKFAFMRLDNPNIQKWQYQQGPLYKKESLESAVSEIQEHHCLFCKKPIDHYHHVVPQHKNGSNTIGNIVGLCAKHHDLVHKDSAWEKKLAKKSTGLYKKYGALGVLNQIIPTLTNELSSLFPKHSFVTNGKSTYDYRAAHGVSKDHWLDAYCIACSVLPSNVCDSNINNHMPYELKQFRRHDRRVLNNENMNRVYTLNNKAVAINRHKAKDQKTVSLEEFRKEHPDDVCKLKVKEHHPTYRNMNRNFPGSVFLVGKQIHVMQGIASSKDGKATKYNDTSATAIAAGKCKFVAKNTGILFV

SEQ ID NO: 7613 - protein, 441 aa, unidentified
  REGION 1..441: note = Human gut metagenome
MSTTVFVLDKKHRPLMPCRPARARRLLRAGRARVVKRFPFVIRLVDRTVEQSEVQPVLIKLDPGSRETGAAVVRDDEKKRHHALAFFVIKHRGGAIRDALKARSAFRRRRRSQNFRCRSPRFLNRVKPKGWLPPSLRHRVETTLSFVRRMCRYLPVSGIATELVKFDSQKLQNPEVSGVKYQQGTLFEYEVREYLLEKFGRKCVYCGAEGVPLNIDHVVPRAKGGSNRVSNLVLACVSCNQKKGARSLEDFLKGKPEVLARVRRELKTPLRDAAAVNATRWVLFNELKATGLPVETGSGALTKLNRHAFGVEKEHWLDALCVGRLNGVVTRKGLNVLEIRCMGRGSRQRTRLTKYGFPRGYLMRQKCVHGFATGDMVEANVPKGKKAGLWRGRVAVRVSGSFNIQTPKGVIQGVGWKHCRLISHNDGYGYAWLGHAPHSSP

SEQ ID NO: 7614 - protein, 422 aa, unidentified; identical to SEQ ID NO: 5333
  REGION 1..422: note = Human gut metagenome

SEQ ID NO: 7615 - protein, 419 aa, Geobacillus sp.; identical to SEQ ID NO: 2839

SEQ ID NO: 7616 - protein, 468 aa, unidentified
  REGION 1..468: note = Ga0373625_0009821
MHSPVPGSVVQGNEVLKGRNQCSEHDKLHSHRRGEPYPQWETGGVCPTNQEERLNKVFVVDQNKKPQDPIRPADARGLLDRKEAAVWRMRPFTIILKVAVEEEPKPLRVKIDPGSRKTGIVLVDEESKKVVWAAEIEHRGVAIKKRMDARRALRHSRRNRKTRHREPRFLNRRRPDGWLPPSLLSRVQNIETWVCRLSRLSPVRFISMELVKFDTQMMENPEISGVEYQQGELRGYEVREYLLEKWGRNCVYCGVMGVPLQVEHINPKSRGGTNRVSNLTISCHGCNTEKGTMTAEEFGHPKIQEQARRPLRDVAAVNITRKEIGERLRDTGLPVEEGTGGRTKFNRIGRGFPKAHWIDAACVGESGENVHLDPDQSVLKIKAMGRGSRQSCRMDRFGFPRTGPKGKRVVHGFRTGDLVRAVVLKGKFIGTHLGRVAIRATGSFTIDGVTTTSWKNCQIAQRADGYSY

SEQ ID NO: 7617 - protein, 419 aa, Aneurinibacillus sp.; identical to SEQ ID NO: 4563

SEQ ID NO: 7618 - protein, 512 aa, unidentified
  REGION 1..512: note = Human gut metagenome
MSTVYVLNKDGKPLMPTTRGGHVRYLLKEKKARVVTSKPFTIQLLYETDDVVQPLYLGIDPGRTNIGVAVVKTDGTAVFTAHLETRNKEIPKLMQGRKKARRARRTNGRRCRRQRRAKANGTISKKCVKQTTAQNGSVSKRAKKIGVIKRHLPGCEKKVLCIGIKNKEAKFSNRTRPAGWLTPTANQLLQTHINLIKKIRKFLPVNDVVLEINKFAFMQLDNPNIQKWQYQQGPLYQKASLEEAVSEMQEHHCLFCKKSIVHYHHVVPQSENGSDTIGNIVGLCTKHHDLVHKDTAWQKKLAKKKTGLNKKYGALSILNQIIPALTKELSSLFPKHFFATNGKSTHDYRAAHDVSKDHWLDAYCIACSILPNDTCDKNINGRVPYKLKQFRRHDRRALHKENMSRVYTLDGKKVATNRHKAIKQTTDSLEEFRQRQPNDVCKLKVKEHHPEYRNPERNFPGCVFLVGKHTHVVQGTSGSHNSKADGYYDTNGNSYSSGKCKFVAKNKGIVFA

SEQ ID NO: 7619 - protein, 512 aa, unidentified
  REGION 1..512: note = Human gut metagenome
MSTIYVLNKDGKPLMPTTRGGHVRHLLKEQKARVVMTKPFTIQLLYETDDVVQPLYLGIDPGRTNIGVAVVKADGTAVFTAHLETRNKEIPKLMKKRKDSRRARRTNGRRCRRQRRAKENDTLSTKRVKQTTAQNGSASKRAKEIGVIRRRLPGCEKDVLCIGIKNKEAKFNNRTRPEGWLTPTANQLLQTHINLVKKIQKFLPISDVVLETNKFAFMQLDNPNIQKWQYQQGPLYKKESLESAVSEMQEHHCLFCKKQIDHFHHVVPQHKNGSNTIGNIVGLCAKHHDLVHKETAWQEKLAKKKTGLNKKYGALGVLNQIIPALTKELGVLFPKHFFVTTGKSTYDYRAAHGVCKDHWLDACCIACSVLPNDVCDSSINNRVPYELKQFRRHDRRVLHKENMNRVYTLNSKKAATNRHKATEQESASLEEFRKEHPDDVCKLKVKEHHPTYRNMNRNYPGSVFFVDKQVHVMQGIARSKDGKATTYKDTNANLITAEGCKFVAKNSGILFV

SEQ ID NO: 7620 - protein, 462 aa, unidentified
  REGION 1..462: note = Human gut metagenome
MSVLVIGSNGRALMPTNPRKACLLLKKKTASVVCRHPFTIQLLYKTGCATQEGSIGIDTGSQHIGVGVTCGDRVILKEEHELRSSMEKRSLLVARAAMRRGRRYRKVRYRKPKWRHHTKRMYFEKPNRRGQHWRKVKTTTQSPRPKGWLPPSLQSKCDHHFRIIDRYLKYLPDSITRNLVIEVGRFDMARMNDPMIHGEMYQRGPMYDAENLKAYIFARDGYQCACCKAKAGTTRKTDGTTVKLVAHHILFRSRGATDNPRYIISVCDHCHTTKAHQPGGVLYSWMENNKKVTRGLRDAAFMNILRQRLFARYPQAAFTYGNITAADRKQLRLPKSHANDAVAISLLGKEASTVKNICQTMHYKQIRKSKRSLHEAIPRKGRKNPNTKAVRNKKNTTQVNGFKLWDSVLANGKKLFICSFTGTSAYLIDKNGCYISQPGKTYKQWPLSKLKRLHPNGNWLMA

SEQ ID NO: 7621 - protein, 426 aa, unidentified
  REGION 1..426: note = Human gut metagenome
LAKDHYRSIDREETNLRVYVLNKRGEPLMPCSAAKARILLKEKKAVVKRRTPFTIQLTIATGETTQPVTLGVDAGYKHIGLSASTEKAELYASEIELRQDVSELLAARRALRGARRSRKTRHRAPQFDNRKREKGWLAPSVENRIGAHVSRVEAVLRILPVTKIVVETASFDVQRLKNPDVQGVEYQQGEQLGFWNVREYVLFRDGHECQHCHGKSKDKVLNVHHIESRRTGGDAPNNLITLCETCHKAFHRGEIELKVKRGRSFQAETFMGVMRWTFFERLQASHPEIEVRNTYGYLTKDTRIANKIEKSHCADAFCIAGNLKAKRLGYYFFQKQTRRHNRQIHKLTILKGGVRKRHQTPYEIKGFRLYDKVLYRGKVAFIFGRRSSGYFDIRTLDGERISASVSYKKLRLLEKRRTFLIELRRN

SEQ ID NO: 7622 - protein, 512 aa, unidentified
  REGION 1..512: note = Human gut metagenome
MPTVYVLNKDGKPLMPTTRGGHVRHLLKEQKARVVRTNPFTIQLLYETDNLVQPLYLGIDPGRTNIGVAVVKTDGTAVFTAHLETRNKEIPKLMQGRKKARRARRTNGRRCRRQRRAKANGTISKKCVKQATAQNGSVSKRANEIGVIKRHLPGCEKEVLCIGIKNKEAKFSNRTRPEGWLTPTANQLLQTHINLVKKIQKFLPISDVVLEINKFAFMRLDNPNVQKWQYQQGPLYQKASLEEAVSEMQEHHCLFCKNTIDHYHHVVPQHKNGSNTIGNIVGLCAKHHDLVHKDTSWQEKLAKKKTGLNKRYGALSVLNQIIPALTKELSSLFPKHFFATNGKSTYDYRAAHGVSKDHWLDAYCIAGSVLPNDACDNNINNRVPYELKQFRRHDRRALHKENMSRVYTLNGKKVATNRHKAVEQATDSLEEFCQNHPDDVCKLKVKEHHPEYRNPKRNFPGCVFLVGKHTHVMQGTSGSHNGKADGYYDTNGNSYSSGKCKFVVKNEGIVFT

SEQ ID NO: 7623 - protein, 460 aa, unidentified
  REGION 1..460: note = Methanosarcinaceae archaeon
VAKWTNSIQEDKTLKVFVINNNGNPLMPTTPRKARILLKSGKAEVVQRIPFSIRLLYPTGNATQPITLGMDTGYSNVGFSAVTEKEELIAGEVQLLTGMVERNQERTMYRRTRRNRLRHRKPGFDQNTNKEGWFAPSIRHKLDSHVRFVAKLYELLPITKIVVEIGKFDIQKIKNPDIKGKQYQEGEKKGYENLRAYILHRDGYKCQNPDCPVTTGKYRRLDIHHIVYRSNGGSDRPNNLITLCSRCHTPKNHKGFLLAWRPKTRGFKDATFMNTVKLKVFDILKQTYENVEATYGYLTKMRRLELGLEKSHANDAFCTVNGDKQIRHQPFIIRQVRRNNRSLSKFYDAKYIDSRDGSTKSGQDMNSGRTCRNKNLNTENLRQYRQQRIKKGRYSIRKKRYPLQPMDLVEVEGKLYYSAGMHNKGKSVTFKGLKKSLTPKKVKLIKYGKGFCWLDPKVVC

SEQ ID NO: 7624 - protein, 405 aa, unidentified
  REGION 1..405: note = Human gut metagenome
MSTCACVFSKSGKRLMPTIRLGKVRHLLKDGKAKIIKHHPFTIQLLYDSETNIQPIEICEDVGYNYIGISVKSQSHEYVSVQYDTLQDEKDCHDSCRKMRRIRRNRLRYRKPRFDNRKRDKGWLAPSLEHKKELNVNVIKMYCKVVPITHVTVEVGSFDTMLVKAIQEGKAIPEGADYQKGPRYNLATLREAVFYRDKYTCQVCGRKANEGAILHVHHMFYWKGRHGNSLSELLTVCEKCHTPANHQQGGKLYRFGENIKFANLSGAAFMNTVRWQIVNELYTAFGKLFVTFTYGAMTKEKRIAFHLEKCHNNDAYAMGNFHPVDRCAFEHYKKVKRNNRILEKFHDSQYIDIRTGKVANGRSLFNGRINRSHKKNSENLHKYRGKRTRKGYRALRRKKVAPQSR

SEQ ID NO: 7625 - protein, 445 aa, Petrotoga sp.
VLVFVFNKHGEPLMPCKPSKARKLLKGKKAKIISYEPFTIQLLYGSSGYKQGVSIGIDIGSKHIGVAITSENKVLVKGEIELRQDVSSLLTTRKTYRRSRRFRKTRYRKSKFLNRKRKEGWLPPSIESRISNTFKWIDKFASLVPNPKLNIEVGKFDSHKFVNPEVSGKDYQKGQMHGYDDIRYFVFERDNYTCEVCKKKGVILQTHHIKYKSKGGTDNPNNLITVCADCHTPENHKPGGIFWEWMTKSKKPKAYKEHPFMNIIRKRIYQRYPSANIVYGFWTTPRRKELGLSKTHYNDAIAISGIDFIKKNVDSVFEIRQVRKKKRSLHEATARKGRKEPNRDQIRNSKNTKFYKSFYLNDLVKVFSRKGWITGFTNGGAYIKDIFDNYITMPNKSYKQVSLKNIQFISHNNNWQFVPHMKEGDLLLNGKENQLSSLIKQPHGR

SEQ ID NO: 7626 - protein, 446 aa, unidentified
  REGION 1..446: note = Human gut metagenome
MSVFVVGLNGCRLMPTSERKARLLLKQGKAFVEQKVPFTIRLNYKTGSTTQLGYLGIDTGSQHIGVSVVREDGTVLHKEEIGLRDSMSKRKLLEAKASLRRGRRYRKTRYRHPKWRPKTKRVYCEVPDRKGRHWQKKKITFTSKRPKGWLPPSLQSKTDHHIRWIKKLQDLLPEGYRLSIELGRFDPARMKNPEIHGDLYQKGPQYDYENVRAYVLDRDRYTCQICKKKGGKLHVHHILYRSHGATDDPQYMVTVCSDCHSAQNHLPGGILYQWMQEQKRFSRGLRDATFMNILRKRLIRAFPEAVFTYGNVTKVDREKLKLPKSHGNDATAIALVKTGITAVKDKESVICIQQVRRKKRSLHEETPRKGRKEPNRTAARNNKNTKAVTVTKRQNKKKVSMTGCLFDRVELNGKKGWISGFTGKSCYVKDADDQYLSTSPKYKRGH

SEQ ID NO: 7627 - protein, 404 aa, unidentified
  REGION 1..404: note = Human gut metagenome
LLKEKKAIVVRRTPFTIQLTIATGETKQPVSLGVDAGYKHVGLSASTENAELYASEVELRQDVSDLLSARRTLRQSRRNRNTRYRAPRFDNRIRTKRKGWLAPSVENRINAHLSRVETVIRLLPVTKITVETTSFDMQLLKNSDIAGKEYQEGEQLGFWNVREYVLFRDGHVCQHCHGRSKDPVLNVHHLESRRTGGDSPGNLITLCETCHKALHRGEITLKAKRGQSFRAETFMGIMRWEVLDRLKASHSKLEVQNTYGYRTKHARISNGIAKSHCADAFCIAGNLGAERLGEFFFQKQTRRNNRQIHKLSILKGGIRKRNQAPYEIKGFRLFDKVACQGEEGFIFGRRSSGYFDVRKLNGTHISAGISCKKLRLLEKRQTYLTEIRKEKALPPLPEGRGLRA

SEQ ID NO: 7628 - protein, 437 aa, unidentified
  REGION 1..437: note = Human metagenome
MSFSKVKNERIYMVFVLNKSKKPLDMISHAKARILLKNRLAVVHKIYPFTIRLKDNSCVGKDKAYTVKIDPGSRTTGVAVVDDKDSVVMLAEIEHRGHIIKKDLDKRRSLRQVRRQRKTRYRPARFLNRTKPKGWLTPSVKSRADNVINFIKKYKKLINIDKVMIESVSFDTAQMTSDDCLIGTGYQQGPLYNTNLRKFIFSKTNGRCSYCGAKATEIDHIVPRAKGGSNSTYNLTPACSSCNKKKSNLSLKEFGKSVGKDFSYLEPKKLPKDAAIVQSARNYTVKEITKLVSDTTTHPSWLTKYNRDELGLPKEHYYDALSVGEIPNNFNFLTDKILIISAKGRGSRQMCRMDSYGFPQTSAKASKTVKGFQSGDMVKAIVPKGSKQGIYLGRVAIRHKGSFNIRTKSGLVKDISYKYCHIIQRGDGYLYSYKERN

SEQ ID NO: 7629 - protein, 418 aa, unidentified
  REGION 1..418: note = Human gut metagenome
MPCSPAKARLLLKEKKAIVKRRTPFTIQLTIATGETKQPVSLGVDAGYKHVGLSASTEKAELYASEVELRQDITDLLSARRALRQSRRNRKTRYRAPRFDNRIRTKRKGWLAPSVENRINAHLSRIEAVLRLLPVTKITVETASFDLQLLKNPDISGKEYQEGEQLGFWNIREYVLCRDGHVCQHCYGRSKDPVLNVHHLESRRTGGDSPGNLITLCETCHKALHRGEITLKAKRGQSFRAEAFMGIMRWEVHSRLRALHPGIEVSNTYGYRTKHARIANGIAKSHCADAFCIAGNLGAERLCEFFFQKQTRRNNRQIHKLSILKGGIRKRNQAPFEVKGFRLFDKVACQGEEGFIFGRRSSGFFDVRKLDGTRISAGISCKKLHLLEKRRTYLTEIRKEEALPPLPEGRGSAPKCDE

SEQ ID NO: 7630 - protein, 252 aa, unidentified
  REGION 1..252: note = Human gut metagenome
MVYVQDINGKPLMPTTRHGKVRRLLKDKKAVVVNLCPFTIKLMYVTSDYKQEIVLGVDAGTKHVGLSATTKSKELYSSEVILRNDIVDLLSTRRELRRARRNRLRYRKPRFNNRIKSKRPGWIAPSVKYKIDAHIRVVENVCSILPISRIVIEVAQFDTQKIKNPNISGKEYQEGDQLGFWNTREYVLARDGHKCQYCKGKSKDKILNVHHIESRKTGGDSPSNLITLCETCHKEYHKGNIDLKIRRGKSLP

SEQ ID NO: 7631 - protein, 442 aa, unidentified; identical to SEQ ID NO: 2903
  REGION 1..442: note = Human gut metagenome

SEQ ID NO: 7632 - protein, 518 aa, unidentified
  REGION 1..518: note = Human gut metagenome
LANLKLIDELLEKTEYIYVLGIDGKPQMPTNRKVRVRSLFKSGLAKIVDTVPFTIRLLYENDAVLQPITIAEDPGRTNIGAAVLTQLGNLVFSAVVETRNKSIKKLMSDRKAYRQASRRGERKARQRLAKRHGSMIKAGMIMRKLPQYAADKFVTCKIIKNTEARFCNRKRMPDWLTPTVNHLVQTHINLIKKVEKYLPITDVAIEVNRFAFMQMENPDASGVDFQNGPLKGFDDVKAAICEQQHGKCLMCKNDIEHFHHIVPRSKGGSDTIQNQAGLCKKCHTKVHTDAEFQAKFKDKKEGLIKKYGALSALNQSIPFICKELLEIYSVEHVHFCTGKDTSLIRSSLGYEKTKDNQMHEVDAYCIGLAAIGADKAKRPDFNNVFKIKQFRRQDRQLVHYQKERTYYLDGKKIATNRNPRFEQKGDALSDWYKEQIKIYGQYEAEKMRSRLTVKKSKRSYNTTKRLMPGCVFYYDGQRHVMTGQSSYGRYLRAYNCRTKDFPASKCQVIQFNAGLVFV

SEQ ID NO: 7633 - protein, 426 aa, unidentified; identical to SEQ ID NO: 3604
  REGION 1..426: note = Cyanobacteria bacterium UBA1136

SEQ ID NO: 7634 - protein, 411 aa, unidentified
  REGION 1..411: note = Ga0307928_10050093
MQRVYTQNKDGEPLMPCKPAKARHLLRDGKAVVVKLTPFTIRLKWDCETNTQKVIVGVDTGAVNVGCSAVSGNKVLYASETKLRTDIHKKMQRRAMYRRTRRTKLRYRQPRFNNRTRPKGWLPPTLKSKAESTIKIVKQLSKILPITKVRVEIAKFDTQKLQNPNIKGKEYQKGVTEGYDNLRAYVFERDNYTCQICKKKLGILQTHHIIERKDGGSDRPDNMVTVHKKCHENFHKGLIQHKFRKPKEYKIETQVTILKDYIIKGLKKDFEVETTFGHITKRIRLGLNLPKTHCFDAVAICNPKKVERTENIFKRICIPRGRYQLTKGKRSEKRLPSGKVFGFNQWDKVLFNNQTGFVKGRRTSGFFDVCDIDGKSISHSVKYAKLQKLYSKNIMEVKAVPPTTKVMGIPA

SEQ ID NO: 7635 - protein, 424 aa, unidentified
  REGION 1..424: note = Human gut metagenome
MRVFVLNMRGEPLMPCTQRKARLLLKEGKAIIYKHNPFTIQLTYATGETKQDCHIGVDTGSKHIGLAVTSKDKVLFKGEVELRQDVKSNLDTRRRYRRNRRNRKTRYRKCRFLNRRRSDKWLPPSLQNRIEHTFRWINELTQIVPNPVLHIEVGKFDTAKMINPQLNGVDYQHGQTYGFFDERYFVFARDEYTCQCCGKSKDKILQTHHIIYRSNGGTNRVDNLITVCTDCHTSVNHKKGGILYKWQEEHKKVKQYKEPPFMNTLRKRIFSSYPDAVITYGSETTPKRKNAGLDKTHYNDAIIISGVTDVIDNSSEWLLIRQFRKKKRSLHEGVARKGRKEPNRLQKRNSKNTPESGGFYLNDKVDVFGQTGYITGFTSGGAYIKDSKGTYITLLNKTYKQVGISNLKLKYHNNNWQYLVKYAV

SEQ ID NO: 7636 - protein, 512 aa, unidentified
  REGION 1..512: note = Human gut metagenome
MSTVYVLNKNGKPLMPTTRCGHVRRLLKEQKARAVASKPFTIQLLYETDDVVQPLYLGIDPGRTNIGVAVVKTDGTAVFTAHLETRNKEIPKLMKKRKDSRRARRTNGRRCRRQRRAKANGTLSKKCVKQTTAQNGSVSKRAKKIGVIKRHLPGCEKEALCIGIKNKEAKFNNRTRPEGWLTPTANQLLQTHINLVKKIQKFLPISDVVLEVNKFAFMRLDNPNIQKWQYQQGPLYQKASLEEAVSEMQEHHCLFCKNTIDHYHHVVPQHKNGSNTIDNIVGLCTKHHDLVHKETAWQEKLAKKKTGLNKKYGALSVLNQIILALTKGLSFLFPKHFFVTTGKNTYDYRTAHSVSKDHWLDAYCIACSVLPNDVCDSSINSHVPYELKQFRRHDRRALHKENMSRVYTLNGKKVATNRHKAIEQTTDSLEEFRQRQPNDVYKLKVKEHHPEYRNPKRNFPGCVFLVGKHTHVMQGTSGSHNGKADGYYDTNGNSYSSGKCKFVVKNKGIVFA

SEQ ID NO: 7637 - protein, 421 aa, unidentified
  REGION 1..421: note = Human gut metagenome
MRGQPLMPCSPAKARHLLKAGKAVVRRRTPFTIQLRIATGETKQSVTLGVDAGAKHVGLSATMEKEEVFASEVELRQDITGLLAARLSLRRERRHRKTRYRAPRFLNRVRSKHKGWLAPSVENRIQAHMSRIDAVCKLLPVTKIVIETASFDIQKIRNPTVEGTDYQQGDLLGFWNVREYVLFRDGHVCQHCHGHSRDKILNVHHLESRQTGGDAPNNLITLCETCHKAYHAGKIKLKVKRAQSFRAEAFMGIMRWTLLDRVRKAHPGLPVENTYGYLTKNTRITLGLPKTHCVDAYCIAGNLKAVRRGVYLYQRQVRKHNRQIHKCTVLSKTLKDGTKIGYRKLNQTPHLVKNFRLFDKVRCLGQTGFIFGRRSSGYFDVRRLDGVKLSSGISYRKLTLLEKRSTYLTELRNEDGASFPV

SEQ ID NO: 7638 - protein, 532 aa, unidentified
  REGION 1..532: note = Human gut metagenome
MSTVYVLNKDGKPLMPTTRGGHVRHLLKEQKARVVQSNPFTIQLLYKTNDAVQPLYLGIDPGRTNIGVAVVKADGTAVFTAHLKSRNKEIPKLMQDRKRARRARRTNGRRHRRQRRAKANGTISKKCVKQTTTQNGSVSKRAKEIGIIKRHLPGCEKDVLCVGIKNKEAKYTNRARLEGWLTPTANQLLQTHINLVKKIQKFLPISDAVLEVNKFAFMRLDNPDIQKWQYQQGPLYKKESLESAVSEMQEHHCLFCKKPIDHYHHVVPKSENGSNTIANIVGLCAEHHNLVHKDVAWQEKLAEEKTGLNKKYGALSVLNQIIPALTNKLSVLFPKHFFVTAGKSTHDYRAAHGVSKDHWLDAYCIACSVLPSNVCDSNINNHVPYELKQFRRHDRRVLHKANMSRVYTLNGKAVATNRHKAIKQTTDSLEEFRQNYPDDVYKLKVKEHHPAYRNLNRNYPGSVFLVGKQAHVMQGIASSKDGKTTKYNDTNATTITAGKCKFVAKNSGILFVQCKFRKALSDGTTKKLQYPV

SEQ ID NO: 7639 - protein, 414 aa, unidentified
  REGION 1..414: note = Mouse gut metagenome
MPCSPAKARLLLKEKKAIVKRRTPFTIQLTIATGETKQPVSLGVDAGYKHVGLSASTEKAELYASEVELRQDITDLLSARRALRQSRRNRKTRYRAPRFDNRISTKRKGWLAPSVENRINAHLSRIEAVLRLLPVTKITVETASFDMQLLKDPDISGKEYQEGEQLGFWNVREYVLFRDGHVCQHCHGRSKDPVLNVHHLESRRTGGDSPGNLITLCETCHKALHRGEITLKAKRGQSFRAETFMGIMRREVLDRLKASHPKLEVQNTYGYRTKHARISNGIAKSHCADAFCIAGNLGAERLCEFFFQKQTRRNNRQIHKLSILKGGIRKRNQAPFEIKGFRLFDKVACKGEEGFIFGRRSSGSFDVRKLDGTRISAGISCKKLHLLEKRRTYLTEIRKEEALPPLPEGRDLRA

SEQ ID NO: 7640 - protein, 470 aa, unidentified
  REGION 1..470: note = Human gut metagenome
MSVFVVGLNGCRLMPTSERKARLLLKQGKAFVEQKVPFTIRLNYKTGSTTQLGYLGIDTGSQHIGVSVVREDGTVLHKEEIGLRDSMSKRKLLEAKASLRRGRRYRKTRYRHPKWRPKTKRVYCEVPDRKGRHWQKKKITFTSKRPKGWLPPSLQSKTDHHIRWIKKLQDLLPEGYRLSIELGRFDPARMKNPEIHGDLYQKGPQYDYENVRAYVLDRDRYTCQICKKKGGKLHVHHILYRSHGATDDPQYMVTVCSDCHSAQNHLPGGILYQWMQEQKRFSRGLRDATFMNILRKCLIRAFPEAVFTYGNVTKVDREKLKLPKSHGNDATAIALVKTGITAVKDKESVICIQQVRRKKRSLHEETPRKGRKEPNRTAARNNKNTKAVTVTKRQNKKKVSMTGCLFDRVELNGKKGWISGFTGKSCYVKDADDQYLSTSPKYKQVSLSKLRILHHCGNWIIGAKKTLGKG

SEQ ID NO: 7641 - protein, 420 aa, unidentified; identical to SEQ ID NO: 6806
  REGION 1..420: note = Human gut metagenome

SEQ ID NO: 7642 - protein, 512 aa, unidentified
  REGION 1..512: note = Human gut metagenome
MSTVYVLNKDGKPLMPTTRGGHVRHLLKEQKARVVRTNPFTIQLLYETDNLVQPLYLGIDPGRTNIGVAVVKTDGTAVFTAHLETRNKEIPKLMQGRKKARRARRTNGRRCRRQRRAKANGTISKKCVKQATAQNGSVSKRANEIGVIKRHLPGCEKEVLCIGIKNKEAKFSNRTRPEGWLTPTANQLLQTHINLVKKIQKFLPISDVVLEINKFAFMRLDNPNVQKWQYQQGPLYQKASLEEAVSEMQEHHCLFCKKPIDHYHHVVPQHKNGSNTIGNIVGLCAKHHDLVHKDTTWQKKLAKKKTGLNKRYGALSVLNQIIPALTKELSSLFSKHFFATNGKSTYDYRAAHGVSKDHWLDAYCIASSVLPNDACDNNINNHVPYELKQFRRHDRRALHKENMGRVYTLNGKSVATNRHKAIKQTTDSLEEFRQRQPNDVCKLKVKEHHPEYRNPKRNFPGCVFLVGKHTHVIQGTSGSHNGKADGYYDTNGNSYSSGKCKFVAKNEGIVFT

SEQ ID NO: 7643 - protein, 456 aa, unidentified
  REGION 1..456: note = Human gut metagenome
MSTCVCVLSNSGERLMPTIRLGKVRRLLKDGKAKIVKHHPFTIQLLYDSKTNTQPIEICEDVGYNYIGISVKSESHEYVSAQYDTLQDEKKHHDDCRKYRRTRRNRLRYRKPRFDNRKRSEGWLAPSLEHKKQLNIRLIERYVSVIPITHATVEVGSFDTMLLQAIQKGKSKPEGVDYQKGPRYNLATLREAVFYRDNYVCKVCGRKATEGAILHVHHMFYWKGRHGNSLSELITVCEKCHTPANHQKGGKLFGFGEDKEFANLSGAAFMNAVRWQIVNALYATYGKEFVTITYGAMTKEKRIILGIEKTHNNDAYAMGDYHPAHRCVFRHYQKRRRNNRVLEKFYDATYIDARTGNKAKGKELFNGRINRNHKKDSENFHKYRSKKVSKGRRSIRRQRYAIQPYDTVHLEGKTYITSGCHNKGTRLLIPVNGKSKSVAISKVQVVCHAGAWIQII

SEQ ID NO: 7644 - protein, 414 aa, unidentified
  REGION 1..414: note = metagenome
MPCSPAKARLLLKEKKAIVKRRTPFTIQLTIATGETKQPVSLGVDTGYKHVGLSASTEKAELYASEVELRQDITDLLSARRALRQSRRNCKTRYRAPRFDNRIRTKRKGWLAPSVENRINAHLSRIEAVLRLLPVTKITVETASFDLQLLKNPDISGKEYQEGEQLGFWNIREYVLCRDGHVCQHCYGRSKDPVLNVHHLESRGTGGDSPGNLITLCETCHKALHRGEITLKAKRGQSFRAEAFMGIMRSEVLNRLKASHPELEVNNTYGYRTKHARIANDIAKSHCADAFCIAGNLGAERLGEFFFQKQTRRNNRQIHKLSILKGGIRKRNQAPFEVNGFRLFDKVACKGEEGFIFGRRSSGFFDVRKLDGTRISAGISYKKLHLLEKRRTYLTEIRKEEVLPPLPEGRGLRA

SEQ ID NO: 7645 - protein, 560 aa, Streptomyces sp.
MTTFPAGEQTHQAVLPQQPALESVGADTPGSRDETAHGHPAPARGTVREHGRGETGGQSTRTRRRHARSATPVARAAENGSGDAPPDHGPAYRGGVGVSRVFVLSKEGRPLMPCHPARARELLGRRRAVVARHVPFTIRLRDRMLPESEVDGVQLRIDPGSRGTGLVLTDEKPQTGERSTVTVRRGLVAVELRHRAGRIRHRMRQRAGYRRRRRSANRRYRAPRPDNRTHPARWLPPSLRHRVDTTFSQANRLCRWAPVAEIHVEVTAFDVRALSAGRPLSGVEYAQGPLAGTTGRAYLRAKWGNACAYCEATGVPLNIDHLHPRSRGGSHRVSNLVLACVPCNQAKGNASAETFLAHRPDRLATILRQVSPSLQDAASMNTILRQLVDALGGLGRPVHSWPGAMTKENRSTAGLAKTHTLDALCVGRLDHEAGDAIVRYPGQVLVAQAAGRGSYARTTPDRHGFPRLPRARAKRHFGYATGDLVRAVIPSGKWAGTWTGHVSVRARGQHSLTTPEGRINVSHRNLQLRQRGDGYDYTTRPEPLPSNCSEKPLERWPTRS

SEQ ID NO: 7646 - protein, 423 aa, Arthrospira sp.
MSNHIFVLDTNRKPLTPCKPGVARSLLKAGKASVFRRYPFTIILNKEVDANPEPLELKLDPGSKVTGIALKQGNHIIFAAELQHRGQQIKEALLSRRQLRRSRRNRKTRYRPARFLNRTRSKGWLAPSLQHRVDTLMTWVHRFRRLAPVGRITQELVRFDLQLMENPEISGVEYQQGELQGYEIREYLLEKWGRTCAYCGAQNVLLEVEHIQPRSKGGSDRVSNLTMACHSCNQAKGNGDIRDFFSGQPDVLSRLLRQAKSPLKDAAAVNSTRWALFKALKATGLPVTTGTGGQTKFNRLRLNLPKAHWLDAACVGPVESLEVLTSKPLLILAKGHGTRQMCGTNKYGFPNRHRSRRQIHKGFQTGDMVTATVTAGKKIGSYLGRVLCRASGSFDITTASVRVAGISHKYCQPIHRKDGYAYA

SEQ ID NO: 7647 - protein, 458 aa, Lactobacillus sp.
LKGAGMMSEKKKVDYIYVVDSNDTPLMPTSRLGMVRRWLKTGQARWYGNSRKTIQFVRPVTTNTQKLTLGVDAGFHLGLSVVGNQREYYAAESLRKSEKDRITSRRELRRTRRGRLRHRKARFNNRRRKDGWLVPSIQHRLDFTIKEIKRLYTFLPITNLVVEVTPFDNQKLLNPDIKPWQYTQGKMHGFKTIKDYLLARDNYRDALDGKQYPASQLRVHHLVQRKDGGSNKPDNLVLLSDVNHNQANHNNGILAKLKENRQKTIDYRGAYFMSVLATRLSDYFEHYTTTQGYLTANLRQKYKIEKSHLNDAFVIAGGTDVTLRMNNVYSRQKLRNNNRSLQKFYDAKYVDSRDGKKKTGKELSSGRIKRSKELNYDNLRQFRKEKVKKGRVSIRRNHYQLRPHDVVLNTKTNKIERVASVQNNGKVVRFQTGKTCSIKSVVSLYHVNGILEKKMENI

SEQ ID NO: 7648 - protein, 431 aa, unidentified; identical to SEQ ID NO: 3340
  REGION 1..431: note = Human gut metagenome

SEQ ID NO: 7649 - protein, 516 aa, unidentified; identical to SEQ ID NO: 5652
  REGION 1..516: note = Human gut metagenome

SEQ ID NO: 7650 - protein, 464 aa, unidentified
  REGION 1..464: note = metagenome
MYVFVIGLDGTRLMPCKPRKARKLIEAHKAEIYKKQPFTIRLLYKTGCASQPITLGIDTGSQHIGIAVTSENKVLYQAEIELRSTMDKRSLMETRYSYRRSRRYRKTRYRSPKFRFHTKRTYSETLVKRKTTGIMTHWVKHTNSISTNRPDGWLAPSMQSKVDHHIRWINRFLDVLPPDTKLRLEIARFDMARMKNPEVHNELYQYGPQYDYENLKAYVFDRDHYKCVVCKRKLGSKQPDGHSLKGMMHHITFRSKGATDNPDQLVTVCEYCHIPQAHKEGGVLWNLKEKHKPVQRGLRDATQMNIIRTRLVKAFPDAELTYGNITAVDRKKMHLPKSHTGDAVAIAMKGKDVNICESTVYIKQIRKKKRSLHEATPRKGRKRPNTQAVRNSKNTKSIGIYHIYDTVRFQNETGFISGFTGKSAYVQDFDGNYITMPGKSYKQINLSSLELVRHNNNWIQKTGN

SEQ ID NO: 7651 - protein, 512 aa, unidentified
  REGION 1..512: note = Human gut metagenome
MSTVYVLNKDGKPLMPTTRGGHVRHLLKEQKARVVRAKPFTIQLLYETNDVVQPLYLGIDPGRTNIGVAVVKANGTAVFTAHLETRNKGVPKLMQDRKKARRARRTNGRRCRRQRRAKANGTISKKCVKQDTAQSKNPSKRAKEIGIIKRRLPGYKKDVLCIGIKNKEAKYTNRTRPEGWLTPTANQLLQTHINLVRKMQKFLPISDVVLEVNKFAFMRLDNPDIQKWQYQQGPLYQKGSLENAVSEMQEHHCLFCDKPIDHYHHVVPQSENGSNTIANIVGLCAEHHNLVHKDAAWQKKLAEEKVGLNKKYGALSVLNQIIPALTNKLSVLFPKHFFVTAGKSTHDYRAAHGVSKDHWLDAYCIACSVLPSNVCDSNINNHMPYELKQFRRHDRRVLNNENMNRVYTLDNKAVAINRHKATEQEAASLEEFRKEHPNDVCKLKVKEHHPTYRNMNRNYPGSIFLVGKHVHIMQGIAGSKDGKATTYKDSNANSITASKCKFVAKNSGILFV

SEQ ID NO: 7652 - protein, 413 aa, unidentified; identical to SEQ ID NO: 2636
  REGION 1..413: note = Human gut metagenome

SEQ ID NO: 7653 - protein, 423 aa, unidentified; identical to SEQ ID NO: 3951
  REGION 1..423: note = Human gut metagenome

SEQ ID NO: 7654 - protein, 480 aa, unidentified
  REGION 1..480: note = Human gut metagenome
MKGKNMVITLDKNKRPLGFMSERRCRILLEKKRAVLYRYFPTIVILKDVDARKLSGLSSYRIKIDPGAKYTGIAIVMDDTNEFMYAMQIEHRGEQIKKNLDTRRSARRNRRSRETGYRRPKWGNRCTAKEQLQSYDSRRDENWLPPSVKSTADNIISWIRRLCRWINITNCSIESVRFDTQLMENPEIEGVEYQQGTLYGYEVKEYLLEKYGHTCQYCGGKSNDPILEWEHMLPRSRGGSDRLKNASLACQNCNQDKDNHTLEEWQTILQDRIPKERGKQKELDQIRQKFVQQVMEGKAPVKGLRYAAWVNSSRRYSQRHLYLRFPELECSSGGRTKYNRNVLKYPKEHHYDALCVGEIPEDGFVDRTHGYYLYAKATGRGTRLRGQINQCGVIIRKWMDRSKTAFGFQTGDLVVADVPKDTKYKYKGHFSGRVMIRKSGSFDIRTLSGELVTVNAKFCRLLQNNSGYQMMIKRAIPLGN

SEQ ID NO: 7655 - protein, 442 aa, unidentified
  REGION 1..442: note = Human gut metagenome
MGEGLQPTERSRRQNLRVFVLNKRGQPLMPCSPAKARLLLKEKKAVVRHRTPFTIQLTQATGETVQPVTLGVDAGSKFIGLSASTEKAEHYASEAELRTEVVDLLSSRREMRRARRNRKTRYRAPRFDNRIHSKNKGWLTPSVENKINTHLSCVDNVRKCLPVTKIVVETAAFDIQKIKNPDIEGTDYQQGDQLGFWNVREYVLCRDGHQCCHCHGKSKDPILNVHHLESRKTGGNAPNNLITLCETCHKAYHDGKITLKQKRGQVFRDAAFMGIMRWTFFNRLKAQCPEIEVRNTYGYLTKNTRIRHGLEKSHHTDAFCIAGNLEAKRLGVYFFQKQTRKHNRQIHKMSILKGGVRKLQQAPYEVKGFRLFDKVRYDGREAFIFGRRSSGYFDIRLLTGEKVSAGVSYKKLVLLEKRKTFLTQLIKENAIPPATEVAGFLA

SEQ ID NO: 7656 - protein, 469 aa, unidentified; identical to SEQ ID NO: 6998
  REGION 1..469: note = Bioreactor metagenome

SEQ ID NO: 7657 - protein, 442 aa, unidentified; identical to SEQ ID NO: 3161
  REGION 1..442: note = metagenome

SEQ ID NO: 7658 - protein, 419 aa, unidentified; identical to SEQ ID NO: 4877
  REGION 1..419: note = Human gut metagenome

SEQ ID NO: 7659 - protein, 431 aa, Moorena sp.
MRVFVLDKNLKPLDPCRPARARLLLKQGRAKVFRRYPFTIILSDLEAENCTTHNHQIKIDPGSKTTGLAILQGNTVIWGAEITHRGFQIRDALTSRRQSRRSRRNRKTRYRKPRFLNRKRPSGWLAPSLMSRVYNILTWVKKMIRFCPIAGVSQELVRFDTQKMENPEISGTEYQQGTLYGYEIREYLLEKWNRKCAYCGATDAQLEIEHIKPKSNGGSDRVSNLAIACHDCNQAKGNQEIEQFLSGKPEVLKRVMSQAKRTLADAAAVNATRWKLYNELKFTGLPVETGSGGQTKYNRRRFNLVKTHWLDAACVGNVKSIYVENYQFLLIVAKGHGTRQICRTDKFGFPKRYCSRTKIHKGFQTGDIVKAVVTKGKKIGTYVGRVTTRKTGSFNISTANGLIQGINHKYCTPIHKKDGYAYQINALSSLS

SEQ ID NO: 7660 - protein, 465 aa, unidentified; identical to SEQ ID NO: 4016
  REGION 1..465: note = Synthetic metagenome

SEQ ID NO: 7661 - protein, 420 aa, unidentified; identical to SEQ ID NO: 2951
  REGION 1..420: note = Human gut metagenome

SEQ ID NO: 7662 - protein, 423 aa, Arthrospira sp.; identical to SEQ ID NO: 3278

SEQ ID NO: 7663 - protein, 423 aa, unidentified; identical to SEQ ID NO: 4062
  REGION 1..423: note = Human gut metagenome

SEQ ID NO: 7664 - protein, 406 aa, unidentified
  REGION 1..406: note = metagenome
MVYVQDINGKPLMPTTRHGKVRRLLKDKKAVVVNLCPFTIKLTYVTSDYKQEIVLGVDAGTKHVGLSATTKSKELYSSEVILRNDIVDLLSTRRELRRARRNRLRYRKPRFNNRIKSKRPGWTAPSVKYKIDAHIRVIDNVCSILPIFRIVIEVAQFDTQKIKNPNISGKEYQEGDQLEFWNTREYVLARDGHKCQYCKGKSKDSILNVHHIESRKTGGDSPSNLITLCEACHKEYHKGNIDLRIRRGKSLRDAAVMGIMKWRLYEELKSRYDRVFMTFGYITKHNRIKYGIEKSHTSDAFVISKNINAKRIERQYLKRLIRRHNRQIHKMKILKGGKKKNNQAPFEVFGFRLFDKVLYNNKICFVYGRRKSGSFNIRDFNGENSKDVSRKKFKLIRGKRHPIILK

SEQ ID NO: 7665 - protein, 396 aa, unidentified
  REGION 1..396: note = Human gut metagenome
MVTVQQSTHHLPFGRVFIRRNLFMVYVISQDGKPLMPCSDPIARLLLKQGKAKVKKREPFTIKLTYETTNYTQGLTLGVDTGSGTIGTAVSKDNGDIVYMSEVVVRNDITDKMTQRAKYRRNRRNRKTRYRKARWLNRASSIKKDRFSPTMQSKLHSHVREIEYIQSILPVTEMVFETGQFDMHLMKNPSLANPKVRPWGYQKGANYGFENTKAMVLNRDNYTCQCCKGKHKDSKLEVHHIVFRSQGGSDEESNLLTLCHTCHKDLHSGKINPKLSGKVKGNLKYATQMNSIRKQLFRFYPNAIETFGYVTKVNRLHLGVAKEHYYDACTIATQGNAFNVKSNLYKKKCVSDGDFQKTKGIRSEQPIVTDKICGFRKFDKVRYFGNDYFIKGRMST

SEQ ID NO: 7666 - protein, 573 aa, Streptosporangium sp.
LRYAFPRTSDSSSGYFCQKPLTGFIVTCSDGRVPNMSVQHRISRLQSVVERVRLVFNGSGETVEQTHRRVLPQPAALESVGADTPEGGHETAHGHRRQAVPGVQPGRGEIERVGTRPARRHPEGASAPEGANREVHPAVFVLDARGHPLDPCHPARARRLLAAGRAVVQRHTPFVIRLKDRSVTDSVVAGVQVGIDPGSKHTGLAVFTDRGGSRTGRYAIQLDHRGALIRDRLASRAALRRGRRGRNLRYRAPRFLNRTKPKGWLAPSLRHRVETTMSQVARLTRWAPVTAVHMEKVSFDTHALSAGKPLEGVEYQQGTLAGYEVREYLLAKWGRACAYCSASGVPLNLDHIHPRSRGGSDRISNLTLACVQCNQTKNATPVQEFLKTSPALLAKILKQAKAPLRDAAAVNATRWALWRALEATGLSVHTASGGRTKWNRSRTGAPKSHTLDALHVGELETVTTWPSTVLVAKATGRGTYARTVPDRYGFLRLVRPRTKLHHGFQTGDLVRGHVPAGKKAGVHLGRVLVRSSGSFDITTRHGRVTGINHRHVRHLQRADGYGYTTQKEADRND

SEQ ID NO: 7667 - protein, 465 aa, unidentified
  REGION 1..465: note = Human gut metagenome
MSTCACVFSKSGKRLMPTIRLGKVRHLLKDGKAKIIKHHPFTIQLLYDSETNIQPIEICEDVGYNYIGISVKSQSHEYVSVQYDTLQDEKDCHDSCRKMRRIRRNRLRYRKPRFDNRKRNKGWLAPSLEHKKELNVNVIKMYCKVVPITHVTVEVGSFDTMLVKAIQEGKAIPEGADYQKGPRYNLATLREAVFYRDKYTCQVCGRKANEGAILHVHHMFYWKGRHGNSLSELLTVCEKCHTPANHQQGGKLYRFGENIKFANLSGAAFMNTVRWQIVNELYTAFGKLFVTFTYGAMTKEKRIAFHLEKCHNNDAYAMGNFHPVDRCAFEHYKKVKRNNRILEKFHDSQYIDIRTGKVANGRSLFNGRINRSHKKNSENLHKYRGKRTRKGYRALRRKKVALNPGDLVSLNGEILVVHSTHAGKNGYVGVEFKAPSKSGKKSASLKKLKIVKTSNSMRSAWTKVS

SEQ ID NO: 7668 - protein, 414 aa, unidentified; identical to SEQ ID NO: 2588
  REGION 1..414: note = Human gut metagenome

SEQ ID NO: 7669 - protein, 419 aa, Anoxybacillus sp.
LFVYVINKHGNPLMPCSPRKARILLKNKKAKVVKRTPFTIQLLYGSSGYKQPISLGVDTGTKHVGLSATTKIQVLLEAEVQLRTDIQELLATRRQFRRSRRNRNTRYRKARFLNRKKPNGWLAPSIQHKVDSHIKLVKWVHSLLPITHITVEVAQFDTQKIKNPDIQGAAYQQGEQLGFWNVREYVLYRDGHTCQWCKGKSKDPVLNVHHIESRKTGGDSPSNLMTLCKTCHDMIHREGLEHEIQRRFSSLKDASHMTVMRWFIWNGLKKVYPHANITYGYITKCIRIANGLPKSHMVDARCISGNPLAKPSGTVYFLKFVRKNNRQLHKATILKGGKRKSNKAPRFVKGFQLFDKVVYEGKECFIFGRRSSGYFDLRLLDGTKVHASASWKKLKRVEYASTLLIERRKGDSSPTFALA

SEQ ID NO: 7670 - protein, 449 aa, unidentified
  REGION 1..449: note = Human gut metagenome
MPTTTRKARILLKENKASVVCRHPFTIHLWYKTGCATQEGSIGIDTGSQHIGVGVTCRNKVILKDEHELRSSMEKRSLMETRATMRRGRRYRKVRYRKPKWRHHTKRMYFEKANRKGQHWRKVKTTTQSPRPERWLPPSLQSKCDHHFRIIDRYLKYLPDSITKNLVIEVGRFDMAHMNDPTIHGEMYQRGPMYDTENLRAYIFARDGYKCACCKAKAGSIRKKDGTSVKLVAHHIQFRSRGATDNPKYMISVCDHCHTTKAHQLGGILYSWMETNKKVTRGLRDATFMNILRRRLFDGYPQAAFTYGNITAVDRKRLLLPKSHANDAVAISLFGKDVSVINATCQTLRYKQVRKSKRSLHEATPRKGRKEPNTKAIRNKKNTTHVNGFKLWDSVLVNGQKLFICGFTGSSAYLVDQDGHYVSPPGKTYKQWTLSKLSRLHPNGNWLMA

SEQ ID NO: 7671 - protein, 425 aa, Moorena sp.; identical to SEQ ID NO: 6387

SEQ ID NO: 7672 - protein, 456 aa, unidentified
  REGION 1..456: note = Human gut metagenome
MSTCVCVLSNSGERLMPTFRLGKVRRLLKDGKAKIVKHHPFTIQLLYDSKTNTQPIEICEDVGYNYIGISVKSESHEYVSAQYDTLQDEKEHHDDCRKYRRTRRNRLRYRKPRFDNRKRSEGWLAPSLEHKKQLNIRLIERYVSVIPITRATVEVGSFDTMLLQAIQKGESKPEGVDYQKGPRYNLATLREAVFYRDNYTCQVCGRKIADGAILHMHHMFYWKGRHGYQLDELVTACEKCHTPANHQKGGKLFGFGENKEFANLSGAAFMNAVRWQIVNALYATYGKEFVTITYGAMTKEKRIALQLEKTHNNDAYAMGDYHPACRCKFRHYQKRRRNNRVLEKFYDATYIDARTGNKAKGKELFNGRISRNHKKDSENLHKYRSKKVSKGRRSIRRQRYAIQPYDTVRLEGKTYITSGCHNKGTRLLIPANGKSKSVAISKVQVVCHAGAWIQII

SEQ ID NO: 7673 - protein, 442 aa, unidentified; identical to SEQ ID NO: 3234
  REGION 1..442: note = Human gut metagenome

SEQ ID NO: 7674 - protein, 408 aa, unidentified
  REGION 1..408: note = Human gut metagenome
MVYVQDIDGKPMMPTTRHGKVRRLLKANKATVVNLCPFTIRLTYATSGYKQEIVLGVDAGTKHVGLSATTKSKELYSSEVILRSDIVELLSTRRELRRTRRNRLRYRKPRFGNRVKSKHHGWVTPSVRHKVDAHIRVIDNICSTLPISRIIVEIAQFDTQKIKNPDISGNEYQEGDQLGFWNVREYVLARDGHKCQHCKGKSKDPILNVHHIESRKTGGDSPSNLITLCETCHKEYHKGNIDLKVKRGKSLRDAAVMGIMKWKLYEELKSRYPNVSMTFGYITKYNRIKYGIEKYHISDAFVISKNFNALRLEYHYKVRLVRRHNRQIHKQKVLKGGAKKPNQSPFEVFGFRLFDRVMFEGNYYFIFGRRKSGSFNIRDINGGNQRNVTYKKLKLSIGKRFMIQKEMN

SEQ ID NO: 7675 - protein, 427 aa, Moorena sp.
MRVFVLDKNRKPLDPCHPAKARKLLKSGRAKVVRRYPFTIIIKDLEVENCSTHDHQLKIDPGAKTTGLAITQGNRVVWGAELTHRGFQIREALTSRRQLRRSRRNRKTRYRKPRFLNRTRPKGWLPPSLMSRVHNVLTWVNKLIKFCPVAGISQELVRFDTQKMLNPEISGIEYQQGTLYGYELREYLLEKWDRTCAYCGAKNTRLEIEHIKPRSKGGANRVSNLAIACHDCNQAKGNLEIEEFLSSKPSILKRILSQAKKPLADAAAVNATRWRLHDELKLIGLPVEAGSGGLTKYNRCRQNLPKTHWLDAANVGKVETLYISDYQPLLIAAKGHGSRQICRTDKFGFPRLHCSVQKIHKGFQTGDIVKAVVTKGKKLGTYVGRMAARKTGSFDITTTKGKVSGISHKYCQAIHRKDGYSYQFHGG

SEQ ID NO: 7676 - protein, 415 aa, Bacillus sp.
MCVFVKNLRGKPLMPCSHRKARLLLKRGKAKIIEYTPFTIQLQYATGEAVQPVTIGVDSGAKHIGIAITTGDKVLTKGTIELRQDVKENLTLRATLRRGRRQRKTRYRKARFLNRKKKEGWLPPSIQSRVDNQIHWIETFKSLLPSPKVIVEVGKFDAQKLKNPDIQRIEYQQGAALGFWNTRYYVFARDNYTCQICKKKGGILHTHHIIERRKGGSDMADNLVTVHDECHQKFHQGTLKHTFKKPKQYKETAFMNILRLQIIRRLDCEITYGSYTTIKRKELDLSKTHANDAIAITNPKRLQGYDQSGEFCIKQFRKKKRSLHEATARKGRKTKNTNAKRNNKNTPHVNGIYLGDKVKVFGQVGFVTGFTGKMVYVQDIYGQYIQNPAKSYKQVKRSEIERIHHTNNWQFLQIS

SEQ ID NO: 7677 - protein, 451 aa, unidentified
  REGION 1..451: note = Mouse gut metagenome
MTTFVFVLDRKGRSLMPCHPARARKLLKKGRARVHKVFPFTIRLTDRELENSSVQPMLIKIDPGSKETGIALVREEKNKEHHALYFINLQHRGQQIRNALYKRRCLRRSRRSRNLRYRSPRFLNRRRAEGWLAPSLQHRADSILSWVSRLRKITPVERISQELVKFDTQLTQNSKIEGIEYQQGELAGYELREYLLEKFGRKCIYCGADNVPLNIDHVIPKSKGGSNRVSNLVLACVQCNQKKGSRSIEEFLKDKPEVLRQIKNQLKQPLKDAASVNATRWKLFNKLKSTGFPFEVGSGALTKFNRKKFGIPKAHWLDALCVGNVPSVTNWRNLNVLNIKCCGRGAYQRTRTDKYGFPRGICMRQKKVYGFSTGDMVKAIIPKGKKKGVYVGKVAVRKTGSFNLQTSGQTIQGISYRYCRLITHSDGYSYSWKSCPIPPRVETRGIPGEVR

SEQ ID NO: 7678 - protein, 424 aa, unidentified
  REGION 1..424: note = Human gut metagenome
MRVFVFNMRGRPLMPCSQRKARLLLRENKAMIYKYHPFTIQLTYTTGETKQDCHIGIDTGSKYIGAAVRSEDKVFWKGEIELRQDIRSNLDTKRIYRRSRRNRKTRYRKPRFLNRKRRDEWLPPSLQSRINHTFHWIDTLSSLVPNPILHIEVGKFDVAKMINPEIHGVDYQHGQTYGFFDERYFVFARDNYTCQCCGKSKNKILNTHHIIYRSNGGTNRVDNLITVCTDCHTSQNHRKGGIFYQWQEQHKKVKQYKEPQFMNTLRKRIFVAYPDAEITYGSETTPKRKAMKLDKTHYNDAIVISGINEIKENPEEWLLIKQFRKKKRSLHEATARKGRKKPNRNQTRNSKNTPYYKGFYLNDKVSVFGKSGYITGFTSNAAYIKDENNDYITLPNKTYKQVSINKMKLECHNNNWQYIIKNAV

SEQ ID NO: 7679 - protein, 451 aa, Moorena sp.; identical to SEQ ID NO: 3199

SEQ ID NO: 7680 - protein, 524 aa, unidentified
  REGION 1..524: note = Human gut metagenome
VRLRYGKFNREPFFGSLAYSKKEKIMRYVYVLDVDGNPLMPTRRYGWVRRMLKSGKADAVDSLPFTIRLKEKTGTRILQPVIVGQDPGRSNIGMAAVRNDGTALYRVHCETRNKEIVGLMDNRRAFRRASRRGERLARKRLAKKLGTTAKNLNGRLLPGYEKPLAVKDIINTEARFNNRIRPEGWLTPTAVQLLRTHLNLFKKVSGILPATEAVIEINQFAFMQLDDPDAKKREIDFCHGPLYGTGGIKAAVQIQQKDVCLLCGKHGIEHFHHIVPRSKRGSNTVNNIAGLCMECHKKVHMSQEAAEKLEKRKAGLVKRYGGASVLNQIIPSLVEGLAGQYPGHTHVTNGWNTKEFREKYGLEKEHDIDAYCIAASILGNIQPKLEAETYEIKQFRKHNRALIHHQTERTYKYEGKTVAKNRKKRMEQKTDSLEDWFISMTEKYGKEEAEWMRSRLTVQKSKRYYNTPGRMMPGTVFEYAGKRYVLTGQRTRGQYYLAYGQEKKNIQAKKVRVLKPNAGLVYVA

SEQ ID NO: 7681 - protein, 420 aa, unidentified
  REGION 1..420: note = metagenome
MQYVYVLNKHGEPLIPCSPGKARLLLKQQKACVVKRTPFTIKLLYGSTGYKQPITLGVDAGSKHIGISAATEKYELYCEEATPRNDVVDLLSARRAFRRSRRNRKTRYRAPRFNNRVHSKHKGWLAPSVEVKIQEHITLIKRVCRILPVTFVRVETAEFDTQRLKAMLEGKPLPVGTDYQLGEMYDEYNIRQYVLKRDNYTCQCCGAHPTKTKAVKLHVHHIETRRTGGNAPNNLITLCTDCHKALHAGKVTLDGKKRGKPLKDAAFMGVMRKTLMERLHKKLKIPVQGTYGYITKYLREKNGIPKSHTNDARCISKNPLAIPCDTCYYTKAVRHHNRQLHKATILKGGIRKANQAPYIVKGYRLWDKVSCNGTECFITGRRTSGYFALKKLDGTVISNSISYKKLRLLEVATNYITERR

SEQ ID NO: 7682 - protein, 414 aa, unidentified
  REGION 1..414: note = Human gut metagenome
MVYVINKQGQALMPTERFGKVRRLLKNSLAHVVCRIPFTIQLDYDTTDYTQPVSLGVDAGSKHIGISATTSEKELYAADVELRNDIVDKLSTRRELRRTRRSRLRYRKARFNNRVSSKRKGWLAPSVENKIQTHLTVVEKIHKFLPITNIVVEIASFDIQKINNPIISGSEYQQGEQLDFFNVREYVLFRDNHICQHCKGKSKDKVLNVHHIESRKTGGDSPNNLITLCETCHKAYHRGEFELNVKRGKSFRNAAFMGIMRWSFYDRLKNIYPNVSMTFGYITKNTRITNNLPKEHYVDARCISDNPVAKPLGYYFYQKKVRCQNRQIHKANFLKGGRKKLNQAPFLVKGFRLFDLVEYQKELYYIFSRRNSGYFDIRKLDGTKVNKGSINCKHLRLIATRKSILIEKRTKVNL

SEQ ID NO: 7683 - protein, 414 aa, unidentified
  REGION 1..414: note = Human gut metagenome
MPCSPAKARLLLKEKKAIVVRRTPFTIQLTIATGETKQPVSLGVDAGYKHVGLSASTEKAELYASEIELRQDITDLLSARRELRRARRNRKTRYRAPRFDNRIRTKRKGWLAPSVENRINAHLSRIEAVLRLLPVTKITVETASFDMQLLKNPEISGKEYQEGEQLGFWNVREYVLFRDGHVCQHCHGRSKDPVLNVHHLESRRTGGDSPGNLITLCETCHKALHRGEITLKAKRGQSFRAEAFMGIMRWEVLNRLKASHPELEVNNTYGYRTKHARISNGIAKSHCADAFCIAGNLGAKRLGEFFFQKQTRRNNRQIHKLSILKHGLRKRNQTPFEIKGFRLFDKVACKGEEGFIFGRRSSGYFDVRKLDGTRISAGISCKKLHLLEKRQTYITEIRKEKALPPLPEGRGLRA

SEQ ID NO: 7684 - protein, 435 aa, unidentified
  REGION 1..435: note = Human gut metagenome
VIVGFDPGRTNIGISAVREDGTCLNLTHCETRNREIPKLMQKRKEHRQTSRRGERLVRKRLAKRHGTVSSKPLERILPGCEKPLKVKDIINTESRFNNRLRSEGWLTPTATQLLRTHVNLLKRMCQILPATDVVMEVNRFAFMQLDQSNVKKCGIDFQHGPLFGTDGIKEAVSIQQDGRCLLCEKRTIEHYHHIVPRAYRGSDTAENIAGLCAGCHKLVHTSREASNKLKHKKDGINKKYGGISVLNQVIPFLFMEFEQMFPGHTYATNGWNTKQFREKYRLAKDHSVDAYCIAASILPEPKVELPEDTHEIVQYRRHDRARIKRQTERTYCLGKKGVCKNRHKRFEQKTDSLEEYVEKYPNFLSNLTVKKSQRSYNDLKRVLPGAVILYQGKRYILSGRSSGGKQYRMLGYGNQNFTASKCTIVQQNTGLVYVS

SEQ ID NO: 7685 - protein, 458 aa, Moorena sp.; identical to SEQ ID NO: 4474

SEQ ID NO: 7686 - protein, 423 aa, Oscillatoria sp.; identical to SEQ ID NO: 5719

SEQ ID NO: 7687 - protein, 419 aa, unidentified; identical to SEQ ID NO: 5677
  REGION 1..419: note = Human gut metagenome

SEQ ID NO: 7688 - protein, 553 aa, Streptomyces sp.; identical to SEQ ID NO: 5972

SEQ ID NO: 7689 - protein, 627 aa, unidentified
  REGION 1..627: note = Lachnospiraceae bacterium UBA7292
MQELEACICAVGDTMNAPTALVQVVALLQFMVKFRVHGIRNTVTLLPQKVPHWMHSNAVYDSELSFQKDVTVYMYVRVIAKDGTPLMPTRRCGNVRHLLETGMAVAIRTKPFTIRLKYETSKYVQALYAGIDTGRENIGSAVSKENGENVYLADSRSNNGTVHSKMYDRAGFRRKRCRHDRQNKQRKAKFDGTEMKKGDADKVRTTHDCISRKVSYPVAEKSVTHKVIQGKEGKFNNRKHPDGWITPSAKQLVQITMNEVKFMCDTMPIRQLSVERVSFDFQKLANVNIRAWEYGKGPLYGYRSYKDYFCDEQKGKCPFCGEDIAHYHHIMPRHRRGTDTVRNIIGVCESCHEKIHSGQITDEMLHEVKDGVAESFEVGLLNSVMPALIDAMKQFCDARNIRLVVMDGRTTSETRNRYHIRKDHCTDAYCISLAGRNIDPADVKLDDFIFMKRRFKKKSKNIINTLNQRVYYDGKKPVAYNRHRAMDQKTDSLEEYMTKYRRTHTGAETDKHFRSLTVRPAKRTYTFHKNGTIAAVHAGDVVRYVKYNKTYGNTKIDTFVALSCEMFGEGHVKYGNGTQGRKLKFCKTIASGALQCVGIEKTDTYLREVALEEAKRRAARVRRKRTG

SEQ ID NO: 7690 - protein, 339 aa, unidentified; identical to SEQ ID NO: 5852
  REGION 1..339: note = Human gut metagenome

SEQ ID NO: 7691 - protein, 442 aa, unidentified; identical to SEQ ID NO: 3218
  REGION 1..442: note = Human gut metagenome

SEQ ID NO: 7692 - protein, 424 aa, Moorena sp.
MRVFVLDKNKKPLDPCQPARARILLKQGRAKVFRRYPFTIIMGDLEELECVTHNHQIKLDPGSQTTGLAIVQEKVVVWGAELTHRGLQIRDGLTSRRQLRRSRRNRKTRYRQPRFLNRKRPDGWLAPSLMSRVYNIITWVKKLTRFCPITGISQELVRFDTQKMENPEISGTEYQQGTLYGYEVREYLLSKWNRKCAYCGVTDTPLEVEHIKPKSKGGSDRVSNLAIACRKCNQTKGNQEIEQFLSGKPDVIKRILSQAKRPLVDAAAVNSTRWKLYNELKALGLPIETGSGGLTKYNRCRQNLPKTHWLDAANVGKVDTLYIEVYQPLLISAKGHGTRKMCRTNKFGFPTRYVPRWKFVKGFQTGDIAKAVVTKGKKVGTYTGRIATRKTGSFNISTKHGLVQGISHKYCSIVHRKDGYAYSF

SEQ ID NO: 7693 - protein, 502 aa, unidentified; identical to SEQ ID NO: 6049
  REGION 1..502: note = Human gut metagenome

SEQ ID NO: 7694 - protein, 443 aa, Halomonas sp.
MPCSEKRARLLLERGRAVVVNLTPFVIRLRDRCLSDCTLQPTLLAADPGSKETGLALMRLENNATEEKAPATRHVLYLFQLVHRGFQIRQALEQRAGFRRRRRSKNLRHRKPRFDNRTRKKGWLPPSLQHRVDTTMARVDKLCRWAPVTHLSMELVRFDMQKMENPEISGVEYQQGTLLGYEVREYLLEKWGRVCAYCGTGDTPLEIEHVVAKSRDGSSRVSNLTVACHDCNIAKDNQSLADFFATDKGLKRRLKANGLSAEMRLARVQRQLKLPLRDATAVNATRWALFGAMKSTGLPVAVGSGGRTKYNRQRLGIPKTHALDAACVGKFDTLKGWRVPTQVIKAMGRGSYQRTRLDKYGFPRGYLMRQKQVQGFQTGDRVRAIVPTGKKAGTHTGRVAIRKTGSFNIQTEQGAVQGISWPYCTLLQRGDGYGYHQIPTPQH

SEQ ID NO: 7695 - protein, 353 aa, Arthrospira sp.; identical to SEQ ID NO: 3451

SEQ ID NO: 7696 - protein, 461 aa, Parasutterella sp.; identical to SEQ ID NO: 3646

SEQ ID NO: 7697 - protein, 465 aa, unidentified; identical to SEQ ID NO: 3070
  REGION 1..465: note = Human gut metagenome

SEQ ID NO: 7698 - protein, 431 aa, unidentified
  REGION 1..431: note = Human gut metagenome
MPNKVYVINKHGRPLMPCSPAKARHLLDAGKAKVKKRTPFTIQLVYGSSGYTQEVILGVDAGSKTIGMSASTTKEELLSAEVKPRNDVVDLLSTRREFRRARRNRKTRYRKPRFDNRVRSKHKGWLAPSVEVKIQEHITAIRRVCGILPVSKVVVETAEFDLQLLKAIEEGKPVPQGEDYQKGEMYGHYNVRQYVLWRDGYTCQCCGAHTTKKKEVRLHVHHLESRKVGGDAPDNQVTLCESCHEKLHKGLIAEKDFKKRKRRSTRDATFMGIMRKTLMQRLCSELPIPVVKTRGYITKATREKLLVLPKSHTNDALAIAQGKRGFNVGYLPEIAQIDKIYTIRPVRHHNRQLHKATILKGGIRKSNQTEKYVFGYRLFDKVQFNGQDCFIWGRRTTGIFTIKTINGKMIKDGISFKKLKLLEKSTSYLIA

SEQ ID NO: 7699 - protein, 512 aa, unidentified
  REGION 1..512: note = Human gut metagenome
MTALEEKLSKTEYIYVLGFDGKPQMPTRRKRHVLKLLKTGRARIAEDIPFTIRLTYRNAPVLQPVTLAEDPGRTNIGAAVLSPLGDLLFAAVIETRNKEIKKLMADRQKSRQASRRGERKARQRLAKRYGSMVKSGMVMRKLPMYAADKFVICKFIRNTQARFCNRKRCPDWITPTVQHLVQTHLNIIRKISRYLPVTDIAFEVNRFAFMHMENPEAMGVDFQNGPLKGYGDVKEAIRTQQHGKCLMCKKPITHFHHIVPRSRGGSDTIQNLAGLCTECHTKVHTDTAFRKDFDEKKSGQLKKYGALSALNQAVPFICKKLLEEYGEEHVHFCRGLDTSLIRTAFGFEKTKKNQMHEVDAYCIGLAALEVNEVETPAFDHTFQIRQFRRQDRSIIHHQTGRSYYQGKEKVAQNRKPGFEQKTTALSQWYKEQIRIHGEKEAEKLRSQLRVEKSCRHYNDMDRFLPGAVFLYEGKRYVLSGRITNGKYLRACGQGMKNFPAAECTFIRHNAGL

SEQ ID NO: 7700 - protein, 507 aa, unidentified
  REGION 1..507: note = Wastewater metagenome
MQTKGKGSKVLVAICKDRSRLLTFPRGDWSQGQRNKSRKGERFEMAVFVLDRSGRPLMPCTEKRARLLLERGRACVHLVMPFTIRIVDLKAENCAFQALRVKLDPGSKATGIALVRETEGKGVAVVNLFELVHRGRQISEALTARRGHRRLRRSKLRYRPPRFDNRGNKQRGWLAPSLQHRVDTSMAWVSRIQRLAPVSAISTELVRFDAQALENPEIEGAQYQQGTLAGYEVREYLLEKWDRTCAYCGAKDVPLQIEHIHPKSKNGSDRINNLTLACQCCNQKKAALPVEMFLAKKPELLKRILAQAKRPLKDAAAVNSTRWALVNTLKTTGLVVETGTGGQTKFNRSQFDIPKTHALDAACVGEVGSITDWQKPTLSIKAMGRGSYQRTRLDKFGCVRGYLTRSKSIKGFQTGDMVKAEVTTGKKIGSYTGRVAVRATGSFNIQTSTGLVQGVSHRYCTVVQRGNGYGYSLVAKTDVRGTPPQHRDASHPALYLPGLKAEVSRAN

SEQ ID NO: 7701 - protein, 396 aa, Moorena sp.
YPFTIILSDLEVENCTTHNHQLKIDPGAKTTGLAILQNDTVIWSAEITHRGFQIRDALTSRRQLRRSRRNRKTRYRKPRFLNRKRPSGWLAPSLMSRVHNILTWVKKLIRLCPIAGIFQELVRFDTQKMENPEISGTEYQQGTLCGYEIREYLLEKWNRKCAYCGATDVRLEIEHIKPKSLGGSDRVNNLAIACHDCNQTKGNQEIEQFLSGKPDILKRILSQAKRSLADAAAVNSTRWKLYNELKLTGLPVKTGSGGQTKYNRRQFSLPKTHWLDAACVGDVQSIFVEDYQILSIVAKGHGTRQICRTDKFGFPKRYCSRTKIHKGFQTGDIVKAVVTKGKKIGTYVGRVATRKTGSFNISTANGLIQGISYKYCTPIHKKDGYAYQINTLPSLS

SEQ ID NO: 7702 - protein, 431 aa, unidentified
  REGION 1..431: note = Human gut metagenome
MDAWDIIVVLNKRGKPLMPCSPAKARLLLKEKKAIVKRRTPFTIQLTIATGETKQPVSLGVDAGYKHVGLSASTEKAELYASEVELRQDITDLLSARRALRQSRRNRKTRYRAPRFDNRIRTKRKGWLAPSVENRINAHLSRIEAVLRLLPVTKISVETTSFDMQLLKNPDISGKEYQEGEQLGFWNVREYVLFRDGHVCQHCHGRSKDPVLNVHHLESRRTGGDSPGNLITLCETCHKALHRSEITLKTKRGQSFRAEAFMGIMRWEVHNRLRALHPGIEVSNTYGYRTKHARIANGIAKSHCADAFCIAGNLGAERLCEFFFQKQTRRNNRQIHKLSILKGGIRKRNQAPFEVNGFRLFDKVACKGEEGFIFGRRSSGFFDVRKLDGTCISAGISYKKLHLLEKRRTYLTEIRKEEALPPLPEGRGLRA

SEQ ID NO: 7703 - protein, 473 aa, unidentified; identical to SEQ ID NO: 3562
  REGION 1..473: note = uncultured beta proteobacterium

SEQ ID NO: 7704 - protein, 414 aa, unidentified
  REGION 1..414: note = Human gut metagenome
MPCSPAKARLLLKEKKAIVVRRTPFTIQLTIATGESKQPVSLGVDAGYKHVGLSASTEKAELYASEVELRQDITDLLSARRALRQSRRNRKTRYRAPRFDNRIRTKRKGWLALSLENRINAHLSRIEAVLRLLPVTKITVETASFDMQLLKNPDIAGKEYQEGEQLGFWNVREYVLFRDGHVCQHCHGRSKDPVLNVHHLESRRTGGDSPGNLITLCETCHKALHRGEIKLKAKRGRSFRAETFMGIMRWGVLNRLKASHPKLEVHNTYGYRTKHARISNGIAKSHCADAFCIAGNLGAERLGEFFFQKQTRRNNRQIHKLSILKGGIRKRNQAPFEVKGFRLFDKVACQGEEGFIFGRRSSGFFDVRKLDGTRISAGISCKKLHLLEKRRTYLTEIRKEEALPPLPEGRGLRA

SEQ ID NO: 7705 - protein, 279 aa, unidentified
  REGION 1..279: note = Human gut metagenome
VVVETAEFDLQLLKAIADGKPVPQGEDYQKGEMYGHYNVRQYVLWRDNYTCQCCGTHPSKKKEVRLHVHHLESRKVGGDAPDNQVTLCESCHEKLHKGLIAEKDFKKRKRRSTRDATFMGIMRKTLMQRLCSELPIPVVKTRGYITKATREKLLVLPKSHTNDALAIAQGKRGFNVGYLPEIAQIDKIYTIRPVRHHNRQLHKAAILTGGIRKSNQTEKYVFGYRLFDKVQFNGQDCFIWGRRTTGIFTIKTINGKMIKDGISFKKLKLVEKSTSYLIA

SEQ ID NO: 7706 - protein, 512 aa, unidentified; identical to SEQ ID NO: 7484
  REGION 1..512: note = Human gut metagenome

SEQ ID NO: 7707 - protein, 400 aa, unidentified
  REGION 1..400: note = Human gut metagenome
KKAIVVRRTPFTIQLTIATGETKQPVSLGVDAGYKHVGLSASTEKAELYASEIELRQDITDLLSARRELRRARRNRKTRYRAPRFDNRIRTKRKGWLAPSVENRINAHLSRIEAVLRLLPVTKITVETASFDMQLLKNPDISGKEYQEGEQLGFWNVREYVLFRDGHVCQHCHGRSKDPVLNVHHLESRRTGGDSPGNLITLCETCHKALHRGEITLKAKRGQSFRAEAFMGIMRWEVLNRLKASHPELEVNNTYGYRTKHARISNGIAKSHCADAFCIAGNLGAKRLGEFFFQKQTRRNNRQIHKLSILKHGLRKRNQAPFEIKGFRLFDKVACKGEEGFIFGRRSSGYFDVRKLDGTRISASISCKKLRLLEKRRTYLTEIRKEEALPSLSEGRGLRA

SEQ ID NO: 7708 - protein, 478 aa, Acidiferrobacter sp.; identical to SEQ ID NO: 4550

SEQ ID NO: 7709 - protein, 411 aa, unidentified; identical to SEQ ID NO: 3277
  REGION 1..411: note = Human gut metagenome

SEQ ID NO: 7710 - protein, 458 aa, Lactobacillus sp.; identical to SEQ ID NO: 7062

SEQ ID NO: 7711 - protein, 434 aa, unidentified; identical to SEQ ID NO: 6197
  REGION 1..434: note = Human gut metagenome

SEQ ID NO: 7712 - protein, 428 aa, Enterococcus sp.
MVYVLSINNEPLMPCSNVIARLLLKQGKAKVKYREPFTIKLTYETTTYTQPLTLGVDTGSQTFATAVTNGKGNILYTSEVVLREDKNHSIKKKMDQRRMYRRNRRNRKTRYRKARFNNRKNSKRKNRFSPTMTSKLHSHQKEIEFIKSILPIAKLILETGTFDPHLMKNPSLANLKVKPWGYQQGPNYGFENKKARILARDNHTCQICKKKPKNERLEVHHIIFRSQGGSDEENNLVTVCHSCHVELHKGLIHPNFEGSLKNALKYATQMNSIRVQLLKLYPDAIETFGYVTKANRLNLGLPKEHYVDAAVIATAGNQVNFACNLMIKRCIPKGDFQRTKGIRSEKIIPKGKIDGFKKYDKVRYFGNEYFVKGRMTTGYIQLMNIYGEKISFNHMPKGFKTPKTKNCQRISARKTWITTTEPLIKNIA

SEQ ID NO: 7713 - protein, 512 aa, unidentified; identical to SEQ ID NO: 4038
  REGION 1..512: note = Human gut metagenome

SEQ ID NO: 7714 - protein, 413 aa, Moorena sp.
LKVFVLNMRGKPLMPCSPAKARHMLKAGKAFVVRRTPFTIKLTIATGETKQDVTLGVDAGARHVGISATTEKEEVFASEVALRQDITGLLADRLAFRRARRNRKTRYRAPHFNNRVRSKHKGWLAPSVENRIQAHISRIEAVCRLLPVTKIVIETASFDIQKIRNPEVEGTGYQQGDQLGFWNVREYVLFRDGHICQHCRGRSKDPILNVHHLESRKTGGDAPNNLITLCETCHKAYHAGKIKLKVKRGQSFRAEAFMGIMRWTLLDRVRKTHPKLPVENTYGYLTKHKRIALGLPKTHCADAFCIAGNLKALRRGDFLFQQQTRKHNRQIHKCSILKGGVRTLNQAPFLVKGFRLFDKVRIGGQIGFVFGRRVRGTFNIRRLDKTVIGTDINCKKLSLLETRKTFLTELRKE

SEQ ID NO: 7715 - protein, 427 aa, Moorena sp.
MQNYVFVIDAKKQPINPIYPKKARRLLDKGKAAVFRMYPFTIILKTAIENPTISPCQIKIDPGSKVTGFALVQDGQVIWGMELEHRGGLIKKKLESRRAVRRGRRNRNTRYRKPRFLNRKRPEGWIPPSLEHRILTTQTWVKRLIKFCPVNEIWVERVKFDTQKMQNPEINGIQYQQGELAGYEVREYLLEKWGRKCTYCGKQNVPLQIEHIHPKSKGGSERVSNLCLACEKCNQRKGNKPIEDFLKKKPSLLQKIKTKAKQPLQDAAAVNTTRNKLVKVLQNVLPLITGTGAQTKFNRTKLGFPKQHWIDAACVGNIEALVLRTSQPLLVTCKGQGGRQKAALNKYGYPIRHNPLKPIGCRPRCANKGWTTGDIAKHQKLGIGKVTPRTKGSFGFTPLGTKGYKSCKPQDISAIHRKDGYTYGFCQ

SEQ ID NO: 7716 - protein, 451 aa, unidentified
  REGION 1..451: note = Human gut metagenome
MSVAVISKTGERLMPTSEYRARKLLKSGKAIKYSYRPFTIQLTERETGDIQPIELCMDTGYIHIGISVKSEKHEYLAEQIDTLTDERSRHDACRMYRRQRRNRKRYRQPRFNNRKKDKGWIAPSLEHKKNIHIQAISRINNVMPLTDITMEMGNFGTQVLKAKEEGNPLPQGADYQHGERYGIATLREAVFTRDDYKCQCCGRTIKDGAILHVHHIKYRSQGGTNSMSNLATVCDKCHTPKNHKPEGKLYNWKPKLPSFKCATFMTTIRWQLYNEVKTLFPDIDIHITYGAATKERRRELDIDKSHVNDAFVMGQFHPKHRIKAVLYKKKRRNNRCLEKFYDAKYIDSRDGKKRSGQELFNGRINRNHKKDSENLHQYRLQKVTAGKRTVRKQHYGIQPHDIIVYENRKRETTGCHCSGTRVMLLPDKKSVSIKKIKIYKYAGGYFKSAFN

SEQ ID NO: 7717 - protein, 189 aa, unidentified
  REGION 1..189: note = Human gut metagenome
MVYVLANDGQPLMPTERHGKVCRMLKSGIAKVVKKCPFTIQLQYESERNVQPVALGIDAGSKHVGVSATTKAKVLYESDVELRDDIVKLLATRRQLRRRRRSRKTRYRPARFDNRRRKEGWLTPSIRQKIESHLTVVANVCKILPVSQIIVETASFDIQKIKNPDIQGIEYQQGEQMDFWNIREYVLFR

SEQ ID NO: 7718 - protein, 443 aa, Anoxybacillus sp.
MVEENMTCFMQRKGENPMVFVLDTNKRPLAPCHEAVARKLLKQGKAAIYRRFPFTIILKKSVDESEIKATYRLKIDYGSRHTGLAILRGQEVVWLGQLDHRTDIKERIDKRRAFRRARRNRKTRYRKPRFLNRKRKEGWLPPSLESRMQNIKTWVERLRKICPIEHISYENAKFDTQLMRNPEINGVEYQQGTLQGYEVREYLLEKFGRKCCYCGKEGVPLEVEHIIPKSRGGTDRMDNLCLACRDCNQRKGSQTAEEFGYPHIQEMVKKTLKDASVVNATRWKVYEVLKQSGCEVECGTGARTKMNRIRLGLPKIHYFDACCVGKSTPLQLHFKTKEVLFIKAKGRGSRSRTNLDRYGFPRGYLARQKYFFGFQTGDMVKANVPKGKYQGVWFGEVACRKTGSFDIKGKDGKRIAQGINYRYVQVIQRFDGYAYGKGVAELA

SEQ ID NO: 7719 - protein, 553 aa, Streptomyces sp.; identical to SEQ ID NO: 4116

SEQ ID NO: 7720 - protein, 518 aa, Anaerostipes sp.; identical to SEQ ID NO: 2751

SEQ ID NO: 7721 - protein, 493 aa, unidentified; identical to SEQ ID NO: 3781
  REGION 1..493: note = Human gut metagenome

SEQ ID NO: 7722 - protein, 425 aa, Aphanothece sp.; identical to SEQ ID NO: 6227

SEQ ID NO: 7723 - protein, 430 aa, Microvirga sp.
MTVFVLDKHGKPLMPCSEKRARQLLDQKRARIHRMRPFTIRLVDRKVEDSILQPIKLKIDPGSKGTGIALVRVSQVRQTVLMLMELKHRGADIRDALTQRRAFRRRRRGKLRFREQRFDNRTRHEGWLAPSLRHRVDTTMAWVDRLSRLASVTAIDMELVRFDTQLLANPEICGVEYQQGTLAGYEVREYCLEKWGRTCMYCGKDGIPLQVEHIVPRARGGSDRPSNLGIACEPCNQAKGSTPVEEFVQDPKRLGRIHAIMRSPLRDAAAVNSTRWGLFNALKAPGLPVSTATGGRTKWNRSRFGIPKTHALDAACVGHVEELAGWSQPTLQAACTGRGRYKRTLLDKHGFPRGRLMVRKRVHGFATGDLVAAAVAKGKKIGSYVGRVAVRESGKFNITTASGVVQGIGHRNFRLLQRADGYCYSQRNTN

SEQ ID NO: 7724 - protein, 421 aa, unidentified
  REGION 1..421: note = Human gut metagenome
MTPMVYVLSKTGQPLMPTENHAKVRVLLKQQKAKVVHRCPFTIQLLYDSTDYTQPVSLGIDAGSRHIGVSATTETKVLYEADVTLRNDIVDLLSTRREARRTRRSRKTRYRKPRFNNRIRKDGWLAPSIQQKVDTHLTVVHKATGILPVNSITVETASFDIQKIKNPDIAGTGYQQGEQLDFWNVREYVLFRDGHKCQCCKGKSKDPVLNVHHIESRKTGGNAPNNLITLCETCHKGYHNGTVSLPKNIRRGMKFNDAAFMGIMRWTFFNRVKETYEPLGIMVNMTYGYITKNTRIEHKLPKDHFIDARCISGHPDAVSDGTVFYQKKVRCHNRQIHKQKILKGGIRKRNQAPYLVKGFRLFEKVKYHGKQYFIFGRRSSGFFDIRTLDGTKVNKGSVSCKKIRSLDMPRSYLTEERKAIV

SEQ ID NO: 7725 - protein, 430 aa, unidentified
  REGION 1..430: note = Human gut metagenome
MDAWDIIVILNKRGKPLMPCSPAKARLLLKEKKAIVARRTPFTIQLTIATGEAKQPVSLGVDAGYKHVGLSASTEKAELYASEVELRQDVSDLLSARRALRQSRRSRNTRYRAPRFDNRIRTKRKGWLAPTVENRINVHLSRIETVLRLLPVTKITVETASFDTQLLKNPDIAGKEYQEGEQLGFWNVREYVLFRDGHVCQHCHGRSKDPVLNVHHLESRRTGGDSPGNLITLCETCHKALHRGGITLKAKRGQSFRAEAFMGIMRWEVLNRLKASHPELEVNNTYGYWTKHARIANGIAKSHCADAFCIAGNLGAERLGEFLFQKQTRRNNRQIHKLSILKGGRRKRNQASFEVKGFRLFDKVACKGEEIFIFSRRSSGYFDVRKLDGTRISAGISYKKLRLLEKRRTYLTEIRKEAFSPLPEGRSLRA

SEQ ID NO: 7726 - protein, 279 aa, unidentified
  REGION 1..279: note = Human gut metagenome
VVVETAEFDLHLLKAIADGKPVPQGEDYQKGEMYGHYNVRQYVLWRDNYTCQCCGTHPSKKKEVRLHVHHLESRKVDGDAPDNQVTLCESCHEKLHKGLIAEKDFKKRKRKSTRDATFMGIMRKTLMQRLCSELPIPVIETRGYITKATREKLLVLPKSHTNDALAIAQGKQGFNVGYLPGIVQINKIYTIRPVRHHNRQLHKATILKGGIRKSNQTEKYVFGYCLFDKVQFNGQDCFIWGRRTTGIFTIKTINGKMIKDGISFKKLKPVEKSTGYLIA

SEQ ID NO: 7727 - protein, 489 aa, unidentified
  REGION 1..489: note = uncultured beta proteobacterium
VCGSRSSGSRQAIGDVRNGSDSNAGLQHGRGEMFSKHVTAARRVERSNPMSRVFVIAKHGDPLMPCEPARARQLLRKGMAVVHRTFPFVIRLKQRETGDVQPIKLKLDPGSKTTGIALTREAPGKSVALKLIELEHRGRQISDALTSRSSLRRRRRGQLRYRAPRFLNRGNKKNGWLAPSLMHRVHSTMSWVERLRRWVPVSDIASELVRFDMQALENPEVTGVEYQQGTLAGYEVREYLLEKWARKCAYCDATGVPLQIEHIVARARGGTDRISNLTLACGCCNQRKGASSIQEYLAKDQSRLKKILASAKAPLKDAAAVNATRWRLANELKTTGLRIELASGGRTKFNRTQFGVPKSHALDAMCVGNVVGVERWNQPTLLARSTGRGGYQRAITDAYGFPKAHKTRTKMQFGFQTGDMVRALIPRGKYTGVHTGRVSVRATGKFDLKSDSRPRFGVGHKHCTIVQRADGYSYSWKPTPTADQKGTTA

SEQ ID NO: 7728 - protein, 493 aa, unidentified
  REGION 1..493: note = gut metagenome
MAAVYVISASGKPLMPTTRCGHIRGLLNAGKARVVEREPFTIQLKYETPDVTQPLYLGIDPGRTNVGSAVVREDGECVFTAQLTTRNKDVPKLMKARKQFRMAHRRLKRRCKRQRRAKAAETLSQKGEFQRLLPGYEEPILCKGIRNKEARFNNRQRPAGWLTPTANHLLLTHLNMVKKLQKLLPITDVVLEVNRFAFMAMENPSIRRWQYQQGPLYGKGSVEDAVYAQQDGHCLFCGKPIAHYHHVVPQHKNGSETLENRVGLCNEHHDLVHKDRAWDAKMKETKAGLNKKYHALSVLNQIIPALTEQLTAMFPQHAFVTTGKDTADFREDYGIAKEHHLDAYCIACSVLAEPTKVAAPTGRPHRLMQFRRHDRQVCHKENIKRVYLSEGKAVATNRHKAIEQKDDSLEEFRKTHTQQEVSALTVKDHQPVYKDMRRFMPGGVFLFNGKVHTLQRSHGRYKGMPFYYIDTDGSKNHAKGCIFLQQNCGLRWV

SEQ ID NO: 7729 - protein, 431 aa, unidentified
  REGION 1..431: note = metagenome
MPDKVYVISRLGHPLMPCSPAKARHLLDDKKAKVVKRMPFTIRLLYGSTKYIQPIILGVDAGSKTIGLSASTAKEEVFAAEVMPRNDVVENLSTRREFRRARRNRTSRYRKPRSDNRVRSNHERWLAPSVKVKIQEHITSIKRVCTILPISKVVIETAEFDLQLLKAIQEGKPIPEGEDYQKGEMYGSYNVCQYVLWRDNYTCICCGVRGTPKNPVRLHVHHFESRKYGGNAPDNHGTLCDDCHKKFHLGIITDVKLKTRRRQSTRDAAFMGIMRKTLMWRLRTELFIPVAETKGYITKATREKLLVLPKSHTRDALAIAQGRHGFGIKEYAYVEPANHIYTVRPVRHHNRQLHKASILKGGIRKRNQASKYVFGFRLYDKVLYQGKACFVWGRRTSGTFLLRTIDGIKVKDGVSYRNLTLLERSSNYLIA

SEQ ID NO: 7730 - protein, 351 aa, unidentified
  REGION 1..351: note = Sediment metagenome
VFAAELTHRGQEIKKRLAHRRASRRSRRQRHTRYRKPRFDNRRNKKKGWIAPSLESRVCNVITWVKRFLRICPLAALSQELVTFDMQQLENPDIAGAEYQQGTLQGYEVREYLLEKWNRMCAYCGQRDVPLQVEHICPRAKHGSNRISNLTLACELCNTKKGTQEIQVFLARQPEVLKRIMAQAKAPLRDAAAVNVTRWALSERLSVLGVPLERGTGGRTKYNRVTRGLEKAHWLDAACVGASTPDHLSIRGIVPLLITANGHGCRQMCLMDKHGFPRTGPKQAKVVKGFQTGDMVKAVVTKGVNIGTYVGRVAVRATGSFNITIKQGKTVQGINHRSCAALHKCDGYSYR

SEQ ID NO: 7731 - protein, 442 aa, unidentified; identical to SEQ ID NO: 2903
  REGION 1..442: note = Human gut metagenome

SEQ ID NO: 7732 - protein, 512 aa, unidentified; identical to SEQ ID NO: 4031
  REGION 1..512: note = Human gut metagenome

SEQ ID NO: 7733 - protein, 415 aa, Bacillus sp.; identical to SEQ ID NO: 2431

SEQ ID NO: 7734 - protein, 460 aa, unidentified
  REGION 1..460: note = Mouse gut metagenome
MSYIAFVIANDNSRLMPTRNPKKVRRLLKEKKAIIYSYEPFTIKLLYKSEKCTQDIELCVDIGYNHQGMSIKSRKQEFVSEERTFLLDEKDKHQEQLKIRRARRNRLRYRKPRFDNRAIPKGWIAPSLRHKKEAGINVILKYCEVLPITSITLEVGNFDTHAIKKYLENGEILEGIDYQHGDTYGYDSLREAIFSRDNYTCAICKKGIKDNVILRMHHINYYNKDRSNRPGNLLTVCTNCHNSKNHGIDGALWGLKPKTDSLRDAAYMNIVKYSFKEDLEKSLKKLNLETPINITYGAVTKRQRLKLNIPKTHANDAYCMGSFRPKYKIKTRYFKKIRRNNRKLEKFYDSKVLDTRTNEYMKGNELSCNRTNRSVPRNNPLNERIYRGPKKSKGKRVIRKTHYKYKSGDIVNIKGMKGHYLCKGINNLGKTAKILVDNKYIYPSTSKLSIHKYSNGWIET

SEQ ID NO: 7735 - protein, 411 aa, Clostridium sp.
MEYSFVIDKNNKPLAPTKVNKAWYLIRKGRATLKSKYPMVIQLKKEIEAGEDNDETHIMCGIDDGSVHVGIAIVQKCSTKNKVIFKGTIEQRQDVKHLLDVRRGYRKYHRQHKRYRKPRFNNRSASKRKGRIAPSIKQKKDAIIRTIVWLNRWINISAYCLEDVAIDIRAMTDGYKPYKWQYQKSNRLDENLRKATILRDKCKCQECGKSNCLLEVHHIRAKRYGGANTIGNLITLCGSCHQKTEGKEQSYEEIYFKKINSSPVRLDYAMHVMQGKTYLREQILQLGFLHLTTGGDTANKRILWDIEKSHSNDAICITGCKPDNCNIKEWTIKPMRRKSKAKTDNVLGIKHRDLVSYTYKNGETHTGYVTALYPELNALNFQSDTKHCKKVNARKCKLLWKYNKIYWLECA

SEQ ID NO: 7736 - protein, 416 aa, unidentified
  REGION 1..416: note = Human gut metagenome
MVYVLDKNGQPLMPTDRHRKVRLMLQSGQAKVIKRCPFTIQLNYDSGHQTQEISLGIDAGSKHIGVSATTKIKVLYEADVELRNDIVDLLSSRRELRRGRRNRKNRYRQAKFNNRRRGNGWLAPSIRQKIGTHLTVVENICKILPISRIMVETASFDIQKIKNPDIQGAEYQQGDQLGFWNVREYVLFRDGHTCQCCKGKSKDKILNVHHIESRKTGGNAPNNLITLCETCHTGYHKDTVQLPKAIKRGMRFKDAAFMGIMRWAFYEALKQQYEPVGTPVHNTYGYITKHTRIEHNLPKEHYVDARCISGNPDAFPNGEYYYQKKVRCHNRQIHKLTILKGGIRKQNQATYLVKGYRLFDKVSYQGKGYFVFGRRQSGFFDIRTLSGEKVNKGSLSCKKLKFIATRTYYLTERRAV

SEQ ID NO: 7737 - protein, 430 aa, unidentified
  REGION 1..430: note = uncultured bacterium
MQVVYVLNKDGLPLMPTHKLGKVRHLLKDGKAKIVKRNPFTIQLNYECGNYIQPITLGVDAGSKHIGLSASTEKEELYSSDVELRKDIVDLLSTRRQNRRTRRNHLRYRPARFDNRKKEDSWLAPSIRQKIDSHLKVIEDVHKILPITNIIVEVASFDTQLLKAEAEGKTISGTDYQKGEMLGYNTREYVLFRDNHTCQHCHGKSKDKVLEVHHLESRKTGSNAPNNLITLCKTCHEAYHKGKIELKQKRGAKYNDAAFIGIMRWAFYNKLKEIYPNVSLTYGYITKYNRINLGLEKEHYNDAYCIAGNFNAKPLNTFIYQKKVRCHNRQIHKSNLLKGGVKKRNQAPYLVKGFRLFDKVKYQNTECFIFGRRSSGYFDIRKLDGTKIHSFINYKKLELLNARENFIKEERSRQFLSRPLKEGEVSLPTC

SEQ ID NO: 7738 - protein, 434 aa, Moorena sp.
MTYFRVEILSERMFCVVYVLTIDGKPLMPCSSVIARLLLKQGKAKVRRRTPFTIQLLYKTKTEYTQPLTHGLDSGSAKVGSAVSDEKGNVLYMSQMEIRNDITEKMKQRSKYRRNRRNRKTCYRKARWLNRKNSTKKDRFSPTMTSKINSHLKEMKFVESILPITRQIVETATFDPHALKNPAVLTNKWLYQKGMNYGYANTKAYMLTRDGYRCQHCKGKSKDKRLEVHHIIFRSMGGSDEESNLITLCKTCHDALHRGEIELKKRGKKKGQLNHATQMNSIRMQLLKRTHAEETFGFVTKEHRQFMELPKEHYFDAVTIATEGKGARFQTNQVLFKRCVSDGDYQQTKGVRSEQVIPTGKLFGFRKFDKVQYKGKEYFIKGRMSSGYAILMDTEGNKVDLKPIPKFSKMERVSARKSWMAIQKNIPIYYSCAT

SEQ ID NO: 7739 - protein, 430 aa, Anabaena sp.
MSNFVFTVDTNKQPLNPVHPGQARRLLNLQQAAVYRRYPFTIILKYAVPNPEIQTHQLKIDPGSKTTGLAILQSNKVLWGAELTHRGQQIKNNLESRRAIRRNRRNRKTRYRKPRFLNRTRKPGWLPPSLESRVKNILTWVKRITRYVPITGISQELVKFNLQSMQNPEISGKEYQQGELTGYEIKEYLLEKWDRKCAYCGVENVPLEVDHIHPKSKGGSDRISNLTIACHRCNQAKSNKHVKDFLAKKPDVLFRILRQAKQPLKDAAAVNSTRWVLFNTLKQTGLPVEIASSSRTKYNRIHLNLPKTHWLDAACVGLVEKLQVLTSQPLLIAAKGWGSRQMCTPNKYGFPIKHKTRCKTFFGFQTGDMVRAILPSGKFAGIHVGRLTVRESGVFEMRTAKGKVSPVRYKYCKSIQRNDGYMYAFSINVR

SEQ ID NO: 7740 - protein, 458 aa, Tolypothrix sp.; identical to SEQ ID NO: 2937

SEQ ID NO: 7741 - protein, 427 aa, unidentified
  REGION 1..427: note = Human gut metagenome
FAAVIETRNKEIKKLMADRKKSRQASRRGERKARQRLAKRYGSMVKSGMIIRKLPMYAADKFVTCKFIRNTQARFCNRKRCPDWITPTVQHLVQTHLNIIRKISRYLPVTDIAFEVNRFAFMHMENPEAMGVDFQNGPLKGYGDVKEAIRTQQHGKCLMCKKPIAHFHHIVPRSRGGSDTIQNLAGLCPECHTKVHTDTAFRKDFDEKKSGQLKKYGALSALNQAVPFICKKLLEEYGEEHVHFCRGLDTSLIRTALGFEKTKKNQMHEVDAYCIGLAALEVNEVETPAFDHTFQIRQFRRQDRSIIHHQTGRSYYQGKEKVAQNRKPGFEQKTTALSQWYEEQVRIHGEKEAEKLRSQLWVEKSCRHYNDMDRFLPGAVFLYEGKRYVLSGRITNGKYLRACGQGMKNFPAAECTFIRHNAGLVFI

SEQ ID NO: 7742 - protein, 532 aa, unidentified
  REGION 1..532: note = Mouse gut metagenome
VTTTAVAPADGFPVRGTAEPAGSWGRHYPGASAPGVYIPCKGDIRMVYVLDKDGRPLMPTGKHAYVRILLKTGRAKVACVHPFTIKLNYDTTYNVRPVVLGIDPGRTNIGLCAVTEAGKPLFTAEVRTRNKDIPGLMAARKAFRQAHRKHRRREKRQRRALANGTALKDGRIERRLPSYGKDKTVTCNVIRNKQARFSNRRRPEGWLTPTASQLLRTHLNLVRKVSGFLPVSKVVLELNRFAFMRLDDPSVSGSMFQHGLLYGYDGSVESAVYALQDGKCLLCGAPIGQYHHVRERRRDGSETVRNRVGLCTACHGLVHTDVTARDRLAVLASGMRKKYGALGVLNQIIPHLMEGLSALYDVSATAGWETEEFRELHGIPKDHYLDAYAIACSALENLEVCVPNECYHICQFRRHDRKACEREMYNRNYVLDGKTAARNRHKSMGQKADSLAEYVRKGGRTDCLRVKHIRRAMKDMARHYPGCQIIRNGRAATLMKRAEGSYWFDDGTKSTVRRTDITLNNSGLVFVSNTLA

SEQ ID NO: 7743 - protein, 487 aa, Lactobacillus sp.
MGPSTREKTAARQRLSLDNLVEGYPHELKSDELDAVVRSLYLTNNTHQKEGIMQNRVFVINRQGEPLMPCKQQKCRKLLQAGRAKVVKKEPFTIQLLFGSTGYRQPVSIGVDSGQHHIGLAVTSQDKVLFQGEVSLRQDVHKLLNTRRDYRHGRRARNTRYRPARFLNRAKPTGWLPPSVASKAQHNIHWIQRLQAVLPKAELHIEVGKFDMAKMKQPGITGLGYQQGDLYGYETAKQYVLDRDNYTCQICHGKTKDPKLKIHHIIYRSTGGTNQVSNLLTVCATCHTQANHQPGGKLYALLAKKFQSYRSLKGATFMNILRRRLFKAFPEASFQYGAQTTLDRAKLELPKAHYNDAVTISGIQNIAQQPTAVVIFHQFRKKKRSLHEATARKGRKTPNITSKRNDKNTKFSKGFYLNDYVQLPGGQKGNISGFSGKTTCYVKDGGNHYLTIDPKYKQVNLSKLKVIRHQNNWNVAEIRTAVYTMAG

SEQ ID NO: 7744 - protein, 296 aa, unidentified
  REGION 1..296: note = Human gut metagenome
INAHLSRIEAVLRLLPVTKITVETASFDLQLLKNPDISGKEYQEGEQLGFWNIREYVLCRDGHVCQHCYGRSKDPVLNVHHLESRRTGGDSPGNLITLCETCHKALHRGEITLKAKRGQSFRAEAFMGIMRWEVLNRLKASHPELEVNNTYGYRTKHARIANDIAKSHCADAFCIAGNLGAERLGEFFFQKQTRRNNRQIHKLSILKGGIRKRNQAPFEVNGFRLFDKVACQGEEGFIFGRRSSGYFDVRKLDGTCISAGISYKKLHLLEKRRTYLTEIRKEEALPPLPEGRGLRA

SEQ ID NO: 7745 - protein, 442 aa, unidentified; identical to SEQ ID NO: 2939
  REGION 1..442: note = Human gut metagenome

SEQ ID NO: 7746 - protein, 413 aa, unidentified; identical to SEQ ID NO: 3476
  REGION 1..413: note = Human gut metagenome

SEQ ID NO: 7747 - protein, 413 aa, unidentified; identical to SEQ ID NO: 2636
  REGION 1..413: note = Human gut metagenome

SEQ ID NO: 7748 - protein, 442 aa, unidentified; identical to SEQ ID NO: 2903
  REGION 1..442: note = Human gut metagenome

SEQ ID NO: 7749 - protein, 388 aa, Moorena sp.
MSNTNYVFVIDTSKKPLQPCKPSVARRLLNSGKASVWRRFPFTLILKKAVEPVEKSLILKIDPGSKFTGIALLDGFQVIWMLEIQHRGSLISEKLQKRSQRRRARRTKNLRYRKPGNPNKKKPKDWLAPSLMHRVETIMTWVKRLIKFCPVESISMELVRFDTQLIQNPEITGYQYQQGELAGYELREYLLEKWGRQCAYCGQTNTPLEIEHIHPRSKGGSDRVSNLTVACTKCNQLKSNRDVKEFLSGKPELLRRILTQARSPLKDAAAVNSSRWKLFNTLKTTGLRVITSSGGQTKFNRRKHKLPKAHCIDAACVGEVNQLNFHTTQALVAICKGQGGRQKAAVNKYGYPIRYNPLKPIKGWNSGDLALNIETGEVGRVNPRSFIK

SEQ ID NO: 7750 - protein, 428 aa, Moorena sp.; identical to SEQ ID NO: 4440

SEQ ID NO: 7751 - protein, 262 aa, unidentified
  REGION 1..262: note = Human gut metagenome
LNKEKEKVFIETAEFDLQLLKAIQEGKPIPEGEDYQKGEMYGSYNVRQYVLWRDNYTCICCGVRGTPKNPVRLHVHHFESRKHGGNAPDNHGTLCDDCHKKFHLGIITDVKLKTRRRQSTRDAAFMGIMRKTLMWRLRTELFIPVAETKGYITKATREKLLVLPKSHTRDALAIAQGRHGFGIKEYAYVEPANHIYTVRPVRHHNRQLHKASILKGGIRKRNQASKYVSGFRLYDKVLYQGKECFMWGGEQAEAFFFEQLTV

SEQ ID NO: 7752 - protein, 398 aa, Moorena sp.
  SITE 26: note = misc_feature - Xaa can be any naturally occurring amino acid
VLQTTNPFQHWRRITTDRKVEQTEPXKQPITLGVDAGYKHVGLSATTAKEELLASEVELRQDVTGLLSDRLALRRARRNRKTRCRAPRFDNRVRSKHKGWLAPSVENRIRAHLSRIEAVLRLLPVTSVTVETAAFDMQKIKNPEIEGEGYQQGEQLGFWNVREYVLFRDGHVCQACKGRSKDLILNVHHIESRKTGGDAPGNLITLCEACHKAYHAGKLKQFSPRRGASFRAETFMGIMRWTVLNRLRERHPELPVTNAYGYLTKHKRIVAGLPKTHCADAFCIAGVLDAKRRGEYLFQKQTRRHNRQIHKLTILKGGVRKRHQAPYLVHGFRLFDKVLCKGEVGFIFGRRSSGAFDVRRLNGTKISAGISYKKLSLLEKRKMFLTELRKEGRDSSRV

SEQ ID NO: 7753 - protein, 455 aa, unidentified
  REGION 1..455: note = Sediment metagenome
MQKFEAKFQNVPMDAPQVHSSTSTLLNRDQNLSEVSIVRTSNNLEVDLLQHKGEQGLRVPATAYVLNQRGRPLMPCSERKARVLLQKGEAKVIRNYPFVIQLMKATGEQVQQCFLGIDSGYKYVGFSAITDKKEIVCGTFTLDGKTSERLTERRMHRKNRRNRLWYRKPRFNNRMRKVGWLPPSIQRKFNTHITLINILKKLLPTERVTIEVGNFDIQRIENPDIKGIQYQQGSLFEHQNMRSFLMAREHGKCQLCGKEFSKTNPSHIHHIIPRNKGGTDREKNLALLHKKCHDKLHKKSLYNSLKKNKQYKEATFMSIIRNKFRETIVGCRIVFGNETFVKRQQLRLEKSHSNDAFVIAGGTTQIKTIPNDMGQKHKNNRSLQTVRRRLGICVRRKRYSIQPFDLVTVDNLKYVSRGCSNRGKIVLCSRNNIDYKIYIKRVEDVFHTKSIYNII

SEQ ID NO: 7754 - protein, 414 aa, unidentified; identical to SEQ ID NO: 4252
  REGION 1..414: note = Human gut metagenome

SEQ ID NO: 7755 - protein, 425 aa, Aphanothece sp.; identical to SEQ ID NO: 6227

SEQ ID NO: 7756 - protein, 422 aa, unidentified; identical to SEQ ID NO: 3922
  REGION 1..422: note = bioreactor sludge metagenome

SEQ ID NO: 7757 - protein, 431 aa, unidentified
  REGION 1..431: note = Human gut metagenome
MPNKVYVINKHGRPLMPCSPAKARHLLDEGKAKIKKRTPFTIQLVYGSSGYTQEVILGVDAGSKTIGMSASTTKEELLSAEVKPRNDVVDLQSTRREFRRARRNRKTRYRKPRFDNRVRSKHKGWLAPSVEVKIQEHITSIKMVCRILPVSKVVIETAEFDLQLLKAIADGKPVPQGEDYQKGEMYGHYNVRQYVLWRDDYTCQCCGAHATKKKEVWLHVHHLESRKVGGDAPDNQVTLCESCHEKLHKGLITEKDFKKRKRRSTRDATFMGIMRKTLMQRLCSELPIPVVETRGYITKATREKLLVLPKSHTNDALAIAQGKRGFNVGYLPGIIQTDKIYTIRPVRHHNRQLHKAAILKGGIRKSNQVGKYVFGYRLFDKVQFNEQDCFIWGRRTTGIFTIKTINGKMIKDGISFKKLKLAEKSTSYLIA

SEQ ID NO: 7758 - protein, 419 aa, unidentified
  REGION 1..419: note = Human gut metagenome
MVYVISQDSKPLMPCSNVIARLLLKQGKAKVKRREPFTIKLTCETTNYTQDLTLGVDTGSGTIGTAVSKNNGDIVYMAEVVVRNDITDKMTQRAKYRRNRRNRKTRYRKARWLNRANSIRNDRFSPTMQSKLHSHIKEIEYIKSILPVTEMVFETGQFDTHLMKNPSLINPKVKHWGYQKGTNYGFENTKAFVLNRDNYTCQYCKGKHKDSKLEIHHIVFRSQGGSDEESNLITLCHTCHKDLHSGKINTKLSGKIKGNLKYATQMNSIRKQLFRLYPNAIETFGYVTKANRLHLGVDKEHYYDACTIATQGNAFNVKSNLYKKKCVSDGDFQQTKGIRSEQSIVTDKICGFRKYDKVKYFGREYFIKGRMSTGYAILMNINGEKADFSYLPRGFKTPKLSNCKRITARTSQMVQAVAI

SEQ ID NO: 7759 - protein, 431 aa, Klebsiella sp.; identical to SEQ ID NO: 2435

SEQ ID NO: 7760 - protein, 458 aa, Moorena sp.; identical to SEQ ID NO: 7062

SEQ ID NO: 7761 - protein, 411 aa, Sulfobacillus sp.
MFVYVLNQHGQPLMPCSPRKARVLLKQNKAKVVNRTPFTIQLLYGSSGYKQGISLGVDAGTKHVGLSATTDQRVLYEAEVLLRTDIQELLATRREFRRARRNRKTRYRPSRFNNRKRPEGWLPPSIQNKVDAHVKVIGQVAKLLPITSITVEVAQFDTQLLKHPEISGVAYQQGEQMGFWNVREYVLFRDQHTCQWCHGKSGDKVLNVHHRESRKTGGDSPDNLVTLCETCHRDIHQKGLEDRVKRKTASLRDATQMTILRWFVYNGIKAVYPNAKLTYGYITKNTRIRHGLAKSHTVDARCISGNPNASPSEHFFLIRQVRRQNRQLHKAKIIKGGVRKANKAPRYLFGYQLFDKVQYEGQECFVFGRRSNGSFDLRLLDGTKITAGVSYKKLKLIERASAMLVQIQKTR

SEQ ID NO: 7762 - protein, 456 aa, unidentified; identical to SEQ ID NO: 4017
  REGION 1..456: note = Human gut metagenome

SEQ ID NO: 7763 - protein, 430 aa, unidentified; identical to SEQ ID NO: 4310
  REGION 1..430: note = Human gut metagenome

SEQ ID NO: 7764 - protein, 420 aa, unidentified
  REGION 1..420: note = Human gut metagenome
MQYVYVLNKHGEPLMPCSPGKARLLLKQQKAHVIKRTPFTIKLLYGSTGYKQPITLGVDAGSKHVGLSASTEKRELYREEFTPRNDVVDLLSTRKQNRRSRRNRKTRYRPPRFDNRVHSKHKGWLAPSVEVKIQEHITVIKRICRILPITLVRVETAEFDTQRLKAMLEGKPLPVGTDYQLGEMYDEYNVRQYVLKRDNYTCQCCGAHTTAKKAVKLHVHHLESRKMGGNAPGNLITLCITCHDALHKGKVSLDNKKRGKPMRDAAFMGIMRRTLMSRLREELPITVQGTYGYITKMQREQNDIKKSHVNDARCISKHPLAEPCSVCYRTKAIRHHNRQTHKANFSKGGIRKRSQMPYVVEGYRLWDKVLYKGQECFVSGRRTSGSFTLKKLDGTRISKGVTFKKLRLLEPATNYLIERM

SEQ ID NO: 7765 - protein, 411 aa, unidentified; identical to SEQ ID NO: 6901
  REGION 1..411: note = Human gut metagenome

SEQ ID NO: 7766 - protein, 410 aa, Finegoldia sp.
MVVYVLNIDNKPLMPTTRFGKVRRLLRNKKANVVKRTPFTIKLLYRTDNNVQDITLGVDSGSKYIGLSASTENKEIFSAEYELRNDIVKKLSSRRECRRTRRNRLRHRKARFNNRVSSKKKGWLAPSIRHKVNSHLKIISDVCSIIPIKKIIVEVASFDMQKIKNPDISGVEYQQGEQLGFWNIREYVLFRDNHTCQHCKGKSKDPILNVHHIESRQTGGNSPNNLITLCESCHNAYHKGKIKLNIKRGKSLKDSAFMGIMRWALYNRLKEIYDDVSLTYGYLTKNKRIENNLPKEHKIDAFCIANNLSAKLSDTTFYFKKVRCHNRQIHKANYLKGGIKKNNQASYLVKGFRLFDRVKYQDKEYFIFGRRSSGQFHIRDLSGNKVNKGSISCKKLEFIEPRKTVLVERR

SEQ ID NO: 7767 - protein, 373 aa, Moorena sp.; identical to SEQ ID NO: 3006

SEQ ID NO: 7768 - protein, 406 aa, unidentified; identical to SEQ ID NO: 6445
  REGION 1..406: note = Human gut metagenome

SEQ ID NO: 7769 - protein, 442 aa, unidentified; identical to SEQ ID NO: 2637
  REGION 1..442: note = Human gut metagenome

SEQ ID NO: 7770 - protein, 427 aa, Anabaena sp.
MCKVFVIDNEKRSLNPIHPAQARQLLKRGKAAVFRRFPFTIVVKESYTDATVSPLRLKFDPGAKYTGIALVNDVNGEVVFAAELKHRGFAIRDALTSRRQLRRSRRSRKTRYRQPRFFNRTRPQGWLAPSLQSRVENIKTWVNRLRKVAPITAISQELVKFDTQLIRHPDIQGKEYQQGTLAGFETRQYFLEKWNRECAYCGIKDVPLQIEHIHPKSKGGSNSITNLTLSCEKCNLKKGTQDIKNFLKKDKSRLEKILALTKKSLADAAAVNTTRFALLEVLKSTGLPVEIGSGGLTKFNRTQQGLNKSHWLDACCVGASTPILKIKGIRLLLITANGHGTRQSCRTDKYGFPIRHCSRTKFHFGFQTGDIVKAVVTKGKKIGTYIGRIATRATGSFNISTVQGLIQGISHKYCKTIHKKDGYAYAI

SEQ ID NO: 7771 - protein, 512 aa, unidentified; identical to SEQ ID NO: 3680
  REGION 1..512: note = Human gut metagenome

SEQ ID NO: 7772 - protein, 427 aa, Moorena sp.; identical to SEQ ID NO: 3216

SEQ ID NO: 7773 - protein, 430 aa, Oscillatoria sp.
MSNFVFVVDTNGQPLNPVPPGQARRLLKLQKAAIYRRYPLTIVLKYTVSAPQIQPHQLKIDPGAKVSGLAIVRDDKVIWGAELTHRGQQIKHDLASRRALRSHRRNRKTRYRQPRFLNRTRKSGWLPPSLESRVENILTWVNRIRRYVPITGISQELVKFDTQAMQNPEISGIQYQQGELAGYEIREYLLEKWGRKCAYCNAQNIPLEIEHIHPRSKGGSSRVSNLTIACRHCNEAKGNQELKDFLAQQPELFDRIAKQAKQPLKDAAAVNSTRWQLFNRLKETSLPVEIGTGGQTKYNRTRLELPKTHWLDAACVGLVSQLKILTAGPLLIQASGWGSRQICQPNKYGFPIRHKTRCKEFFGFKTGDMVQATLPTGKFAGTHRGRLIVRASGVFEMMSPTGKVSPVRHKYCRAIHHNDGYTYTLSTCVQ

SEQ ID NO: 7774 - protein, 420 aa, unidentified; identical to SEQ ID NO: 7764
  REGION 1..420: note = Human gut metagenome

SEQ ID NO: 7775 - protein, 470 aa, unidentified
  REGION 1..470: note = Human gut metagenome
MSVFVVGLNGCRLMPVSERKARLLLKGGKASVYRKVPFTIKLNYKTGSTVQPGYLGIDTGSQHIGVSVVRKDGTVLHKEEIGLRDSMSKRKLLESRASSRRGRRYRKTRYRHPKWKPKTKRIYNEKADRKGRHWKKQKNTFTSKRQAGWLPPSLQSKTGHHIQWIRKLLDLLPEGYRLSIELGRFDPARMKDPEIHGELYQKGPQYDYENVRAYVLARDGYTCRVCKKKGGKLHVHHILYRSRGASDNPKYMAAVCSKCHTTENHLPGGILYQWMQDQKKFTRGLRDATFMNILKKRLRKAFPDAVFTYGNITKADREKLELPKSHGNDATAIALVKTEVKSVKDEEPVIHIQQVRRKKRSLHEETPRKGRKEPNRTASRSDKNTKSVTVTKGSGEKKASMTACLFDRVELDGKKGWITGFTGTSCYVKDKEDNYICTSSKYKQVSISRLRILHHCGNWAIGAEKPLGKG

SEQ ID NO: 7776 - protein, 462 aa, unidentified
  REGION 1..462: note = Human gut metagenome
MSVLVIGSNGRALMPTNPRKARLLLKKKTASVVCRHPFTIQLLYKTGCATQEGCIGIDTGSQHIGVGVTCGDRVILKEEHELRSSMEKRSLLVARAAMRRGRRYRKVRYRKPKWRHHTKCMYFEKPNRRGQHWRKVKTTTQSPRPKGWLPPSLQSKCDHHFRIIDRYLKYLPDSITRNLVIEVGRFDMARMNDPMIHGEMYQRGPMYDAENLRAYIFARDGYQCACCKAKAGTTRKADGTTVKLVAHHILFRSRGATDNPKYMVSVCDHCHTTKAHQPGGILYSWMENNKKVTRGLRDAAFMNILRQRLFARYPQAAFTYGNITATDRKQLRLPKSHANDAVAISLFGKEASAVRDTCQTVHYKQVRKSKRSLHEAIPRKGRKNPNTKAVRNKKNTTQVNGFKLWDSVLADGKKLFICSFTGTSVYLVDKNGCYVSQPGKTYKQWPLSKLKRLHPNGNWLVT

SEQ ID NO: 7777 - protein, 415 aa, unidentified
  REGION 1..415: note = Human gut metagenome
MENRIEYCFVVDKNNRPLTPTKVNKGWYLVRKSRAKLKSKYPMVIQLEKEVKSDEDDESHIVCGIDDGSAHVGLAIVQKCPTKNKVVFKGAIEQRQDVKHLMDVRRGHRRYHRYHKRYRQARFNNRSSSKRTCRLVPSIKQKKDAILRVLYQLNKWVNIQEYHLEDVCIDIRALTDDYKPYRWQYQKSNRLDENLRKATILRDECRCQECGKSNCVLEVHHIRARKYGGADTIGNLITLCSGCHQKTEGRERDFEDRYFNMIKSKPKRFDYAMHVMQGKTYLREKISELGSLHLTNGGETANKRIEWNMEKSHGNDAICVTDCIPDNCDVKEWIIKPMRRKSKAKTNNLLGIRHRDLVSYTYKNGETHTGYVTALYPEQLVLNFQSKTKHCKKVNARKCRLLWKFNKIYWLEQCV

SEQ ID NO: 7778 - protein, 442 aa, unidentified
  REGION 1..442: note = Human gut metagenome
MVTVQQSTHHLPFGRVFIRRNLFMVYVISQDGKPLMPCSDPIARLLLKQGKAKVKKREPFTIKLTYETTNHTQGLTLGVDTGSGTIGTAVSKDNGDIVYMSEVVVRNDITDKMTQRAKYRRNRRNRKTRYRKARWLNRSNSIKKDRFSPTMQSKLHSHVREIEYIQSILPVTEMVFETGQFDMQLMKNPSLANPKVRPWGYQKGANYGFENTKAMVLNRDNYTCQCCKGKHKDSKLEVHHIVFRSQGGSDEESNLLTLCHTCHKDLHSGKINPKLSGKLKGNLKYATQMNSIRKQLFRFYPNAIETFGYVTKANRLHLGVDKEHYYDACTIATQGNAFNVKSNLYKKKCVSDGDFQKTKGIRSEQPIVTDKICGFRKFDKVRYFGNDYFIKGRMSTGYAILMDIDGNKIDFSTMPRGYKTPKLSNCKRITARSTVMTQVKVV

SEQ ID NO: 7779 - protein, 417 aa, unidentified
  REGION 1..417: note = Human gut metagenome
MPCSPAKARLLLKERKAIVKRRTPFTIQLTIATGEAKQPVALGVDSGYKHIGLSATTEKAELYASEVELRQDITDLLSARLALRRSRRSRKTRYRAPRFDNRVASKREGWLAPSVENRIAAHMSRVEAVMQVLPVTAITVETAAFDTQLLKNPDIIGAAYQQGEQLGFWNVREYVLFRDGHVCQHRRGKSKDPILNVHHIESRRTGGDAPNNLITLCETCHKAFHRGEIKLKVRRGKSFKAETFMGIMRRTLFERLKKAHPELNVRNTYGYLTKHKRISYGIAKSHCADAYCIADNLGAKRLEGFFFQKQTRKHNRQIHKLLILKGGLKKKNQAPYEVKGFRLFDKVICKGEEAFIFGRRTSGSFDVRRLDGTRISAGINYKKLRLLEPRTTYLTEFRKEAALPPLHKCRGFCAEFL

SEQ ID NO: 7780 - protein, 499 aa, unidentified; identical to SEQ ID NO: 3843
  REGION 1..499: note = Human gut metagenome

SEQ ID NO: 7781 - protein, 429 aa, unidentified
  REGION 1..429: note = Human oral metagenome
MFVYVISKDGQPLMPTTRFGKVRRLLRDKKAKVVRRCPFTIKLLYEPKTSVVQEVILGQDTGSKYVGTACVANDKVSYQSEVTLRDNIKKKMDSRRGSRRNRKQRKTRYRKPRFLNRANSIKKDRLPPSVRHKVQAHVDEIEFCKKILPVSELVFETGKFDTQLMEKPWLQKYKWAYQKGVNYGFANARAHALDRDNYTCQCCGKKHVRLEVHHIIFRSLGGSDELDNLITLCEKCHIDIHAGKITLNLKGKRKRNLKHATQMSIIRSQLLKLYPDAIETFGYVTKANSENLGLSKEHCLDACVIASSGKEFEQSNWLFKKRRVARQNRQLCKGTHGETKLPTGKILGFRKCDKVKYLNEICFIKSRRSSGYFTLMDIDNTILDFRDRGGRKSPSYKLLERLNLQRSTLCIGQRIQRGERGNSCTKLKI

SEQ ID NO: 7782 - protein, 430 aa, unidentified; identical to SEQ ID NO: 4817
  REGION 1..430: note = Human gut metagenome

SEQ ID NO: 7783 - protein, 442 aa, unidentified; identical to SEQ ID NO: 2834
  REGION 1..442: note = Human gut metagenome

SEQ ID NO: 7784 - protein, 414 aa, Tolypothrix sp.
MSNFVLVLDTNKRPLDPVHPGTARKILTDKKASVFRRHPFTIILKDAFPSIAVKPIKIKLDPGSKTTGIALVQEGKVIFGAELQHRGQAIKGELETRKAVRRSRRNRHTRYRKPRFLNRVRRSGWLAPSLEHRVKTTMTWVNKLIRFAPIAEIFQELVRFDLQQLENPEISGIEYQQGELQGYEVREYLLEKWSRKCAYCNVENVPLQIEHIKPRASSGTNRISNLCLACEKCNIKKGTQDVALFLAKKPEVLKRVLSQAKCPLKDAAAVNSTRWTLFNALKETRLPVIVASGGKTKFNRRKLELPKTHWIDAACVGDCLSLKILTAKPLLIKSTGKGTRRLCRVNKLGFPCSKPRTTYTHGWNTGDIALCKGVVGRVVVQSSTRLEVRVDGKRIGGKLSDFRKLHNKDSYSYA

SEQ ID NO: 7785 - protein, 416 aa, unidentified
  REGION 1..416: note = Human gut metagenome
MTNCENYAFVLDAEGKQLSPTKEKKAWYLIRKKRAILVSKYPMVIQLNKIVSNDNICKDEIRCGIDDGGLHVGIALVQKCQTKNKTLFKGTIEQRNDVKHLMKVRWDYRRYRRYHKRYRPKRINNRSSSKRTDRIAPSILQKRQATLRVITQLNKWINITSYWLEDVAIDVRVLTDGFSSYGWQYQKSNRLDENIRKAVILRDGCRCMECGQSNCRLEVHHIKPRRLNGSNTLGNLITLCESCHQKTEGKEEQYMQHYFNILESSDNKNLNYASYVMIGKTWLRKQLSQLGVLNLTTGGNTANKRIDWNIEKSHSNDAVCITDLQPDSCNVKDWIIKPMRRQSKAKTDNVLGIKHRDLVSYVYKNGELHTGYVTALYPELNALNFQSPTKHCKKVNVRKCRVLWKYNKIYWLDSVS

SEQ ID NO: 7786 - protein, 442 aa, unidentified
  REGION 1..442: note = Human gut metagenome
MSTSVFVLDKKPRPLMPCRPARARRLLRAGRARVVKRFPFVIRLVDRTVEQSEVQPVLIKLDPGSRETGAAVVRDDEKKRHHALAFFVIKHRGGAIRDALKARSAFRRRRRSQNFRCRSPRFLNRVKPKGWLPPSLRHRVETTLSFVRRMCRYLPVSGIATELVKFDSQKLQNPEVSGVKYQQGTLFEYEVREYLLEKFGRKCVYCGAEGVPLNIDHVVPRAKGGSNRVSNLVLACVSCNQKKGARSLEDFLKGKPEVLARVRRELKTPLRDAAAVNATRWVLFNELKATGLPVETGSGALTKLNRHAFGVEKEHWLDALCVGRLNGVVTRKGLNVLEIRCMGRGSRQRTRLTKYGFPRGYLMRQKCVHGFATGDMVETNVPKGKKAGLWRGRVAVRVSGSFNIQTPKGVIQGVGWKHCRLISHNDGYGYAWLGHAPHSSPA

SEQ ID NO: 7787 - protein, 509 aa, unidentified; identical to SEQ ID NO: 7126
  REGION 1..509: note = metagenome

SEQ ID NO: 7788 - protein, 455 aa, unidentified
  REGION 1..455: note = Human gut metagenome
MVFVLDRHHKPLMPCHPARARRLLGKGRARIHKLYPFTIRLVDRELKDSTVQPVVLKLDPGSKETGMALVREDETKTHHALYFVNLKHRGSEIKQSLLQRSSFRRSRRSRNLHYRAPRFLNRTRPQGWLAPSLQHRVDTTLSWVERLRKLAPVATLEMELVKFDTQKMQNPEIDGVAYQQGELAGFEVREYLLEKFGRKCIYCGAEGVPLNIDHIVPKSAGGSNRVSNLVLACVDCNQKKNNLPFEVFLKGDKAKINRIRSQLKTPLKDAASVNTTRWQLFEALKLTGLSLTTATGARTKYNRHQFGVPKEHWLDALCVGETAAVRGWQPLGVLVVKCTGRGAYKRTRLTKDGFPRGYLTRTKRFFGFGTGDMVVATVFAGKKKGSYKGRVAVRKSGSFAIQTASRKVDGISYRYCRLLSRADGYGYSWHSSKSLINSTKETALLPRINTQVSAP

SEQ ID NO: 7789 - protein, 430 aa, Clostridium sp.; identical to SEQ ID NO: 3788

SEQ ID NO: 7790 - protein, 424 aa, Mastigocoleus sp.; identical to SEQ ID NO: 6040

SEQ ID NO: 7791 - protein, 433 aa, unidentified
  REGION 1..433: note = Human gut metagenome
MRIGPRAEQAEPAGIRKGDTLKVFVLNMRGKPLMPCSPAKARHMLKAGKAFVVRRTPFTIKLTIATGETKQDVTLGVDAGARHVGISATTEKEEVFASEVALRQDITGLLADRLAFRRARRNRKTRYRAPHFNNRVRSKHKGWLAPSVENRIQAHISRIEAVCRLLPVTKIVIETASFDIQKIRNPEVEGTGYQQGDQLGFWNVREYVLFRDGHICQHCRGRSKDPILNVHHLESRKTGGDAPNNLITLCETCHKAYHAGKIKLKVKRGQSFRAEAFMGIMRWTLLDRVRKTHPKLPVENTYGYLTKHKRIALGLPKTHCADAFCITGNLNALRRGDFLFQRQTRKHNRQIHKCSILKGGVRKLNQAPFLVKGFRLFDKVRIGGQIGFVFGRRVRGLFNIRRLDKTVIGTDINCKKLSLLETRKTFLTELRKE

SEQ ID NO: 7792 - protein, 414 aa, unidentified; identical to SEQ ID NO: 6579
  REGION 1..414: note = Human gut metagenome

SEQ ID NO: 7793 - protein, 413 aa, unidentified; identical to SEQ ID NO: 7120
  REGION 1..413: note = Human gut metagenome

SEQ ID NO: 7794 - protein, 459 aa, Leptospirillum sp.
MSVFVLDKRKTPLMPCSEKRARLLLERKKAVVHRMAPFTIRLKERIGGEVQPVRIKLDPGSKTTGLALVREEILVSPETGETEKTAHVLGLVELEHRGGKIRDRLAARRAFRRRRRSNLRHRTPRFDNRTKPEGWLAPSLQHRVDTTVAWVNRFRKLVPVAALSQELVRFDMQKMENPETSGALYQQGTLAGYEVREYLLEKWGRSCAYCGAENAPLEVDHIHPRSRGGSDRISNLTLACRPCNERKGSNPVETFLARRPEVLARVLSRAKAPLRDASAVNATRWALFRSLTQTGLPVEQASGGRTKWNRTRFGLPKSHCLDAACVGKVDRIEGGNRPVLSIKATGRGSYQRTRLDSFGFPRGILTRKKAHFGFATGDLVRAVVTTGKKIGTYVGRVAVRASGSFNLQAGSGLVQGISHKVCRLLQRADGYGYSLATSNRKESAFLPGINAGVSIARRG

SEQ ID NO: 7795 - protein, 414 aa, unidentified
  REGION 1..414: note = Human gut metagenome
MPCSPAKARLLLKEKKAIVVRRTPFTIQLTIATGEAKQPVSLGVDAGYKHVGLSASTEKAELYASEVELRQDVSDLLSARRALRQSRRSRNTRYRAPRFDNRIRTKRKGWLAPTVENRINVHLSRIETVLRLLPVTKITVETASFDTQLLKNPDIAGKEYQEGEQLGFWNVREYVLFRDGHVCQYCHGRSKDPVLNVHHLESRRTGGDSPGNLITLCETCHKALHRGEIKLRAKRGQSFRAETFMGIMRWEVLNRLKASHSKLEVNNTYGYLTKHARIKSGITKSHCSDAFCIAGNLGAKRLGEFLFQKQTRRNNRQIHKLSILKGGIRKRNQAPFEIKGFRLFDKVACKGEEGFIFGRRSSGSFDVRRLDGTRISAGISYKKLRLLQKRQTYLTEIRKEEALPPLPEGRDLRA

SEQ ID NO: 7796 - protein, 456 aa, unidentified
  REGION 1..456: note = Human gut metagenome
MSTCVCVLSNSGERLMPTFRLGKVRRLLKDGKAKIVKHHPFTIQLLYDSKTNTQPIEICEDVGYNYIGISVKSESHEYVSAQYDTLQDEKKHHDDCRKYRRTRRNRLRYRKPRFDNRKRSEGWLAPSLEHKKQLNIRLIERYVSVIPITRATVEVGSFDTMLLQAIQKGESKPEGVDYQKGPRYNLATLREAVFYRDNYTCQVCGRKIADGAILHMHHMFYWKGRHGYQLDELVTACEKCHTPANHQKGGKLFGFGEDKEFANLSGAAFMNAVRWQIVNALYATYGKEFVTITYGAMTKEKRIILGIEKTHNNDAYAMGDYHLAHRCVFRHYQKRRRNNRVLEKFYDATYIDARTGNKAKGKELFNGRINRNHKKDSENFHKYRSKKVSKGRRSIRRQRYAIQPYDTVRLEGKTYITSGCHNKGTRLLIPANGKSKSVAISKVQVVCHAGAWIQII

SEQ ID NO: 7797 - protein, 414 aa, unidentified; identical to SEQ ID NO: 2588
  REGION 1..414: note = Human gut metagenome

SEQ ID NO: 7798 - protein, 406 aa, unidentified
  REGION 1..406: note = Human gut metagenome
MVYVQDIDGKPMMPTTRHGKVRQLLKDKKAVVINTCPFTIKLMYKTSDYKQEIVLGVDAGTKHVGLSATTKSKELYSGEVILRSDIVELLSTRRESRRTRRNRLRYRKPRFNNRIKSKRLGWVAPSVRHRIDAHIRVIDNICSILPVSRVIVEVAQFDTQKIKNPDISGDEYQEGDQLGFWNVREYILARDGHKCQHCKGKSKDHILNVHHIESRKTGGDSPSNLITLCETCHKEYHKGNIDLKVKRGRSLRDAAVMGIMKWKLYEELKSRYPNVSMTFGYITKYNRIKYGIEKSHTSDAFVISRNFNAKRIERQYLKRLIRRHNRQIHKMKILKGGKKKNNQAPFEIFRFRLFDKVLYNNEILFVYGRRKSGNFNIRDFNGENPKDVSHKKLKLIRGKRHLIILK

SEQ ID NO: 7799 - protein, 414 aa, unidentified
  REGION 1..414: note = Human gut metagenome
MPCSPAKARLLLKEKKAIVVRRTPFTIQLTIATGETKQPVSLGVDAGYKHVGLSASTEKAELYASEVELRQDITDLLSARRALRQSRRNRKTRYRAPRFDNRIRTKRKGWLAPSVENRINAHLSRIEAVLRLLPITKITVETASFDTQLPKNPDIAGKEYQEGEQLAFWNVREYVLFRDGHVCQHCHGRSKDPVLNVHHLESRRTGGDSPGNLITLCETCHKALHRGEIKLSAKRGQSLRAEAFMGIMRWEVLNRLKLSHPELEVNNTYGYRTKHARIANGIAKSHCADAFCIAGNLGAKRLGEFFFQKQTRRNNRQIHKFSILKDGIRKRNQAPFEVNGFRLFDKVACKGEEGFIFGRRSSGYFDVRKLDGTCISAGISYKKLHLLEKRRTYLTEIRKEKALPPLPGGSGLRA

SEQ ID NO: 7800 - protein, 493 aa, unidentified; identical to SEQ ID NO: 2644
  REGION 1..493: note = Human gut metagenome

SEQ ID NO: 7801 - protein, 406 aa, unidentified; identical to SEQ ID NO: 6031
  REGION 1..406: note = Human gut metagenome

SEQ ID NO: 7802 - protein, 420 aa, unidentified; identical to SEQ ID NO: 4588
  REGION 1..420: note = Human gut metagenome

SEQ ID NO: 7803 - protein, 507 aa, unidentified
  REGION 1..507: note = Human gut metagenome
MSEYIYVLGMDGDPQMPTKRKRHVEKMLQTGRARVFRQVPFTIQLTYKNQPVLQPVTIAEDPGRSNIGMAVVSLSGELLSAAVVQTRNKEIVKLMEKRKQHRRASRNGERKARQRLAKKCHTMIKAGSLMRKLPMYGQDKRVQCNVIRNTEARFCNRKREDGWLTPSAEHLVRTHINLIHKMQKFLPITDVAIEVNRFAFLSLEDPSISGVDFQNGPLKGYDDLNAAVEDLQDGHCLMCNSPIEHRHHIVPRSMQGSNTIGNIAGLCCKCHERIHKDARFEDHLKKKKAGLNKRYAAVSVLNQAIPFICKRLEQEFGKEHVHYCSGRDTSMVRRSLGYHKTKEEQLHEVDVWCIAVLALRQIPEKAPEFDHVHEILQFRRQDRSIIDAQTSRMYYHEGKKVAKNRKKAEGQKDDSLQEWRERQVERYGKEQTRKMISQLEIKKSSRRYNRLDRLMPGAVFYYQGVRYVMRGQHSNRQYLQAVGMGSKDFPAKKCKIVVHNEGLVFVS

SEQ ID NO: 7804 - protein, 431 aa, unidentified
  REGION 1..431: note = metagenome
MPNKVYVINKHGRPLMPCSPAKARHLLDEGKAKIKKRTPFTIQLVYGSSGYTQEVILGVDAGSKTIGLSASAETEELLSAEVKPRNDVVDLLSTRREFRRARRNRKTRYRKPRFDNRVRSKHKGWLAPSVEVKIQEHITSIKRVCRILPVSKVVVETAEFDLQLLKAIADGKPVPQGEDYQKGEMYGHYNVRQYVLWRDNYTCQCCGTHPSKKKEVRLHVHHLESRKVGGDAPDNQVTLCESCHEKLHKGLIAEKDFKKRKRRSTRDATFMGIMRKTLMQRLCSELPIPVVKTRGYITKATREKLLVLPKSHTNDALAIAQGKRGFNVGYLPEIAQIDKIYTIRPVRHHNRQLHKATILKGGIRKSNQTEKYVFGYRLFDKVQFNGQDCFIWGRRTTGIFTIKTINGKMIKDGISFKKLKLVEKSTSYLIA

SEQ ID NO: 7805 - protein, 411 aa, unidentified; identical to SEQ ID NO: 3917
  REGION 1..411: note = Human gut metagenome

SEQ ID NO: 7806 - protein, 465 aa, unidentified
  REGION 1..465: note = Human gut metagenome
MSTCVCVLSNSGERLMPTFRLGKVRRLLKDGKAKIVKHHPFTIQLLYDSKTNTQPIEICEDVGYNYIGISVKSEFHEYVSVQYDTLQDEKDCHDGCRRVRRSRRNRLRYRQARFDNRKRDDGWLAPSFEHKKELNVNVIKMYCKVMPITHAIVEVGSFDTMLVKAIEEGKATPESADYQKGPRYKLATLREAVFYRDNYTCQVCGRKANEGAILHVHHMFYWKGRHGNSLSELITVCEKCHTPANHQKGGKLYGFGEDIKFANLSGAAFMNTVRWQIVNVLYAAFGKPFVTFTYGAMTKEKRIALHLEKSHNNDAYAMGSFHPVNRCAFEHYEKVKRNNRILEKFYDSQYIDTRTGELTNGKSLFNGRISRSHKKDSENLHKYRGKRICKGHRALRRKKVALNPGDLVSLNGEILVVHGTHTKKNGSVNVEFKTPSRGGKKSASFKKLKIVKTTDSMHSAWEKMS

SEQ ID NO: 7807 - protein, 544 aa, unidentified
  REGION 1..544: note = Human gut metagenome
MKQKKQKVMVYILNKKGKPLMPTTRCGHVRKLLDSKKAVVVNSNPFTIRLKYDTPNGVQDVFAGIDSGRENIGSGASNEDGDCLYLGELKTSNKSIKLKMTERAGFRKERRRHDRQNKQRKARKDHTEIQNGNADICRTTISCKSVQISYPAAEKSVTHKIIRGKEGKFANRHRDEGWITPSARQLVQMHMNDLKSICKILPISHVTLERVAFDFQKLENENIKAWEYGKGKLYGYDSPEEYIHDVQDGKCLVCGKPHIDYLHHIIPRSKGGSDKVSNLAGLCYDCHYGPIGVHNCQDTQDRLPELKNEVNKQYKVSLLNSVMPVLIEEMDKFCKANSIIFSICEGHDTAKVRDMYDLQKDHCLDGFAISLVGRNVKSVDVMPDRIHQKQRYKKKSKNIIQKRNYREYYDGKKLVAVNRHKGTDQKADSLEEYMNTYAETHTADECKKHFDSLTVKPARRTYTFHKEGRICPLHIGDKVRYEKKNKIKGNTKVETFICESIHFYKDENKAKVEHNKTKSKRMKFCRVLEAGCTPYIDYRKLALM

SEQ ID NO: 7808 - protein, 442 aa, Lactobacillus sp.; identical to SEQ ID NO: 3226

SEQ ID NO: 7809 - protein, 419 aa, Vibrio sp.
MFVFVLNKNGKALMPCKPQKARVLLKRGDVKVIKRTPFTIKLVGGSSGYKQKLVAGMDTGSKTIGYAVVGLGQVIYQSQVALRQDVSKKMEQRAMYRRNRRGRKCRYRPARWANRASMRANGRLAPSLKSKLDSHLRERDFVESILPISEWKVETASFDIHKITNPDVVGVDYQKGAQKGFYNTKAYVLHRDGYKCKSGRKGKHSNKLHVHHIVFRSNGGTDTPTNLITLCETCHRDLHAGKFELKVRKSRTKHATEMGILKSRLKSVWLFTETFGYETKFKREQVLKLTKEHYFDAVAICLEDGELITQNETVYFKRHVSKGDYQLTKGARSEKQIPVGKLFGLKKHDLISTPQGTGFVKGKRSTGYFALETITGEKIHASANVKKNTVRLSARTTTLIQQMEAAFPPAAKATGILAA

SEQ ID NO: 7810 - protein, 458 aa, Desulfobacter sp.; identical to SEQ ID NO: 4473

SEQ ID NO: 7811 - protein, 456 aa, Halomonas sp.
MAIFVLDKKKQPLMPCSEKRARLLLQRGRAVVHKRYPFTIRLKDRVGGSTQPLSLGIDPGSKTTGLALIREPDSQQRHVLCLFELIHRGYQIKKALQQRAAFRRRRRSANLRYRAPRFNNRTKPKGWLAPSLQYRVDTVTAWVNRLNRLAPVTAISQELVRFDTQKLDNPEINGVEYQQGTLLGYEVREYLLEKWGRECAYCGTADTPLEIEHVIPRSRGGSNRVSNLTLSCHPCNQSKDALSLVDFFATDKGLKKRLKANGHTANARLERVQRQLKQPLRDASAINATRWALFNALKATSLPVAVGTGGRTKYNRQRLGIPKTHALDAACVGAFDALHAWQVPTLTIKAMGRGSYQRTRLTKHGFPRGYLMRQKQVHGFQTGDMVRAMVPTGKKAGTHTGRVAVRKTGSFNIQTEQGAVQGISHKYCTLIQRGDGYGYHFTPFTHLTGGAGQAVA

SEQ ID NO: 7812 - protein, 286 aa, unidentified
  REGION 1..286: note = Human gut metagenome
VLRLLPITKITVETASFDMQRLKNPDISGKEYQEGEQLGFWNVREYVLFRDGHVCRHCHGRSKDPVLNVHHLESRRTGSDSPDNLITLCETCYKALHRGEITLKAKRGQSFRAQAFMGIMRREVLNRLKASYPELKVHETYGYLTKHARIANGIVKSHGADAFCIAGNLGAERLGEFFFQKQTRRNNRQIHKLSILKGGIRKRNQAPFEAKGFRLFDKVACQGEEGFIFGRRSSGSFDVRKLDGTRISAGISCKKLRLLEKRRTYLTEIRKEEALPPLPEGRGLRA

SEQ ID NO: 7813 - protein, 416 aa, unidentified
  REGION 1..416: note = Human gut metagenome
MVYVLDKNGQPLMPTDRHRKVRLMLQSGQAKVIKRCPFTIQLNYDSGHQTQEISLGIDAGSKHIGVSATTKIKVLYEADVELRNDIVNLLSSRRERRRGRRNRKIRYRQAKFNNRRRGNGWLAPSIRQKIGTHLIVVENICKILPISRIMVETASFDIQKIKNPDIQGAEYQQGDQLGFWNIREYVLFRDNHTCQCCKGKSKDKILNVHHIGSRKTGGNAPNNLITLCETCHTGYHKGTVQLPKAIKRGMRFKDAAFMGIMRWAFYEALKQQYEPVGTPVHDTYGYITKHTRIAYNLPKEHYVDARCISGNPEASSNGEYYYQKKVRCHNRQIHKLTVLKGGIRKQNQATYLVKGYRLFDKVSYQGKGYFVFGRRQSGFFDIRTLSGEKVNKGSLSCKKLKFIATRTYYLTERRAV

SEQ ID NO: 7814 - protein, 270 aa, unidentified
  REGION 1..270: note = Human gut metagenome
LSIKTLINIGKGVIYSSICTGLSLQTYQKRKEVPYMVYVLDIDGQPLMPTTRHGKVRRLLNSHLAKVVKRCPFTIQLLYQSTKETQPVSLGVDAGSKHIGMAATTEKKVVYQEELSPRNDVVKLLSARRTLRRTRRNRKTRYRKPRFNNRVHSKHKGWLAPSVEVKIQEHITATKRICQILPIFDIHVETAEFDLQRLKAMDEGSPLPVGIDYQLGEQYDFYNTRQYVLHRDGYTCQCCGTHDNNIKLHMHHIESRQTGGDAPNNLITLC

SEQ ID NO: 7815 - protein, 458 aa, Lactobacillus sp.
LKGVGMMSEIKKVDYIYVVDSKGTPLMPTSRLGMVRRWLKTGQAKWFGNSRNTIQFVRPVTTNTQELTLGVDAGFHLGLSVVGNNRECYVSESLRKSEKDRITSRRESRRTRRNRLRYRKARFDNRRRKDGWLAPSIQHRLDFTIKEIKRLYMFLPITNLVVEVTPFDNQKLLNPDIQGWQYQKGKMYGFKTIKDYLLARDNYRDALDGKQYPASQLRVHHLVQRKDGGSNQPDNLVLLSDINHNQANHNNGILAKLKENRQKTIDYRGAYFMSVLATRLSNYFDNYTITQGYLTANLRQKYEIEKSHLNDAFVIAGGTDTTLRTNNVYSRQKLRNNNRVLQKFYDAKYIDSRDGKQKAGKELSSGRTRRSQELNYDNLRQFRKEKVKKGRVSIRRGHYQLRPHDVVLNTRTNRIETVKGVQNSGTVIKFQTGKTCSIKSVVSLYHVNGILEKKMENV

SEQ ID NO: 7816 - protein, 456 aa, unidentified
  REGION 1..456: note = Human gut metagenome
MSTCVCVLSNNGERLMPTIRLGKVRHLLKDGKAKIIKHHPFTIQLLYDSKTNTQPIEICEDVGYNYIGISVKSESHEYVSAQYDTLQDEKEHHDDCRKYRRTRRNRLRYRKPRFDNRKRSEGWLAPSLEHKKQLNIRLIERYVSVIPITRATVEVGSFDTMLLQAIQKGESKPEGVDYQKGPRYNLATLREAVFYRDDYTCQVCGRKITDGAILHMHHMFYWKGRHGYQLDELVAVCEKCHTPANHQKGGKLYGFGKDKKFANLSGAAFMNAVRWQIVDALHATYGKEFVTITYGAMTKEKRIILGIEKTHNNDAYAMGDYHPAHRCVFRHYQKRRRNNRVLEKFYDATYIDARTGNKAKGKELFNGRINRNHKKDSEDLHKYRSKKVSKGRRSIRRQRYAIQPYDTVRLESKTYITSGCHNKGTRLLIPVNGKSKSVAISKVQVVCHAGAWIQII

SEQ ID NO: 7817 - protein, 431 aa, unidentified
  REGION 1..431: note = Human gut metagenome
MPNKVYVINKHGRPLMPCSPAKARHLLDEGKAKIKKRTPFTIQLVYGSSGYTQEVILGVDAGSKTIGVSASTKKEELFAANVIPRNDVVDLLSTRREFRRARRNRKTRYRKPRFDNRVRSKHKGWLAPSVEVKIQEHITSIKRACRILPVSKVVVETAEFDLQLLKAIADGKPVPQGEDYQKGEMYGHYNVRQYVLWRDDYTCQCCGAHATKKKEVRLHVHHLESRKVGGDAPDNQVTLCESCHEKLHKGLITEKDFKKRKRRSTRDATFMGIMRKTLMQRLCSELPIPVVETRGYITKATREKLLVLPKSHTNDALAIAQGKRGFNVGYLPGILQIDKIYTIRPVRHHNRQLHKAAILKGGIRKSNQAGKYVFGYRLFDKVQFNGQDCFIWGRRTTGIFTIKTINGKMIKDGISFKKLKLVEKSTSYLIA

SEQ ID NO: 7818 - protein, 431 aa, unidentified; identical to SEQ ID NO: 3401
  REGION 1..431: note = coral metagenome

SEQ ID NO: 7819 - protein, 515 aa, unidentified
  REGION 1..515: note = Human gut metagenome
MATVYVLNKDSKPLMPMTRCGHVRYLLKEKKARVVRANPFTIKLLYETDDVVQPLYLGIDPGRTNIGVAVAKGDGTAVFTAHLETRNKEIPKLMAKRKEYRQGRRHYRRCKRQRRAAAHGTLSKRCKKQDTAQGSNISERAQKIGVFERNLPGCEKPVLCIGIKNKEARFNNRVRPAGWLTPTANQLLLTHINFVKKICKYLPISDVVLEINKFAFMALDNPNIQKWQYQQGPLYQKGSLENAVSEQQDHHCLFCKKAIEHYHHVVPRSENGSNTIANIVGLCTKHHDLVHKDTAWQKKLAKKKTGLNKKYGALSVLNQIIPALTKELSSRFQGHLYVTTGKSTYDYRAAHGVSKDHWLDAYCIACSVLPDGCFDNTVNSRIPHELRQFRRHDRQVCHQQNAKRKYYLDRKLVAINRHKATEQKTDSLEEYRNNGGATDKLVVKEHKPTSKRLNRILPGALMTANGKLNVMVASKGLHNGIPDYYVFADNSEAKPTKYTLINKNKGIVFVLNSVS

SEQ ID NO: 7820 - protein, 512 aa, unidentified; identical to SEQ ID NO: 2792
  REGION 1..512: note = Human gut metagenome

SEQ ID NO: 7821 - protein, 518 aa, Moorena sp.; identical to SEQ ID NO: 7410

SEQ ID NO: 7822 - protein, 242 aa, unidentified
  REGION 1..242: note = Human gut metagenome
VQLRQSDAGQSFVLCCLSDKKKGRHNHMYVYVINKHGQPVMPCRPRMARVLLQEGKAAVVKQVPFTIRLLYGSSGYKQPVSLGMDAGSRHIGIAVTTGKKVLYAEELSPRNDVVKLLSVRRQNRRTRRSRKTRYRQARFDNRVRSKHKGWLAPSVEVKIQEHISAVLRIQKMLPVSEIHVETAEFDTQRLKALEEGRPVPVGTDYQKGEMYDQYNVRQYVLFRDGYRCQCCGKHGVKASCAS

SEQ ID NO: 7823 - protein, 416 aa, unidentified
  REGION 1..416: note = Human gut metagenome
MVYVLDQNGQPLMPTSRHGKVRRMLQSGRAKVVNRCPFTIQLNYESGHQTQEISLGIDAGSQHIGVSATTKVKVLYEAEVELRNDIVDLLSSRRELRRGRRTRKTRYRQSRFQNRKKKDGWLAPSIRQKVGTHMAVVEKVCKILPISKVIVETASFDLQKIKNPEIHGMEYQQGDQLGFWNVREYVLCRDHHTCQCCHGKSKDKILNVHHIESRKTGGNAPNNLITLCETCHTGYHQGAVKLPESIKRGMSFKDATFMGIMRWIFYEDLKKKYEPIGMSVSNTYGYITKHTRISHDLPKEHYIDARCINGNPEAATNGEVYCQKKIRCHNRQIHKLTILKGGTRKKNQAEYLVKGLRLFDQVSYLGKAYFIFGRRQSGFFDIRTLSGEKVNKGSISYRKLKFLAPRSYYITERRPV

SEQ ID NO: 7824 - protein, 568 aa, Streptomyces sp.
VSGRVTSPSHHGPKDQGGAPMTTFPVGEQTHQAVLPQQPALESVGADTPGSRDETAHGHSATARGTGREHGRGETDGHGTRTRRRHAKNAATAAEATENGSGDAPPRSPSYAGGIGAGRVFVLSKDGQPLMPCHPARARELLSKGRAVVARQVPFTIRLKDRTLAESEVDGVQLRIDPGSKGTGLALTDEKKEADGEGAVVTVRRGLVAVELQHRGDQIHLCMQQRAGYRHRRRSANRRYRAPRSNNRPRRAGWLPPSLRHRVDTTFSQAARLCRYAPVTEIHVERVAFDTHAMSAGKPLTGAEYQQGPLAGTDARAYLHAKWNSACAYCDASGVPLNIEHLRPRSRGGSSRISNLVLACVPCNEAKGSKPVEVFLAHWPERLAKILQQVKAPLHDAAAMNATRWQLTEALGELGRPVHAWSGGRTKWNRSAMGLEKTHTLDALSVGCLDHENGDAVVRFPGQVLVAKATGRGSYARTTPDRFGFPRLRRARTKQHFGYVTGDLVRANMPTGRWAGTWTGRISVRANGQHSLTTPAGRFNVRHRNMRLLQRGDGYAYSFRSEPGSSTS

SEQ ID NO: 7825 - protein, 412 aa, unidentified
  REGION 1..412: note = Human gut metagenome
RARVVKRFPFVIRLVDRTVEQSEVQPVLIKLDPGSRETGAAVVRDDEKKRHHALAFFVIKHRGGAIRDALKARSAFRRRRRSQNFRCRSPRFLNRVKPKGWLPPSLRHRVETTLSFVRRMCRYLPVSGIATELVKFDSQKLQNPEVSGVKYQQGTLFEYEVREYLLEKFGRKCVYCGAEGVPLNIDHVVPRAKGGSNRVSNLVLACVSCNQKKGARSLEDFLKGKPEVLARVRRELKTPLRDAAAVNATRWVLFNELKATGLPVETGSGALTKLNRHAFGVEKEHWLDALCVGRLNGVVTRKGLNVLEIRCMGRGSRQRTRLTKYGFPRGYLMRQKCVHGFATGDMVEANVPKGKKAGLWRGRVAVRVSGSFNIQTPKGVIQGVGWKHCRLISHNDGYGYAWLGHAPHSSPA

SEQ ID NO: 7826 - protein, 451 aa, unidentified; identical to SEQ ID NO: 2436
  REGION 1..451: note = Human gut metagenome

SEQ ID NO: 7827 - protein, 423 aa, unidentified; identical to SEQ ID NO: 3951
  REGION 1..423: note = Human gut metagenome

SEQ ID NO: 7828 - protein, 426 aa, unidentified
  REGION 1..426: note = Human gut metagenome
LAKDHYRSIDREETNLRVYVLNKRGEPLMPCSAAKARILLKEKKAKVKRRTPFTIQLTIATGETKQPVTLGVDSGYRHVGLSASTEKAELYASEIELRQDIPELLAARRALRGARRSRKTRYRAPRFDNRKRDKGWLAPSVENRIGAHVSRVEAVLRILPVTKIIVETASFDVQRIKNPDVQGVEYQEGEQLGFWNVREYVLFRDGHECQHCHGKSKDRVLNVHHIESRRTGGDAPNNLITLCETCHKAFHRGEFELKVKRGRSFQAEAFMGVMRWTFFERLRARHPEIEVRNTYGYLTKDTRIANKIEKSHCADAFCIAGNLKAKRLGYYFFQKQTRRHNRQIHKLTILKGGVRKRHQTPYEIKGFRLYDKVLYRGKTAFIFGRRSSGYFDIRTLDGERISAAVNSKKLRLLEKRRTFLIELRRN

SEQ ID NO: 7829 - protein, 414 aa, unidentified; identical to SEQ ID NO: 5236
  REGION 1..414: note = Human gut metagenome

SEQ ID NO: 7830 - protein, 447 aa, Moorena sp.; identical to SEQ ID NO: 2820

SEQ ID NO: 7831 - protein, 499 aa, unidentified
  REGION 1..499: note = Human gut metagenome
MRYIYVLDMNGEPLMPTCRYGKVRRMLKSGQAKAVDTLPFTIQLLKPTKTRILQPVIAGQDPGRTNIGMAAVRSDGTELYRAHIETRNKEIVSLMNDRRSFRQASRRGERLARKRLAKKLHTTARHLNGRILPGCKEPLAVKDIINTESRFNNRLRPEGWLTPTATQLLRTHLEAFRKLSGILPVTEVVLEVNRFAFMQLDNQDMEKRDIDFCRGPLYGTGGVKAAVSLQQDGLCLLCREREIEHYHHIVPRSRRGSNTISNIAGLCKKCHERVHKDQAAAERLQSKKDGLSKKYGGTSVLNQIILSLAEKLGIRYPGHAHVTNGWNTKEFRKKHELEKDHDIDAYCIAASILEDVQPVMQTEPYEIKQFRRHNRARIHHQTERTYRYDGKIIAKNRKKRMDQKMDSLKDWVTDMTEQYGRDTASRMLSKATVQKSTRHYNTKGRMMPGTVFICRGKRFVMTGQLTGGAYYRAYGQDKKNFPAKAVQVIQKNKGLVYVA

SEQ ID NO: 7832 - protein, 376 aa, unidentified; identical to SEQ ID NO: 4597
  REGION 1..376: note = Bacillus sp. AFS019443

SEQ ID NO: 7833 - protein, 627 aa, unidentified
  REGION 1..627: note = Lachnospiraceae bacterium UBA2826
MQELEACICAVGDTMNAPTALVQVVALLQFMVKFRVHGIRNTVTLLPQKVPHWMHSNAFYDSELSFQKDVTVYMYVRVIAKDGTPLMPTRRCGNVRHLLETGMAVAIRTKPFTIRLKYETSKYVQALYAGIDTGRENIGSAVSKENGENVYLADTRSNNGTVHSKMYDRAGFRRKRCRHDRQNKQRKAKFDGTEMKKGDADKVRTTHDCISRKVSYPVAEKSVTHKVIQGKEGKFNNRKHPDGWITPSAKQLVQITMNEVKFMCDTMPIRQLSVERVSFDFQKLANVNIRAWEYGKGPLYGYRSYKDYFCDEQKGKCPFCGEDIAHYHHIMPRHRRGTDTVRNIIGVCESCHEKIHSGQITDEMLHEVKDGVAESFEVGLLNSVMPALIDAMKQFCDARNIRLVVMDGRTTSETRNRYHIRKDHCTDAYCISLAGRNIDPADVKLDDFIFMKRRFKKKSKNIINTLNQRVYYDGKKPVAYNRHRAMDQKTDSLEEYMTKYRRTHTGAETDKHFRSLTVRPAKRTYTFHKNGTIAAVHAGDVVRYVKYNKTYGNTKIDTFVALSCEMFGEGHVKYGNGTQGRKLKFCKTIASGALQCVGIEKTDTYLREVALEEAKRRAARVRRKRTG

SEQ ID NO: 7834 - protein, 406 aa, Geobacillus sp.; identical to SEQ ID NO: 3747

SEQ ID NO: 7835 - protein, 493 aa, unidentified; identical to SEQ ID NO: 2644
  REGION 1..493: note = Human gut metagenome

SEQ ID NO: 7836 - protein, 456 aa, unidentified; identical to SEQ ID NO: 5717
  REGION 1..456: note = Human gut metagenome

SEQ ID NO: 7837 - protein, 406 aa, unidentified
  REGION 1..406: note = Human gut metagenome
MPTERFGKVRRLLKNNKAKVIRRCPFTIQLLYEIENPVTQEIVLGIDAGSKVIGVSASTEKKEVYAAEVELRKDVSSLLSARRELRISRRNRKTRYRKPRFNNRVHAKKKGWLAPSILQKIGTHLKVVENITKLLPVSKIVVETASFDIQKIKNPAIQGVEYQQGEQLDFWNAREYVLFRDGHTCQCCKGKSKDRILNVHHIESRQTGGNAPNNLITLCETCHKKYHRGELELPKTIRRGMKFKDSAFMGIMRWSFYNRLKEIYAPLGIAVDMTYGYITKNTRIHHGLPKTHRVDALCATGHPTAARNTEYFYQKKVRCHNRQIHKLTIAEGGYRKRNQAEYKVKGYRLFDKVRYLGQEAFIFGRRSSGSFDIRNLKGEVLSAGVSYKKLRFLEPRKNLSTERRQA

SEQ ID NO: 7838 - protein, 420 aa, unidentified; identical to SEQ ID NO: 5662
  REGION 1..420: note = Human gut metagenome

SEQ ID NO: 7839 - protein, 473 aa, unidentified; identical to SEQ ID NO: 3562
  REGION 1..473: note = uncultured beta proteobacterium

SEQ ID NO: 7840 - protein, 414 aa, unidentified; identical to SEQ ID NO: 4264
  REGION 1..414: note = Viral metagenome

SEQ ID NO: 7841 - protein, 413 aa, unidentified
  REGION 1..413: note = Mouse gut metagenome
MTNYAFVLDANGKQLSPTKEQKAWFLIRKKRAILISKYPMVIQLNREILDDKVCKDEIRCGIDDGGLHVGVALVQKCKTKNKTIFKGTMEQRNDVKYLMEVRKGHRCHHRYYKRYRQARYNNRISSKRKGRVAPSILQKKQAIIRVINQLNKWINITNYWLEDVAIDIRALTDGYNPYRWQYQKSNRLDENIRKAVILRDGCKCKECGKSKCRLEVHHIKPRRLNGSNTLDNLITLCEKCHQNTEGREELFMKKYFSLLNSSDNKNLNYASHVMIGKNWLREQLSNFGILYLTNGGDTGNKRIDWNIGKSHCNDAVCITNLNPDTCDVKEWIMKPMRRQSKAKTDNVLGIKHKDLVEYTYKNGETHRGYVTALYPKQEALNFQSPRKHCKKVNAKKCRLLWKYQKIYWLERET

SEQ ID NO: 7842 - protein, 427 aa, Parasutterella sp.; identical to SEQ ID NO: 3787

SEQ ID NO: 7843 - protein, 442 aa, unidentified; identical to SEQ ID NO: 2903
  REGION 1..442: note = Human gut metagenome

SEQ ID NO: 7844 - protein, 512 aa, unidentified; identical to SEQ ID NO: 6203
  REGION 1..512: note = Human gut metagenome

SEQ ID NO: 7845 - protein, 458 aa, Lactobacillus sp.; identical to SEQ ID NO: 6016

SEQ ID NO: 7846 - protein, 423 aa, unidentified; identical to SEQ ID NO: 3538
  REGION 1..423: note = Human gut metagenome

SEQ ID NO: 7847 - protein, 413 aa, unidentified
  REGION 1..413: note = Human gut metagenome
MTNYVFVLDANGKQLAPTKEAKAWFLIRKKRATLVSKYPMVIQLNKEISDDEICKDEIRCGIDDGGLHVGIALVQKCQAKNKVIFKGTIEQRNDVKHLMDVRRGYRRYHRCHKRHRQARFNNRSSSKRDGKIAPSILQKRQATVRVINQLNKWINITNYWLEDVSIDIRALTDGYKSYRWQYQKSNRLDENIRKAVILRDECKCMECGKSNCRLEVHHIRPRRLNGSNTLSNLITLCEKCHQKTEGREELFMDKYFSLLKSSDNKNLNYAQHVMIGKKWLREQLSNLGILYLTNGGDTANKRINWNIEKSHSNDAICITDLQPDTCNIKEWSIKPMRRQSKAKTDNVLGINHRDLVEYTFKNGETHKGYVTALYPKQNAINFQSLTKHCKKVNAKKCRLLWKFSKIYWLDNVF

SEQ ID NO: 7848 - protein, 423 aa, Moorena sp.
MRVFVLNKNRQPLDPCKPARARIILSTGKAKVYRRYPFTIILTEEIEEPITHTHQLKIDPGAKTSGLAIVQNSRVVWGGELTHRGFQIRDALTSRRQLRRARRNRKTRYRKPRFLNRPWSEGWLAPSLMSRVYNILTWVKKLTRLCPITGFSQELVRFDTQKLQNPEISGIEYQQGTLYGYELREYLLEKWNRKCAYCGTTDTQLEIEHIKPLSKGGSDRVYNLAIACHSCNQAKSNQEVEHFLSGKPDVLRRVKAQAKRPLADAASVNATRWKLYHELKSIGLPVEVGSGGLTKFNRCRQNLPKTHWLDAANVGKIETLVIEVTHPLIITAKGHGTRQLCRTNKYGFPIRYCSRTKVHKGFQTGDIVRAVVTKGKKIGTYVGRVATRKSGSFNISTKSGLVQGISHKYCQFIHRKDGYAYTI

SEQ ID NO: 7849 - protein, 431 aa, unidentified
  REGION 1..431: note = Human gut metagenome
MPGKVYVISRLGHPLMPCSPAKARHLLDDGKAKVVKRTPFTIKLLYGSTEYTQPVILGVDAGSKTIGLSASTTKEELFAAEVMPRNDVVENLSTRREFRRARRNRTTRYRKPRFNNRVHSKNNGWLAPSVEVKIQEHITSIKRVCAILPISKIVVETAEFDLQLLKAVQDGKPVPEGEDYQKGEMYGSYDVRQYVLWRDNYTCTCCGVKGTDKKPIKLHVHHFESRKHGGNAPDNYGTLCEDCHKKHHLGIITDISLKTRKRPSTRDAAFMGIMRKTLMQRLITGLSIPVAETKGYITKAAREEILKLPKTHTNDALAIAQGRHGFGIREPAYVKPTNRIYTVRPVRHHNRQLHKATILKGGIRKLNQASKYIFGFRLYDKVLYRGGECFVWGRRTSGSFLLRTIDGTKVKDGVGYRNLTLLERSTNYLIA

SEQ ID NO: 7850 - protein, 423 aa, Arthrospira sp.; identical to SEQ ID NO: 3251

SEQ ID NO: 7851 - protein, 447 aa, Allochromatium sp.
MAVFVLDKQKKPLMPCTEKRARLLLERGRAVVVRLAPFTIRLKDRIGGAVQPLRLKLDPGSRVTGLAIVRESEICDPDTGAVERLEHGLWFGELAHRGQAIREALETRRQYRRARRARKTRYRAPRFLNRTRRAGWLPPSLQHRLDTTVTWVQRLRRIAPISALSQELVRFDTQALQNPEISGVEYQQGELAGYEVREYLLEKWNRRCAYCGARAVALEIEHIVPRARGGSDRVSNLTLACRPCNVSKGHQSIETFLKGRPALLHQIQVQAPLKDAAAVNATRWALFNALNATGLPVETGSGGRTKFNRTRLNLPKTHALDAACVGTVDQVRDWNRPVLSIRATGRGAYSRTRTFKNGFPRGYLRCQKRVQGFQTGDWVRAEVPKGKKAGVHVGRVAVRQTGSFNIQAQAGTVQGISYRHCRLLQRADGYGYSFQLKPEMEAARRAA

SEQ ID NO: 7852 - protein, 417 aa, unidentified
  REGION 1..417: note = Human oral metagenome
MFVYVLDKNGQPLMPTQRFGKVRRMLRDRKAKVVKRCPFTIRLLYEPETKIVQDVVLGVDTGSKHVGVACIGNDKVLYQSQVELRDDIKRKMDSRRMYRRSRRNRKTRYRKTRFLNRGNSIKNDRYCPTITSKFYGHIREIEFCKKILPIKDTVLETGKFDTQLMEKPWLQEHKWAYQKGVNYGYANAREHALIRDNYTCQCCGKKNCRVEAHHIVYRSKNGSNELENYITLCEDCHKAVHLGKIELNLKGKRRSNIRYATQMSIIRSMLLKRCPDAIETYGYVTKANRENLGLKKDHHIDACVIASGGLEFKPLDILYRKRCVSKQDRQLRKGIRGEKRIPTGKVFGFKKFDLVEYMREHCFIKGRRSRGSFVLMDISNNSIDFRGRGGVCEPSYKHIKRLNARRSVLCVRERLER

SEQ ID NO: 7853 - protein, 418 aa, Bacteroides sp.; identical to SEQ ID NO: 2425

SEQ ID NO: 7854 - protein, 512 aa, unidentified; identical to SEQ ID NO: 2444
  REGION 1..512: note = Human gut metagenome

SEQ ID NO: 7855 - protein, 415 aa, Bacillus sp.; identical to SEQ ID NO: 2431

SEQ ID NO: 7856 - protein, 446 aa, Moorena sp.
MAVFVLDRRKRPLMPCSEKRARLLLARGRARIHRLTPFTIRLVNRTVEQSVLQPVRIKLDPGSRTTGIALVRDGETGRTAHVLFLAELHHRGQVIRDALTQRRAFRRRRRTANLRYRAKRFYNRTRPEGWIAPSLRHRIETTVSWVNRLRRWTPVAAISQELVRFDTQKLQNPEISGVEYQKGTLFGLEVREYLLEKWNRACAYCGARNVPLEIEHIQPRSRGGSDRVSNLTLACDRCNKRKGNKSIEEFLAHDPKRLAQVKAQAKSPLKDAAAVNSTRWTLWRQLRDMDLEIEVGTGGRTKWNRTRLGLPKTHALDAVCVGDVKAVQGWAVPVLQVKAAGHGSYQRTRLDRFGFPRGCLIRQKRVQGFQIGDLVKAAISKGIKAGIYVGRVAVRASGSFNVQTAHGVVEGISYRYCRLLQRADGYGYFVQLCGIALGKEELREAA

SEQ ID NO: 7857 - protein, 446 aa, Moorena sp.; identical to SEQ ID NO: 7856

SEQ ID NO: 7858 - protein, 442 aa, unidentified; identical to SEQ ID NO: 4418
  REGION 1..442: note = Human gut metagenome

SEQ ID NO: 7859 - protein, 461 aa, Parasutterella sp.; identical to SEQ ID NO: 3646

SEQ ID NO: 7860 - protein, 461 aa, unidentified
  REGION 1..461: note = Human gut metagenome
VQPLYLGIDPGRTNIGVAVVKADGTAVFAAHLETRNKKIPKLMQDRKKARRARRTNGRRCRRQRRAKANGTISKKCVKQDTAQSKNPSKRAKEIGVIKRHLPGCKKDVLCVGIKNKEAKYTNRARLEGWLTPTANQLLQTHINLVKKIQKFLPISDAVLEVNKFAFMRLDNPNIQKWQYQQGPLYQKGSLENAVSEMQEHHCLFCEKPIEHYHHVVPKSENGSNTIANIVGLCAEHHNLVHKDVAWQEKLVEEKTGLNKKYGALSVLNQIIPALTKELSFLFPKHSFMTNGKSTHDYRAAHGISKDHWLDAYCIACSVLPIDVCDSTINNCVPYELKQFRRHDRRALNNENMNRVYTLNDKVVATNRHKATEQEAASLEEFRKEHPNDVCKLKVKEHHPTYRNMNRNYPGSVFLVGKQIHVMQGIASSKDGKATKYNDTRATTIAAGKCKFVAKNSGILFV

SEQ ID NO: 7861 - protein, 472 aa, unidentified
  REGION 1..472: note = Burkholderiales bacterium UBA4657
MSVFVLDRRGKPLMPCSEARARKLLAAGRARVHRVMPFAIRLTDRFQADCELQPLRLKLDPGSKITGLALVRESQTLDLSTGEIERNAAVVSLIEIVHRGRQISETLTARRQMRRRRRNQLRYRAPRFLNRGGDKKGWLAPSLMHRVHTTMSWVHRLQRWAPITALSQELVRFDMQAMQNPEISGMEYQQGTLAGYEVREFLLEKWGRQCAYCGVTDTPLQIEHIHPKSRGGSDRVSNLTLACAPCNQRKNHLPVEVFLAKKPEVLKSILAQAKAPLRDAAAVNATRWALANALKDTGLSVELASGGRTKFNRHRLSIPKSHALDAACVGDIAIVTDWRQTTLQVKCTGRGSYQRTRLDRFGFPRGYLTRKKRVFGFQTGDRVRATVARGKNAGTHTGRVAVRATGSFNIQTGLSVVQGIGYRHCQLIQRGDGYGYSQLKIALAPKGCGNQGAASQPALSLLPIHGEVSRAD

SEQ ID NO: 7862 - protein, 415 aa, unidentified; identical to SEQ ID NO: 3582
  REGION 1..415: note = Human gut metagenome

SEQ ID NO: 7863 - protein, 431 aa, Klebsiella sp.; identical to SEQ ID NO: 2435

SEQ ID NO: 7864 - protein, 401 aa, unidentified
  REGION 1..401: note = Human gut metagenome
RRQRRAKTNGTISKKCVKQTTAQNGSVSKRAKEIGVIKRHLPGCEKDVLCIGIKNKEAKFTNRARPEGWLTPTANQLLQTHINLVKKIQKFLPISDVVLEVNKFAFMQLDNPNIQKWQYQQGPLYQKGSLENAVSEMQEHHCLFCEKPIEHYHHVVPKSENGSNTIANIVGLCTEHHNLVHKDATWQKKLAKEKVGLVKKYSALSVLNQIIPALTKEMNSLFPKHFFVTNGKSTYDYRTAHGVSKDHWLDAYCIACSVLPNDVCDSNINSHVPYELKQFRRHDRRVLHKANMSRVYTLNGKTVATNRHKAIKQTTDSLEEFRQSHPGDVCKLKVKEHHPAYRNLNRNYPGSVFLVDGQVHVMQGVSGSHNGKADGYYNTNGNAYPYYKCKFVVKNEGIVFA

SEQ ID NO: 7865 - protein, 420 aa, unidentified
  REGION 1..420: note = Human oral metagenome
MVYVLSLDGQPLMPIRRHGKVRRLLNSKKAKVVCREPFTIQLLFDTKENISCLTLKVDTGSKYVGAGVTDDNACVYYVSEVEIRNDIHTKMGRRAAYRRARRNRKLRYRKARWLNRHNSIKKNRFSPTMASKFNSHIREIEYVKSILPISKLVIETGTFDPNLLNYEDKAFNRHWGYQKGPNYGFKNSQEACFNRDSYKCQCCKTKKGTLNAHHIIYRSNGGADMLDNLITLCEDCHKKLHRGELCEFESKLVGKKKGQLKYATQMNSIRIQLLKYYPNAIETFGFITKANREWLGLEKTHWMDAVSMGLTAQPIFLVDRVYKKKHIAKGQYPLYQGQNSDKKLPRGKVYGFLNKDIVEYRNQLYLIKGLMSLGYCRLSNIDGIEQKFENPKTVKLSACKRVSARKTTRCISQKIIPNIA

SEQ ID NO: 7866 - protein, 406 aa, unidentified; identical to SEQ ID NO: 7347
  REGION 1..406: note = Human gut metagenome

SEQ ID NO: 7867 - protein, 442 aa, unidentified; identical to SEQ ID NO: 2903
  REGION 1..442: note = Human gut metagenome

SEQ ID NO: 7868 - protein, 236 aa, unidentified
  REGION 1..236: note = Human gut metagenome
MVYVQDIDGKPMMPTTRHGKVRRLLKDSKAVVVNTCPFTIKLMYKTSDYKQEIVLGVDAGTKHVGLSATTKSKELYSSEVILRSDIVELLSTRRESRRTRRNRLRYRKPRFNNRIKSKRTGWVAPSVRHRIDAHIRVIDNICSILPISRIIVEVAQFDTQKIKNPNISGNEYQEGDQLGFWNVREYVLTRDGHKCQHCKGKSKDPILNVHHIESRKTGGDSPSNLITLCETCHKEY

SEQ ID NO: 7869 - protein, 420 aa, unidentified
  REGION 1..420: note = Human gut metagenome
MQYVYVLNNHGKPLMPCSPGKARLLLKQQKACVVKRTPFTIKLLYGSAGYKQPITLGVDAGSKHVGLSASTEKRELYSEEFTPRSDVVELLSTRRQNRRSRRNRKTRYRAPRFDNRVHSKHKGWLAPSVEVKIQEHITIIKRICKILPISLVRVETAEFDTQRLKAMLAGKPLPIGTDYQLGEMYDEYNVRQYVLKRDHYTCQCCGAHNTAEKVVKLHVHHFESRKVGGNTPSNLVTLCTTCHKNLHKGKATLDGKERGKPLRDAAFMGIMRKTLMARLKEELPIPVQGTYGYITKMSREQNDIKKSHVNDARCISKHPLAEPCSVCYRTKAIRHHNRQTHKANFSKKGIRKRSQMPYLVEGFRLWDKVLYKGQECFVSGHRSSGSFALKKLDGTSISKGVTFKKLRLLEPATNYLIERM

SEQ ID NO: 7870 - protein, 415 aa, Bacillus sp.
MVSYCFVLDRKRRKLSPTNENRGWVLIRKNKAALINKFPMVIQLFKEVADEEIDQTPIHFNIDDGSKFTGIALVQECQTKNKPVFKGTIEHRTDVKEKMDKRRGYRRYKRSHKKYRPKRFHNRSSSTRKGRIPPSIKQKKEATLRVLNNLMKWIRVNHIHLENVMIDIHKLEKGSQPYRWDYQKSNRLDENLRKAALMRDHFTCQDCGKKHCRLEVHHIIPRRLQGSNSIHNLITLCSSCHENVTGEESNHAKRFFDKIQGKKIIFLDAMHVMQGKTYLQQEVKKIAPLTLTTGGDTANRRIDWDIEKSHSNDAIVLSQLHVSSKQCDMKDWIIKPMRRRSKKKVEEVNGFQHRDFVRYTKRNGDVYEGYITALYPKKKQCNLTTTEGKVLKRYGVNRLKLLWRFNHIYFLNKHE

SEQ ID NO: 7871 - protein, 425 aa, Aphanothece sp.
MSNFVFVLDTTKKPLNPVHPGQARRLLKLSLAAVFKRFPFTIILKEEVTETPKKITLKLDPGSRFTGIALVQDNQVIWGAELQHRGQQIKDNLTSRRQLRRGRRGRKTRYRKARFLNRKRPPGWLAPSLQHRVDTTLTWVKRLMRYCPINSLAVELVKFDLQKQENPEISGVEYQHGTLMGCEIREYLLAKFNRTCKYCGAVDQPLEIDHIYPKSKGGSDRISNLTLSCHLCNQKKGTQDIKVFLTGKSDLVNHILKQAKTPLKDAAAVNSTRWKLFNSLKELGLPIETGSGGLTKFNRKRLNVPKTHFSDAACVGQVSDNLSFKTLQPLLIKATGHGCRQRCRTDKFGFPQSHALKAKFFEGFQTGDLVSASIPSGKFVGQYVGRIAIRFRPSFVLQLPNQKFNVHPKYLTHIHRNDGYNYAFK

SEQ ID NO: 7872 - protein, 442 aa, unidentified; identical to SEQ ID NO: 2637
  REGION 1..442: note = Human gut metagenome

SEQ ID NO: 7873 - protein, 470 aa, Anaerostipes sp.; identical to SEQ ID NO: 2949

SEQ ID NO: 7874 - protein, 512 aa, unidentified; identical to SEQ ID NO: 3680
  REGION 1..512: note = gut metagenome

SEQ ID NO: 7875 - protein, 416 aa, unidentified
  REGION 1..416: note = Human gut metagenome
MVYVLDKNGQPLMPTDRHRKVRLMLQSGQAKVIKRCPFTIQLTYNTGHQAQEISLGIDAGSKHIGVSATTKTRVLYEADVELRNDIVDLLSSRRELRRGRRNRKTRYRPARFDNRRREDGWLAPSIRQKIGTHLTVVENICKILPISRITVETASFDIQKIKNPDIQGAEYQQGDQLGFWNNREYVLFRDNHTCQCCKGKSKDKILNVHHIESRKTGGNAPNNLITLCEICHTGYHKGAVQLPKTVKRGMRFKDAAFMGIMRWAFYEALKQQYEPVGTPVHNTYGYITKHTRIEHNLPKEHYVDARCISGNPDAFPNGEYYYQKKVRCHNRQMHKLTILKGGIRKQNQATYLVKGYRLFDKVSYQRKEYFVFGRRKSGFFDIRTLSGKQVNKGSLSCKKLKFIATRMYYLIERRAV

SEQ ID NO: 7876 - protein, 257 aa, unidentified; identical to SEQ ID NO: 5154
  REGION 1..257: note = Human gut metagenome

SEQ ID NO: 7877 - protein, 406 aa, unidentified; identical to SEQ ID NO: 4082
  REGION 1..406: note = Human gut metagenome

SEQ ID NO: 7878 - protein, 456 aa, Streptomyces sp.
VSRVFVLSKDGQPLMPCHPARARELLTKGRAVVARQVPFAIRLKDRTRAESAVDGVQLRIDPGSKGTGLALTDEKKETDGQGATVTVRRGLVSIELQHRGDQIHSCMQQRAGYRHRRRSANCRYRKPRSRNRARSAGWLSPSLRHRVDTSFSMANRLCRYAPVTEIHVEQVSFDTHSMSAGRALRGSEYMHGPLAGTTTRDYLRDRWDNACAYCGATGVPLNIEHLRPRSRGGSNRTANLVLACIPCNTAKGSESVEVFLADRPDRLAHILRQITSSLRDAAAMNSTRRLLMAALGDLGLPVHAWTGQTTMENRNIMGLAKTHTLDALSVGQLDHEAGDVIVRYPEQVLVAKATGRGSYARTTPDRFGFPRLRRTRAKQHFGYITGDLVRATIPTGKWAGTWTGHISVRARGQHSLRIHTGRLNVSHWNLELLQRGDGYGYSVRPELPPSTSRKIG

SEQ ID NO: 7879 - protein, 397 aa, unidentified
  REGION 1..397: note = Human gut metagenome
VVRRTPFTIQLTIATGESKQPVSLGVDAGYKHVGLSASTEKAELYASEVELRKDITDLLSARRALRQSRRNRKTRYRAPRFDNRIRTKRKGWLAPSVENRINAHLSRIKAVLRLLPITKITVETASFDMQRLKNPDISGKEYQEGEQLGFWNVREYVLFRDGHVCRHCHGRSKDPVLNVHHLESRRTGSDSPDNLITLCVTCHKALHRGEITLKAKRGQSFRAQAFMGIMRREVLNRLKASYPELKVHETYGYLTKHARIANGIVKSHGADAFCIAGNLGAERLGEFFFQKQTRRNNRQIHKLSILKGGIRKRNQAPFEAKGFRLFDKVACQGEEGFIFGRRSSGSFDVRKLDGTRISAGISCKKLRLLEKRRTYLTEIRKEEELPPLPEGRGLRAI

SEQ ID NO: 7880 - protein, 427 aa, Parasutterella sp.; identical to SEQ ID NO: 4733

SEQ ID NO: 7881 - protein, 451 aa, unidentified
  REGION 1..451: note = Human gut metagenome
MSVAVMSKTGMRLMPTSEYRARKLLKSKKATVYRYNPFTIQLTERETGDVQTVELCMDTGYLHIGTSVKSEKHEYFGVQIDTLTDEKQKHDACRMYRRQRRGRKRYSQSRFNNRKRSDGWIAPSLEHKKDIHIQTISRICNAMPITNITLEMGNFDTQVLKALEENRPLPQGTDYQHGERYGIATLREAVFARDKYTCQCCRKTIADGAILHVHHIIYRSRGGTNRMSNLATVCDRCHTPANHKPGGRLYNWKPKIASFKGATFMTAVRWKMYNEVKSKFSDINIHITYGAETKEQRRAFDITKSHVNDAFVMGQFHPKHRSRPVCYKKKRRNNRCLEKFYDAKYIDSRDGKKRSGQELFNGRINRNHKKDSENLHQYRQQKVSSGRKTIRKQHYSIQPHDIVVFNRQQFETSGCHCNGARAILLPQKKSVAIKKLSIHKYAGGYFKSDFT

SEQ ID NO: 7882 - protein, 292 aa, unidentified
  REGION 1..292: note = Human gut metagenome
MSTVYVLNKDGKPLMPTTRCGHVRHLLKEQKARVVTSKPFTIQLLYETDDVVQPLYLGIDPGRTNIGVAVVKADGTAVFTAHLETRNREIPKLMKKRKDSRRTRRTNGRRCRRQRRAKANGTISKKCVKQDTAQNGSVSKRAKKIGVIKRHLPGCEKEVLCIGIKNKEAKFSNRVRPEGWLTPTANQLLQTHINLVKKIQKFLPISDVVLEVNKFAFMQLDNPNIQKWQYQPKKCAFRKTAFAYTCDSSYIVRNLFHSSSSKRTITQCVFGFNLGFLPYLLFFFMLLILSIL

SEQ ID NO: 7883 - protein, 431 aa, Escherichia sp.; identical to SEQ ID NO: 4170

SEQ ID NO: 7884 - protein, 458 aa, unidentified
  REGION 1..458: note = seawater metagenome
MSVFVLDSSGTPLMPCSEKRARKLLGAGRARVHRLVPFVIRLIDRTADACEFQALRIKLDPGSKSTGVALVRDREDEAAVLNLMELVHRGRQISEALTARRTMRRRRRGNLRYRAPRFLNRTKPNGWLAPSLQHRVDATLAWVQRIRRWAPVASISTELVRFDMQALENPEISGVEYQQGTLAGYELREYLLEKWNRQCCYCDAKDTPLNIEHLHPKARGGTNRASNLAIACVPCNQRKGAMPLDAFVSDPKHLAQIQAQARRPLKDAAAVNATRWALTEGLKATGLPVELASGGRTKFNRTRFGIPKTHALDAACVGKTEALTGWRKPTISIKCAGRGSYQRTRLDKYGFPRGYLARRKAVRGFQTGDLVRADVPASSKKAGCYVGRVAVRASGSFNIQTGCEVVQGISHKHCRVIQRSDGYGYTRIASQGEARVGRAMRAALSLPALNGEVSRATR

SEQ ID NO: 7885 - protein, 427 aa, Parasutterella sp.; identical to SEQ ID NO: 3787

SEQ ID NO: 7886 - protein, 414 aa, unidentified; identical to SEQ ID NO: 2588
  REGION 1..414: note = Human gut metagenome

SEQ ID NO: 7887 - protein, 420 aa, unidentified; identical to SEQ ID NO: 3987
  REGION 1..420: note = Human gut metagenome

SEQ ID NO: 7888 - protein, 418 aa, unidentified; identical to SEQ ID NO: 4934
  REGION 1..418: note = Human gut metagenome

SEQ ID NO: 7889 - protein, 395 aa, unidentified
  REGION 1..395: note = Human gut metagenome
MDTGYIHIGISVKSEKHEYLTEQIDTLTDERSRHNARRMYRSQRRNRKRYRQPRFNNRKKDKGWIAPSLEHKKNIHVQAISRINNVMPLTDITMEMGNFDTQVLKAKEEGRPLPQGVDYQHGERYSIATLREAVFARDGYKCQCCGRTIKDGAILHVHHIKYRSQGGTNSISNLATVCDKCHTPKNHKPGGKLYGWKPKLPSFKGATFMTTIRWQLYNEAKALFPDIDIHITYGAATKERRRELNIDKSHINDAFVMGQFHPRHRIKAVLYKKKRRNNRCLEKFYDAKYIDSRDGKKRSGQELFNGRINRNHKKDSENLHQYRLQKVTAGKRTVRKQHYSVQPHDIIIYESRKRETTGCHCNGARVMLLPDKKSVSIKKIKIYRYAGGYFKSTFN

SEQ ID NO: 7890 - protein, 554 aa, Acidithiobacillus sp.
VLNKKISSRNRIGARYYTFSAAALSRGRLLPTWLSRGPVLSGSSWRRVAKTHSGMLPQSRTLEGEDHAGERQSAEGSHRCQKAGAGRQQPRGETAARGHSRKLALQRPVRAWGIVVAVFVLDKCKKPLMPCSEKRARLLLARGRARVHRMVPFTIRLVDRLQADSVLQPLRLKIDPGGKTTGLALVREVESVNENGDSNRTAYVVALMELKHRGYQIRRKLYQRRGHRNRRRWHLWYRPSRFRNRTRSPGWLPPSVRHRVDSVATWIYRLKKWTPISGISLELPRFDMRRLTEEEDDSTDRQRDLFRFEARAYLLKKYGRRCAYCGAQDVPLTIDHICPRSRGGSNRLSNLTLACIPCNQRKGNQSVSEFLAQDPRRVASIEQSRQKSLKEAAAVNSSRSELLRCIKATGLDIETGSGVGTQWNRSRLAVPKAHCLDAACVGKVDVLISWKQKPVLVITATGRGRYGRTMLDSNGFPKAYLIKTKGVFGFQTGDLARATVTRGKNHGIYIGSVAISARGYFDLHTLTGMRLVVSHRYCKLIQRSDGYRYQFSSV

SEQ ID NO: 7891 - protein, 344 aa, Streptomyces sp.
MHLRASYRRRRRSRNTRYRAPRYDNRRRPDGWLPSSLRHRVDTTHSWVRRLQQWAPVAEMHIERTAFDVHALSVGVPLQGIEYQQGTLAGYEVRQYLLEHWGRACAYCGASGVPLQVEHIRPRSRGGSDRVSNLTLACRPCNHAKGSLSVEAFLKGKPQLVAKILSRAKAPLRDAAAMNSTRWALWGSLKDLRVPVHSWSGGRTKYNRSRHGLTKTHSLDALAVGEVPDDMTIERFPAIVLLVSCTGRGTHARTRTDKHGFPRLKLPRIKRFFGYATGDLVTAAVLTGKNAGTHTGRVAVRSNGRFNIRTAHGLVQGVHRRHFRLLQRADGYGYARRAEESAAE

SEQ ID NO: 7892 - protein, 509 aa, unidentified
  REGION 1..509: note = Human gut metagenome
MPDTDYIYVLGADGKPQMPTKRKRHVKRLLDTGKARIACHVPYTIQLLYENTPVLQPVMLAEDPGRTNIGMAVLSVKGELLMSAVVETRNREIVRLMNHRRGYRKASRNGERKARQRLAKRFGTMLKAGMLMRRLPKFASDKFITCHYIRNTESRFCNRKRPDGWLTPTSRQLVETHTNLIHKIQKYLPVTDIAMEVNRFAFLSLENPSVSGVNFQNGPLKGFDSLHDAVNELQHGKCLLCDKKIEHYHHIVPRSMNGSNTIGNIAGLCMECHDKVHKSAKYQKKLNDVKKGLDKKYGALSALNQAVPFICKQLETEFGKEHVSYCTGRDTAKMRNSFGFQKTKDNQMHETDAWCIGILALNRIPDVIPDFGRTYCIRQFRRQDRSLVYAQTERVYKLDGVAVAKNRKKRTEQKTDSLEDWYNRQVVLYGKKKADFMRSRLTVVKSKRRYNDLTRVMPGAVFIYNGVRHVLSGRLTEGQYFRAVGDTRTNYPSSKCKIIRHNEGLVFVC

SEQ ID NO: 7893 - protein, 448 aa, unidentified; identical to SEQ ID NO: 4180
  REGION 1..448: note = Marine sediment metagenome

SEQ ID NO: 7894 - protein, 456 aa, unidentified
  REGION 1..456: note = Human gut metagenome
MSTCVCVLNNSGERLMPTIRLGKVRHLLKDGKAKIVKHHPFTIQLLYDSKTNTQPIEICEDVGYNYIGISVKSESHEYVSAQYDTLQDEKEHHDDCRKMRRARRNRLRYRKPRFDNRKRSEGWLAPSLEHKKQLNISLIERYVSVIPITRATVEVGSFDTILLQAIQKGKSKPEGVDYQKGPRYNLATLREAVFYRDNYTCQVCGRKIADGAILHMHHMFYWKGRHGYQLDELVTACEKCHTPANHQKGGKLFGFGEDKEFANLSGAAFMNAVRWQIVDALHATYGKEFVTITYGAMTKEKRIILGIEKTHNNDAYAMGDYHPVHRCVFRHYQKRRRNNRVLEKFYDATYIDARTGNKAKGKELFNGRINRNHKKDSENFHKYRSKKVSKGRRSIRRQRYAIQPYDTVRLEGKTYITSGCHNKGTRLLIPANGKSKSVAISKVQVVCHAGAWIQII

SEQ ID NO: 7895 - protein, 514 aa, unidentified
  REGION 1..514: note = Human gut metagenome
MSTVYVLNKNGKPLMPTTRCGRVRHLLKEQKARVVTSNPFTIQLLYETDDVVQPLYLGIDPGRTNIGVAVVKTDGTAVFTAHLETRNKEIPKLMQGRKKARRARRTNGRRCRRQRRAKANDTISKKCVKQDTAQSGSASKRAKKIGVIKRHLPGCEKGVLCIGIKNKEAKFSNRTRPEGWLTPTANQLLQTHINLVKKIRKFLPISDVVLEINKFAFMQLDNPNIQKWQYQQGPLYQKASLEEAVSEMQEHHCLFCKKPIAHYHHVVPQSENGSDTIGNIIGLCTKHHDLVHKDTAWQKKLAKKKTGLNKKYGALSVLNQIIPALTKGLGSRFQGHFYVTTGKSTYDYREVHGVSKDHWLDAYCIACSVLPNDVCDSDINNRVPYELKQFRRHDRRALHKANINRVYTLNGKSVATNRHKAIKQTTDSLEEFRQCQPDDVCKLKVKEHHPEYRNPERNFPGCVFLVGKHTHVMQGTSGSHNGQADGYYDTNGNSYSSGKCKFVAKNEGVVFTLN

SEQ ID NO: 7896 - protein, 413 aa, unidentified; identical to SEQ ID NO: 2636
  REGION 1..413: note = Human gut metagenome

SEQ ID NO: 7897 - protein, 249 aa, unidentified
  REGION 1..249: note = Archaeon sp.
VEVIGRVKEHIKSSSSSLLLYNVSRTVLANNNSAQDIPSGRSRKNLRVPVLNMSGKPLMPTSPRKARILLKQGKATVVQKMPFTIQLKYPSGETKQDITLDINDRYSTIGFSAITEKSELISGELTLRKGISKLLEQKRNYRRVRRNKLLHRKPRLNNRSKHKCWLASGIHHKFNTHLRLIEKLKEVLPITKVIVEVSAFDTQKLQNPEIRDVKYQQEELQGHGVIEDLLEKWKHKVCLLWKGWSSSGN

SEQ ID NO: 7898 - protein, 442 aa, unidentified; identical to SEQ ID NO: 3218
  REGION 1..442: note = Human gut metagenome

SEQ ID NO: 7899 - protein, 456 aa, Achromobacter sp.
MPCSEKRARKLLAACRARVHRLVPFVIRLVAHRAGTCNFQPLRIKLDPGSRATGLALVRDVETVDAATGCILRGAAVLTLMELVHRGRQISEVLTARRNTRRRRRGNLRYRAPRFRNRTRRAGWLAPSLQHRVDTTLAWVIRVRRWAPVTAISSELVRFDLQALENPEISGIEYQQGTLSGYEVREYLLEKWDRKCAYCDATGVPLQIEHLHARARGGSNRIANLALACGPCNQKKAALPLEAFLAKDPGRMARIQAQAKRPLKDGAAVNATRWALANGLTVTGLPVELSSGGRTKYNRSQLGVPKTHALDAACVGSVDAIKAWRRPTLQVKCTGRGSYQRTRLDKYGFPRGYLMRCKAVRGFQTGDLVRADVPASSKKAGRYVGRVAVRASGSFNIQTGSEVVQGISHKHCRIVQRSDGYGYSRIAISKGDAGAGHVARAALSLPGLKPEASRAI

SEQ ID NO: 7900 - protein, 478 aa, unidentified
  REGION 1..478: note = Ga0315294_10000834
MQKLERRDTYTPTDASQVRGNREILLGTITERCDGNCDSVIKHGMKPFQVLQDSKTLSNNPDVNQQSGRTGQDLRVPVLNMRGEPLMPTNPAKARHLLKQNKAKVMSRKPFTIQLNYATGETKQPITLGIDSGYKTIGFSAITEKKELISGEVALRTDISKLLEERMMYRRIKRNKLWYRQPRFDNRRKDENWLAPSIKHKLDTHIRLVNKIKKLLPVTEVIVEVAKFDIQKIKNPEITGEQYQQGEQLGFWNVREYVLHRDNHICQHCFGKKKDKILEVHHINGKKEGATNRPEELLTICKTCHEEHHTGIDIIPKKEIKQFKPETFMSSIRWKLINILNCEHTYGYITKSIRVGLKLPKLHVNDAFVIAGGTSQERCRPFDVKQVRRNNRCIQINRKGFKPAIRKKHYSLQPHDKIIYKNNEYLVRGIHSKGTQVMIFNLIERMDVNVKKIKLICYGKGMQFFYEPKLIIFSNGVL

SEQ ID NO: 7901 - protein, 472 aa, unidentified
  REGION 1..472: note = Human gut metagenome
VVDNRLLSIKPLINIGEGVIYSSICTGLSLQTYQKRKEVPCMVYVLDINGQPLMPTTRHGKVRRLLNSHLAKVVKRCPFTIQLLYQSTKEIQPVSLGVDAGSKHIGMTATTEKKVVYQEELSPRNDVVKLLSARRTLRRTRRNRKTRYRKPRFNNRVHSKHKGWLAPSVEVKIQEHITAIKRICQILPISEIHVEISEFDLQRLKAMEEGRTLPVGTDYQLGEQYDFYNTRQYVLHRDGYTFQCCGTHDNNIKLHVHHIESRQTGGDAPSNLITLCEHCHKALHKGKLELPKGKKRGKTYRDATFMGIMRKTLLERLRKEVDVPASGTYGYITKYWRERAGLEKSHINDAICISKYPYAKPLDTYYLTKAVRNHNRQIHKSNFSKGGIRKRNQAPYLVKGFRLFDKVLYQGKEYFIFGRRATGYFDIRTLDGTKVNKGSISYKKLRIQDTAKAYLKEARAIPHMNKFTCVLA

SEQ ID NO: 7902 - protein, 420 aa, unidentified; identical to SEQ ID NO: 6833
  REGION 1..420: note = gut metagenome

SEQ ID NO: 7903 - protein, 442 aa, unidentified; identical to SEQ ID NO: 2637
  REGION 1..442: note = Human gut metagenome

SEQ ID NO: 7904 - protein, 442 aa, unidentified; identical to SEQ ID NO: 3333
  REGION 1..442: note = Human gut metagenome

SEQ ID NO: 7905 - protein, 435 aa, unidentified
  REGION 1..435: note = Human gut metagenome
MVYVQNHLGQPLMPTQDHRKVRLLLKSGAAVVVRRTPFTIRLTTRSKTYVQPVTLSVDAGSKKIGLTAATRNRELFAAEVMPRNDVVKLMSDRRELRRSRRNRTTRYRQPRFDNRVHSKHKDWLAPSVEVKIQEHITAIKRACRLLPVSRVVVETAEFDLQMLKAVAAGKPVPQGEDYQKGEMYGFYNSRQYVFFRDGYTCQCCGASNKSLRGEARKKGLIFHTHHLESRKTGGDAPDNLVTICDKCHKDFHAGRLTNDKLKKRRSKSTRDAAFMGIMRKTLMRRLREELPVPVAETKGYVTKATREQLLKLPKSHTNDALAIAMGRDGFGIQGVTYIPQVDHIYQMRAVRHHNRQLHKANPKKGGVRRRNQGPKRVQGFQRFDKVLYRGKECFIWGLRTSGYFQLKQIDGRKVHESAKASELVLLEHSSGYLIT

SEQ ID NO: 7906 - protein, 413 aa, Blautia sp.; identical to SEQ ID NO: 5365

SEQ ID NO: 7907 - protein, 425 aa, unidentified; identical to SEQ ID NO: 5668
  REGION 1..425: note = Human gut metagenome

SEQ ID NO: 7908 - protein, 411 aa, unidentified; identical to SEQ ID NO: 3917
  REGION 1..411: note = Human gut metagenome

SEQ ID NO: 7909 - protein, 456 aa, Halomonas sp.
MAVFVSDKHKQPLMPCSEKRARLLLERGRAVVHKRYPFTIRLRDRVGGDTQALRLGIDPGSKATGLALMRESDGRQRHVLCLFELLHRGFQIKKALEQRAAFRRRRRSANLRYRAPRFDNRTRPKGWLAPSLQHRVDTVTAWVERLRRLAPITALDQELVRFDTQKLDNPEIGGVEYQQGTLLGYEVREYLLEKWGRACAYCGATETPLEIEHVEPRSRGGSNRVSNLALACHDCNQAKGNQPLGDFLAHDKGLKKRLKANGLSASGRLERVQRQFKQPLRDASAVNATRWALFTALKATGLSVTVASGGRTKYNRQRLGIPKTHALDAACVGAVEALHDWPVPTLMIKATGRGSYQRTRLTRHGFPRGYLMRQKQVHGFQTGDRVKAIVPAGRKAGTHTGRVAVRKTGRFNIQTPQGAVQGISHQHCTLIQRGDGYGYHLTPSINHKGGAGQAVA

SEQ ID NO: 7910 - protein, 470 aa, Allochromatium sp.
VDTVGRDIPPTIRLNDLCDLDEETLTAARRAPVRAGIEMNNRVFVLSSTKKPLMPCTPARARKLLHAGRAAIYRRQPFTIILLERAAGDTQPIEVKLDPGSKTTGIALVADFLCGRTVIWAANLHHRGQAIRSALTDRRAFRRGRRARKTRYRAPRFLNRTRLAGWLPPSLRARVDNVRHLTTKLQARAPIASAAVETVRFDTQALQNPEISGVEYQQGELAGYEVREYLLEKWNRTCAYCGARDVPLEVEHIVPRSRGGSDRVSNLTLACRPCNERKGSQPIEEFLKGKPEVLRRIQAQARTPLKDAAAVNATRYAIGEAVKSVGLPTTFWSGGRTKKNRVTQGYVKDHWIDAACVGESGAAVRIASGMQALTIKATGRGRRRVQGNDRFGFPRGTPRSAKRVHGFQTGDLAKLTCTTGKSAGVHVGRIAAIRARGWFVLNKHDRPAREFRLLQRADGYDYTNDQPSPS

SEQ ID NO: 7911 - protein, 442 aa, unidentified; identical to SEQ ID NO: 2637
  REGION 1..442: note = Human gut metagenome

SEQ ID NO: 7912 - protein, 450 aa, Moorena sp.; identical to SEQ ID NO: 2437

SEQ ID NO: 7913 - protein, 413 aa, Blautia sp.; identical to SEQ ID NO: 2636

SEQ ID NO: 7914 - protein, 413 aa, unidentified; identical to SEQ ID NO: 3695
  REGION 1..413: note = Human gut metagenome

SEQ ID NO: 7915 - protein, 420 aa, unidentified
  REGION 1..420: note = Human gut metagenome
MQYVYVLNRHGEPLMPCSPGKARLLLKQQKACVVKRTPFTIKLLFGSAGYKQPITLGVDAGSKHVGLSASTEKRELYSEEFTPRSDVVELLSTRKQNRRSRRYRKTRYRAPRFDNRVHSKHKGWLAPSVEVKIQEHITVIKHICKILPISLVRVETAEFDTQRLKAMLAGKPLPVGTDYQLGEMYDEYNVRQYVLKRDHYTCQCCGAHNTAKKVVKLHVHHLESRKTGGNAPSNLVTLCTTCHKNLHKGRVTLDGKERGKPLRDAAFMGIMRKTLMVRLKEELPIPVQGTYGYITKMRREQNDIKKSHTNDARCISKHPLAEPCSVCYRTKAIRHHNRQTHKANFSKKGIRKRSQMPYLVEGFRLWDKVLYKGQECFVSGRRSSGSFALKKLDGTSISKGVTFKKLRLLEPATNYLIERK

SEQ ID NO: 7916 - protein, 512 aa, unidentified; identical to SEQ ID NO: 3870
  REGION 1..512: note = Human gut metagenome

SEQ ID NO: 7917 - protein, 352 aa, Parasutterella sp.
  SITE 40: note = misc_feature - Xaa can be any naturally occurring amino acid
MLSASPATLAPKGSANSSSRSRRVGTTGRFISFPSSKAAXIRTKRKGWLAPSVENRINAHLSRIESVLRLLPVTKITVETASFDTQLLKNPDISGKEYQEGEQLGFWNIREYVLCRDRHVCQHCYGRSKDPVLNVHHLESRRTGGDSPGNLVTLCETCHKALHRGEITLKAKRGQSFRAEAFMGIMRWEVQNRLKASHPELEVNNTYGYRTKHARIANDIAKSHCADAFCIAGNLGAERLGEFFFQKQTRRNNRQSHKLSILKGGIRKRNQAPFEVNGFRLFDKVACKGEEGFIFGRRSSGFFDVRKLDGTRISAGISYKKLHLLEKRRTYLTEIRKEEVLPPLPEGRGLRA

SEQ ID NO: 7918 - protein, 414 aa, unidentified
  REGION 1..414: note = Human gut metagenome
MPCSPAKARLLLKEKKAIVKRRTPFTIQLTIATGETKQPVSLGVDAGYKHVGLSASTEKAELYASEVELRQDITDLLSARRALRQSRRNRKTRYRAPRFDNRIRTKRKGWLAPSVENRINAHLSRIEAVLRLLPVTKITVETASFDLQLLKNPDISGKEYQEGEQLGFWNVREYVLFRDGHVCQHCHGRSKDPVLNVHHLESRRTGGDSPGNLITLCETCHKELHRGEITLKAKRGQSFRAETFMGIMRWEVLGRLKASHPELEVNNTYGYRTKHARIANDIAKSHCADAFCIAGNLGAERLGEFFFQKQTRRNNRQIHKLSILKGGIRKRNQAPFEIKGFRLFDKVACKGEEGFIFGRRSSGYFDVRKLDGTHISAGISYKKLRLLEKRQTYLTEIRKEEALPPLPEGRGLRA

SEQ ID NO: 7919 - protein, 419 aa, unidentified; identical to SEQ ID NO: 4877
  REGION 1..419: note = Human gut metagenome

SEQ ID NO: 7920 - protein, 446 aa, unidentified
  REGION 1..446: note = metagenome
VAFSLATIQKKEEGIMPNKVYVINKHGRPLMPCSPAKARHLLDAGKAKVKKRTPFTIQLVYGSSGYTQEVILGVDAGSKTIGMSASTTKEELLSAEVKPRNDVVDLLSTRREFRRARRNRKIRYRKPRFDNRVRSKHKGWLAPSVEVKIQEHITSIKRVCRILPVSKVVVETAEFDLQLLKAIADGKPVPQGEDYQQGEMYGHYNVRQYVLWRDGYTCKCCGAHTTKKKEVRLHVHHLESRKVGGDAPDNQVTLCESCHEKLHKGLIAEKDFKKRKRKSTRDATFMGIMRKTLMQRLCSELPIPVIETRGYITKATREKLLVLPKSHTNDALAIAQGKQGFNVGYLPGIVQIDKICTIRPVRHHNRQLHKATILKGGIRKSNQTEKYVFGYCLFDKVQFNGQDCFIWGRRTTGIFTIKTINGKMIKDGISFKKLKPVEKSTGYLIA

SEQ ID NO: 7921 - protein, 456 aa, unidentified
  REGION 1..456: note = Human gut metagenome
MSTCVCVLSNNGERLMPTIRLGKVRRLLKDGKAKIVKHHPFTIQLLYDSKTNTQPIEICEDVGYNYIGISVKSESHEYVSAQYDTLQDEKKHHDDCRKYRRTRRNRLRYRKPRFDNRKRSEGWLAPSLEHKKQLNIRLIERYVSVIPITRATVEVGSFDTMLLQAIQKGEPKPEGVDYQKGPRYNLATLREAVFYRDNYTCQVCGRKIADGAILHMHHMFYWKGRHGYQLDELVTACEKCHTPANHQKGGKLFGFGENKEFANLSGAAFMNAVRWQIVNALYATYGKEFVTITYGAMTKEKRIILGIEKTHNNDAYAMGDYHPAHRCVFRHYQKRRRNNRVLEKFYDATYIDARTGNKAKGKELFNGRINRNHKKDSENFHKYRSKKVSKGRRSIRRQRYAIQPYDTVRLEGKTYITSGCHNKGTRLLIPANGKSKSVAISKVQVVCHAGAWIQII

SEQ ID NO: 7922 - protein, 458 aa, Lactobacillus sp.; identical to SEQ ID NO: 4474

SEQ ID NO: 7923 - protein, 428 aa, Moorena sp.
MSNQNYVFVLDTNGKPLNPCRPITARKLLNANKAAVFRRYPFTIILKKEVVDTPEPITLKLDPGSKATGIALLQREKVVFGASLAHRGQAIKASLDSRRAIRRSRRARHTRYRQPRFLNRTRAKGWLAPSLQHRVETTLTWIDRFIRFAPIGSIVQELVRFDLQRLENPEISGIEYQQGELQGYEVREYLLNKWDRKCAYCGAENVPLQVEHIHPKAKGGSNRISNLCLACDKCNAKKGTQDIKQFLAKKPEVLKRVLAQAKRPLKDAAAVNSTRWALFNRLKAIGLPVSTASGGLTKFNRTRLQLPKAHWLDAACVGKVESLLLLTQQPLLIKALGWGCRQMVQTDKYGFPRKGYRAKQKVKNWNTGDIVSVVAGKFAGITGKRLKTVRFKGNFDIRLSKELVISVSRNDIKAVHRKDGYDYKFAQV

SEQ ID NO: 7924 - protein, 413 aa, unidentified
  REGION 1..413: note = Human gut metagenome
LMPCSPAKARLLLKEKKAIVVRRTPFTIQLTIATGESKQPVSLGVDAGYKHVGLSASTEKAELYASEVELRQDITDLLSARRALRQSRRNRKTRYRAPRFDNRIRTKRKGWLAPSVENRINAHLSRIETVIRLLPVTKISVETTSFDMQLLKNSDIAGKEYQESEQLGFWNVREYVLFRDGHVCQHCHGRSKDPVLNHLESRRTGGDSPGNLITLCETCHKELHRGEITLKAKRGQSFRAETFMGIMRWEVLDRLKASHPKLEVQNTYGYRTKHARIVNGIAKSHCADAFCIAGNLGAERLGEFLFQKQTRRNNRQIHKLSILKGGIRKRNQVPFEVKGFRLFDKVACKGEEGFIFGRRSSGYFDVRKLDGTRISAGISYKKLRLLEKRQTYLTEIRKEEALPPLPEGRGLRA

SEQ ID NO: 7925 - protein, 456 aa, unidentified
  REGION 1..456: note = Human gut metagenome
MSTCVCVLTNNGERLMPTFRLGKVRHLLKDGKAKIVKHHPFTIQLLYDSKTNTQPIETCEDVGYNYIGISVKSESHEYVSAQYDTLQDEKEHHNDCRKYRRTRRNRLRYRKSRFDNRKRDKGWLAPSLEHKKQLNISLVERYVSVIPITHVTVEVGSFDTMLLQSIQKGEAKPEGADYQEGPRYNLATLREAVFYRDNYTCQVCGRKIADGAILHMHHMFYWKGRHGYKLDELVTACEKCHTPANHQKGGKLFGFGEDKEFADLSGAAFMNAVRWQIVNALHTTYSKEFVTITYGAMTKENRIALQLEKSHNNDAYAMGDFHPVHRCGFRHYQKRRRNNRVLEKFYDATYIDTRTGNKAKGKELFNGRISRNHKKDSENLHKYRSKKVSKGRRSIRRQRYAIQPYDTVRLEGKTYITSGCHNKGTRLLIPANGKSKSVAISKIQVVCHAGAWIQII

SEQ ID NO: 7926 - protein, 434 aa, Lactobacillus sp.; identical to SEQ ID NO: 2383

SEQ ID NO: 7927 - protein, 418 aa, Moorena sp.; identical to SEQ ID NO: 6948

SEQ ID NO: 7928 - protein, 413 aa, unidentified; identical to SEQ ID NO: 3119
  REGION 1..413: note = metagenome

SEQ ID NO: 7929 - protein, 432 aa, Moorena sp.; identical to SEQ ID NO: 4244

SEQ ID NO: 7930 - protein, 344 aa, unidentified
  REGION 1..344: note = Human gut metagenome
MYVFVIGLDGTRLMPCKPRKARKLIEAHKAEIYKKQPFTIRLLYKTGCASQPITLGIDTGSQHIGIAVTSENKVLYQAEIELRSTMDKRSLMETRYSYRRSRRYRKTRYRSPKFRFHTKRTYSETLVKRKTTGIMTHWVKHTNSMSTNRPDGWLAPSMQSKVDHHIRWINRFLDVLPPDTKLRLEIARFDMARMKNPEVHNELYQHGPQYDYENLKAYVFNRDHYKCVVCKRKLGSKQPDGHSLKGMMHHITFRSKGATDNPDQLVTVCEYCHTPQAHKEGGVLWDLKEKHKSVQRGLRDATQMNIIRTRLVKAFPDAELTYGNITAADRKKMHQSHMLVMQLQ

SEQ ID NO: 7931 - protein, 418 aa, unidentified; identical to SEQ ID NO: 2425
  REGION 1..418: note = Human gut metagenome

SEQ ID NO: 7932 - protein, 469 aa, unidentified; identical to SEQ ID NO: 6998
  REGION 1..469: note = Bioreactor metagenome

SEQ ID NO: 7933 - protein, 331 aa, unidentified
  REGION 1..331: note = Human gut metagenome
LLSARRAFRRNRRNRKTRYRAPRFNNRVHSKHKGWLAPSVEVKIQEHITLIKRVCRILPVTLVRVETAEFDTQRLKAMLEGKPLPVGTDYQLGEMYDEYNVRQYVLKRDKYTCQCCGAHPTKTKAVKLHVHHIETRRTGGNAPNNLITLCTACHKALHAGKVTLNGKKRGKPLKDAAFMGIMRKTLMERLLKELKIPVQETYGYITKYLREKHSIPKSHTNDARCISKNPLAIPCDTCYYTKAIRHHNRQLHKATILKGGIRKANQAPYTVKGYRLWDKVSYNGSECFITGRRTSGYFALKKLDGTVVSNSASYKKLRLQEIATNYITERR

SEQ ID NO: 7934 - protein, 411 aa, unidentified; identical to SEQ ID NO: 2663
  REGION 1..411: note = Human gut metagenome

SEQ ID NO: 7935 - protein, 418 aa, Anoxybacillus sp.
IRPLAPCHEAVARKLLKQGKAAIYRRFPFTIILKKSVDESEIKATYRLKIDYGSRHTGLAILRGQEVVWLGQLDHRTDIKERIDKRRAFRRARRNRKTRYRKPRFLNRKRKEGWLPSSLESRVQNIQTWVNRLKKLCPIGNISYENAKFDTQLMRNPEINGVEYQQGTLQGYEVREYLLEKFGRKCCYCGKENVPLEVEHIIPKSRGGTDRVDNLCLACHDCNQRKGSKTAEEFGYSHIQEMVKKTLKDASVVNATRWKVYEVLKQTGLDVECGTGARTKMNRIRLDLPKTHYFDACCVGESTPNHLYFKTKEVLFIRAKGRGSRSRTNLDRYGFPRGYLARQKFFFGFQTGDMVKAVVPRGKYQGVWFGEVACRKTGSFDIKGKDGKRIAQGINYRYVQVIQRFDGYAYGKGVAELA

SEQ ID NO: 7936 - protein, 556 aa, Streptomyces sp.; identical to SEQ ID NO: 3394

SEQ ID NO: 7937 - protein, 431 aa, unidentified
  REGION 1..431: note = Human gut metagenome
MPDKVYVISRLGHPLMPCSPAKARHLLDDKKAKVVKRMPFTIRLLYGSTKYIQPIILGVDAGSKTIGLSASTAKEEVFAAEVMPRNDVVENLSTRREFRRARRNRTTRYRKPRSDNRVRSNHERRLAPSVKVKIQEHITSIKRVCTILPISKVVIETAEFDLQLLKAIQEGKPIPEGEDYQKGEMYGSYNVCQYVLWRDNYTCICCGVRGTPKNPVRLHVHHFESRKYSGNAPDNHGTLCDDCHKKFHLGIITDVKLKTRRRQSTRDAAFMGIMRKTLMWRLRTELFIPVAETKGYITKATREKLLVLPKSHTRDALAIAQGRHGFCIKEYAYVEPANHIYTVRPVRHHNRQLHKASILKGGIRKRNQASKYVFGFRLYDKVLYQGKACFVWGRRTSGTFLLRTIDGIKVKDGVSYRNLTLLERSSNYLIA

SEQ ID NO: 7938 - protein, 419 aa, unidentified
  REGION 1..419: note = Human gut metagenome
MVYVISQDGKPLMPCSDPIARLLLKQGKAKVKKREPFTIKLTYETTNYTQGLTLGVDTGSGTIGTAVSKDNGDIVYMSEVVVRNDITDKMTQRAKYRRNRRNRKTRYRKARWLNRASSIKKDRFSPTMQSKLHSHVREIEYIQSILPVTEMVFETGQFDMQLMKNPSLANSKVRPWGYQKGANYGFENTKAMVLNRDNYTCQCCKGKHKDSKLEVHHIVFRSQGGSDEESNLLTLCHTCHKDLHSGKINPKLSGKVKGNLKYATQMNSIRKQLFRFYPNAIETFGYVTKANRLHLGVDKEHYYDACTIATQGNAFNVKSNLYKKKCVSDGDFQKTKGIRSEQPIVTDKICGFRKFDKVRYFGNDYFIKGRMSTGYAILMDIDGNKIDFSTMPRGYKTPKLSNCKRITARSTVMTQVKVV

SEQ ID NO: 7939 - protein, 456 aa, unidentified
  REGION 1..456: note = Human gut metagenome
MSTCVCVLSNSGERLMPTFRLGKVRRLLKDGKAKIVKHHPFTIQLLYDSKTNTQPIEICEDVGYNYIGISVKSESHEYVSAQYDTLQDEKEHHDDCRKYRRTRRNRLRYRKPRFDNRKRSEGWLAPSLEHKKQLNIRLVERYVSVIPITHATVEVGSFDTMLLQAIQKVESKPEGVDYQKGPRYNLATLREAVFYRDNYTCQVCGRKIADGAILHMHHMFYWKGRHGYQLDELVTACEKCHTPANHQKGGKLFGFGEDKEFANLSGAAFMNAVRWKIVDALHATYGKEFVTITYGAMTKEKRIILGIEKTHSNDAYAMGDYHPVHRCVFRHYQKRRRNNRVLEKFYDATYIDARTGNKAKGKELFNGRISRNHKKDSEDLHKYRSKKVSKGRRSIRRQRYAIQPYDTVRLESKTYITSGCHNKGTRLLIPANVKSKSVAISKVQVVCHAGAWIQII

SEQ ID NO: 7940 - protein, 415 aa, unidentified
  REGION 1..415: note = Human gut metagenome
MVYVQDIDGKPMMPTTRHGKVRRLLKSNKAIVVNLCPFTIKLTYVTSDYKQEIVLGVDAGTKHVGLSATTKSKELYSSEVILRNDIVDLLSTRRELRRARRNRLRYRKPRFNNRIKSKRPGWIAPSVKYKIDAHIRVVENVCSILPISRIVIEVAQFDTQKIKNPNISGKEYQEGDQLGFWNTREYVLARDGHKCQYCKGKSKDKILNVHHIESRKTGGDSPSNLITLCETCHKEYHKGNIDLKIRRGKSLRDAAVMGIMKWRLYEEIKSKYDRVSMTFGYVTKYNRINHGFEKSHVSDAFVISKNFNAIRLGYYYKARLVRSHTRQIHKQKIQKGGIKRLNQSPFEVFGFRLFDRVMFENSYYFIFGRRKTGSFDIRYIDGKNQKNVTYKKLKLSRCKRFMIQMELNKKNTDMF

SEQ ID NO: 7941 - protein, 425 aa, Tolypothrix sp.; identical to SEQ ID NO: 6179

SEQ ID NO: 7942 - protein, 441 aa, unidentified
  REGION 1..441: note = Fermentation metagenome
MELRITYRKVKYFQGVDILVYIISIDGKPLMPCKPVIARLLLKQHKAKVIKKYPFTIKLLYKTKTEYTQPLTLGIDTGSSKIGSAVVDENNNVLYLSQVEVRNDITDKMKQRAKYRRNRRNRKTRYRKARWLNRKNSIKEDRFSPTIVSKINSHLKEINFVKSILPIQNVILETATFDPYALKNPAVLHNKWLYQKGVNYGFANTRAYVLGRDNYTCQYCKGKSKDSKLEVHHIIFRSQSGSDESKNLITLCKTCHGKLHNGKINLKKNGKVKGQLKHATQMNSIRQQLLRLLPEATETFGFITKEHRQLMKLPKEHYYDAVAIACLNNIENTGLIGVNFKTKNILFKRCIADGDFQQTKGIRSEQRIITGKIQGFRKLDKVEYQGKEYFIKGRMSTGYAILMDIEGNKINLKPIPKFERMKRMQARKSWILSQEVIQNIC

SEQ ID NO: 7943 - protein, 268 aa, Moorena sp.
MVYVVANDGQPLMPTERHGKVCRMLRSGMAKVIKKCPFTIQLQYESERNVQPVSLGVDAGSKHIGISATTKTKVLYESDVELRDDIVKLLATRRQLRRSRRSRKTRYRPARFDNRKRKEGWLAPSIQQKIGSHLTVVANVCKILPINQIIVETASFDIQKIKNPEIQGIEYQQGEQMDFWNVREYVFFRDGHTCQCCKGRSKDKILNVHHIESRKIGGNAPNNLITLCETCHKGYHNGTVILPKNIKRGMQFKDAAFMGIMRWAFTMH

SEQ ID NO: 7944 - protein, 406 aa, unidentified
  REGION 1..406: note = Human gut metagenome
MVYIKDIDGRPLMPTKRHGKVRWLLKENKAVVINLCPFTIQLTYKSTDHKQPVTLGIDAGAKHIGFSATAEKEELFACETTLRTDIVDLLSTRLQNRRTRRSRLRYRKPRFNNRGSSKKKGWVAPSVKQRIDSHLNEVNEIHKILPITKIVIEVAQFDTQKMKNHDISGSDYQNGEQLGFWNVREYVLFRDGHKCSHCKGKSKDPVLNVHHLESRKTGGDSPSNLVTLCESCHKAFHKGEIELKKKRGKSLRDAAVMGIMKWKLYEELKSRYDNVSMTFGYITKYNRIKYGIEKSHTSDAFVISRNFNAKRIERQYLKRLVRRHNRQIHKMKILKGGKKKNNQAPFEVFRFRLFDKVLYNNEICFIYGRRKSGNFNIRDFNGENPKDVSYKKLKLIRGKMHPIILK

SEQ ID NO: 7945 - protein, 427 aa, Enterococcus sp.; identical to SEQ ID NO: 5630

SEQ ID NO: 7946 - protein, 393 aa, Exiguobacterium sp.; identical to SEQ ID NO: 7321

SEQ ID NO: 7947 - protein, 442 aa, unidentified; identical to SEQ ID NO: 2939
  REGION 1..442: note = Human gut metagenome

SEQ ID NO: 7948 - protein, 419 aa, unidentified; identical to SEQ ID NO: 6355
  REGION 1..419: note = Human gut metagenome

SEQ ID NO: 7949 - protein, 465 aa, unidentified; identical to SEQ ID NO: 6840
  REGION 1..465: note = Human gut metagenome

SEQ ID NO: 7950 - protein, 437 aa, Sulfobacillus sp.
MVFVLDRQKNPLMSCTEKRARQLLERGRAIVHKMAPFTIRLKDRTAEGSTFQPLRVKFDPGSKTTGVALVLEGAKGSKVVFFGELVHKAGIKAKLDARRALRRGRRHRKTRYRKPRFQNRRRKAGWLPPSLEARVDQTLHVLVKLRKLAPFTDLSVEHVRFDTQKLENPEISGVEYQQGTLLGYEVREYLLEKWGRACVYCGATDVPLEVEHIIPKSRGGTDRVSNLALACHACNQVKGSRTAEEFGYPDIQVQARKPLKDVAMMNATRWRLYEQLKATGLPVEAGSGARTKMQRLNHGFPKEHYYDALCAGESTPDRFTSLPAYVQVWTAKGRGNRQRCRTDKHGFPIRYLSGKKVHFGFRTGDLVRTQKRRGKQVGTWAGRLTVRADGRFVVTTADGLRIEASWRSCHLLQRGDGWQYAQKLANLERREAASSPA

SEQ ID NO: 7951 - protein, 410 aa, unidentified
  REGION 1..410: note = Human gut metagenome
LTERETGDVQTVELCMDTGYLHIGTSVKSEKHEYLGVQIDTLTDEKQKHDACRMYRRQRRSRKRYRQSRFNNRKRSDGWIAPSLEHKKDIHIQTISRICNAMPITNITLEMGNFDTQVLKALEENRPLPQGTDYQHGERYGIATLREAVFARDKYTCQCCRKTIADGAILHVHHIIYRSRGGTNRMSNLATVCDRCHTPANHKPGGRLYNWKPKIASFKGATFMTAVRWKMYNEVKSKFSDINIHITYGAETKEQRRAFDITKSHVNDALVMGQFHPKHRSRPVCYKKKRRNNRCLEKFYDAKYIDSRDGKKRSGQELFNGRINRNHKKDSENLHQYRQQKVSAGRRTIRKQHYSIQPHDIIVFNRQQFETSGCHCNGARAILLPQKKSVAIKKLSIHKYAGGYFKSDFT

SEQ ID NO: 7952 - protein, 431 aa, unidentified
  REGION 1..431: note = Human gut metagenome
MPNKVYVINKHGRPLMPCSPAKARHLLDAGKAKVKKRTPFTIQLVYGSSGYTQEVILGVDAGSKTIGMSASTTKEELLSAEVKPRNDVVDLLSTRREFRRVRRNRKTRYRKPRFDNRVRSKHKEWLAPSVEVKIQEHITSIKRVCRILPVSKVVIETAEFDLQLLKAIADGKSVPQGEDYQKGEMYGHYNVRQYVLWRDDYTCQCCGAHTTKKKEVRLHVHHLESRKTGGDAPSNLITLCDSCHEKLHKGLIAEKDFKKRKRRSTWDATFMGIMRKTLMQRLCSELPIHVVETRGYITKATREKLLVLPKSHINDALAIAQGKHGFNVGYLPGILQIDMIYTIRPVRHHNRQLHKATILKGGIRKSNQTGKYVFGYRLFDKVQFNGQDCFIWGRRTTGIFTIKTINGKMIKDGISFKKLKLVEKSTSYLIA

SEQ ID NO: 7953 - protein, 413 aa, unidentified; identical to SEQ ID NO: 5215
  REGION 1..413: note = metagenome

SEQ ID NO: 7954 - protein, 355 aa, Halomonas sp.
FRRRRRSANLRYRAPRFNNRIKPKGWLAPSLQHRVDTVMAWVNRLSKSAPITGISQELVRFDTQKLESPEISGVEYQQGTLLGYEVREYLLEKWGRECAYCGTADTPLEIEHVVPRSRGGSNRVSNLTLSCHPCNAEKDSQTLTDFFATNKGLKKRLKANGLSADAQLERVQRQLKQPMRDASAVNATRWALFSALKTTDLPVAVSSGGRTKYNRQRLNIPKTHALDAACVGAFGKLYDWTVPTLTIKAMGRGSYQRTRLTKHGFPRGFLMRQKQVHGFQTGDMVRAIVPTGKKAGTHTGRVAIRKTGSFNIQAEYGAVQGISHKYCTLIQRSDGYGYYVTLFSNLTGEAGRAVA

SEQ ID NO: 7955 - protein, 427 aa, Moorena sp.; identical to SEQ ID NO: 4008

SEQ ID NO: 7956 - protein, 413 aa, Clostridium sp.; identical to SEQ ID NO: 4134

SEQ ID NO: 7957 - protein, 399 aa, unidentified
  REGION 1..399: note = Human gut metagenome
KAIVVRRTPFTIQLTIATGEAKQPVSLGVDAGYKHVGLSASTEKAELYASEVELRQDVSDLLSARRALRQSRRSRNTRYRAPRFDNRIRTKRKGWLAPTVENRINVHLSRIETVLRLLPVTKITVETASFDTQLLKNPDIAGKEYQEGEQLGFWNVREYVLFRDGHVCQHCHGRSKDPVLNVHHLESRRTGGDSPGNLITLCETCHKALHRGEIKLKAKRGRSFRAETFMGIMRWGVLNRLKASHPKLEVHNTYGYRTKHARIANGIAKSHCADAFCIAGNFGAKRLGEFFFQKQTRRNNRQIHKLSILKHGLRKRNQAPFEVKGFRLFDKVVCQGEEGFIFGRRSSGSFDVRKLDGTRISAGISYKKLRLLEKRRTYLKEIRKEEALPPLPEGRSLRA

SEQ ID NO: 7958 - protein, 464 aa, unidentified; identical to SEQ ID NO: 3972
  REGION 1..464: note = metagenome

SEQ ID NO: 7959 - protein, 418 aa, Moorena sp.
MQNYVFVIDANKQPLNPIHPRKARRLLDKGKAAVFRMYPFTIILKTAISNPTISPGQIKIDPGSKVTGFALVQNNQVIWGMELEHRGGFIKKKLESRKAVRRGRRNRHTRYRKPRFLNRKRSEGWLPPSLEHRVSTIETWVKRLTKFCPINEIWVERVKFDTQKMQKPEISGVEYQQGELAGYEVREYLLEKWRRECTYCGKQSVPLQIEHIQPKSLGGSNRVSNLCLACEKCNQRKGNKPIEEFLKNKPSLLQKIKTKAKQPLLDAAAVNTTRNKLVKVLQNILLVVTGTGAQTKYNRIKLGLPKQHWIDAACVGDIETLVLKTYQPLLVTCKGQGGRQKAALNKYGYPIRHNPLKPIKGWVTGDIAKHQKLGIGKVTPRSKGSFGFTPLGTKGYKSCKRQDISAIHRKDGYTYRFC

SEQ ID NO: 7960 - protein, 458 aa, Moorena sp.; identical to SEQ ID NO: 4474

SEQ ID NO: 7961 - protein, 518 aa, Anaerostipes sp.; identical to SEQ ID NO: 3878

SEQ ID NO: 7962 - protein, 422 aa, unidentified
  REGION 1..422: note = Human gut metagenome
LNKRGKPLMPCSPAKARLLLKEKKAIVVRRTPFTIQLTIATGESKQPVSLGVDAGYKHVGLSASTEKAELYASEVELRKDITDLLSARRALRQSRRNRKTRYRAPRFDNRIRTKRKGWLAPSVENRINAHLSRIEAVLRLLPITKITVETASFDMQRLKNPDISGKEYQEGEQLGFWNVREYVLFRDGHVCRHCHGRSKDPVLNVHHLESRRTGSDSPDNLITLCETCHKALHRGEITLKAKRGQSFRAQAFMGIMRREVLNRLKASYPELKVHETYGYLTKHARIANGSVKSHGADAFCIAGNLGAERLGEFFFQKQTRRNNRQIHKLSILKGGIRKRNQAPFEAKGFRLFDKVACQGEEGFIFGRRSSGSFDVRKLDGTRISAGISCKKLRLLERRRTYLTEIRKEEALPPLPEGRGLRA

SEQ ID NO: 7963 - protein, 432 aa, Moorena sp.
MSQVFVLDRDRQPLDPCHPARARELLRNGRAAVLRRLPFTIILNDRRRAASVVHEHRVKIDPGSRTTGLALVAGARLLWAAELSHRGQRITAALRSRHAIRRGRRQRQTRYRPPRFLNRRRPASWLPPSLQSRVCHVMTWVQRLARSCPMTALSQELVRFDTQRMQHAEITGVAYQQGVLAGYEVREYLLEKWHRTCAYCHKTGVPLQVEHIVPKVRGGSDRVSNLTLACGPCNQKKGAQTASEFGFPQVQAQARMPLHDAAAVNATRWALYGQLCATGLPVETGTGGRTKYNRTRLGIPKSHWGDAACVGASTPETLHVAGIAPLGIRAMGHGTRQMCRTEAHGFPKNHRGRQKRYWGLQTGDLVKAMVPTGKYVGTWVSRVVVRASGWFDLVIDGKKTSVHHKHCTRLWAADGYTYTLPAVAGPAVSSPR

SEQ ID NO: 7964 - protein, 512 aa, unidentified
  REGION 1..512: note = Human gut metagenome
MSTVYVLNKDGKPLMPTTRGGHVRHLLKEQKARVVRTKPFTIQLLYETNDVVQPLYLGIDPGRTNIGVAVVKTDGTAVFTAHLETRNKEIPKLMQGRKKARRARRTNGRRCRRQRRAKANGTISKKCVKQATAQNGSVSKRANEIGVIKRHLPGCEKEVLCIGIKNKEAKFSNRTRPEGWLTPTANQLLQTHINLVKKIQKFLPISDVVLEINKFAFMRLDNPNVQKWQYQQGPLYQKASLEEAVSEMQEHHCLFCKNTIDHYHHVVPQHKNGSNTIGNIVGLCAKHHDLVHKDTSWQEKLAKKKTGLNKRYGALSVLNQIIPALTKELSSLFPKHFFATNGKSTYDYRAAHGVSKDHWLDAYCIAGSVLPNDACDNNINNRVPYELKQFRRHDRRALHKENMSRVYTLNGKKVATNRHKAVEQATDSLEEFCQNHPDDVCKLKVKEHHPEYRNPKRNFPGCVFLVGKHTHVMQGTSGSHNGKADGYYDTNGNSYSSGKCKFVVKNEGIVFT

SEQ ID NO: 7965 - protein, 456 aa, unidentified; identical to SEQ ID NO: 7423
  REGION 1..456: note = Human gut metagenome

SEQ ID NO: 7966 - protein, 275 aa, unidentified
  REGION 1..275: note = Human gut metagenome
VETASFDLQLLKNPDISGKEYQEGEQLGFWNIREYVLCRDGHVCQHCYGRSKDPVLNVHHLESRRTGGDSPGNLITLCETCHKALHRGEITLKAKRGQSFRAEAFMGIMRWEVHNRLRALHPGIEVSNTYGYRTKHARIANGIAKSHCADAFCIAGNLGAERLCEFFFQKQTRRNNRQIHKLSILKGGIRKRNQAPFEVKGFRLFDKVACQGEEGFIFGRRSSGFFDVRKLDGTRISAGISCKKLHLLEKRRTYLTEIRKEEALPALPEGRGLRA

SEQ ID NO: 7967 - protein, 415 aa, unidentified; identical to SEQ ID NO: 6883
  REGION 1..415: note = Human metagenome

SEQ ID NO: 7968 - protein, 268 aa, unidentified
  REGION 1..268: note = Human gut metagenome
LLKAIADGKPVPQGEDYQQGEMYGHYNVRQYVLWRDGYTCKCCGAHTTKKKEVRLHVHHLESRKVGGDAPDNQVTLCESCHEKLHKGLIAEKDFKKRKRRSTRDATFMGIMRKTLMQRLCSELPIPVIETRGYITKATREKLLVLPKSHTNDALAIAQGKQGFNVGYLPGIVQIDKICTIRPVRHHNRQLHKATILKGGIRKSNQTEKYVFGYCLFDKVQFNGQDCFIWGRRTTGIFTIKTINGKMIKDGISFKKLKLVEKSTSYLIA

SEQ ID NO: 7969 - protein, 419 aa, Moorena sp.; identical to SEQ ID NO: 3991

SEQ ID NO: 7970 - protein, 442 aa, unidentified; identical to SEQ ID NO: 2903
  REGION 1..442: note = Human gut metagenome

SEQ ID NO: 7971 - protein, 458 aa, Moorena sp.; identical to SEQ ID NO: 4474

SEQ ID NO: 7972 - protein, 417 aa, Ktedonobacter sp.; identical to SEQ ID NO: 7380

SEQ ID NO: 7973 - protein, 431 aa, unidentified
  REGION 1..431: note = Human gut metagenome
MPNKVYVINKHGRPLMPCSPAKARHLLDAGKAKVKKRTPFTIQLVYGSSGYTQEVILGVDAGSKTIGVSASTKREELFAANVIPRNDVVDLLSTRREFRRARRNRKTRYRKPRFDNRVRSKHKGWLAPSVEVKIQEHITAIKTVCRILPVSKVVVETAEFDLQLLKAIADGKPVPQGEDYQKGEMYGHYNVRQYVLWRDNYTCQCCGTHPSKKKEVRLHVHHLESRKVGGDAPDNQVTLCESCHEKLHKGLIAEKDFKKRKRRSTRDATFMGIMRKTLMQRLCSELLIPVIETRGYITKATREKLLVLPKSHTNDALAIAQGKRGFNVGYLPEIAQIDKIYTIRPVRHHNRQLHKAAILKGGIRKSNQAGKYVFGYRLFDKVQFNGQDCFIWGRRTTGIFTIKTINGKMIKDGISFKKLKLVEKSTSYLIA

SEQ ID NO: 7974 - protein, 437 aa, unidentified
  REGION 1..437: note = Human gut metagenome
MSTCVCVLSNSGERLMPTFRLGKVRRLLKDGKAKIVKHHPFTIQLLYDSKTNTQPIEICEDVGYNYIGISVKSQSHEYVSAQYDTLQDEKACHDSCRKLRRTRRNRLRYRKPRFDNRKRGEGWLAPSLRHKKELNVNVVKMYCAVMPITHATVEVGSFDTMLLHAIQKGESKPEGVDYQKGPRYNLATLREAVFYRDNYTCQVCGRKIADGAILHMHHMFYWKGRHGYQLDELVTACEKCHMPANHQKGGKLFGFGEDKEFANLSGAAFMNAVRWQIVNALYATYGKEFVTITYGAMTKEKRIALQLEKTHSNDAYAMGNCHPAHRCEFRHYQKRCRNNRVLEKFYDATYIDTRTGNKAKGKELFNGRISRNHKKDSEDLHKYRSKKVSKGRRSIRRQRYAIQPYDTVRLEGKTYITSGCHNKGTRLLISANGKSKS

SEQ ID NO: 7975 - protein, 483 aa, Oscillochloris sp.; identical to SEQ ID NO: 6098

SEQ ID NO: 7976 - protein, 512 aa, unidentified
  REGION 1..512: note = Human gut metagenome
MSTVYVLNKDGKPLMPTTRCGHVRHLLKEQKARVVTSKPFTIQLLYETDDVVQPLYLGIDPGRTNIGVAVVKADGTAVFTAHLETRNKEIPKLMKKRKDSRRARRTNGRRCRRQRRAKANGTISKKCVKQTTAQNGSVSKRAKEIGVIKRHLPGCEKDVLCIGIKNKEAKFSNRTKSEGWLTPTANQLLQTHINLVKKIRKFLPISDVVLEINKFAFMQLDNPNVQKWQYQQGPLYQKANLEEAVSEMQEHHCLFCKKPIAHYHHVVPQSENGSNTIGNIVGLCTKHHDLVHKDTAWQKKLAKKKTGLNKKYGALSVLNQIIPALTKELSSLFPKHFFATNGKSTYDYRAAHGVRKDHWLDAYCIACSVLPNDVCDKNINSRVLYELKQFRRHDRRALNNENMSRVYTLNENVVATNRHKATKQTTDSLEEFRQNHPDDACKLKVKEHHPTYRNMSRNYPGSVFLVGNQVHVMQGVAGSKDGKATTYKDTNANSIAAGKCKFVAKNSGILFV

SEQ ID NO: 7977 - protein, 442 aa, unidentified
  REGION 1..442: note = Human gut metagenome
MSTSVFVLDKKHRPLMPCRPARARRLLRAGRARVVKRFPFVIRLVDRTVEQSEVQPVLIKLDPGSRETGAAVVRDDGKKRHHALAFFVIEHRGGAIRDALKARSAFRRRRRSQNFRCRSPRFLNRVKPKGWLPPSLRHRVETTLSFVRRMCRYLPVSGIAAELVKFDSQKLQTPEVSGIEYQQGTLFEYEVREYLLEKFGRKCVYCGAEGVPLNIDHVVPRAKGGSNRVSNLVLACVSCNQKKGARSLEDFLKGKPEVLARVRRELKTPLRDAAAVNATRWVLFNELKATGLPVETGSGALTKLNRHAFGVEKEHWLDALCVGRLNGAVTRKGLNVLEIRCMGRGSRQRTRLTKYGFPRGYLMRQKCVHGFATGDMVEANVPKGKKAGLWRGRVAVRVSGSFNIQTPKGVIQGVGWKHCRLISHNDGYGYAWLGHAPHSSPA

SEQ ID NO: 7978 - protein, 419 aa, unidentified; identical to SEQ ID NO: 3670
  REGION 1..419: note = Human gut metagenome

SEQ ID NO: 7979 - protein, 480 aa, unidentified
  REGION 1..480: note = metagenome
LYTKPLDNIGEGSLPPSGEINLKGMTFMVYVKSIDGKALMPTSNAKARKLLKQKKAKVVSLRPFVVKLTYKTKTEYIQKLNLGVDSGYSNIGFSVIDAKQEYIAGEVKLLEGMKKRLLEKASYRRIRRSRLRYRKARWNNRVKSKKKGWLAPSLKHKLDTHIKFIDYLKNILPIEKITIEVANFDIQKMKDDLISGIDYQNGDMFGFWNVREFVLHRDGHKCQNPNCKHKDKKEQILKVHHIRYRSEGGSDRPENLITLCSKCHIPANHKKGKFLYDWCVNGKKVRGFKDATFMSMIRWYLVNELKSKHNNVSITYGYITKNHRIQNGIEKSHLNDAFAITKGTNQARTKDRFLVIQDRLKNRSLEKFYDSKIIDIRTGKKVSGGDLSCGRSTRNKNLNTENLRKYRGAKISKGQRRIRKQKYFYQPNDLVKYDGKVYTVKGTQNEGKYIALKEIKKVPKVELLIPYVFKKGLNWSYGLC

SEQ ID NO: 7980 - protein, 413 aa, unidentified
  REGION 1..413: note = Human gut metagenome
MTSYAFVLDANGKQLAPAKEQKAWFLIRKKRAALVSKYPMVIQLKKEIPENEICKDEIRCGIDDGGLHVGIALVQKCKTKNKVVFKGTIEQRNDVKHLMEVRRSYRHYHRYHKRYRPARFDNRKSSKRKKRIAPSILQKRQAIIRVIHWLNKWINITNYWLEDVSIDIRALTDGYKPYRWQYQKSNRLDENIRKAAILRDGGKCMECGKLNCRLEVHHIKPRRRNGSDTLDNLITLCKSCHQKTEGQEELYMARYFSLLKSSDHKNLNYAQHVMIGKEWLRKQLSSLGVLYLTNGGDTANKRIDWNIEKSHANDAVCITNLQPDTYDMKEWTVKPMRRQSKAKTDNVLGIKHRDLVEYTLKNGETHRGYVTALYPEQKAINFQSPTKHCKKVNARKCKLLWKYSKIYWFENAS

SEQ ID NO: 7981 - protein, 454 aa, Calothrix sp.; identical to SEQ ID NO: 4352

SEQ ID NO: 7982 - protein, 419 aa, unidentified
  REGION 1..419: note = Human gut metagenome
MVYVISQDGKPLMPCSDPIARLLLKQGKAKVKKREPFTIKLTYETTNYTQGLTLGVDTGSGTIGTAVSKDNGDIVYMSEVVVRNDITDKMTQRAKYRRNRRNRKTRYRKARWLNRASSIKKDRFSPTMQSKLHSHVREIEYIQSILPVTEMVFETGQFDMHLMKNPSLANPKVRPWGYQKGANYGFENTKAMVLNRDNYTCQCCKGKHKDSKLEVHHIVFRSQGGSDEESNLLTLCHTCHKDLHSGKINPKLSGKVKGNLKYATQMNSIRKQLFRFYPNAIETFGYVTKVNRLHLGVAKEHYYDACTIATQGNAFNVKSNLYKKKCVSDGDFQKTKGIRSEQPIVTDKICGFRKFDKVRYFGNDYFIKGRMSTGYAILMDIDGNKIDFSTMPRGYKTPKLSNCKRITARSTVMTQVKVV

SEQ ID NO: 7983 - protein, 442 aa, unidentified
  REGION 1..442: note = Human gut metagenome
MSTSVFVLDKKHRPLMPCRPARARRLLRAGRARVVKRFPFVIRLVDRTVEQSEVQPVLIKLDPGSRETGAAVVRDDEKKRHHALAFFVIKHRGGAIRDALKARSAFRRRRRSQNFRCRSPRFLNRVKPKGWLPPSLRHRVETTLSFVRRMCRYLPVSGIATELVKFDSQKLQNPEVSGVKYQQGTLFAYEVREYLLEKFGRKCVYCGAEGVPLNIDHVVPRAKGGSNRVSNLVLACVSCNQKKGARSLEDFLKGKPEVLARVRRELKTPLRDAAAVNATRWVLFNELKATGLPVETGSGALTKFNRHAFGVEKEHWLDALCVGRLNGVVTRKGLNVLEIRCMGRGSRQRTRLTKYGFPRGYLMRQKCVHGFATGDMVEANVPKGKKAGLWRGRVAVRVSGSFNIQTPKGVIQGVGWKHCRLISHNDGYGYAWLGHAPHSSPA

SEQ ID NO: 7984 - protein, 411 aa, unidentified
  REGION 1..411: note = hot springs metagenome
MVYVISKDGKPLMPTKRYGKVRRLLKQKLARVVKREPFTIQLLYDTTDYTQDVIVGVDIGSKTVGISAVSEKEELFSAEITLRQDIKDLLLERRGYRRSRRYRKRRYRKARFLNRKRPEGWLAPSIKWKVDAHVRIVKFLSKILPILKVVVEVAPFDTQKIVNPNIQGKEYQEGPQKGFWDVREYCLWRAGYKSEISGKKGVLEVHHIIPRSKGGTNNPSNLIVLTVEEHEAIHEGKLKIPKSKLEKIKILKDASHVSIIGWYIVNTLKEKQYNVKVTYGSFTKAKRIEIGLEKSHRNDAFVIAGGNKNVKRTNLWYIGKFFRRQNRSLHKANPIKGGRRPVNTIKQAYEFRRFDKVKYQGKVYIITALRSKGYFSIGDLSGKKIHDGVKYTKLKRIEIAKTLMFVGSNIT

SEQ ID NO: 7985 - protein, 467 aa, Moorena sp.
MPTRRRGHVKRLLNKGKARIVSHVPFVIQLKYDGSKNTQPLFGGIDPGRTNIGAAVVTPEGKCVYRSHTASRNRDVPKKMEARKSHRQASRRGERLRRKRRARANGTTTEFPDGRMLPGYKKPVMVKDIINTTAKFNYRKRPEKWLTPTANQLVQTHENLICRISAILPVTDWTIEANKFAFMQMDNGKCYGTDFQNGRMKGYKNSHEYVYIRQNGVCPMCGAPIEHYHHIIPRSRGGSDLPENILGVCMKCHAQIHKGELRSDMKGVMKKYGSLSVLNQAIPYIWQWMTETYGEDHAHFCTGVETQTVRDDSGLPKDHDIDALCIACIGSGITPVRRLPRTFEIVQFCRHSRANINNQRERTYRLDGRIVCRNRHKRFEQKGDSIEEFRQKYPDQVSRLTVTKSTRYYNDADRLMPGAVFLFDGERYVLQSQLTGGRYYRAVGCEKRNFPAAKCTIIRENAGLVYV

SEQ ID NO: 7986 - protein, 430 aa, unidentified
  REGION 1..430: note = gut metagenome
MPKVYVLNRHGRPLMPCTPAKARHLLDAGKAKVRHRTPFTIQLLYGSTGYTQEVILGVDAGSKTIGLSAATETEELFSAEVKPRNDVVELMSARRQFRRARRNRTTRYRKPRFDNRVRSKHKGWLAPSVEVKIQEHMTAIRRACAILPVSKVVVETAEFDLQLLKAVAEGKPVPQGEDYQKGEMYGHYNVRQYVLWRDSYTCCICGVHGSVRKGVPLHVHHLESRRVGGDAPDNLVTLCTACRDKLHKGIIMAADIKKRKRRSTSDATFMGIMRMTLLRRLREQLPVPVVETRGYITKATRENLLVLPKSHANDALAIAHGPQGFRAEHLPNIRQADRLYTIRPVRHHNRQLHKATILKGGVRKTNQAEKYICGFRLYDKVLYNGIECFVWGRRTSGSFLLRQLNGEKVKDGVSYKHLKLLERSQSYLVA

SEQ ID NO: 7987 - protein, 416 aa, unidentified
  REGION 1..416: note = Ga0373625_0013209
MVYVLSKEGKPLMPTNRHGKVRHLLKDGKAKVIKRTPFTIQLLYDSEEYTQPITLGIDSGYQNIGLSAVTESQEVFSAEVKLRTDIVKLNSERRQYRRARRNRKTWYREPRFLNRKKDNGWLAPSIQHKLDSHLKLIDTVKKILPITKINIEVANFDIQKIKNPEIDGIGYQNGDQSGFWNIREYVLYRDGHICQHCKGKSGDKILEVHHINSRQTGGDRPDNLITLCGLCHEKVSQNKLQLKIKVSKGYKAESFMSMVRWRLVNILRNTNPEENPNVSYTYGYITKGNRIALGVEKTHINDAFVIAGGTKGISQTCFNSYLIQQVRKCNRKLYKGIRSHIKNTASRFVNGFQRFDKILFENIECFIFGRRVTGRFDIRLLDGTVVSSSVSYKQLTLLECSSTLLIERGSGNSSNS

SEQ ID NO: 7988 - protein, 424 aa, Enterococcus sp.; identical to SEQ ID NO: 4410

SEQ ID NO: 7989 - protein, 360 aa, unidentified
  REGION 1..360: note = Human gut metagenome
MSTTVFVLDKKHRPLMPCRPARARRLLRAGRARVVKRFPFVIRLVDRTVEQSEVQPVLIKLDPGSRETGAAVVRDDGKKRHHALAFFVIEHRGGAIRDALKARSAFRRRRRSQNLRCRSPRFLNRVKPKGWLPPSLRHRVETTLSFVRRMCRYLPVSGIAAELVKFDSQKLQTPEVSGIEYQQGTLFEYEVREYLLEKFGRKCVYCGAEGVPLNIDHVVPRAKGGSNRVSNLVLACVSCNQKKGARSLEDFLKGKPEVLARVRRELKTPLRDAAAVNATRWVLFNELKATGLPVETGSGALTKFNRHAFGVEKEHWLDALCVGRLNGAVTRKGLNVLEIRCMGRGSRQRTRLTKYGFPRG

SEQ ID NO: 7990 - protein, 453 aa, unidentified
  REGION 1..453: note = Human gut metagenome
MSVAVVSKTGMLLMPTSEYRARKLLKSKKAIIHGYHPFTIQLTERETGYIQPVELCMDTGYIHIGTSVKSEKHEYLGEQIDTLTDERQKHDACRMYRRQRRNRKRYRQPRFNNRERDDGWIAPSLEHKKTIHIQAISRICKVMPVTDITLEMGNFDTQVLKAREEGRPLPQGLDYQHGERYSVTTLREAVFLRDGYTCQCCGRTIKDGAILHAHHVVYRSQGGTNRMSNLITVCDKCHTPANHKPGGKLYGCKPKVASFKGATYMTTIRWKLYNEVKALFPDIDIHITYGAETKERRRAFDITKSHVNDAFVMGQFHPKHRSKPVCYKKKRRNNRCLEKFYDAKYIDSRNGKTRTGQELFNGRISRNHKKDSENLHQYRRQKISAGKRTIRKQHYAIQPHDIVIFNGEKFETSGCHNNGTRVILLPQKKSVAIKKLNIYRYAGGYFKSAFNQK

SEQ ID NO: 7991 - protein, 405 aa, Pseudomonas sp.
VAVYVLDKTGTPLMPCSEKRARLLLERGRARIHRQVPFVIRLVDRRQADSALQSLTLKFDPGSKFTGIALVRQKGQRVSVLSLMELAHRGAAIRQAMQQRAAFRRRRRGQNLRHRTPRFDNRTRPEGWLPPSLRHRLDTTLGWVGRMRNWAPISDLAVERVKFDMQAIQNPEISGVQYQQGELAGYEVREYLLEKWGRCCAYCDAENTPLEIEHIVPRSAGGSDRVPNLTLACRPCNQRKGNQPVEVFLKARPELLARIKAKAKVPLRDAAAVNATRNALFRALLDTGLSVTTGTGAQTKFNRRCLGLPKTHALDAASVGEIRAIEHWQRPTLAIKATGRGEYQRTRLTAHGFPRGYLTRQKRHFGFQTGDQVRAEVPTGKRLAPTRVASPCARPAASTSRRLMA

SEQ ID NO: 7992 - protein, 431 aa, unidentified
  REGION 1..431: note = Human gut metagenome
MPNKVYVINKHGRPLMPCSPAKARHLLDAGKAKVKKRTPFTIQLLFGSTGYTQEVILGVDAGSKTIGLSASAETEELLSAEVKPRNDVVDLLSTHREFRRARRNRKTRYRKPRFDNRVRSKHKGWLAPSVEVKIQEHITSIKRVCRILPVSKVVIETAEFDLQLLKAIADGKPVPQGEDYQKGEMYGHYNVRQYVLWRDDYTCQCCGAHATKKKEVRLHVHHLESRKVGGDAPDNQVTLCESCHEKLHKGLITAKDFKKRKRRSTRDATFMGIMRKTLMQMLCSELPIPVVKTRGYITKATREKLLVLPKSHTNDALAIAQGKRGFNVGYLPEIAQIDKICTIRPVRHHNRQLHKAAILTGGIRKSNQAEKYVFGYRLFDKVQFNGQDCFIWGRRPTGIFTIKTINGKMIKDGISFKKLKPVEKSTSYLIA

SEQ ID NO: 7993 - protein, 451 aa, unidentified
  REGION 1..451: note = Human gut metagenome
MSVAVISKTGERLMPTSEYRARKLLKSGKAIKHSYHPFTIQLTEREAGDIQPIELCMDTGYIHIGISVKSKKHEYLAEQIDTLTDERGRHDACRMYRRQRRSRKRYRQARFNNRKRDQGWIAPSLEHKKKIHIQAISRINKVMPITDITMEMGNFDTQVLKAKEEGKPLPQGAEYQHGERYGIATLREAVFARDGYKCQCCGRTIKDGAILHVHHIKYRSQGGTNSMSNLATVCDKCHTPKNHKPGGKLYNWKPKLPSFKGATFMTTIRWQLYNEVKALFPDIDIHITYGAATKERRRELDIDKSHVNDAFVMGQFHPKHRIKAVLYKKKRRNNRCLEKFYDAKYIDSRDGKKRSGQELFNGRINRNHKKDSENLHQYRLQKVTAGKRAVRKQHYKIQPHDIVIYESRKRETAGCHCNGTRVMLLPDKKSISVKKVKIYKYAGGYFKSAFN

SEQ ID NO: 7994 - protein, 431 aa, unidentified
  REGION 1..431: note = Human gut metagenome
MPNKVYVINKHGRPLMPCSPAKARHLLDAGKAKVKNRTPFTIQLVYGSSGYTQEVILGVDAGSKTIGMSASTTKEELLSAEVKPRNDVVDLLSTRREFRRVRRNRKTRYRKPRFDNRVRSKHKEWLAPSVEVKIQEHITSIKRVCRILPVSKVVIETAEFDLQLLKAIADGKSVPQGEDYQKGEMYGHYNVRQYVLWRDDYTCQCCGAHATKKKEVWLHVHHLESRKVGGDAPDNQVTLCESCHEKLHKGLITEKDFKKRKRRSTRDATFMGIMRKTLMQRLCSELPIPVVETRGYITKATREKLLVLPKSHTNDALAIAQGKRGFNVGYLPGIIQTDKIYTIRPVRHHNRQLHKAAILKGGIRKSNQVGKYVFGYRLFDKVQFNGQDCFIWGRRTTGIFTIKTINGKMIKDGISFKKLKLAEKSTSYLIA

SEQ ID NO: 7995 - protein, 413 aa, unidentified; identical to SEQ ID NO: 2636
  REGION 1..413: note = Human gut metagenome

SEQ ID NO: 7996 - protein, 451 aa, unidentified; identical to SEQ ID NO: 7526
  REGION 1..451: note = Human gut metagenome

SEQ ID NO: 7997 - protein, 431 aa, unidentified
  REGION 1..431: note = Human gut metagenome
MPNKVYVINKHGRPLMPCSPAKARHLLDAGKAKVKKRTPFTIQLLFGSTGYTQEVILGVDAGSKTIGLSASAETEELLSAEVKPRNDVVDLLSTRREFRRARRNRKTRYRKPRFDNRVRSKHKGWLAPSVEVKIQEHITSIKRVCRILPVSKVVIETAEFDLQLLKAIADGKPVPQGEDYQKGEMYGHYNVRQYVLWRDDYTCQCCGAHATKKKEVRLHVHHLESRKVGGDAPSNLITLCDSCHEKFHKGIITAANLKKRKRRSMRDATFMGIMRKTLIQRLRAELTIPVAETRGYITKTTREKLLVLPKSHTNDALAIALGKHGFNVGYLPEIAQIDKIYTIRPVRHHNRQLHKVTILKGGIRKSNQAEKYVFGYRLFDKVQFNGQDCFIWGRRTTGIFTIKTINGKMIKDGISFKKLKPVEKSTSYLIA

SEQ ID NO: 7998 - protein, 406 aa, unidentified; identical to SEQ ID NO: 3980
  REGION 1..406: note = Human gut metagenome

SEQ ID NO: 7999 - protein, 392 aa, Moorena sp.
MQNYVFVIDTNKQPLNPIPPKKARRLLNKGKAAVFRMYPFTIILKTAIRQSRRCANNNPSISPCQIKIDPGSKVTGFALVQNNQVIWGMELEHRGGLIKKKLESRGAVRRGRRNRNTRYRKPIFLNRKRPEGWLPPSLEHRILTIQTWVKRLIKFCPVNEIWVERVKFDTQKMQNPEISGIQYQQGELAGYEVREYLLEKWGRECTYCGKQSVPLQIEHIHPRSLGGSDSALPTLRERVSNLCLACEKCNQRKGNKPIEDFLKKKPSLLQKIKSKAKQPLKDATAVNATRNKLVKVLQLIKVVVTGTGAQTKYNRTRLELPKQHWIDAACVGDIETLVLRTSQPLLVTCKGPGGRQKAALNKYGYPIRHNPLKPIKGACYWGHSQASKTRNR

SEQ ID NO: 8000 - protein, 462 aa, Moorena sp.
MSAFVLDRNGRPLMPCSEKRARHLLARGRARVHRVMPFVIRLVDRMADSCALQPLRIKLDPGSKVTGVALVREADSGIAVINLFELIHRGRQISEALTARRGFRRRRRGANLRYRAPRFLNREKPEGWLPPALQHRVDTTMAWVQRIRRWVPITALSSELVRFDLQQLENPEISGLEYQQGTLAGYEVREYLLEKWKRTCIYCDAKDRPLQIEHLTARARQGSNRVGNLGLACGDCNQDKGALDVRAYVKDSKRLARILATASHPLRDAAAVNTTRWALTDTLRATGLPLEVASGGRTKFSRITHDLPKTHALDAVCVGRVDAINDWKRPSLSIKASGRGSYQRTRLTRHGFPRGYLMRQKQVQGFQTGDHVRADVPNGKKAGMHVGRVAVRATGYFNIQTASTVVQGINHRHCRLIQRGDGYAYSLQSTDSYRQGDAGVWRAAHAALSLPGLNPEVSRAFG

SEQ ID NO: 8001 - protein, 480 aa, unidentified
  REGION 1..480: note = Human gut metagenome
LYTKPLDNIGEGSLPPSGEINLKGMTFMVYVKSIDGKALMPTSNAKARKLLKQKKAKVVSLRPFVVKLTYKTKTEYIQKLNLGVDSGYSNIGFSVIDAKQEYIAGEVKLLEGMKKRLLEKASYRRIRRSRLRYRKARWNNRVKSKKKGWLAPSLKHKLDTHIKFIDYLKNILPIEKITIEVANFDIQKMKDDLISGIDYQNGDMFGFWNVREFVLHRDGHKCQNPNCKHKDKKEQILKVHHIRYRSEGGSDRPENLITLCSKCHIPANHKKGKFLYDWCVNGKKVRGFKDATFMSMIRWYLVNELKSKHNNVSITYGYITKNHRIQNGIEKSHLNDAFAIAKGTNQARTKDRFLVIQDRLKNRSLEKFYDSKIIDIRTEKKVSGGDLSCGRSTRNKNLNTENLRKYRGAKISKGQRRIRKQKYFYQPNDLVKYDGKVYTVKGTQNEGKYIALKEIKKVPKVELLIPYVFKKGLNWSYGLC

SEQ ID NO: 8002 - protein, 431 aa, unidentified
  REGION 1..431: note = metagenome
MPNKVYVINKHGRPLMPCSPAKARHLLDEGKAKIKKRTPFTIQLVYGSSGYTQEVILGVDAGSKTIGMSASTKKEEVFAADVTPRNDVVDLMSTRREFRRARRNRKTRYRKPRFDNRVRSKHKGWLAPSVEVKIQEHITSIRRACRILPVSKVVIETAEFDLQLLKAIEEGKPVPQGEDYQQGEMYGHYNVRQYVLWRDGYTCQCCGAHATKKKEVRLHVHHLESRKVGGDAPDNQVTLCESCHEKLHKGLIAEKDFKKRKRRSTRDATFMGIMRKTLMQMLCSELPIPVVKTRGYITKATREKLLVLPKSHTNDALAIAQGKQGFNVGYLPGIVQINKIYTIRPVRHHNRQLHKAAILTGGIRKSNQTEKYVFGYRLFDKVQFNGQDCFIWGRRTTGIFTIKTINGKMIKDGISFKKLKPVEKSTSYLIA

SEQ ID NO: 8003 - protein, 502 aa, unidentified; identical to SEQ ID NO: 2616
  REGION 1..502: note = Human gut metagenome

SEQ ID NO: 8004 - protein, 427 aa, Parasutterella sp.; identical to SEQ ID NO: 4733

SEQ ID NO: 8005 - protein, 427 aa, Parasutterella sp.; identical to SEQ ID NO: 3787

SEQ ID NO: 8006 - protein, 446 aa, Bacillus sp.; identical to SEQ ID NO: 5749

SEQ ID NO: 8007 - protein, 407 aa, unidentified
  REGION 1..407: note = Human gut metagenome
QPLMPTDRHRKVRLMLQSGQAKVIKRCPFTIQLNYDSGHQTQEISLGIDAGSKHIGVSATTKIKVLYEADVELRNDIVDLLSSRRELRRGRRNRKTRYRQAKFNNRRRGNGWLAPSIRQKIGTHLTVVENICKMLPISRIMVETASFDIQKIKNPDIQGAEYQQGDQLGFWNVREYVLFRDGHTCQCCKGKSKDKILNVHHIESRKTGGNAPNNLITLCETCHTGYHKGTVQLPKAIKRGMRFKDAAFMGIMRWAFYEALKQQYEPVGTPVHNTYGYITKHTRIAYNLPKEHYVDARCISGNPEASSNGEYYYQKKVRCHNRQIHKLTVLKGGIRKQNQATYLVKGYRLFDKVSYQGKGYFVFGRRQSGFFDIRTLSGEKVNKGSLSCKKLKFIATRTYYLTERRAV

SEQ ID NO: 8008 - protein, 435 aa, unidentified
  REGION 1..435: note = Human gut metagenome
MPKVYVLNKYGHPLMPCTPAKARHLLDSGKAKVRKRTPFTIQLLYGSSGYKQSVILGVDAGSKTIGLSASTEKQELFAAEVKPRNDVVELLSSRREFRQARRNRKTRYRTPRFDNRVKSKHKGWLAPSVEVKIQEHITAIARVCALLPIAKVIVETAEFDTQRLKAMLEGRPLPVGTDYQLGEMYDEYNVRQYVLKRDNYTCQCCGAHPSAKKGVKLHVHHLESRKTGGNSPNNLITLCEHCHKLLHKGKITLDKKKRGHSMRDAAFMGIMRKTLILRLRSELAIPVVETYGYITKLVRETHHMDKSHTVDALCIAGHPLADASDVIYLIKPVRRHNRQLHKATILKGGVRKANQAPRSVFGFRLFDKVRYQGQECFIWGRRSSGSFLLKKLDGTKVKDGISYKKLTLLERETNYLIEERRRCSSPCLKAGVSAA

SEQ ID NO: 8009 - protein, 434 aa, Anoxybacillus sp.; identical to SEQ ID NO: 3421

SEQ ID NO: 8010 - protein, 425 aa, unidentified
  REGION 1..425: note = Human gut metagenome
MENTLKVFVLNMRGQPLMPCSPPKARKLLRAGKAVPVRRTPFVIQLTVPTGETKQPITLGVDAGYKHVGLSATTAKEELLASEVELRQDVTGLLSNRLALRRARRNRKTRCRAPRFDNRVRSKHKGWLAPSVENRIQAHISRIEAVCRVLPITKIVIETASFDIQKIKNPEVEGTDYQQGEQLGFWNVREYVLFRDGHVCQACKGRSKDLILNVHHIESRKTGGDAPGNLITLCEACHKAYHAGKLKQFSPRRGASFRAETFMGIMRWTVLNRLRERHPELPVTNTYGYLTKHKRIVAGLPKTHCADAFCIAGVLDAKRRGEYLFQKQTRRHNRQIHKLTILKGGVRKRHQAPYLVHGFRLFDKVLCKGEVGFIFGRRSSGAFDVRRLDGTKISAGISYKKLSLLEKRKMFLTELRKEGRDSSRV

SEQ ID NO: 8011 - protein, 419 aa, unidentified
  REGION 1..419: note = metagenome
MVYVINKQGQALMPTERFGKVRRLLKNSLAHVVCRIPFTIQLDYDTTDYTQPVSLGVDAGSKHIGISATTSEKEMYAADVELRNDIVDKLSTRREQRRTRRSRLRYRKARFNNRVSSKRKGWLAPSVENKIQTHLTVVEKIHKFLPITNIVVETASFDIQKINNPSISGSEYQQGEQLDFFNVREYVLFRDNHTCQHCKGKSKDKVLNVHHIESRKTGGDSPNNLITLCETCHKAYHRGEFKLNVKRGKSFRDAAFMGIMRWKLYDRLKNIYPNVSMTFGYITKNTRITNNLPKEHYVDARCISGNPVAKPLGYYFYQKKVRCQNRQIHKVNFLKGGRKKLNQAPFLVKGFRLFDLVEYQKDLYYIFGRRNSGFFDIRKLDGTKVNKGSINCKHLRLMATRKSILIEKRMQINYENTGF

SEQ ID NO: 8012 - protein, 284 aa, Moorena sp.; identical to SEQ ID NO: 3117

SEQ ID NO: 8013 - protein, 431 aa, unidentified
  REGION 1..431: note = Human gut metagenome
MPNKVYVINKHGRPLMPCSPAKARHLLDAGKAKVKKRTPFTIQLIYGSSGYTQEVILGVDAGSKTIGMSVSTTKEELLSAEVKPRNDVVDLLSTRREFRRARRNRKTRYRKPRFDNRVRSKHKGWLAPSVEVKIQEHITSIKRVCRILPVSKVVIETAEFDLQLLKAIADGKPVPQGEDYQKGEMYGHYNVRQYVLWRDGYTCQCCGAHATKKKEVRLHVHHLESRKVGGDAPDNQVTLCESCHEKLHKGLIAEKDFKKRKRKSTRDATFMGIMRKTLMQRLCSELPIPVVKTRGYITKATREKLLVLPKSHTNDALAIAQGKRGFNVGYLPEIAQIDKIYTIRPVRHHNRQLHKATILKGGIRKSNQTEKYVFGYCLFDKVQFNGQDCFIWGRRTTGIFTIKTINGKMIKDGISFKKLKLVEKSTSYLIA

SEQ ID NO: 8014 - protein, 413 aa, unidentified; identical to SEQ ID NO: 2636
  REGION 1..413: note = Human gut metagenome

SEQ ID NO: 8015 - protein, 431 aa, unidentified
  REGION 1..431: note = Human gut metagenome
MQNKVYVLNKHGRPLMPCSPAKARHLLDEGKAKVKKRTPFTIQLIYGSSGYTQKVILGVDAGSKTIGVSASTTKEELFSAEVKPRNDVVELMSTRREFRKARRNRKNRYRKPRFNNRVRSKHKGWLAPSVEVKIQEHITAIKMVCRILPVSKVVVETAEFDLQLLKTIEEGKSVPQGEDYQQGEMYGHYNVRQYVLWRDGYACQCCGVQPTKKNEVRLHVHHLESRKYGGDAPGNLITLCESCHKKHHGGLITEKDLKKRKRRPTRDATFMGVMRATLVQRFCSELHIPVVETKGYITKATREKLLVLPKSHTNDALAIAQGKHGFNVSHLPGIVQVNKVYTIRPVRHHNRQLHKATVLKGGIRKSNQAERYVFGYRLYDKVLYNGIVCFVWGRRTSGSFLLRQLDGTKVKDGVNYKHLKLLERSRNFLIA

SEQ ID NO: 8016 - protein, 460 aa, unidentified; identical to SEQ ID NO: 7594
  REGION 1..460: note = Human gut metagenome

SEQ ID NO: 8017 - protein, 555 aa, unidentified
  REGION 1..555: note = Viral metagenome
MLPQSQALESVSVDNRKGEDETGHGCCGNTTTGMQHGREDRFLELASSRNSYPTTSEQSEEVGARGVIAPPSSTTSRVFVIDKHGNPLMPCHPARARKLLKSGRARIHHLAPFVIRLVDKEVEQCEVPGVTVKIDPGSKHTGIVCACVDEAGITHGLVSIQLDHRGQRIHEKMEQRANYRRRRRSANLRYRAPRWNNRHPQACRACGKNAKHGRGYCGTCLKERNFVDNGYRQHRLPPSLFHRVATTTSWVNRLSSWSPVTSLVMELVRFDTLAMQNSKISGVEYQQGTLAGYEVREYLLEKWGRKCAYCGIKNAPLQIEHILARSKGGTNRISNLTLACRPCNESKGSENVEIWCERHFGGQKGKKIAKTVLDQAKAPLKDAAAVNSTRWALWRALKNTGLDVSVGTGGRTKWNRQRFGISKSHTLDALCVGMVNAIDVVPNNVLLIFCTGRGQHQRTKPDKYGFPRLALPRTKTHHGLRTGDLVRAVIPRGKHSGVRVDRVSVRSSGYIRVGRADGISAKNCTVLQRADGYGYERKKEAPLIPALTDGVSEAR

SEQ ID NO: 8018 - protein, 494 aa, unidentified; identical to SEQ ID NO: 6841
  REGION 1..494: note = Human gut metagenome

SEQ ID NO: 8019 - protein, 452 aa, Petrotoga sp.; identical to SEQ ID NO: 7138

SEQ ID NO: 8020 - protein, 472 aa, unidentified
  REGION 1..472: note = Human gut metagenome
VVGNNLLSIKPLINIGEGVIYSSICTGLSLQTYQKRKEVPYMVYVLDIDGQPLMPTTRHGKVRRLLNNHLAKVVKRCPFTIQLLYQSTKETQPVSLGVDAGSKHIGMAATTEKKVVYQEELSPRNDVVKLLSARRTLRRTRRNRKTRYRKPRFNNRAHSKHKGWLAPSVEVKIQEHITAIKRICQILPISEIHVETAEFDLQRLKAMDEGSPLPVGIDYQLGEQYDFYNTRQYVLHRDGYTCQCCGTHDNNIKLHVHHIESRQTGGDAPNNLIILCEHCHKALHEGKLELPKGKKRGKSYRDATFMGVMRKTLLERLKKEIDVPVEGTYGYITKYWRERAGLEKSHIHDAVCISKYPYAKPLDIYYLTKTVRHHNRQIHKSNFSKGGIRKRNQAPYLVKGFRLFDKVLYQGKEYFIFGRRATGYFDIRTLDGTKVNKGSISYKKLRIQDTAKAYLKEARAIPHMNKFTCVLA

SEQ ID NO: 8021 - protein, 526 aa, Streptomyces sp.
MVPFSPSERTHPSVLPQRRALESVAADTPGSRHETGHGLPASESGTGAEHGRGETPGGSPPAGRVTPDLSVGEEVRECHPAVFVLDKHGRALQPTTPARARKLLRNGRAVVARHTPFVIRLKDRTLAESGIDGVELGIDPGSKHTGIAVFTERAGERRCRYALQLDHRGPQIRKRLGQRTVYRHGCRSRNLRYRPPRFSNRSRKPGRLAPSLQHRVDTAISWTDRLARWAPVREVHVERVAFDSHALTADGPLEGVAYQHGTLAGTEAREYLLAKWQRCCAYCGRSGVPLNIDHIQPRSKGGSDRISNLTLACVPCNQAKGNRPVEEFVKDKALLARILAQARTPLRDAAAVNATRWALWRALDARLPTRTASGGRTKWNRTRCGLAKSHSLDALTVGELRTVTEYVSPVLVVRCTGRGTYARTRPDKHGFPRLRMPRQKHFFGFATGDLVRAVVPNGKSAGTHTGRVAVRATGRFNITTSHGTIQSIHHRHVRLLQRADGYGYTTRSEVTPRSDDPGIQREKESA

SEQ ID NO: 8022 - protein, 470 aa, unidentified; identical to SEQ ID NO: 2825
  REGION 1..470: note = Human gut metagenome

SEQ ID NO: 8023 - protein, 512 aa, unidentified; identical to SEQ ID NO: 4031
  REGION 1..512: note = Human gut metagenome

SEQ ID NO: 8024 - protein, 420 aa, unidentified; identical to SEQ ID NO: 3153
  REGION 1..420: note = Human gut metagenome

SEQ ID NO: 8025 - protein, 544 aa, unidentified; identical to SEQ ID NO: 4004
  REGION 1..544: note = Human gut metagenome

SEQ ID NO: 8026 - protein, 346 aa, unidentified; identical to SEQ ID NO: 4983
  REGION 1..346: note = Human gut metagenome

SEQ ID NO: 8027 - protein, 456 aa, unidentified
  REGION 1..456: note = Human gut metagenome
MSTCICVLSNSGERLMPTIRLGKVRRLLKDGKAKIVKHHPFTIQLLYDSKTNTQPIEICEDVGYNYIGISVKSESHEYVSAQYDTLQDEKACHDSCRKLRRTRRNRLRYRKPRFDNRKRGEGWLAPSLEHKKQLNIRLIERYVSVIPITHATVEVGSFDTMLLQAIQKGKSKPEGVDYQKGPRYNLATLREAVFYRDNYTCQVCGRKIADGAILHMHHMFYWKGRHGYQLDELVTACEKCHTPANHQKGGKLFGFGEDKEFANLSGAAFMNAVCWQIVDALHATYGKEFVTITYGAMTKEKRIILGIEKTHNNDAYAMGDYHPVHRCVFRHYQKRRRNNRVLEKFYDATYIDTRTGNKAKGKELFNGRISRNHKKNSEDLHKYRSKKVSKGRRSIRRQRYAIQPYDTVRLESKTYITSGCHNKGTRLLIPANGKSKSVAISKVQVVCHAGAWIQII

SEQ ID NO: 8028 - protein, 424 aa, unidentified
  REGION 1..424: note = Human gut metagenome
MASMQYVYVLNKHGEPLIPCSPGKARLLLKQQKACVVKRTPFTIKLLYGSAGYKQPITLGVDAGSKHVGLSASTEKRELYREEFTPRNDVVDLLSTRRQNRRSRRNRKTRYRAPRFDNRVHSKHKGWLAPSVEVKIQEHITVIKRICRILPITLVRVETAEFDTQRLKAMLKGKPLPVGTDYQLGEMYDEYNVRQYVLKRDNYTCQCCGAHPTEKKPVRLHVHHLESRHVGGNAPNNLITLCVACHKALHEGKITLDKGKKRGKPLRDAAFMGIMRNTLLARLKDELNIPVKQTYGYITKLLREKNKIPKSHVNDARCIAKAPNAKPCDTMLYTRALRHHNRQIHKAKILNGGIRKKNQAPYLVKGFRLWDKVRYNGEECFITGRRSSGYFALKKYDGTVISNSASYKKLMLLEAATNYITERS

SEQ ID NO: 8029 - protein, 428 aa, unidentified
  REGION 1..428: note = Human oral metagenome
MFVYVLDKNGQPLMPTQRFGKVRRMLRDKKAKVVHREPFTIRLLYEPETKIVQEVVLGVDTGSKHVGVACVGNNKVLYQAHVELRDDIKKKMDSRRMYRRNRRNRKTRYRKCRFSNRRNSIRDDRYCPTIVSKYCGHEREIEFCKKIPPISDKNIILEVSQFDTQLMKKPWLQEHKWAYQKGVNYGYANAREHALVRDRYTCQCCGKKNCRVEAHHIVFRSKNGSNDLENYVTLCEDCHKEVHSGEKELKLKGKRRGTLRYATQMSVIRSMLLKKYPDAIETFGFVTKANRENLGLQKDHYLDACVIASGGLECNPSDVLYLKRCVSKQDRVLTKGIRGEQKLPTGKIHGFKKFDKVKYLGETCFIKGRRSSGAFVLMDIDNNSIDFRDKGGKQNPSYKSIKRLNTRKSILCIYKRIEGEVRFIPTLS

SEQ ID NO: 8030 - protein, 532 aa, unidentified; identical to SEQ ID NO: 3169
  REGION 1..532: note = Human gut metagenome

SEQ ID NO: 8031 - protein, 415 aa, Bacillus sp.; identical to SEQ ID NO: 2431

SEQ ID NO: 8032 - protein, 420 aa, unidentified; identical to SEQ ID NO: 6582
  REGION 1..420: note = Human gut metagenome

SEQ ID NO: 8033 - protein, 465 aa, unidentified
  REGION 1..465: note = Human gut metagenome
MSTCACVLSKNGERLMPTIRLGKVRHLLKDGKAKIIKHHPFTIQLLYDSETNIQPIEICEDVGYNYIGISVKSQSHEYVSAQYDTLQDEKSCHDACRRMRRTRRNRLRYRQKRFDNRKRDKSWLAPSLKHKKELNVNVIKMYCEVVPITHATVEVGSFDTMLVKAIEEGKATPEGADYQKGPRYNLATLREAVFYRDNYTCQVCGREASEGAILHVHHMFYWKGRHDNSLSELITVCEKCHTPANHQKGGKLYGFGEDIKFANLSGAAFMNTVRWQIVNELYAAFGKPFVTFTYGAMTKEKRIALHLEKSHNNDAYAMGEFHPNCRCTFEHYEKVRRNNRILEKFYDSRYIDIRTGEIATGKELFNGRINRSHKKDSENSHKYRGKRIRKGYRALRRKKVALNPGDLVSLNGEILTVHGTHTKKNGSVNVEFKTPSKSGKKSTSLKKLKIIKTISPMRSAWDKVS

SEQ ID NO: 8034 - protein, 430 aa, unidentified
  REGION 1..430: note = Human gut metagenome
MPKVYVLNRHGRPLMPCTPAKARHLLDAGKAKVKKRTPFTIQLVYGSSGYTQEVILGVDAGSKTIGVSASTKKEELFAANVIPRNDVVDLLSTRREFRRARRNRKTRYRKPRFDNRVRSKHKGWLAPSVEVKIQEHITAIKTVCRILPVSKVVVETAEFDLQLLKAIADGKPVPQGEDYQKGEMYGHYNVRQYVLWRDGYTCQCCGAHATQKKEVRLHVHHLESRRVGGDAPDNLVTLCTACHDKLHKGIIMAADIKKRKRRSTRDATFMGIMRMTLLRRLREQLPVPVVETRGYITKATRENLLVLPKSHTNDALAIAHGPQGFRAEYLPNIRQADRLYTIRPVRHHNRQLHKATILKGGVRKANQAEKYICGFRLYDKVLYNGIECFVWGRRTSGSFLLRQLNGEKVKDGVSYKHLKLLERSQSYLVA

SEQ ID NO: 8035 - protein, 420 aa, unidentified
  REGION 1..420: note = Human gut metagenome
MQYVYVLNKHGEPLMPCSPRKARLLLKQKKACVIKRTPFTVKLLYGSTGYKQPVTLGVDAGSKHIGISATTEKHELYREEATPRNDVVDLLSARRAFRRSRRNRKTRYRAPRFDNRVHSKHKGWLAPSVEVKIQEHITLVEHVCRILPVTLVRVETAEFDTQRLKAMLEGKPLPVGTDYQLGEMYDEYNVRQYVLKRDNYTCQCCGAHSTKTKGVKLHVHHIETRRTGGNAPNNLITLCTACHKALHAGKVTLDGKKRGKPLKDAAFMGIMRKTLMERLRKELKIPVQGTYGYITKCLREKNGIPKSHTNDARCISKNPLAIPCDTCYYTKAVRHHNRQLHKTTILKGGIRKANQAPYIVKGYRLWDKVSCNGTECFITGRRTSGYFALKKLDGTVVSNSISYKKLRLLEAATNYITERK

SEQ ID NO: 8036 - protein, 411 aa, unidentified; identical to SEQ ID NO: 3917
  REGION 1..411: note = Human gut metagenome

SEQ ID NO: 8037 - protein, 431 aa, unidentified; identical to SEQ ID NO: 5002
  REGION 1..431: note = Human gut metagenome

SEQ ID NO: 8038 - protein, 398 aa, unidentified
  REGION 1..398: note = Human gut metagenome
RRAKANGTISKKCIKQDTAQSKNPSKRAKEIGVIKRHLPGCKKDVLCVGIKNKEAKYTNRARLEGWLTPTANQLLQTHINLVKKIQKFLPISDVVLEVNKFAFMRLDNPNIQKWQYQRGPLYQKGSLENAVSEMQEHHCLFCEKPIEHYHHVVPKSENGSNTIANIVGLCAEHHNLVHKDVAWQEKLVEEKTGLNKKYGALSVLNQIIPALTKELSFLFPKHSFMTNGKSTHDYRAAHGISKDHWLDAYCIACSVLPIDVCDSTINNCVPYELKQFRRHDRRALNNENMNRVYTLNDKVVATNRHKATEQEAASLEEFRKEHPNDVCKLKVKEHHPTYRNMNRNYPGSVFLVGKQIHVMQGIASSKDGKATKYNDTRATTIAAGKCKFVAKNSGILFV

SEQ ID NO: 8039 - protein, 431 aa, unidentified
  REGION 1..431: note = Human gut metagenome
MPNKVYVINKHGRPLMPCSPAKARHLLDAGKAKVKKRTPFTIQLVYGSSGYTQEVILGVDAGSKTIGVSALTKKEELFAANVIPRNDVVDLLSTRREFRRARRNCKTRYRKPRFDNRVRSKHKGWLAPSVEVKIQEHIIAIRRVCGILPVSKVVVETAEFDLQLLKAIADGKPVPQGEDYQKGEMYGHYNVRQYVLWRDDYTCQCCGAHATKKKEVRLHVHHLESRKVGGDAPDNQVTLCESCHEKLHKGLIAEKDFKKRKRRSTRDATFMGIMRKTLMQMLCSELPIPVVKTRGYITKATREKLLVLPKSHTNDALAIAQGKRGFNVGYLPEIAQIDKIYTIRPVRHHNRQLHKAAILKGGIRKSNQAGKYVFGYRLFDKVQFNGQDCFIWGRRTTGIFTIKTINGKMIKDGISFKKLKPVEKSTSYLIA

SEQ ID NO: 8040 - protein, 419 aa, Moorena sp.; identical to SEQ ID NO: 2999

SEQ ID NO: 8041 - protein, 320 aa, Parasutterella sp.; identical to SEQ ID NO: 4725

SEQ ID NO: 8042 - protein, 406 aa, unidentified
  REGION 1..406: note = Human gut metagenome
MPTMRHGHVRRLLKAKQAKVVKRCPFTIQLLYKSTTYTQNVTLGIDAGSKHIGVSATTVNKVLYESDVTLRNDIVDLLSARRALRYSRRNRKTRYRKARFDNRVHGKNKGWLAPSVRQKIDSHITVVDKVCTLLPITNIVVEVASFDIQKIKNPDVSGTDYQQGEQLGFWNIREYVLFRDGHECQRCHGQSKDPVLNVHHIESRRTGGNAPNNLITLCETCHKGYHKGTVILPKTIHRGMRFKDAAFMGIMRWAFYNRLKELYASKNIPVSMTYGYITKNTRIEHHLQKEHFVDARCISGHPDAAPSNEVFYQKKVRCHNRQIYKLTINKGGTRKRNQTSYEVHGYHLFDKVRYQKKPYFIFGRRKSGFFDIRDLSGNKVNNGSISYKKISFIEPGSYYLAERRPV

SEQ ID NO: 8043 - protein, 415 aa, Bacillus sp.; identical to SEQ ID NO: 2431

SEQ ID NO: 8044 - protein, 302 aa, unidentified
  REGION 1..302: note = Human gut metagenome
VYVLNKDGKPLMPTTRCGHVRYLLKEKKARVVKTKPFTIQLLYETNDVVQPLYLGIDPGRTNIGVAVVKADGTAVFTAHLETRNKEIPKLMKKRKDSRCARRTNGRRCRRQRRAKANGTISKKCVKQATAQNGSASKRAKEIGVIKRHLPGCEKEVLCIGIKNKEAKFNNRTRPAGWLTPTANQLLQTHINLIKKIQKLLPISDVVLEINKFAFMQLDNPNIQKWQYQQGPLYQKANLEEAVSEMQEHHCLFCKKKIDHYHHVVPQHKNGSNTIDNIVGLCTKHHDLVHKDTAWHAKTKAFG

SEQ ID NO: 8045 - protein, 494 aa, unidentified; identical to SEQ ID NO: 2450
  REGION 1..494: note = Human gut metagenome

SEQ ID NO: 8046 - protein, 425 aa, Aphanothece sp.; identical to SEQ ID NO: 6227

SEQ ID NO: 8047 - protein, 512 aa, unidentified
  REGION 1..512: note = Human gut metagenome
MPTVYVLNKDGKPLMPTTRCMHVRHLLKNGKARVVKSKPFTIQLLYETDDVVQPLYLGIDPGRTNIGVAVVKADGAAVFTAHLETRNKEVPKLMKKRKESRCARRTNGRRCRRQRRAKTNGTISKKCVKQTTAQNGSVSKRAKEIGVIKRHLPGCEKDILCIGIKNKEAKFTNRARPEGWLTPTANQLLQTHINLVKKIQKFLPISDVVLEVNKFAFMQLDNPNIQKWQYQQGPLYQKGSLENAVSEMQEHHCLFCEKPIEHYHHVVPKSENGSNTIANIVGLCTEHHNLVHKDATWQKKLVKEKVGLVKKYSALSVLNQIIPALTKEMNSLFPKHFFVTNGKSTYDYRTAHGVSKDHWLDAYCIACSVLPNDVCDSNINSHVPYELKQFRRHDRRVLHKANMSRVYTLNGKTVATNRHKAIKQTTDSLEEFRQSHPGDVCKLKVKEHHPAYRNLNRNYPGSVFLVDGQVHVMQGVSGSHNGKADGYYNTNGNAYPYYKCKFVVKNEGIVFA

SEQ ID NO: 8048 - protein, 413 aa, unidentified
  REGION 1..413: note = Human gut metagenome
MTSYAFVLDANGKQLAPTKEQKAWFLIRKKRAALVSKYPMVIQLKKEIQENEICKDEIRCGIDDGGLHVGIALVQKCKTKNKVVFKGTIEQRNDVKHLMEVRRGYRRYHRYHKRYRQARFNNRKSSKREGRIAPSILQKRQAIIRVIHWLNKWINITNYWLEDVSIDIRVLTDGYKSYRWQYQKSNRLDENIRKAAILRDGGKCMECGKLNCRLEVHHIKPRRRNGSDTLDNLITLCKSCHQKTEGQEELYMDRYFSLLKSSDNKNLNYAQHVMIGKEWLRKQLSSLGVLYLTNGGDTANKRIDWNIEKSHANDAVCITDLQPDTYDMKEWTMKPMRRQSKAKTDHVLGIKHRDLVEYTFKNGETHRGYVTALYPEQKAINFQSPTKHCKKVNARKCKLLWKYSKIYWFENAS

SEQ ID NO: 8049 - protein, 376 aa, unidentified
  REGION 1..376: note = Filamentous sp.
MAFRPASYEIKLDPGSKTTGIALLKGENIIFVGELNHRGQAIKASLDSRRAIRRSRRARHTRYRQARFLNRIRPKGWLAPSLKHRVDTTLTWVNKFIKFAPVNSIAMELVRFDLQQLEKPEISGVEYQQGELLGYEIREYLLNKWERKCTYCKVENIPLQVEHIHPKAKGGSNRISNLCLACEKCNLKKGTQDINDFLLKKPDLLKQIMAQVKQPLKDATAVNSTRWALFNQLKLTGLPVTTGSGGQTKYNRTRLELPKTHYFDAACVGKVDKLIVLTTQPLLIKANGHGTRQMCRTDKFGFPSRYVPRDKFVKGFQTGDLVKAVVTRGKKVGQYIGRVAVRSSGSFNISAKELVQGISHKYCQTLQRKDGYSYQF

SEQ ID NO: 8050 - protein, 414 aa, unidentified
  REGION 1..414: note = Human gut metagenome
MPCSPAKARLLLKEKKAIVVRRTPFTIQLTIATGETKQPVSLGVDAGYKHVGLSASTEKAELYASEIELRQDITDLLSARRELRRARRNRKTRYRAPRFDNRIRTKRKGWLAPSVENRINAHLSRIGAILRLLPVTKITVETASFDTQLLKNPDISGKEYQEGEQLGFWNVREYVLFRDGHACQHCHGRSKDPVLNVHHLESRRTGGDSPGNLLTLCETCHKALHRREIKLKTKRGQSFRAEAFMGIMRWEVLNRLKASHPELEVHNTYGYRTKHTRIVNGIDKSHCADAFCIAGNLGAKRLGEFFFQKQTRRNNRQIHKLSILKHGLRKRNQAPFEVKGFRLFDKVVCQGEEGFIFGRRSSGSFDVRKLDGTRISAGISYKKLRLLEKRRTYLKEIRKEEALPPLPEGRSLRA

SEQ ID NO: 8051 - protein, 442 aa, unidentified
  REGION 1..442: note = Human gut metagenome
MVTVQQSTHHLPFGRVFIRRNLFMVYVISQDSKPLMPCSNPIARLLLKQGKAKVKRREPFTIKLIYETTDYTQDLTLGVDTGSGTIDAAVSKDNGDIVYMSEVVVRNDITDKMTQRAKYRRNRRNRKTRYRKARWLNRSNSIKKDRFSPTMQSKLHSHVKEIEYIQSILPITEMVFETGQFDMHLMKNPSLANPKVRPWGYQKGTNYGFENTKAMVLNRDNYTCQCCKGKHKDSKLEVHHIVFRSQGGSDEESNLITLCHTCHKDLHSGKINLKLSGKVKGNLKYATQMNSIRKQLFRLYPNAIETFGYVTKANCLHLGVDKEHYYDACTIATQGNAFNVKSDLYKKKCVSDGDFQKTKGIRSEQPIVTDKICGFRKFDKVRYFGKDYFIKGRMSTGYAILMDIDGNKIDFSTMPRGYKTPKLSNCKRITARSTVMTQVKVV

SEQ ID NO: 8052 - protein, 406 aa, unidentified
  REGION 1..406: note = Human gut metagenome
MVYVQDIDGKPLMPTTRHGKVRRLLKSNKAVVVNLCPFTIKLMYVTSDYKQEIVLGVDAGTKHVGLSATTKSKELYSSEVILRNDIVDLLSTRRELRRSRRNRLRYRKPRFDNRIKSKRPGWVAPSVKYKVDAHIRVIDNVCSILPISRIVIEVAQFDTQKIKNPEILGKEYQEGDQLGFWNVREYVLARDGHKCQHCKGKSKDPVLNVHHIESRKTGGDSPSNLITLCETCHKEYHKGNIKLKVKRGTSFRDAAAMGIMKWKLLDKLKSLYPNVSMTFGYITKHNRIKHEIKKSHISDAFVISKNFEAKRPGYYFKEKLVRRHNRQIHKMKILKGGKKKMNQAPFKVFGFRLFDKVEFQGNEYFIYARRLSGYFNIRDINSENKKDVTYKKLTHIGHGLISVETG

SEQ ID NO: 8053 - protein, 314 aa, unidentified
  REGION 1..314: note = metagenome
KKAIVVRRTPFTIQLTIATGETKQPVSLGVDAGYKHVGLSASTEKAELYASEIELRQDITDLLSARRELRRARRNRKTRYRGPRFDNRIRTKRKEWFAPSVENRINAHLSRIEKVLRLLPVTTITVETASFDTQLLKNPDISGKEYQEGEQLGFWNIREYVLCRDGHVCQHCYGRSKDPVLNVHHLESRRTGGDSPGNLITLCETCHKALHRGEITLKAKRGQSFRAEAFMGIMRWEVLDRLKASHPELEVQNTYGYRTKHVRIANGIAKSHCADAFCIGGNLGAERLGEFFFQKQTRRNNRQIHKLSILKGAL

SEQ ID NO: 8054 - protein, 442 aa, unidentified; identical to SEQ ID NO: 2903
  REGION 1..442: note = Human gut metagenome

SEQ ID NO: 8055 - protein, 429 aa, Moorena sp.
MSNFVFVLDTNKRPLDPVHPGKARRLLSTGNAAVFRRYPFTIILKQAYPEIPVQDLELKLDPGSQVTGIAVVQGTKVIFGAELEHRGQQIKDALLSRRQLRRSRRNRKTRYRQARFLNRTRPKGWLPPSLQHRVDTTMTWVNRFRRLAPIARIAQELVRFDLQLIQNPEISGIEYQQGELQGYELREYLLEKWNRKCAYCGAENLPLELEHIHPRSKGGTDRVSNLTLACHSCNQSKSNRDIRDFLSDKPSRLNRILKQSQSPLKDAAAVNSTRWALFNALKQTGLPVATGTGGQTKFNRTRLNLPKTHWLDAASVGKIDSLKVLTTNPLLIAAKGHGTRQMCGTDKFGFPKRHRSRVQIHQGFQTGDIVTAIVTKGKKIGSYVGRVLCRASGSFDITTQSGRVSGISHRYCQPIHKRDGYAYAFAHTL

SEQ ID NO: 8056 - protein, 442 aa, unidentified
  REGION 1..442: note = Human gut metagenome
MVTVQQSTHHLPFGRVFIRRNLFMVYVISQDGKPLMPCSDPIARLLLKQGKAKVKKRDPFTIKLTYETTNYTQGLTLGVDTGSGTIGTAVSKDNGDIVYMSEVVVRNDITDKMTQRAKYRRNRRNRKTRYRKARWLNRASSIKKDRFSPTMQSKLHSHVREIEYIQSILPITEMVFETGQFDMQLMKNLSLANPKVRPWGYQKGANYGFENTKAMVLNRDNYTCQCCKGKHKDSKLEVHHIVFRSQGGSDEESNLLTLCHTCHKDLHSGKINPKLSGKVKGNLKYATQMNSIRKQLFRFYPNAIETFGYVTKANRLHLGVDKEHYYDACTIATQGNAFNVKSNLYKKKCVSDGDFQKTKGIRSEEPIVTDKICGFRKFDKVRYFGNDYFIKGRMSTGYAILMDIDGNKIDFSTMPRGYKTPKLSNCKRITARSTVMTQVKVV

SEQ ID NO: 8057 - protein, 522 aa, unidentified
  REGION 1..522: note = Human gut metagenome
KPLMPTTRGGHVRHLLKEQKARVVQSNPFTIQLLYETNDAVQPLYLGIDPGRTNIGVAVVKADGTAVFTAHLKSRNKEIPKLMQDRKRARRARRTNGRRHRRQRRAKANGTISKKCVKQTTTQNGSVSKRAKEIGIIKRHLPGCEKDVLCIGIKNKETKYTNRERPEGWLTPTANQLLQTHVNLVKKVQKLLPISDVVLEVNKFAFMRLDNPDIQKWQYQQGPLYKKESLESAVSEMQEHHCLFCKKPIDHYHHVVPKSENGSNTIANIVGLCAEHHNLVHKDVAWQEKLAEEKTGLNKKYGALSVLNQIIPALTNKLSVLFPKHFFVTAGKSTHDYRAAHGVSKDHWLDAYCIACSVLPSNVCDSNINNHVPYELKQFRRHDRRVLHKANMSRVYTLNGKAVATNRHKAIKQTTDSLEEFRQNYPDDVYKLKVKEHHPAYRNLNRNYPGSVFLVGKQAHVMQGIASSKDGKTTKYNDTNATTITAGKCKFVAKNSGILFVQCKFRKTLSDGTTKKLQYPVR

SEQ ID NO: 8058 - protein, 464 aa, unidentified
  REGION 1..464: note = Human gut metagenome
MSTCACVLSNNGERLMPTIRLGKVRHLLKDGKAKIIKHHPFTIQLLYDSKTNTQPIEICEDVGYNYIGISVKSQSHEYVSAQYDTLQDEKDCHDDCRRMRRTRRNRLRYRQARFDNRKRDKGWLAPSLKHKKELNVNVIKMYCEVMPVTHAIVEVGSFDTVLVKAIQEGKATPESTDYQKGPRYNLATLREAVFYRDNYVCKVCGRKATEGAILHMHHMFYWKGRHGNSLSELLTVCEKCHTPANHQKGGKLYGFGEDIKFANLSGAAFMNTVRWQIVNELYAAFGKPFVTFTYGAMTKEKRIALHLEKSHNNDAYAMGSLHPTDRCAFEHYEKVKRNNRILEKFYDSQYIDIRTGEVATGKSLFNGRINRSHKKDSENLHKYRGKRVYKGHRALHRKKVPLNPGDSVSLNGETLIVHGTHTRKGDVNVEFKTPSKSGKKSASLKNLKIVKTINPMRSAWAKVS

SEQ ID NO: 8059 - protein, 442 aa, unidentified; identical to SEQ ID NO: 3218
  REGION 1..442: note = Human gut metagenome

SEQ ID NO: 8060 - protein, 420 aa, unidentified
  REGION 1..420: note = Human gut metagenome
MQYVYVLSKHGEPMMPCSPGKARLLLKRQKACVVRRTPFTIKLLYGSAGYKQPITLGVDAGSKHVGLSASTEKRELYREEFTPRNDVVELLSTRRQNRRSRRNRKTRYRAPRFDNRVHSKHKGWLAPSVEVKIQEHITIIKRICKILPISLVRVETAEFDTQRLKAMLAGKPLPVGTDYQLGEMYDEYNVRQYVLKRDNYTCQCCGAHTTAKKLVKLHVHHLESRKTGGNAPSNLVTLCTTCHKNLHKGKVTLDGKERGKPLRDAAFMGIMRKTLMARLKEELPIPVQGTYGYITKMRREQNDIKKSHTNDARCISKHPLAEPCSVCYRTKAIRHHNRQTHKANFSKKGIRKRSQMPYLVEGYRLWDKVLYKEQECFVSGRRSSGSFTLKKLDGTSVSKGVTFKKLRLLEPATNYLIERM

SEQ ID NO: 8061 - protein, 493 aa, unidentified
  REGION 1..493: note = Human gut metagenome
MAAVYVISASGKPLMPTTRCGHIRGLLNAGKARVVEREPFTIQLKYETPDVTQPLYLGIDPGRTNVGSAVVREDGECVFTAQLTTRNKDVPKLMKARKQFRMAHRRLKRRCKRQRRAKAAETLSQKGEFQRLLPGYEEPILCKGIRNKEARFNNRQRPAGWLTPTANHLLLTHLNMVKKLQKLLPITDVVLEVNRFAFMAMENPSIRRWQYQQGPLYGKGSVEDAVYAQQDGHCLFCGKPIAHYHHVVPQHKNGSETLENRVGLCNEHHDLVHKDRAWDAKMKETKAGLNKKYHALSVLNQIIPALTEQLTAMFPQHAFVTTGKDTADFREDYGIAKEHHLDAYCIACSVLAEPTKVAAPTGKPHRLMQFRRHDRQVCHKENIKRVYLSEGNAVATNRHKAIEQKDDSLEEFRKTHTQQEVSALTVKDHQPVYKDMRRFMPGGVFLFNGKVHTLQRSHGRYKGMPFYYIDTDGSKNHAKGCIFLQQNCGLRWV

SEQ ID NO: 8062 - protein, 512 aa, unidentified
  REGION 1..512: note = Human gut metagenome
MSTIYVLNKDGKPLMPTTRGGHVRHLLKEQKARVVRTKPFTIKLLYETNDVVQPLYLGIDPGRTNIGVAVVKTDGTAVFTAHLETRNKEIPKLMKKRKDSRRTRRTNGRRCRRQRRAKANNTISKKCVKQTTAQNGSVSKRAKEIGVIKRHLPGCEKEVLCIGIKNKEAKFNTRTRPEGWLTPTANQLLQTHINLVKKIRKFLPISDVVLEINKFAFMQLDNPNIRKWQYQQGPLYQKANLEEAVSEMQEHHCLFCKNTIDHYHHVVPQHKNGSNTIGNIVGLCAKHHDLAHKDISWQEKLAKKKTGLNKKYGTLSILNQIIPALTKELSSLFPKHFFATNGKSTYDYRAAHGVSKDHWLDAYCIACSVLANDVCDSNINSHVPYELKQFRRHDRRALHKENMGRVYTLNGKKVATNRHKAVEQTTDSLEEFRQNHPDDVCKLKVKEHHSAYRNPKRNFPGCVFLVGKQTHVMQGTSGSHNGQADGYYDTNGNSYSSGKCKFVAKNEGIVFT

SEQ ID NO: 8063 - protein, 413 aa, unidentified
  REGION 1..413: note = Human gut metagenome
MTNYVFVLDANGKHLSPTKEQKAWFFIRKKRATLVSKYPMVIQLNKEIPDDKICKDEIRCGIDDGGLHTGIALVQKCQTKNKVLFKGVIEQRNDVKHLMDVRRGYRRYHRYHKRYRPARFNNRSSSKKEGKIAPSILQKRQATIRAVAQLNKWINITDYWLEDVAIDIRALTDGFKPYKWQYQKSNRLDENIRKAVILRDGCQCVECGRTNCKLEVHHIKPRRSNGSNVLSNLITLCERCHQNTEGREELFMDKYFALLNSSDNKYLNYAQHVMIGKKWLREQLSSLGILHLTNGGDTANKRIDWNIEKFHSNDAICITNLQPDTCDVKEWTIKPMRRQSKAKADNVLGIKHRDLVEYTFKSGETHRGYVTALYPKQNAINFQSPTKHCKKVSAKKCRLLWKFNKIYWLDDVS

SEQ ID NO: 8064 - protein, 473 aa, unidentified; identical to SEQ ID NO: 3562
  REGION 1..473: note = uncultured beta proteobacterium

SEQ ID NO: 8065 - protein, 470 aa, unidentified; identical to SEQ ID NO: 2825
  REGION 1..470: note = Human gut metagenome

SEQ ID NO: 8066 - protein, 456 aa, Halomonas sp.; identical to SEQ ID NO: 3067

SEQ ID NO: 8067 - protein, 443 aa, unidentified
  REGION 1..443: note = Human gut metagenome
LTKDENRPSGRTTGLRAEQAEPAGIRKGDTLKVFVLNMRGKPLMPCSPAKARHMLKAGKAFVVRRTPFTIKLTIATGETKQDVTLGVDAGARHVGISATTEKEEVFASEVALRQDITGLLADRLAFRRARRNRKTRYRAPRFNNRVRSKHKGWLASSVENRIQAHMSRIDAVCRLLPVTKIVIETASFDIQKIRNPEVEGTGYQQGDQLGFWNVREYVLFRDGHICQHCRGRSKDPILNVHHLESRKTGGDAPNNLITLCETCHKAYHAGKIKLKVKRGQSFRAEAFMGIMRWTLLDRVRKTHPKLPVENTYGYLTKHKRIALGLPKTHCADAFCIAGNLKALRRGDFLFQQQTRKHNRQIHRCSILKGGVRKLNQAPFLVKGFRLFDKVRIGGQIGFVFGRRVRGIFNIRRLDKTVIGTDINCKKLSLLETRKTFLTELRKE

SEQ ID NO: 8068 - protein, 465 aa, unidentified
  REGION 1..465: note = Human gut metagenome
MSTCACVLSKNGERLMPTIRLGKVRHLLKDGKAKIIKHHPFTIQLLYDSETNIQPIEICEDVGYNYIGISVKSQSHEYVSAQYDTLQDEKSCHDACRRMRRTRRNRLRYRQKRFDNRKRDKGWLAPSLKHKKELNVNVIKMYCEVVPITHATVEVGSFDTMLVKAIEEGKATPEGADYQKGPRYNLATLREAVFYRDNYTCQVCGREASEGAILHVHHMFYWKGRHDNSLSELITVCEKCHTPANHQKGGKLYGFGEDIKFANLSGAAFMNTVRWQIVNELYAAFGKPFVTFTYGAMTKEKRIALHLEKSHNNDAYAMGEFHPNCRCTFEHYEKVRRNNRILEKFYDSRYIDIRTGEIATGKELFNGRINRSHKKDSENLHKYRGKRIRKGYRALRRKKVALNPGDLVSLNGEILTVHGTHTKKNGSVNVEFKTPSKSGKKSTSLKKLKIIKTISPMRSAWDKVS

SEQ ID NO: 8069 - protein, 416 aa, unidentified
  REGION 1..416: note = Human gut metagenome
MVYVLDKNGQPLMPTDRHRKVRLMLQSGQAKVIKRCPFTIQLNYDSGHQTQEISLGIDAGSKHIGVSATTKIKVLYEADVELRNDIVDLLSSRRELRRGRRNRKTRYRQAKFNNRRCGNGWLAPSIRQKIGTHLTVVENICKILPISRIMVETASFDIQKIKNPDIQGAEYQQGDQLGFWNVREYVLFRDGHTCQCCKGKSKDKILNVHHIESRKTGGNAPNNLITLCETCHTGYHKGTVQLPKAIKRGMRFKDAAFMGIMRWAFYEALKQQYEPVGTPVHNTYGYITKHTRIAYNLPKEHYVDARCISGNPEASSNGEYYYQKKVRCHNRQIHKLTVLKGGIRKQNQATYLVKGYRLFDKVSYQGKGYFVFGRRQSGFFDIRTLSGEKVNKGSLSCKKLKFIATRTYYLTERRAV

SEQ ID NO: 8070 - protein, 396 aa, unidentified
  REGION 1..396: note = Human gut metagenome
VVRRTPFTIQLTIATGESKQPVSLGVDVGYKHVGLSASTEKAELYASEVELRKDITDLLSARRALRQSRRNRKTRYRAPRFDNRIRTKRKGWLAPSVENRINAHLSRIEAVLRLLPITKITVETASFDMQRLKNPDISGKEYQEGEQLGFWNVREYVLFRDGHVCRHCHGRSKDPVLNVHHLESRRTGSDSPDNLITLCETCHKALHRGEITLKAKRGQSFRAQAFMGIMRREVLNRLKASYPELKVHETYGYLTKHARIANGIVKSHGADAFCIAGNLGAERLGEFFFQKQTRRNNRQIHKLSILKGGIRKRNQAPFEAKGFRLFDKVACQGEEGFIFVRRSSGSFDVRKLDGTRISAGISCKKLRLLEKRRTYLTEIRKEEALPPLPEGRGLRA

SEQ ID NO: 8071 - protein, 512 aa, unidentified
  REGION 1..512: note = Human gut metagenome
MSTVYVLNKDGKPLMPTTRGGHVRHLLKEQKARVVRTNPYTIQLLYETDNLVQPLYLGIDPGRTNIGVAVVKTDGTAVFTAHLETRNKEIPKLMKKRKDSRRARRTNGRRCRRQRRAKANGTISKKCVKQTTAQNGIVSKRAKDIGVIKRHLPGCEKEVLCIGIKNKEAKFSNRVRPEGWLTPTANQLLQTHINLVKKIQKFLPISDVVLEINKFAFMRLDNPNVQKWQYQQGPLYQKASLEEAVSEMQEHHCLFCKKPIDHYHHVVPQHKNGSNTIGNIVGLCAKHHDLVHKDTTWQKKLAKKKTGLNKKYGALSVLNQIIPALTKELSSLFSKHFFATNGKSTYDYRAAHGVSKDHWLDAHCIACSVLPNDVCDSDINNRVPYELKQFRRHDRRALHKENMSRVYTLNGKSVATNRHKAIKQTTDSLEEFRQRQPNDVCKLKVKEHHPEYRNPKRSFPGCVFLVGKQTHVMQGTSGSHNGKADGYYDTNGNSYSSGKCKFVAKNEGIVFT

SEQ ID NO: 8072 - protein, 518 aa, unidentified; identical to SEQ ID NO: 3878
  REGION 1..518: note = Human gut metagenome

SEQ ID NO: 8073 - protein, 438 aa, unidentified; identical to SEQ ID NO: 4848
  REGION 1..438: note = metagenome

SEQ ID NO: 8074 - protein, 424 aa, unidentified; identical to SEQ ID NO: 3434
  REGION 1..424: note = Human gut metagenome

SEQ ID NO: 8075 - protein, 438 aa, unidentified
  REGION 1..438: note = Human gut metagenome
LKDGKAKIVKHHPFTIQLLYDSKTNTQPIEICEDVGYNYIGISVKSEFHEYVSVQYDTLQDEKEHHDDCRKYRRTRRNRLRYRQARFDNRKRDDGWLAPSFEHKKELNVNVIKMYCEVMPITHAIVEVGSFDTMLVKAIEEGKATPESADYQKGPRYNLATLREAVFYRDNYVCKVCGRKATEGAILHVHHMFYWKGRHGNSLSELITVCEKCHTPANHQKGGKLYGFGEDIKFANLSGAAFMNTVRWQIVNVLYAAFGKPFVTFTYGAMTKEKRIALHLEKSHNNDAYAMGSFHPVNRCAFEHYEKVKRNNRILEKFYDSQYIDIRTGEIATGKELFNGRISRSHKKDSENLHKYRGKRICKGHRALRRKKVALNPGDLVSLNGEILVVHGTHTKKNGSVNVEFKTPSRGGKKSASLKKLKIVKTTDSMHSAWEKVS

SEQ ID NO: 8076 - protein, 529 aa, unidentified; identical to SEQ ID NO: 6786
  REGION 1..529: note = Human gut metagenome

SEQ ID NO: 8077 - protein, 426 aa, Moorena sp.
MSNSTNYVFVLDAKKKPLAPCKPAMARSLLKAGKAKVFKRYPFTIILKKLVALDFQGLQLKIDPGSKQTGFALVTQSEEVIFAMVLVHRGQQIKNALERRRTLRRGRRYRKTRYRKCRFFNRKRKKGWLPPSLRHRVLTVETWVNRLCKLSPVSSLAIELVKFDTQKIQNPEISGVEYQKGELFGYDVREYLLEKWGRSCAYCGATDTPLEIEHIVPRSKGGSNRVSNLAIACHQCNQNKGAMDIREFLENKPSILAHVLKVAKTPLKDAAAVNSTRTQIFETLTATGLPVITGSGAGTKYNRRRLNLPKEHWIDAACIGEVEKLTILTNQPLVVTAMGHGCRQMVQMDKYGFPRIGYKAKKPVPGWKTGDIINVVKGKNAGLKGVRIKTVRSKGNFDIRQGDKILSVSRNHIQPVHRRDGYNYSF

SEQ ID NO: 8078 - protein, 544 aa, Streptomyces sp.
MTTFPAGQQTHQAVLPQQPALESVRADTPGSRDETAHGHPATTRDTGREHGRGETGGHSTRTRRRHAKSAATATQAAENRSGDAPTTNQLYEGGAGASRVFVLSKDGQPLMPCHPARARELLGKKRAVVARQVPFTIRLKDRTRAESEVDGVQLRIDPGSRGTGLALTDEKKETDEQGTTVIVRRGLSSVELQHRGDQIRACMRQRAGYRHRRRSANLRYRARRSNNRTTAPGWLPPSLRHRVDTTISQAKRLCRYAPVTEIHIEHVTFDTHSMSAGRSLRGTEYAQGPLAGTNARSYLRAKWNNACAYCDATGIPLNIEHLSPRGRGGSHRISNLVLACAPCNQAKGSKPVETFLAHRPGRLARILQQIKTPLTDAAAMNTTCRQLAEALSTLGPPVHAWPGWLTKENRDAMGLAKTHTLDALSVGPLDHTNGDKIVRSPRHVLVTKATGRGSYARTTPDRYGFPRLLRSRAKQHFGYATGDLVRAVMPSGKWAGTWTGRISVRARGQHSLMTPRGRFNVSHWHLKLLQRGDGYGYDVRPESS

SEQ ID NO: 8079 - protein, 559 aa, Planomonospora sp.
MRQPPHLKPVLTSLSHQRMEVPLMATFDTRQRTHRRVLPQPAALECAGADTPGRDETARADPAGDGRVPGIGHGRGETRTRRTRVHGRHPEAAAAVKGDRGLTASHVFVLDKSGEPLMPCHPARARTLLASGRAVVVRHTPFVIRLKDRTVDESAVPSVEVGIDPGSRHTGISLFMQTDEVRRGLFALQLDHRGGQIRDKLTARANYRRGRRSRNLRYRAPRFSNRIRSKGWLAPSLRHRVDGVASWVGRLRRWAPIRVLHVERTAFDTSALAVGKSLSGVEYQQGTLYGYEIREYLLEKWNRTCAYCGATGVPLNIDHIHPRCRGGSDRISNLALACVPCNQAKDALPVEEFLVGDPERLARIRIQAKTPLRDSAAMNATRQALWRALAATGLPTRAASGGRTKWNRWRTGASKSHTLDALHVGDLEYVTAWPATVLVATATGRGGYARTRPDRYGFPRLALPRIKQVHGFATGDLVRAVVPSGKKAGTHAGRVAVRTTGSFNIRTRQGLVQGIGYRHVRLLQRADGYGYIMIKEVIVASRSIALPRFEDLGCHAGGN

SEQ ID NO: 8080 - protein, 453 aa, unidentified
  REGION 1..453: note = Human oral metagenome
LDTVAVISASGKKLMPTNSYRARGLLKSKRAVIHKYRPVFTIKLVDRTNGYTQPIEYKCDTGYQNIGISICSDTKEFVNEQRDLLKDEVKKHSDSRRYRRTRRNHLRYRKKRFDNRRGMISRDGFAPSIRNKRDVHVRLYEEYYKIFPIAKAVFEMGQFDTQVLKAIEAGLPVPKGADYQRGEQYGYATLREAVFARDDYKCICCGKSAIKDRIKLRVHHIGYLSGDRSNRMANLGSVCENCHTPNNHKPGGKLYNLKPKLKELKGATFMTTVRYSMIKNLKAATPNADIKVTYGAATKLARKDLNVRKTHSNDAYCMGEFHPKHRSDFKHYKKCRRNNRVLSRFYDAKYRDLRDGSTKTGSQLSCGRTNRKILRHTKLDERIYRAHKISKGRISTRRQHYSLRPGDKVLYDGKVYFVKGIQSNGTSIKLANGKACPLKKVSILQHCNAWAII

SEQ ID NO: 8081 - protein, 476 aa, unidentified
  REGION 1..476: note = Human gut metagenome
LEVVDTEGVSHPGLPGKYKHKGGQLMSVAVISKTGERLMPTSEYRARKLLKSGKAIKHSYHPFTIQLTERETGDIQPIELCMDTGYIHIGISVKSEKHEYLAEQIDTLTDERGRHDACRMYRRQRRSRRRYRQARFNNRKRDQGWIAPSLEHKKKIHIQAISRINNVMPITDITLEMGNFDTQVLKAKEEGKPLPQGADYQHGERYSIATLREAVFSRDSYKCQYCGRTIKDGAILHIHHIKYRSQGGTNSMSNLATVCDKCHTPKNHKPGGKLYNWKPKLSFFKGATFMTVIRWQLYNEVKALFPDIDIHITYGAATKERRRELDIDKSHVNDAFVMGQFHPKHRIKAVLYKKKRRNNRCLEKFYDAKYIDSRDGKKRSGQELFNGRINRNHKKDSENLHQYRLQKVTSGKRTVRKQHYKIQPHDIVIYENRKRETAGCHCNGTRMMLLPDKKSASIKKVKIYKYAGGYFKSAFN

SEQ ID NO: 8082 - protein, 510 aa, unidentified
  REGION 1..510: note = Human gut metagenome
MPTVYVLNKDGKPLMPTTRCMHVRHLLKNGKARVVKSKPFTIQLLYETDDVVQPLYLGIDPGRTNIGVAVVKADGAAVFTAHLETRNKEVPKLMKKRKESRCARRTNGCRRQRRAKTNGTISKKCVKQTTAQNGSVSKRAKEIGVIKRHLQGCEKDVLCIGIKNKEAKFTNRARPEGWLTPTANQLLQTHINLVKKIQKFLPISDVVLEVNKFAFMQLDNPNIQKWQYQQGPLYQKGSLENAVSEMQEHHCLFCEKPIEHYHHVVPKSENGSNTIANIVGLCTEHHNLVHKDATWQKKLAKEKVGLVKKYSALSVLNQIIPALTKEMNSLFPKHFFVTNGKSTYDYRTAHGVSKDHWLDAYCIACSVLPNDVCDSNINSHVPYELKQFRRHDRRVLHKANMSRVYTLNGKTVATNRHKAIKQTTDSLEEFRQSHPGDVCKLKVKEHHPAYRNLNRNYPGSVFLVDGQVHVMQGVSGSHNGKADGYYNTNGNAYPYYKCKFVVKNEGIVFA

SEQ ID NO: 8083 - protein, 434 aa, Moorena sp.
MQNYVFVVDKNVVPLNPIRPKRARQLLNQNKAAVLRPFPFTLILKQEISNANIHPLTLKIDPGSKTTGFALLDGDKVVWLGELEHRGQRIKDSLEKRRTIRRNRRSRKTRYRKARFLHRTGSIRPLPPSVHHRALTVETWLKRFTRFVPINKIAIEQVKFDMAKMQNAEITGVEYQQGTLWGYEVREYLLEKWGRECTYCGKKDVPLQIEHIVPKSKGGSNRVSNLCLACEECNQKKGNKPVEEFLKNKLEKLKKIKSKMKTPLKDAAAVNASRNKLAWICEFIISGITGKRSDCEVGTGAQTKYNRTRLGLPKEHSIDAACVGSVDTLEFRTSQPLLIKAAGHRNKQYVRMNKFGFPASKPRKKYDIGWKTGDIAISINKGVKCLGRVLINDAKRFEMRINGKRISGKYGELTKLHRSDGYSYSFSANYSVSP

SEQ ID NO: 8084 - protein, 366 aa, unidentified
  REGION 1..366: note = Human gut metagenome
VIKRHLPGCEKEVLCIGIKNKEAKFSNRTRPEGWLTPTANQLLQTHINLVKKIQKFLPISDVVLEINKFAFMRLDNPNIQKWQYQQGPLYQKASLEEAVSEMQEHHCLFCKKPIAHYHHVVPQSENGSNTIGNIVGLCTKHHDLVHKDTAWQKKLAKKKTGLNKKYGALSVLNQIIPALTKELSSLFPKHFFATNGKSTYDYRAAHGVSKDHWLDAYCIACSVLPNDVCDSNINSRVPYELKQFRRHDRRALHKANMNRVYTLDGKKVATNRHKAIKQTTDSLEEFRQRQPDDVCKLKVKEHHPEYRNPERNFPGCVFLVGKHTHVMQGTSGSHNGQADGYYDTNGNSYSSGKCKFVAKNKGIVFA

SEQ ID NO: 8085 - protein, 477 aa, unidentified
  REGION 1..477: note = Human gut metagenome
MIIALDKYKRPLGFLTERRCRILMERKRAVLYRVFPTVVILMDVDARTIPDLPSFRIKIDPGSKYTGIAIIRNDTDEFVYAMQIEHRGDTVRAALNKRKNARRNRRSRETGYRRAKWGNRCLSEKDKRSYDSSREDGWLPPSIRSAADNVISWVRRLGRWINLTECSFEAVRFDTQLMEDPDIEGEEYQHGTLFGLEIKEYLMEKFGHTCQYCGGKSGDPVLEWEHMRPKSRGGSDRVKNALLSCSSCNKDKGNRTPEEWLEQIKARLPREKGKRKELDEERVKLIQKVIDGKPQGSALRYAAWVSSSRRYLEKALFGIFGDVECSSGGRTKYNRTELGYPKEHHYDALCVGTVPEKGYHDRTNGYYLYAKAAGRGTRLRGHLNKCGVIVTKWTDRKKGFFGFQTGDIVVAEVPHKTPKPYKYEGRFVGRVMVRATGSFDIKTTDGKLVTVKEQYCRLLQANSGYHYTMKRAIPLGH

SEQ ID NO: 8086 - protein, 442 aa, unidentified; identical to SEQ ID NO: 3218
  REGION 1..442: note = Human gut metagenome

SEQ ID NO: 8087 - protein, 417 aa, unidentified
  REGION 1..417: note = Human gut metagenome
MPCSPAKARLLLKERKAIVKRRTPFTIQLTIATGEAKQPVTLGVDSGYKHIGLSATTEKAELYASEVELRQDITDLLSARLALRRSRRSRKTRYRVPRFDNRVASKRKGWLAPSVENRITAHMSRVEAVMRVLPVTAITVETAAFDTQLLKNPDITGAAYQQGEQLGFWNVREYVLFRDRHVCQHCRGKSKDPILNVHHIESRRTGGDAPNNLITLCETCHKAFHRGEIKLKVRRGKSFKAETFMGIMRRTLFERLKKAHPELNVRNTYGYLTKHKRISYGIAKSHCADAYCIADNLGAKRLEGFFFQKQTRKHNRQIHKLLILKGGLKKKNQAPYEVKGFRLFDKVICKGEEAFIFGRRTSGSFDVRRLDGTRISAGISYKKLRRLEPRTTYLTEFRKEAALPPLHKCRGLRAEFL

SEQ ID NO: 8088 - protein, 434 aa, Anoxybacillus sp.
MVFVLDTNKCPLAPCHEAVARKLLKQGKAAIYKRFPFTIILKKSVDESENETTYRLKIDYGSRHTGLAILRGQEVVWLGQLDHRTDIKERIDKRRAFRRARRNRKTRYRKPRFLNRKRKEGWLPPSLESRVQNIQTWVSRLKKLCPIGHISYENAKFDTQLMRNPEISGIEYQQGTLQGYEVREYLLEKFGRKCCYCGKENVPLEVEHIIPKSRGGTDRIDNLCLACRDCNQRKGNQTAEEFGCPHIQKQVKESLKDTSIINATRWKVYEVLKQARLDVECGTDARTKMNRIRLGLPKTHYFDACCVGESTPNHLYFKTKEVLFINAKGRGSRSRTNLDRYGFPRGYLARQKFFFGFQTGDMVKAIVPRGKYKGVWFGEVACRKTGNFDIKGKDGKRIAQGISYKYIQVIQRFDGYTYRKEEAELAQGAIPPRA

SEQ ID NO: 8089 - protein, 414 aa, unidentified; identical to SEQ ID NO: 4868
  REGION 1..414: note = Human gut metagenome

SEQ ID NO: 8090 - protein, 616 aa, Salipiger sp.; identical to SEQ ID NO: 3768

SEQ ID NO: 8091 - protein, 431 aa, Escherichia sp.; identical to SEQ ID NO: 3801

SEQ ID NO: 8092 - protein, 512 aa, unidentified; identical to SEQ ID NO: 3870
  REGION 1..512: note = Human gut metagenome

SEQ ID NO: 8093 - protein, 430 aa, unidentified
  REGION 1..430: note = Human gut metagenome
MPKVYVLNRHGRPLMPCTPAKARHLLDAGKAKVRHRTPFTIQLLYGSTGYTQEVILGVDAGSKTIGLSAATETEELFSAEVKPRNDVVELMSARRQFRRARRNRTTRYRKPRFDNRVRSKHKGWLAPSVEVKIQEHMTAIRRACAILPVSKVVVETAEFDLQLLKAVAEGKPVPQGEDYQKGEMYGHYNVRQYVLWRDSYTCRICGAHGSVRKGVPLHVHHLESRRVGGDAPDNLVTLCTACHDKLHKGIIMAADIKKRKRRSTRDATFMGIMRMTLLRRLREQLPVPVVETRGYITKATRENLLVLPKSHTNDALAIAHGPQGFRAEYLPNIRQADRLYTIRPVRHHNRQLHKATILKGGVRKANQAEKYICGFRLYDKVLYNGIECFVWGRRTSGSFLLRQLNGEKVKDGVSYKHLKLLERSQSYLVA

SEQ ID NO: 8094 - protein, 421 aa, Moorena sp.; identical to SEQ ID NO: 5881

SEQ ID NO: 8095 - protein, 473 aa, Aneurinibacillus sp.; identical to SEQ ID NO: 6640

SEQ ID NO: 8096 - protein, 460 aa, Petrotoga sp.
MWTYRYIADLFPKGDLRMVYVLSKDETPLMPTKRHGKVKHLLREGKAKVVRNKPFTIQLTYDTTHYTQPITLGIDSGHKYIGFSAVTGKEELLSGEVELRDDISELIKEKVMYRRIRRSRLRYREPKFDNRVSSRKETPRKGFKEGWLAPSIKHKLDTHIRFIEFIKKILPITDIIIEVAKFDTQKIKNPEIKGKEYQQGEQRDFYNLREYILYRDNYTCQLCGKSNVPLEVHHIGYWKGERTNRPSNLITLCTKCHDPKNHLKGGKLYGMKPVQKPLKEATFMSTVRWKLVNALGCKYTYGYITKSKRIKLNLDKTHYNDAFCIAGGTRQRRIEPIYFEQIRRNNRSLEKFYDAKYIDTRDGSTKKGQELFNGRTTRNKNYNTQNLKKFRGQKVSKGRRSIRTQRYFYQPKDIVIYEGKKYTVKGIQNKGSYIKLAGLSKPVKTEIVEPYIFRKGLCVV

SEQ ID NO: 8097 - protein, 442 aa, unidentified; identical to SEQ ID NO: 2807
  REGION 1..442: note = Human gut metagenome

SEQ ID NO: 8098 - protein, 312 aa, Fischerella sp.
MARFDNRKRSEGWLPPSLMHRVLTVETWVKRLCRHAPIAQTVMELVKFDTQKMQNPEIDGIEYQQGQLAGYEVRQYLLEKWGRKCVYCDKEGVPLQIEHIHPKSKGGSNRVSNLAFSCKRCNLKKGTQLVDEFLKKDAKRLEKIKQQAKKPLKDAAAVNATRWTLFHTLKRILPTTTGTGAQTKYNRTLFQLEKQHWIDAACIGDIKAIKLLTLQPLLIKANGWGTRQMAGTNKYGFPIRHRTRQSLHFGFQTGDIVKAVVLSGKKVGQYVGRVLCRARGSFDIVTKTGTVGDINHRFCKPIHKKDGYSYAF

SEQ ID NO: 8099 - protein, 471 aa, unidentified
  REGION 1..471: note = Verrucomicrobia subdivision 3 bacterium UBA6082
MKDRTKFPRVLVVTQDRRPAMPCSPARARQLLASGQARILRRLPFVIALTNRVDVETQALRLKMDPGASETGLVLTAAKNDGEHVIWGANLRHRSNQIRRGLYKRRLCRNNRRRRKTRFRPQRCLRQRKGKLSPSLRSALDRTWTWVQRLRRWSPVTGVSVEVVRIDLQRMQDPDVQGCDYQRGPLVGVRLRDHLLHKHDRQCAYCSEKRRGRLEIDHISPVARGGTDRLNNLVIACEPCNRSKGAKSTTEIGHPHIQAGKSLRHATATNIMCVHLLRRLECLDLEVEVGNGAETHTNRGLQGYRKDHWIDAACVGRSGRKVWLELRMPVWHITSFRRHLRRVHLSDAYGFPRQNGRVSQVHGFRTGDVVVAVVRRGKHRGIHLGRIALRASGWFQIGSAAVPWKCCRVVQRNDGYGYALQNLPYHPKVDARNQSTRPSHQRKLMGLRGAERPQTHSEMALPVSDPAISGS

SEQ ID NO: 8100 - protein, 434 aa, unidentified; identical to SEQ ID NO: 5659
  REGION 1..434: note = Fermentation metagenome

SEQ ID NO: 8101 - protein, 454 aa, unidentified
  REGION 1..454: note = uncultured beta proteobacterium
MAVFVLDRRGKPLMPCSEKRARLLLERGRARVHKMLPFTIRVVDRLAEDSEFQALRIKLDPGSKTTGIALVRETENNGVAVVNLFDLIHRGRQISEALTARRGHRRLRRSKLRYRAPRFDNRGNQQRGWLAPSLQHRVDTTLAWVKRIGKLAPISAISTELVRFDMQALENPDIEGAQYQQGTLAGYEVREYLLEKWGRTCAYCDAKDAPLQIEHIHPKAKGGSNRISNLTLACPSCNAKKAALPIEVFLARHPDRLKRIQAHARRPLKDAAAVNSTRWALVNALKATGLAIETASGGRTKFNRNQFNIPKTHALDAACVGAVGSITNWKKPTLCIKALGRGSYQRTRLDKFGCVRGYLTRSKSIQGFQTGDMVKAVVTKGKKTGSYSGRVAIRASGSFNIQTRTGLVQGVSHRYCTVVQRGDGYGYSQAAKTDATGTPPRAMDASHPRSTSPA

SEQ ID NO: 8102 - protein, 414 aa, unidentified; identical to SEQ ID NO: 2588
  REGION 1..414: note = Human gut metagenome

SEQ ID NO: 8103 - protein, 419 aa, unidentified; identical to SEQ ID NO: 6355
  REGION 1..419: note = Human gut metagenome

SEQ ID NO: 8104 - protein, 413 aa, unidentified; identical to SEQ ID NO: 2636
  REGION 1..413: note = Human gut metagenome

SEQ ID NO: 8105 - protein, 439 aa, Bacillus sp.
MMAYVISLNGNPLDPTHPAKARKLVRKGKANVLQVNPFTIQLTYETTEYTQDITLGIDSGYQHIGFSAVSEKKEHISGELDLLQGMTNRIEERRSYRRTRRGRLRYRQPRFGNRKRNEGWLAPSIQHKLDSHSRFIKKMKTLLPINNVIIEVANFDIQKIKNPDISGVDYQQGEQMGFWNVREYVLHRDHHKCQNPNCKNKAKEPILQVHHIVYRDNGGSDAPSNLITLCTKCHTSANHKKGKFLYEWQSNKPKLNRFKDSTFMSMVRWKLAAIEDANITYGYITKTNRIQFNLEKTHYNDAYVIVGGSTQLRCEPIYYQQVRRNNRSLEKFFDAKYIDSRTGEKSTGKELDSGRRTRNKNENSENSRVYRGEKISNGQRRIRTQRYFYQPNDLVKFKGQICGVVGTMNKGKNVKLNIGKSPNPAKLTPYKFSKGMVAT

SEQ ID NO: 8106 - protein, 424 aa, unidentified; identical to SEQ ID NO: 3351
  REGION 1..424: note = Human gut metagenome

SEQ ID NO: 8107 - protein, 439 aa, Moorena sp.
MVFVLDKKKRPLMPCSEKRARLLLKRERAVVHRLQPFTIRLKDRLLEQSVLQPVGVKSDPGSKVTGAALVRREETVNGPVDHALHLSQIAHRGEMVHERMQKRAASRRRRRSANLRYRPPRFNNRTRSQGLLAPSLRSRVENVLAWVERYRRLAPIVFVDVETVRFDTQKIQNPEISGVEYQRGELFGYEVRGHLLEKWGRRCAYCGAEKVPLEIEHIVPKSRGGSDRVSNLSLACRPCNQAKGSRTAEEFGHAEVQAKAKPPLKDAAAVNTTRYAILDGLREMELAVRAWTGGRTKYNRVQFGIPKAHALDALCVGGMAGVSGWNVQVLEIKALGRGQRCRTNVDAHGFSRGYRMRHKTVHGFRTGDLVQAEVPHGKWAGTHVGFVAVRALGSFRVEKADGISWKRCRLLQRADGYEYRKIPSVVSSPGVNAGASNAA

SEQ ID NO: 8108 - protein, 475 aa, Blautia sp.; identical to SEQ ID NO: 4128

SEQ ID NO: 8109 - protein, 415 aa, unidentified; identical to SEQ ID NO: 6534
  REGION 1..415: note = Human gut metagenome

SEQ ID NO: 8110 - protein, 470 aa, unidentified; identical to SEQ ID NO: 2949
  REGION 1..470: note = Human gut metagenome

SEQ ID NO: 8111 - protein, 454 aa, Halomonas sp.
MRVYVKSQQGDWLMPTHPAKARWMLRLGKAQVIRRTPFAIQLTYAATEHGQPVVLGIDDGNVVVGIAAVANDEVVYQEEIHLRTDIKIKMDTRRSYRQGRRHRKTRYRTPRFDNRSASHKKGRLPPSIRSKKGAILRAVAQMPLPAPALIRLEDAYFDIQAIENPDITGTAYQQGPLLYDKNVKSACKTRDKHRCRVCSTEDYLQVHHLIHRTNGGSDKLSNLMTLCRDCHDDHHKNGLVLPRQKNVSFRSAAHVQQGKYYLQAQLETLAPVQTTFGYLTAHHRKHQGIDKIHANDAVVIAQVGVLPKSILIKTICLGGRKRSLHEATPRRGRKQSNREQKRNGKNVVSLKGFKRLDTVRFQGQVGYLSGFNGTSMAFVRGKDGRYITSPGKSYKQVSLSTLERLHHNQTRVRFLVKQTLTTSRPSSHASLADAPLRRGNPAACLLNLNWITPA

SEQ ID NO: 8112 - protein, 424 aa, Enterococcus sp.
MRVFVRNMQDKPLMPCSNRKARLLLKEGKAKIYQYNPFTIQLCYASREYVQECHIGIDTGTKHIGMAVTSEDKVLFKGEIELRQDVKSNLDTRRSYRRDRRNRKTRYRKARFLNRKKKESWLPPSIENRINHTFKWINKLVALLPNPKLHIEVGKFDVAKMINPNVQGVDYQHGQTYGFYNVRYFVFARDNYTCQCCKKSKNKILQTHHIVYRSNGGSNRADNLITVCTDCHTYENHQKGGILYQWQENRKKTKQYKEPPFMNVLRKRIFTQYPNAIITYGSETTPKRKELGLEKTHYNDAIVISGITKIKENPNEWLLIKQFRKKKRSLHEATARKGRKEPNRLQKRNAKNTPYYKGFYLNDKVRVFNQVGHITGFTSGGAYIKNSENEYITLPNKSYKQIGISNIRLLHHNNNWQYIHKHIA

SEQ ID NO: 8113 - protein, 562 aa, Streptomyces sp.; identical to SEQ ID NO: 3959

SEQ ID NO: 8114 - protein, 420 aa, unidentified
  REGION 1..420: note = Human gut metagenome
MQYVYVLNKHGEPLMPCSPGKARLLLKQQKACVVKRTPFTIKLLFGSAGYKQPITLGVDAGSKHVGLSASTEKRELYSEEFTPRSDVVELLSTRRQNRRSRRNRKTRYRVPRFDNRVHSKHKGWLAPSVEVKIQEHITVIKHICKILPISLVRVETAEFDTQRLKAMLAGKPLPVGTDYQLGEMYDEYNVRQYVLKRDHYTCQCCGTHNTAKKVVKLHVHHLESRKTGGNAPSNLVTLCTTCRKNLHKGRVTLDGKERGKPLRDAAFMGIMRKTLMVRLKEELPIPVQGTYGYITKMRREQNDIKKSHTNDARCISKHPLAEPCSVCYRTKAIRHHNRQTHKANFSKKGIRKRSQMPYLVEGFRLWDKVLYKGQEFFVSGRRSSGSFALKKLDGTSISKGVTFKKLRLLEPATNYLIERM

SEQ ID NO: 8115 - protein, 422 aa, unidentified; identical to SEQ ID NO: 3922
  REGION 1..422: note = bioreactor sludge metagenome

SEQ ID NO: 8116 - protein, 466 aa, Moorena sp.
VRFEINWLIRGQKGDRKMQKLGERNTYTPTNASQVRSSVVVSLNREETLGEHDLKTCPNNLDGNQLSGKREQDLRVPVLNMRGKPLMPARPAKARHLLKEGKAMVVGRSPFTIQLTTATGEAKQDIALGVDCGYSHVGLSAVSRKKELFSAEVILRGDIVKLNSERRQYRRARRSRLWHRQPRFDNRKKDKGWLAPSIQHKLDSYFKLIGKIKEILPIAKINVEVAAFDIAKIKNPDIEGEGYQNGVQKNFWNTREYVLFRDNHTCQACKGKSKDPVLEVHHLESRKTGGDRPDNLIALCNTCHSKVSKGKFYLNVKIPKGFKAETFMNTVRWKLVNRLKELGNSVSHTYGYITKSKRIEIGLEKNHVNDAFVIAGGTTQERCSSFTVNQTRRNNRRLQTNRKGYRPSIRRKRYELQPNDLVRYDNTEKRVKGVFNYGTWVRLDDGVNTNVKNVEVLKYGKGIQFV

SEQ ID NO: 8117 - protein, 416 aa, unidentified
  REGION 1..416: note = Human gut metagenome
MVYVLSQHGQPLMPTENHAKVRALLKHGKAKVIQRCPFTIQLLYESTTHTQKINLGIDAGSKTIGVSATTDSKVLYESEVVLRNDIVELLSGRRALRNSRRSRKTRYRKPRFDNRKKPDGWLAPSIRQKIETHVTVVGNVMKILPVTKIIVETASFDIQKIKNPEIEGEGYQHGEQLDFWNVREYVLFRDGHTCQCCKGKSKDNILNVHHIESRKTGGNAPNNLITLCETCHKAYHKGIITLPKEIHRGMRFRDAAFMGIMRWAFYDRLKELYNPLGAEVINTYGYITKNTRIEHGLPKEHYVDARCISDNPAAKPLDHYYFQKKVRCHNRQIHKNTILKGGIRKRNQASYEVKGFRLYDQVLWKGQKCFIFGRRSTGRMDLRLLDGTHINASVGHKNLKLLSMRKNYLIEQRKAG

SEQ ID NO: 8118 - protein, 335 aa, Moorena sp.
MSYVFVIDQEKRPLDPVHPGRARKLLSSGKAAVYRRFPFVLILKHPVSEAHPQPLRLKIDPGSKTTGLAVLNDTSGQVLWAAELVHRGEEVHQALQKRAGVRRGRRSRHTRYRAARFSNRRRKRGWLAPSLCSRMQNVQTWTRRLMRWCPLGAISYEAVRFDTQAIQNPEIKGVAYQHGTLAGLEVKEYLLLKWRHKCVYCQKGDIPLEVEHIVPKRRGGSDRITNLTLACEACNQQKGSQTAQAFGFPHLQAQALQPLKDAAAVNSTRWALYERLKATGLPIEVSTGGQTKWNRKQRGIPKSHWLDAVCVGPSTPERVQWQHVIPLLITARGRQ

SEQ ID NO: 8119 - protein, 465 aa, unidentified
  REGION 1..465: note = Ga0315279_10035668
MQKLERRNTYTPRNTSLVPGNCDPVIKHGQCDQVLQSSKTLSNNSEENQCQHTDRPTVIVYVLHQDGTPLMPYKPAKASHLLKQKKARVVSRKPFTIRLSWDCEKNVQPVTLGIDSGYKSVGLSATTGKKELFSAEVTLRTDIPKLMKERRMYRRQKRNKHHWYRPPRFNNRMKEDNLVPSIKHKLDSHIRLVEKVKKLLPISEVIIEVANFDIQKIKNPNIFGKEYQQGEQSGFWNTREYVLHRDNHECQHCHGKKKDQILQIHHINGKSEGATDRPEELLTVCKTCHEDHHAGKDIIPKKGIKQFKPETFMTAIRWKLVTALGCKHTYGYITKSGRIELKLSKSHINDAFVIAGGSNQERCRPFFVKQVRRNNRCLQINRKGFKPSIRKKHYRLQPSDIVRYNSKEYVSKGCHCKGASIVIVNDTEKLDVNTKKVELVCYGKGLQFRSWLKPGVSLDGAGEAL

SEQ ID NO: 8120 - protein, 325 aa, unidentified
  REGION 1..325: note = Human oral metagenome
LWGVDKLIEQRRGYRQRRRYWKRYRKERFSNRASTRRKGRITPTILQKRQAVVRVVDRLSKYIRIDSIYLEDVAIDVRVLTDEKKLYSWQYQRSNRLDENLRKATILRDNCKCQLCGKRNCRLEVHHITPRRMDGANTIGNLITLCSECHSNVTGREIEFAEQLYSKIGKKKNNASLQYASHVMVGKTWLREELSKRTPVFLTTGGDTANKRIDWNLEKSHEIDAVCITNLEPESVGVKPWNVKPLRHQRKTMKVKEILGFRHRDIVCYTFKNGEYHEGYVTALYPSEGKQKEGLNFLSPTKHCKRVNPKKCQRLNRPDKFLWLV

SEQ ID NO: 8121 - protein, 512 aa, unidentified
  REGION 1..512: note = Human gut metagenome
MSTVYVLNKDGKPLMPTTRCGHVRRLLKEQKARVVTSKPFTIQLLYETNDVVQPLYLGIDPGRTNIGVAAVKTDGTAVFTAHLETRNKEIPKLMQGRKKARRARRTNGRRCRRQRRAKANGTISKKCVKQTTAQNGSVSKRAKEIGVIKRHLPGCEKELLCIGIKNKEAKFSNRTRPEGWLTPTANQLLQTHINLVKKIQKFLPISDVVLEINKFAFMQLDNPNIQKWQYQQGPLYQKASLEEAVSEMQEHHCLFCKKPIAHYHHVVPQSENGSNTIGNIVGLCTKHHDLVHKDATWQKKLAKKKTGLNKKYGALSVLNQIIPALTKELSSLFPKHFFATNGKSTYDYRAAHGVSKDHWLDAYCIACSVLANDVCDSNINSHVPYELKQFRRHDRRALHKENMSRVYTLNGKSVATNRHKAIKQTTDSLEEFRQRQPNDVYKLKVKEHHPEYRNPKRNFPGCVFLVGKHTHVVQGTSGSHNSKADGYYDTNGNSYSSGKCKFVAKNKGIVFA

SEQ ID NO: 8122 - protein, 413 aa, unidentified; identical to SEQ ID NO: 2636
  REGION 1..413: note = Human gut metagenome

SEQ ID NO: 8123 - protein, 414 aa, unidentified
  REGION 1..414: note = Human gut metagenome
MPCSPAKARLLLKEKKAIVKRRTPFTIQLTIATGESKQPVSLGVDAGYKHVGFSASTEKAELYASEVELRQDVSDLLSARRALRQSRRNRKTRYRAPRFDNRIRTKRKSWLAPSVENRINAHLSRIEAVLRLLPVTKITVETTSFDMQLLKNPDISGKEYQEGEQLGFWNVREYVLFRDGHVCQHCHGRSKDPVLNVHHLESRRTGGDSPGNLITLCETCHKALHRSEITLKTKRGQSFRAEAYMGLMRWEVLNRLKTSHPGLEVHNTYGYRTKYTRIVNGIDKSHCADAFCIAGNLGAERLGEFFFQKQTRRNNRQIHKLSILKGGIRKRNQAPFEVNGFRLFDKVACKGEEGFIFGRRSSGFFDVRKLDGTCISAGISYKKLHLLEKRRTYLTEIRKEEALPPLPEGSGLRA

SEQ ID NO: 8124 - protein, 420 aa, unidentified
  REGION 1..420: note = Human gut metagenome
MQYVYVLNKHDEPLMPCSPRKARLLLKQKKAHVVKRTPFTIKLLYGSAGYEQPITLGVDAGSKHVGLSASTEKRELYREEFTPRNDVVELLSTRKKYRHSRRYRKTRYRAPRFDNRVHSKHKGWLAPSVEVKIQEHITVIKRICRILPIALVRVETAEFDTQRLKAMLEGKPLPVGTDYQLGEMYDEYNVRQYVLKRDYYTCQCCGAHTTTKKTVKLHEHHLESRKVGGNAPSNLITLCTTCHDALHKGKVSLDSKKRGKPMRDAAFMGIMRKTLMARLRDELPIPVQGTYGYITKMRREQNGIKKSHVNDARCISKHPLAEPCSVCYRTKAIRHHNRQTHKANFSKGGTRQRSQMPYVVEGYRLWDKVLYKGQECFVSGRRASGSFTLKKLDGTRISKGVTFKKLRLLEPATNYLIERM

SEQ ID NO: 8125 - protein, 438 aa, Thermoanaerobacter sp.
VADKTSQSNIGDEHLTPKGGLPHMVYVISKEGKPLMPTNRHGKVRRLLKQGLAKVVRREPFTIQLLYNTTSYTQPVVLGLDTGSKVDGISAITEKQELFSAEVELRQDINKLLLERREYRRNRRYRKRRYRKPRFLNRRKYKGKLAPSIQWKVDAHVRLVNFVAKILPVTKVIVEIAPFDTHKIINPDVESKGYQEGPQKGFWDVREYCLWRAGYKSELSGKKGVLEVHHIVPRNQGGTDNPSNLIVLTAEEHKAVHEGRIKIPNSKLEKVRILKDASHVSIVGWYVVNKLKQTYDIDITFGSRTKEKRIELGIEKSHRNDAFIIAGGSNNIEQIDHWYYGKFFRRQNRSLHKSNPIKGGIRPANTIKEVKGFRRFDKVRYEDMVGIIYGLRSSGYFDIITLNGEKIHSSAKWQNLKLIERAKTLMFERRKERFLSIL

SEQ ID NO: 8126 - protein, 451 aa, Moorena sp.; identical to SEQ ID NO: 3199

SEQ ID NO: 8127 - protein, 515 aa, unidentified
  REGION 1..515: note = Human gut metagenome
MTALEERLSKTEYIYVLGFDGKPQMPTRRKRHVLKLLKTGRARIAEDIPFTIRLTYRNAPVLQPVTLAEDPGRTNIGAAVLSPLGDLLFAAVIETRNKEIKKLMADRQKSRQASRRGERKARQRLAKRYGSMVKSGMVMRKLPMYAADKFVICKFIRNTQARFCNRKRCPDWITPTVQHLVQTHLNIIRKISRYLPVTDIAFEVNRFAFMHMENPEAMGVDFQNGPLKGYGDVKEAIRTQQHGKCLMCKKPISHFHHIVPRSRGGSDTIQNLAGLCPECHTKVHTDTAFRKDFDEKKSGQLKKYGALSALNQAVPFICKKLLEEYGEEHVHFCRGLDTSLIRTALGFEKTKKNQMHEVDAYCIGLAALEVNEVETPAFDHTFQIRQFRRQDRSIIHHQTGRSYYQGKEKVAQNRKPGFEQKTTALSQWYKEQVRIHGEKEAEKLRSQLRVEKSCRHYNDMDRFLPGAVFLYEGKRYVLSGRITNGKYLRACGQGMKNFPAAECTFIRHNAGLVFI

SEQ ID NO: 8128 - protein, 408 aa, unidentified
  REGION 1..408: note = Human gut metagenome
RHLLDEGKAKVKKRTPFTIQLVYGSSGYTQEVILGVDAGSKTIGMSASTTKEELLSAEVKPRNDVVDLLSTRREFRRAQRNRKTRYRKPRFDNRVRSKHKGWLAPSVEVKIQEHITAIRRVCGILPVSKVVIETAEFDLQLLKAIADGKPVPQGEDYQQGEMYGHYNVRQYVLWRDGYTCQCCGAHATKKKEVRLHVHHLESRKVGGDAPDNQVTLCESCHEKLHKGLIAEKDFKKRKRKSTRDATFMGIMRKTLMQRLCSELPIPVIETRGYITKATREKLLVLPKSHTNDALAIAQGKQGFNVGYLPEIAQIDKIYTIRPVRHHNRQLYKATILKGGIRKSNQTKKYVFGYRLFDKVQFNEQDCFIWGRRTTGIFTIKTINGKMIKDGISFKKLKLAEKSTSYLIA

SEQ ID NO: 8129 - protein, 453 aa, Anaerotruncus sp.; identical to SEQ ID NO: 5442

SEQ ID NO: 8130 - protein, 470 aa, unidentified
  REGION 1..470: note = Human gut metagenome
MSVFVVGLNGCRLMPTSERKARLLLKEGKASVYRKVPFTIKLNYKTGSTIQPGYLGIDTGSQHIGITAVREDGTVLHKEEIGLRNSMTKRKLLESKASLRRGRRYRKTRYRHPKWRPKAKRVYCEKPDRKGRHWKKQKNTFTSKRQAGWLPPSLQSKTDHHIRWIRKILGLLPEGYRLSIELGRFDPARMKDPEIHGELYQKGPQYDYENVRAYVLDRDRYTCQACKKKGGKLQVHHILYKSSGATDNPQYMATVCSDCHTLENHQPGGILYRWQQEQKKFTRGLRDASFMNILRKRLMEAFPDAVFTYGNITKVDREALKLPKSHADDATAIALVRIGITSIKDNEPVIYIQQVRRKKRSLHEENPRKGRKEPNRTASRNSKNTKSITVNKKLGKKKIRVTACLFDRVELNGEKGWITGFTGTSCYMKDAEDNYIRTSEKCNQVSLSKLRILHHCGNWVIGARKTLGKG

SEQ ID NO: 8131 - protein, 455 aa, unidentified
  REGION 1..455: note = Human gut metagenome
MSVLVIGRNGRALMPTTSRKARILLKKETASVVCRHPFTIQLLYKTGCATQEGCIGIDTGSQHIGVGVTCEDRVILKEEHELRSSMEKRSLLVTRAAMRRGRRYRKVRYRKPKWRQHTKRMYFEKPNRRGQHWRKVKTTTQSPRPKGWLPPSLQSKCDHHFRIIDRYLKYLPASITRNLVIEAGRFDMARMNDPMIHGEMYQRGPMYDAENRRAYIFARDNYQCACCKAKAGTTRKTDGTTVKLVAHHILFRSRGATDNPKYMVSVCDHCHTTKAHQPGGILYSWMENNKKVTRGLRDATFMNILRQRLFARYPQAAFTYGNITAADRKQLRLPKSHANDAVAISLFGKEVSAVRDTCQTVHYKQVRKSKRSLHEAIPRKGRKHPNTKAVRNKKNTTQVNGFKLWDSVLADGKKLFICSFTGTSAYLIDKNGCYVSQPGKTYKQWPLSKLKRLHP

SEQ ID NO: 8132 - protein, 442 aa, unidentified
  REGION 1..442: note = Human gut metagenome
MVTVQQSTHHLPFGRVFIRRNLFMVYVISQDGKPLMPCSDPIARLLLKQGKAKVKKREPFTIKLTYETTNYTQGLTLGVDTGSGTIGTAVSKDNGDIVYMSEVVVRNDITDKMTQRAKYRRNRRNRKTRYRKARWLNRASSIKKDRFSPTMQSKLHSHVREIEYIQSILPVTEMVFETGQFDMQLMKNPSLANPKVRPWGYQKGANYGFENTKAMVLNRDNYTCQCCKGKHKDSKLEVHHIVFRSQGGSDEESNLLTLCHTCHKDLHSGKINPKLSGKVKGNLKYATQMNSIRKQLFRFYPNAIETFGYVTKANRLHLGVDKEHYYDACTIATQGNAFNVKSNLYKKKCVSDGDFQKTKGIRSEQPIVIDKICGFRKFDKVRYFGNDYFIKGRMSTGYAILMDIDGNKIDFSTMPRGYKTPKLSNCKRITARSTVMTQVKVV

SEQ ID NO: 8133 - protein, 424 aa, unidentified
  REGION 1..424: note = Marine metagenome
VLDNHKQPLMPCVPARARQLLKKGKASVYRRFPFTIILNERVGGRTQPTELKYDPGSKTTGISLVVHGKTASRVVWAGELTHRSWSIVEALNTRRNIRRFRRYRKTRYRQPRFLNRTRKDGWLPPSIQSRVDNIVTITRKLQVFAPLSSLACEVVKFDTQKLRNPEIDGAEYQRGTLFGFELWEYLLVKWNHSCAYCNAKNTPLEKEHVVAKSKGGSNSVTNLVVSCRPCNERKGTKSIDEFLKKKPSVLKKIKSQLKAPLKDAASMNANRYAIARELETFNLPVNYGTGGQTKYNRTNQGYRKEHWIDASCATSTGENIQILDTMTPLIIKAVGRGSRKMCQTDGYGFPSSKPKAVKRINGFQTNDIVKAIVTKGKKKGVYVGKVSIRSTGYFNIKTKQGKIQGINHRYCNLLQRIDGYEYHT

SEQ ID NO: 8134 - protein, 413 aa, unidentified; identical to SEQ ID NO: 2636
  REGION 1..413: note = Human gut metagenome

SEQ ID NO: 8135 - protein, 434 aa, Anoxybacillus sp.; identical to SEQ ID NO: 5674

SEQ ID NO: 8136 - protein, 419 aa, unidentified
  REGION 1..419: note = Human gut metagenome
MVYVISQDGKPLMPCSNPIARLLLKQGKAKAKCREPFTIKLIYETTDYTQDLTLGIDTGSGTIGTAVSKNNGDIVYMSEVVVRNDITDKMAQRAKYRRNRRNRKTRYRKARWLNRSNSIKKDRFSPTMQSKLHSHVREIEYIQSILPITEMVFETGQFDMHLMKNPSLANPKVRHWGYQKGTNYGFENTKAMVLNRDNYTCQCCKGKHKDSKLEVHHVIFRSQGGSNEESNLITLCHTCHKNLHSGKVNLKLKGKMKGNLKYATQMNSICKQLFRLYPNAIETFGYVTKANRLHLGVDKEHYYDACIIATQGNAFDVKSNLYKKKCVSDGDFQKTKGIRSEQSIVTDKIWGFKKFDKVCYFGNDYFIKGRMSTGYAILMDIDGNKIDFSTMPRGYKTPKLSNCKRITARSTVMMQVEVV

SEQ ID NO: 8137 - protein, 509 aa, unidentified; identical to SEQ ID NO: 4404
  REGION 1..509: note = Human gut metagenome

SEQ ID NO: 8138 - protein, 468 aa, Moorena sp.; identical to SEQ ID NO: 2405

SEQ ID NO: 8139 - protein, 430 aa, unidentified; identical to SEQ ID NO: 4504
  REGION 1..430: note = Human gut metagenome

SEQ ID NO: 8140 - protein, 443 aa, Anoxybacillus sp.
MVEENMTCFMQRKGENPMVFVLDTNKRPLAPCHEAVARKLLKQGKAAIYRRFPFTIILKKSVDESEIKATYRLKIDYGSRHTGLAILRGQEVVWLGQLDHRTDIKERLDKRRAFRRARRKRKTRYRKPRFLNRRRKDGWLPPSLESRVQNIQTWVERLRKICPIEHISYENAKFDTQLMRNPEINGVEYQQGTLQGYEVREYLLEKFGRKCCYCGKEGVPLEIEHIIPKSRGGTDRVDNLCLACHDCNQRKGSKTAEEFGYLHIQEMVKKTLKDASVVNATRWKVYEVLKQSGCEVECGTGARTKMNRIRLGLPKIHYFDACCVGESTTNHLYFKTKEALFIKAKGRGSRSRTNLDKYGFPRGFLARQKYFFCFQTGDIVKANVPKGKYQGVWFGEVACRKTGSFDIKGKDGKRIAQGINYRYVQVIQRFDGYTYRREGMNIA

SEQ ID NO: 8141 - protein, 544 aa, Blautia sp.; identical to SEQ ID NO: 4004

SEQ ID NO: 8142 - protein, 472 aa, unidentified
  REGION 1..472: note = Human gut metagenome
MNTCVCVLSNNGERLMPTFRLGKVRRLLKDGKAKIVKHHPFTIQLLYDSKTNKQPIEICEDVGYNYIGISVKSESHEYVSAQYDTLQDEKEHHDDCRKMRRARRNRLRYRKPRFDNRKRSEGWLAPSLKHKKELNVNVVKMYCAVMPITHATVEVGSFDTMLVKAIQEGKAIPEGADYQKGPRYNLATLREAVFYRDNYVCKVCGRKATEGAILHMHHMFYWKGRHGNSLNELLTVCEKCHTPANHQKSGKLYGFGEDVKFADLSGAAFMNTVRWQIVNELYAAFGKPFVTITYGAMTKEKRIALQLEKSHNNDAYAMGEFHPNHRCAFEHYEKVRRNNRILEKFYDSQYIDIRTGEIATGKELFNGRINRNHKKDSENLHKYRGKRTYAGHRALLRKKVNLNPGDLVSLNGEPLVVLGTHTRKNGAVNVEFETPSKSGRKSASLKKLKIVKAADSIHPAWEKVSQIIQRKK

SEQ ID NO: 8143 - protein, 406 aa, unidentified; identical to SEQ ID NO: 3415
  REGION 1..406: note = Human gut metagenome

SEQ ID NO: 8144 - protein, 413 aa, unidentified
  REGION 1..413: note = Human gut metagenome
MTSYSFVLDANGKQLAPTKEPKAWFLIRKKRAALVSKYPMVIQLKKKIQENEICKDEIRCGIDDGGLHVGIALVQKCKSKNKVVFKGTIEQRNDVKHLMEVRRNYRRYHRYHKRYRQARFDNRKSSKREGRIAPSILQKRQATIRVIHWLNKWINITNYWLEDVSVDIRALTDGYQSYRWQYQKSNRLDENIRKAAILRDDGKCMECGKSNCRLEVHHIKPRRRNGSNTLDNLITLCESCHQKTEGQEELYMDRYFSLLKSSDNKNLNYAQHVMIGKMWLRKQLSGLGVLYLTSGGDTANKRIDWNIEKSHANDAVCITDLQPDTCDIKEWAIKPMRRQSKAKTDHVLGIHHRDLVEYTFKNGETHRGYVTALYPDQKAINFQSQTKHCKKVNARKCKLLWNYSKIYWFENAS

SEQ ID NO: 8145 - protein, 527 aa, Streptomyces sp.
MGEGIPACDHLRERESQRTHFCRVREHELSVTTASSGKDHLMHDDEALGIPALLEPPPKPGSGAPRVFVLDRRGRPMMPCHPARARELLGKGRAAVARHTPFTLRIKDRLLEDSEVDGVAVRIDPGSRATGIAVTDDITRTFAAKGEVTVRRGLYAVELQHRGPAIRASVEQRASHRRRRRVANTRYRAPRFDNRRRRPGWLPPSLQHRVDTTWSLVERLSRLVPLAEVHIERVAFDTHAMTAGRGLFGIEYQRGTLAGYELRNYLLDQWGRCCAYCGRSGLPLEVEHIQPRSSGGTNRVSNLTLSCKPCNQAKGARPIEDFLRERPQPLAQLNRQAKAPLRDAAVMNATRWRLAERLQDLGRPVSCWSGGMTQHNRTLCGLGKTHTLDALAVGELGLGWRIARYPSHVLVAAATGRGSYARTRTDKYGFPRLALPRTKNHHGFQTGDLVRASVPTGKKAGTHVGRVAVRASGRFNIRTRRGIVQGIGHQYVSLLQRADGYGYSVRVEKRSTQPPAGAAGVHTGGIR

SEQ ID NO: 8146 - protein, 410 aa, Rhodococcus sp.
MTHCFVLDAQDNKLSPTKENRAWYLIRKEKAILKNKFPMVIQLKKEIPFDEIDSTPVHLGIDDGSKSVGIALVQEGKRKNKPLFKGTIELRTDVKDKMSVRRGYRRYRRSHKKYRPARFNNRSISKKKGRLAPSIRQKKDSILRVVNQLQKFVRINHIFLEDVLIDIRALEKGHKPYKWEYQQSNRIDENIRKAVVLRDHNCCQDCGMTNTRMEVHHIIPRRLNGNDSIHNLITLCSTCHGNVTGYELNHSARFLNKIKGRNISYHDAMHVMQGKSYLQNELIKIATLALTTGGDTANKRIDWGIDKSHANDGIVICHLKVKPDQCELKNWTIKTMRKRSSKKVESANGFFHRDFVKYTKRNGETYLAYITALYPKKNQCNMTTIEGKILKRYGLSRLSLIWRFSNIYWL

SEQ ID NO: 8147 - protein, 286 aa, unidentified
  REGION 1..286: note = Human gut metagenome
VLRLLPVTKITVETASFDMLLLKNPDIAGKEYQEGEQLGFWNVREYVLFRDGHVCQHCYGRSKDPVLNVHHLESRRTGGDSPGNLITLCETCHKALHRGEITLKTKRGQSFRAEAFMGIMRWEVQNRLKASHPELEVNNTYGYRTKHARIVNGIDKSHCADAFCIAGNLGAERLGEFFFQKQTRRNNRQIHKLSILKGGIRKRNQAPFEVKGFRLFDKVACQGEEGFIFGRRSSGYFDVRKLDGTCISAGISYKKLHLLEKRRTYLTEIRKEEALPPLPEGRGLRA

SEQ ID NO: 8148 - protein, 483 aa, unidentified; identical to SEQ ID NO: 6352
  REGION 1..483: note = Synthetic metagenome

SEQ ID NO: 8149 - protein, 431 aa, unidentified; identical to SEQ ID NO: 4483
  REGION 1..431: note = Human gut metagenome

SEQ ID NO: 8150 - protein, 518 aa, unidentified; identical to SEQ ID NO: 2751
  REGION 1..518: note = Human gut metagenome

SEQ ID NO: 8151 - protein, 442 aa, Lactobacillus sp.; identical to SEQ ID NO: 5262

SEQ ID NO: 8152 - protein, 442 aa, Tepidiphilus sp.; identical to SEQ ID NO: 4402

SEQ ID NO: 8153 - protein, 396 aa, unidentified; identical to SEQ ID NO: 4508
  REGION 1..396: note = Human gut metagenome

SEQ ID NO: 8154 - protein, 407 aa, unidentified; identical to SEQ ID NO: 3417
  REGION 1..407: note = Human gut metagenome

SEQ ID NO: 8155 - protein, 408 aa, unidentified
  REGION 1..408: note = gut metagenome
MVYVQDINGKPMMPTTRHGKVRRLLKDKKAVVVNLCPFTIKLMYVTSDYKQEIVLGVDAGTKHVGLSATTKSKELYSSEVILRNDIVDLLSTRRELRRSRRNRLRYRKPRFDNRIKSKRPGWVAPSVRYKVDAHIRVIDNVCSILPISRIVIEVAQFDTQKINNPNISGKEYQEGDQLGFWNVREYVLARDGHKCQYCKGKSKDPVLNVHHLESRKTGGDSPSNLITLCETCHKEYHKGNIDLKIRRGKSLRDAAVMGIMKWRLYEKLKSKYDNISMTFGYVTKYNRIKHGIEKSHVFNAFVISKNFDAIRLGYYYKVRLVRRHNRQIHKQKIPKGGIKRLNQSPFEVFGFRLFDRVMFENSYYFIFARRKTGSFNIRDIDGKNQRDITYKKLKLSRCKRFMVQKEMD

SEQ ID NO: 8156 - protein, 491 aa, Allochromatium sp.
MAVFVLDKQKRPLMPCTEKRARLLLERGRAVVVRLAPFTIRLKDRIGGALQPLRLKLDPGSRVTGLALVRESETCDADTGAVERLEHGLWFGELVHRGQAIREALTRRRHYRRARRSRKTRYRAPRFLNRPRREGWLPPSLQHRLDTTVNWVQRLRRLAPITALSQELVRFDTQALQNPEISGVEYQQGELAGYEVREYLLEKWRRTCAYCGAMHVPLEIEHIVPRARGGSDRVSNLTLACRACNQRKANQSIEDFLQRQPALLHQIQAQARAPLKDATAVNATRWALLNALKTTGLPVETASGGRTKFNRTRLDIPKTHALDAACVGAVDQVRDWNRPVLSIRATGRGAYSRTRTFNNGFPRGYLIRHKRVQGFQTGDWVRAEVLKGKKAGVHVGRVAIRRTGSFNVQTPGGTVEGLSHRYCRVLQRADGYGYTIHTKPVTEDARRAATPNRATRGALFLPASQGRGFSRKTDEHSARCSGPYAPSSIRE

SEQ ID NO: 8157 - protein, 465 aa, unidentified; identical to SEQ ID NO: 3070
  REGION 1..465: note = Human gut metagenome

SEQ ID NO: 8158 - protein, 426 aa, unidentified; identical to SEQ ID NO: 3243
  REGION 1..426: note = Human gut metagenome

SEQ ID NO: 8159 - protein, 462 aa, unidentified; identical to SEQ ID NO: 2823
  REGION 1..462: note = Human gut metagenome

SEQ ID NO: 8160 - protein, 362 aa, unidentified
  REGION 1..362: note = gut metagenome
LKGLSRTCGSLRFKEKTLKVFVINKRGKPLMPCKPAKARHLLRDGKARVVRRTPFTIQLTIATGENVQPIHLGVDAGSKHIGLSATTEKEELFSSEVELRKDITDLLSSRREMRRARRNRKTRYRAPRFDNRVHAKNKGWLAPTLENKISAHLSRIKAIRAILPVSRITIEVAFFDIQKIKNPEIEGEQYQQGEQLGFWNVREYVLFRDGRKCCHCHGKSKDPILNVHHIESRKTGGDAPNNLITLCETCHKAYHAGKIQLTAKRGEKFTDATHMGIMRWELFKRAKEANLGIPVKATFGYITKVRRIQFGIAKTHCADAFCIAGNLNAKRLGEYLYQKQTRKHNRQIHKMAILKGGYRKRI

SEQ ID NO: 8161 - protein, 416 aa, unidentified; identical to SEQ ID NO: 4039
  REGION 1..416: note = Human gut metagenome

SEQ ID NO: 8162 - protein, 420 aa, unidentified
  REGION 1..420: note = gut metagenome
MQYVYVLNKHGEPLMPCSPRKARLLLKQKKACVVKRTPFTIKLLYGSTGYKQPITLGVDAGSKHIGISAATEKYELYCEEATPRNDVVDLLSARRAFRRSRRNRKTRYRAPRFNNRVHSKHKGWLAPSVEVKIQEHITLIKRVCRILPVTFVRVETAEFDTQRLKAMLEGKPLPVGTDYQLGEMYDEYNVRQYVLKRDNYTCQCCGAHPTKTKAVKLHVHHIETRRTGGNAPNNLITLCTACHKALHAGKVTLDGKKRGRSLKDAAFMGVMRKTLMERLLKELKIPVQGTYGYITKYLREKHSIPKSHTNDARCISKNPLAIPCDTCYYTKAIRHHNRQLHKATILKGGIRKANQAPYTVKGYRLWDKVSYNDSECFITGRRTSGYFALKKLDGTVVSNSASYKKMRLLEVATNYITERR

SEQ ID NO: 8163 - protein, 443 aa, unidentified
  REGION 1..443: note = Human gut metagenome
LTKDENRPSGRTTGLRAEQAEPAGIRKGDTLKVFVLNMRGKPLMPCSPAKARHMLKAGKAVVVRRTPFTIKLTIATGETKQDVTLGVDAGARHVGISATTEKEEVFASEVALRQDITGLLADRLAFRRARRNRKTRYRSPRFNNRVRSKHKGWLAPSVENRIQAHMSRIDAVCRLLPVTKIVIETASFDIQKIRNPEVEGTGYQQGDQLGFWNVREYVLFRDGHICQHCRGRSKDPILNVHHLESRKTGGDAPNNLITLCETCHKAYHAGKIKLKVKRGQSFRAEAFMGIMRWTLLDRVRKTHPKLPVENTYGYLTKHKRIALGLPKTHCADAFCIAGNLKALRRGDFLFQQQTRKHNRQIHKCSILKGGVRKLNQAPFLVKGFRLFDKVRIGGQIGFVFGRRVRGIFNIRRLDKTVIGTDINCKKLSLLETRKTFLTELRKE

SEQ ID NO: 8164 - protein, 419 aa, Geobacillus sp.; identical to SEQ ID NO: 2623

SEQ ID NO: 8165 - protein, 413 aa, unidentified; identical to SEQ ID NO: 2636
  REGION 1..413: note = Human gut metagenome

SEQ ID NO: 8166 - protein, 420 aa, unidentified
  REGION 1..420: note = Human gut metagenome
MQYVYVLSKHGKPLMPCSPGKARLLLKQQKACVVKRTPFTIKLLYGSAGYKQPITLGVDAGSKHVGLSASTEKRELYREEFTPRNDVVELLSTRRQNRRSRRNRKTRYRAPRFDNRVHSKHKGWLAPSVEVKIQEHITVIKHICKILPISLVRVETAEFDTQRLKAMLAGKPLPVGTDYQLGEMYDEYNVRQYVLKRDHYTCQCCGAHNTAKKVVKLHVHHLESRKTGGNAPSNLVTLCTTCHKNLHKGKVTLDGKERGKPLRDAAFMGIMRKTLMARLKEELPIPVQGTYGYITKMSREQNDIKKSHVNDARCISKHPLAEPCSVCYRTKAIRHHNRQTHKANFSKKGIRKRSQMPYLVEGLRLWDKVLYKGQECFVSGRRSSGKFALKKLDGTTISEGVTFKKLRLLEPATNYLIERM

SEQ ID NO: 8167 - protein, 407 aa, unidentified
  REGION 1..407: note = Human gut metagenome
LNSHLAKVAKRCPFTIQLLYQSTKETQPVSLGVDAGSRHIGLAATTEQKVVYQEELVPRNDVVKLLSARRALRSSRRSRKTRYRKPRFNNRVHSKHKGWLAPSVEVKIQEHITAIKRICQILPISEIHVETAEFDLQRLKAMEEGRTLPVGTDYQLGEQYDFYNTRQYVLHRDGYTCQCCGAHDNDVKLHVHHIESRQTGGDAPNNLITLCEHCHKSLHAGKAILPKDKKRGKSYRDAAFMGIMRKTLLERLKKEVDVPVTGTYGYITKYWREKAGLEKSHINDAICISKHPYAKPLDTYYLTKAVRHHNRQIYKSNFSKGGIRKRNQAPYLVKGFRLFDKVLYQGKSYFIFGRRATGFFDIRTLNGAKVNKGSISYKKLRIQDTANAYLKEIKAIPHMNKFTCVLA

SEQ ID NO: 8168 - protein, 507 aa, unidentified
  REGION 1..507: note = Human gut metagenome
MSEYIYVLGMDGDPQMPTKRKRHVEKMLQTGRARVFRQVPYTIQLTYKNQPVLQPVTIAEDPGRSNIGMAVVSLSGELLSAAVVQTRNKEIVKLMEKRKQHRRASRNGERKARQRLAKKCHTMIKAGSLMRKLPMYGKDKRVQCNVIRNTEARFCNRKREDGWLTPSAEHLVRTHINLIHKMQKFLPITDVAFEINRFAFLSLEDPSISGVDFQNGPLKGYDDLNTAIEDLQDGHCLMCNSSIEHRHHIVPRSMQGSNTIGNIAGLCCKCHERVHKDARFEDRLKKKKAGLNKRYAAVSALNQAIPFICKRLEQEFGKEHVHYCSGRDTSMVRRSLGYHKTKKEQLHEVDAWCIAVLSLRQIPEKAPEFDHVHELLQFRRQDRSRIKAQTSRAYYHEGKKIAKNRKKAEGQREDSLQEWRKQQVKRYGEEQTRKMISQLEIKKSIRRYNRLDRLMPGAVFYYQGIRYVMRGQHCEGTYLQAVGMGSKDFPAKKCKIVAHNEGLVFVS

SEQ ID NO: 8169 - protein, 393 aa, Moorena sp.; identical to SEQ ID NO: 5287

SEQ ID NO: 8170 - protein, 415 aa, Bacillus sp.; identical to SEQ ID NO: 2431

SEQ ID NO: 8171 - protein, 421 aa, unidentified
  REGION 1..421: note = Human gut metagenome
MMVYVLSHTGQPLMPTEDYRKVRILLKQHKAKVLQRTPFTIKLLHYTHEYKQPISLGVDAGSKVIGLSATTEKKELFASEVILRNDIVKLLSTRREFRRARRNRKKRYRSPRFDNRVHSKNKGWLAPSIENKIDTHLKTVKNVYKILPITNIVVETAAFDTQMLRAKELGLPLPKGVDYQQGEQIYSYNVREYVLFRDNHTCQHCKGKSKDPVLQVHHIESRKIGGDAPNNLITLCKTCHAKYHAGLIKELRVKRGASYRDAAFMGVMRWAFYDRLKQIYPNVSMTFGYITKHTRIKHQLEKKHYIDARCISGHPNALPTENLYLQKAVRKRNRQLHKATINKGGIRKSNQSPKYVYGFQLFDKVFYDNKECFIFGRRATGYFDIRMLDGTKLSAGVSYKKLKLLERRKTILMQQVEDFAT

SEQ ID NO: 8172 - protein, 373 aa, Moorena sp.; identical to SEQ ID NO: 3006

SEQ ID NO: 8173 - protein, 431 aa, unidentified; identical to SEQ ID NO: 3235
  REGION 1..431: note = Human gut metagenome

SEQ ID NO: 8174 - protein, 428 aa, Moorena sp.
MSKVFVLDTNKQPLNPIHPGRARMLLSQGKAAVFRRYPFTVILKQEVSNPKIEPLRIKIDPGAKTTGLALVNDSTGEVVWVAELQHRGFRIRDALTSRRQLRWSRRNRKTRYRKPRFLNRTRSQGWLPPSLGSRVANILTWVKRLSSLCRVTAISQELVRFDTQKMKNSDISGVGYQQGTLAGYEIREFLLEKWGRICAYCGEKDTKLEIEHIQPRSKGGSNRVSNLCLACTPCNQKKGNQDIKDFLKGKPDLLKRILAQAKRPLADTAAVNATRWNLYENLKKTGLTVEVDTGGRTKYNRTIRGLEKTHYWDAACVGVSTPEQLITTGIKPLLIAAKGHGTRQQCRTDKFGFPVRYCSRTKFHKGFQTGDIVKAVVTSGKKIGTYVGRVATRATGSFNISAKDGLVQGISYKYCTHIHKKDGYSYAN

SEQ ID NO: 8175 - protein, 442 aa, Moorena sp.
VVSPTSHYNIVKEHITNSEALTMQNYVFVIDTNFQPLNPIPPKKARRLLDKGKAAVLRMYPFTIILKTSVMNPTISPCQLKIDPGSKVTGFALVQNNQVIWGMELEHRGGLIKKKLESRRAVRRGRRNRHTRYRKPRFLNRKRPEGWLPPSLEHRILTIQTWVKRLIKFCPIKEIWVERVKFDTQKMENPEINGVQYQQGERRGYEVREYLLEKWGRECTYCGKQSVPLQIEHIHPKSLGGSNRVSNLCLACEKCNQRKGNKPIEEFLKKKPNLLQKIKNKAKQPLKDAAAVNVTRNKLVKVLQSIKSVVTGTGAQTKYNRNKFGFPKEHWIDAACVGDIETLVLRTSQPLLVNCKGHGGRQKAALNKYGYPIRHNPLKPIKGWCSGDIAKNLLTGEFGRVNPRSKSNSFNYTIPGEKAISLHVKNLVRVHKKDGYTYGFCQ

SEQ ID NO: 8176 - protein, 536 aa, unidentified
  REGION 1..536: note = Human gut metagenome
VLRPRYQCPTRWYPSREQGSGNGCLSGEENTDLEQEVSGTLSKGDHSHPGEQDFCVPAITIQGGPAMSVFVVGLNGCRLMPTSERKARLLLKHGKASVYRKVPFTIKLNYKTGSTTQSGYLGIDTGSQHIGVSVVREDGTVLHKEEIGLRDSMSKRKLMQSRASSRRGRRHRKTRYRHPKWRPKAKRVYCKTPDRKGRHWKKRKITFASKRPKGWLPPSLQSKTDHHIRWIKKLQDLLPEGYRLSIELGRFDPARLKDPEIHGELYQKGPQYDYENVRAYVLNRDRYTCQVCGKKGGKLHVHHILYRSHGATDDPQYMATVCSDCHNTENHQQGGILYQWMQKQKKFTRGLRDATFMNILRKRLIEAFPGATFTYGNITKADRERLILPKSHGNDATAIAIVKTGIMTVKDKEPVIYIQQVRRKKRSLHEETPRKGRKEPNRKASRYDKNTKAVTVTKRKNKKKISITGCLFDRVELNGKKGWISGFTDKSCYVKDENDQYIRTSPKYKQVSLSKLKILHHCGNWAIGARRSLGKG

SEQ ID NO: 8177 - protein, 456 aa, unidentified; identical to SEQ ID NO: 7921
  REGION 1..456: note = Human gut metagenome

SEQ ID NO: 8178 - protein, 421 aa, unidentified
  REGION 1..421: note = Human oral metagenome
MRIFVKNMRGKPLMPCTPRKARLLLKQKRAKIVSYKPFTIQLQYATGEAVQEIVVGVDEGARHIGIALVSQGKILAKGEIELRQDVHSLLLSRAQYRRGRRFRKTRYRKARFLNRKRSDSWLPPSIQAKLDANFAWIDKFCSLVPSPKLRIEVGKFDVAKMINPDIQGVDYQHGQTYGYYDVRYFVFARDEYTCQVCKKKNKILHTHHIIYRSKGGTDRADNLITVCSDCHTSENHKQGGILYQWMCEHKKTRQYKEPSFMNILRRRTFQKYPDAEITYGSETSPRRKELGLNKTHYNDAIAITGVEAIKDKEQECFRIKQFRKKKRSLHEATARKGRKVKNVNAKRNKKNTKQLRGWYLNDEVICFGRCGWISGFTGTSSAYVIDCNGEYIQNPSKSYKRVNLSDLKLICHNNNWQYGVA

SEQ ID NO: 8179 - protein, 518 aa, unidentified; identical to SEQ ID NO: 3878
  REGION 1..518: note = Human gut metagenome

SEQ ID NO: 8180 - protein, 424 aa, Moorena sp.
MRVFVLDKNKKPLDPCKPARARILLKQGRAKVFRRYPFTIIMRDLEELECVTHNHQIKLDPGSQTTGLAIVQEKVVVWGAELTHRGLQIRDGLTSRRQLRRSRRNRKTRYRQPRFLNRKRPDGWLAPSLMSRVYNIITWVKKLTRFCPITGISQELVRFDTQKMENPEISGTEYQQGTLYGYEVREYLLSKWNRKCAYCGVTDTPLEVEHIKPKSKGGSDRVSNLAIACRKCNQTKGNQEIEQFLSGKPDVIKRILSQAKRPLVDGAAVNSTRWKLYNELKALGLPIETGSGGLTKYNRCRQNLPKTHWLDAANVGKVDTLYIEVYQPLLISAKGHGTRQMCRTNKFGFPTRYVPRLKFVKGFQTGDIAKAVVTKGKKVGTYTGRIATRKTGSFNISTKHGLVQGISHQYCSIVHRKDGYAYSF

SEQ ID NO: 8181 - protein, 432 aa, unidentified
  REGION 1..432: note = Human gut metagenome
MVITLDKNKRPLGFMSERRCRILLEKKRAVLYRYFPTIVILKDVDARKLSGLSSYRIKIDPGAKYTGIAIVMDDTNEFMYAMQIEHRGEQIKKNLDTRRSARRNRRSRETGYRRPKWGNRCTAKEQRQSYDSRRDENWLPPSVKSTADNIISWIRRLCRWINITNCSIESVRFDTQLMENPEIEGVEYQRGTLYGYEVKEYLLEKYGHTCQYCGGKSNDPILEWEHMLPRSRGGSDRLKNASLACHNCNQDKGNHTLEEWKTILQDRIPKERGKQKELDQIRQKFVQQVMERKAPVKGLRYAAWVNSSRRYSQRHLYLRFPELECSSGGRTKYNRNLLKYPKEHHYDALCVGEIPEDGFVDRTHGYYLYAKATGRGTRLRGQINQCGVIIRKWMDRSKTAFGFQTGDLVVADVPKDTKYKYKAINEQVRDFA

SEQ ID NO: 8182 - protein, 470 aa, unidentified; identical to SEQ ID NO: 2949
  REGION 1..470: note = Human gut metagenome

SEQ ID NO: 8183 - protein, 455 aa, unidentified
  REGION 1..455: note = Human gut metagenome
MVFVLDRHHKPLMPCHPARARRLLGKGRARIHKLYPFTIRLVDRELKDSTVQPVVLKLDPGSKETGMALVREDETKTHHALYFVNLKHRGSEIKPSLLQRSSFRRSRRSRNLHYRAPRFLNRTRPQGWLAPSLQHRVDTTLSWVERLGKLAPVATLEMELVKIDTQKMQNPEIDGVAYQQGEVAGFEVREYLLEKFGRKCIYCGAEGVPLNIDHIVPKSAGGSNRVSNLVLACVDCNQKKNNLPFEVFLKGDKAKINRIRSQLKTPLKDAASVNTTRWQLFEALKLTGLSLTTATGARTKYNRHQFGVPKEHWLDALCVGETAAVRGWHPLGVLVVKCTGRGAYKRTRLTKDGFPRGYLTRTKRFFGFGTGDMVVATVFAGKKKGSYKGRVAVRKSGSFAIQTASRKVDGISYRYCRLLSRADGYGYSWHSSKSLINSTKETALLPRINTQVSAP

SEQ ID NO: 8184 - protein, 442 aa, unidentified
  REGION 1..442: note = Human gut metagenome
MSTSVFVLDKRHRPLMPCRPARARRLLRAGRARVVKRFPFVIRLVDRTVEQSEVQPVLIKLDPGSRETGAAVVRDDEKKRHHALAFFVIKHRGGAIRDALKARSAFRRRRRSQNFRCRSPRFLNRVKPKGWLPPSLRHRVETTLSFVRRMCRYLPVSGIATELVKFDSQKLQNPEVSGVKYQQGTLFEYEVREYLLEKFGRKCVYCGAEGVPLNIDHVVPRAKGGSNRVSNLVLACVSCNQKKGARSLEDFLKGKPEVLARVRRELKTPLRDAAAVNATRWGLFNELKATGLPVETGSGALTKLNRHAFGVEKEHWLDALCVGRLNGVVTRKGLNVLEIRCMGRGSRQRTRLTKYGFPRGYLMRQKCVHGFATGDMVEANVPKGKKAGLWRGRVAVRVSGSFNIQTPKGVIQGVGWKHCRLISHNDGYGYAWLGHAPHSSPA

SEQ ID NO: 8185 - protein, 424 aa, Moorena sp.; identical to SEQ ID NO: 4427

SEQ ID NO: 8186 - protein, 453 aa, Halomonas sp.
MSVFVVGKHKQRLMPCTEKRARLLLDRGRAVVHKRYPFTIRLKDRTDGELQSLRLSIDPGSRETGLAITREVGNKRHVLSLFELVHRGFQIREALEQRRAFRRRRRGQLRHRQPRFNNRTKCKGWLAPSLQHRVDTTLAWVDRLCQLAPITSLSQELVRFDTQKLENPEISGIEYQRGTLLGYEIREYLLEKWGRECAYCGDKDTPLEIEHVIAKSNGGSNRVTNLTLACHPCNQAKGNDTLEAFFTRDKGLKKRLRQNKLSAETRYQRVIREQKRSLRDAAAVNATRWALHRDLNVTGLPVEVGTGGQTKFNRMTLGIPKTHALDAACVGSLKAQHDWNVPTLVIKAMGRGSYQRTRLNKYGFPRGYLMREKRAYGFQTGDMVSALVPTGEKTGRHQGRVAIRKTGNFNIQTTNGAIQGISHRHCTLVQRGDGYRYHQTATIQPKGEGKQVA

SEQ ID NO: 8187 - protein, 420 aa, unidentified
  REGION 1..420: note = Human gut metagenome
MQYAYVLNKRGEPLMPCSPGKARILLKQQKACVVKRTPFTIKLLHGSAGYKQPITLGVDAGSKHVGLSASTEKRELYSEEFTPRNDVVELLSTRRQNRRSRRNRKTRYRAPRFNNRVHSKHKGWLAPSVEVKIQEHITVIKRICRILPVTLVRVETAEFDTQRLKAMLAGKPLPVGTDYQLGEMYDEYNVRQYVLKRDNYTCQCCGAHTTAKKAVKLHVHHLESRKVGGNAPSNLITLCTTCHNNLHKGKITLDGKKCGKTLRDAAFMGIMRNTLLTRLRNELHIPVQNTYGYITKLLREQNDIKKSHVNDARCISKHPLAEPCSICYRTKAIRHHNRQIHKAKILKYGIRKANQAPYIVKGFRLWDKVLYNGQECFISGRRTSGYFALRKLDGTTITNSISFKKLRLLEPATNYLIERK

SEQ ID NO: 8188 - protein, 427 aa, Enterococcus sp.; identical to SEQ ID NO: 2410

SEQ ID NO: 8189 - protein, 415 aa, unidentified
  REGION 1..415: note = Human gut metagenome
VLGQDGHPLMPTCRHGKVRRMLKSGMAKVVQRCPFTIQLQYESTTHTQKINLGIDAGSKTIGVSATTDSKVLYESEVVLRNDIVELLSGRRALRRSRRNRKTRYRKPRFDNRRRPDGWLTPSIRQKIKTHVTVVENVMKILPVTKIIVETASFDIQKIKNPEIEGAEYQYGEQLDFWNVREYVLFRDGHTCQCCKGKSKDNILNVHHIESRKTGGNAPNNLITLCETCHKAYHKGVITLPKEIHRGMRFRDAAFMGIMRWAFYDRLKELYNLLGVEVINTYGYITKNTRIEHGLPKEHYVDARCISGNPAAKPLGHYYFQKKVRCHNRQIHKNTILKGGIRKRNQAAYLVKGYRLFDKVKYQNQEYFIFGRRSSGFFDIRTLDGTKVNKGSISCKKLQLVEKSKHYLTEQRKVTA

SEQ ID NO: 8190 - protein, 470 aa, unidentified
  REGION 1..470: note = Human gut metagenome
MSVFVVGLNGCRLMPVSERKARLLLDDGKASVYRKVPFTIKLNYKTGSTTQPGYLGIDTGSQHIGVSVVRKDGTVLHKEEISLRDSMTKRKLLEAKASLRRGRRYRKTRYRHPKWRSKTKRVYCEVPDKKRRHWKKQKSTFTSGRPEGWLPPSLQSKTDHHIRWIKKLQNLLPEGYRLSIELGRFDPARMKDPEIHGELYQKGPQYDYENVRAYVLDRDRYTCQVCRRKGGKLHVHHILYRSQGASDTPQYMATVCSSCHTTENHLPGGILYQWMQEQKKFTRGLRDATFMNILRKRLMKTFPDAVFTYGNITKVDREKLKLPKSHGNDATAIALVRTGVTSVKDEEPVLYIQQVRRKKRSLHEETPRKGRKEPNRTAARNSKNTKAVTVTKRRDGKKVSVTACLFDRVELNGKKGWITGFTGKACRIVDTEGNYVAATDKYTQVNISSIRILHHTGNWVTGLKRNVGKR

SEQ ID NO: 8191 - protein, 438 aa, Calothrix sp.; identical to SEQ ID NO: 7577

SEQ ID NO: 8192 - protein, 414 aa, unidentified; identical to SEQ ID NO: 2588
  REGION 1..414: note = Human gut metagenome

SEQ ID NO: 8193 - protein, 420 aa, unidentified
  REGION 1..420: note = Ga0307928_10020951
MTQKVFVIDADGKQLLPTHPARARKLVQAGRAQVHQVVPFTIQLARVVENPVGTFTVGIDDGAKHVGIAMVNEHTKEVVFRGTVRLRQDVTRKMTQRAAYRRTRRNRKLRHRPARFLNRGRKGFLSPTIRQKKDSILRVIRDLGKVLHITKAVVEEGQFDISSMAAGRKLVGAEFQQSEYEGRNFRAKVLWRDRYKCTRCSSTEWLQAHHIKPKSVGGGNSPSNGLTLCRTCHKELHDGLWVLTARPKRFLYPAHLQAGKKYLREGLRSCGLAVNTCCGWMTKLWRDTLKLPKAHDLDAVAMVCRAYRPTITERMFTIIPRRTKVWEDNPTKKCHERMGFRHWDLVRARHRSRGVVVGSVRSLKERGLTLRTHGDSNFPVSYSKTQLLWRPKGLVYIGVLGLFCPSALQEEVRCVLLWSS

SEQ ID NO: 8194 - protein, 458 aa, Anoxybacillus sp.
MVEENMTCFMQRKGENPMVFVLDTNKRPLAPCHGAVARKLLKQGKAAIYRRFPFTIILKKSVDESEIKATYRLKIDYGSRHTGLAILRGQEVVWLGQLDHRTDIKERIDKRRAFRRARRNRKTRYRKPRFLNRKRKEGWLPSSLESRVQNIQTWVNRLKKLCPIGYISYENTKFDTQLMRNPEINGVEYQQGTLQGYEVREYLLEKFGRKCCYCGKENVPLEVEHIIPKSRGGTDRVDNLCLACHDCNQRKGSKTAEEFGYPHIQKQVKESLKDASAINSTRWKAYEVLKQTGLDVECGTGARTKMNRIRLDLPKTHYFDACCVGESTTNHLYFKTKEVLFIKAKGRGSRSRTNLDRYGFPRGYLARQKFFFGFQTGDMVKAVVPRGKYQGVWFGEVACRKTGSFDIKGKDGKRIAQGINYRYVQVIQRFDGYAYGKGGRNLRKVQFLPVPKGRGFLA

SEQ ID NO: 8195 - protein, 410 aa, Bacillus sp.
MAVYCFVLDQNGKPLSPTKENKGWYLIRKGRAILVKKYPMVIQLKKEVTDKEQGKSEFVCGIDDGSKYAGIAIVQKGKSKNIAVFKGIIEQRHDVKKLMDVRRAYRRYRRSHKRYRQARFQNRSSSKRKERIAPSIKQKRDAILRVVQQLMKWIPIHQFRLEDVLLDVRKLTEGRTLYKWQYQKSNRLDENLRKATLLRDQFQCKKCGAKECRLEAHHITPKRFGGANTISNLITLCSDCHSFIGNHEMNYADEFYSIIKGKNIRFDYVQHVMQGKTYLRNELSKRASLELTTGCDTANKRIDYEVEKTHSNDALMIANLNGNNVDIKEYKIRPMRRKRQGKTKEVKGFNHRDIVKYTKRNGEFYIGWITALYPDKNQCNITTFNGEKLKRYGMNRLKLLWKCNKIQWFV

SEQ ID NO: 8196 - protein, 465 aa, unidentified
  REGION 1..465: note = Human gut metagenome
MSTCVCVLSNSGERLMPTFRLGKVRHLLKDGKAKIVKHHPFTIQLLYDSKTNTQPIEICEDVGYNYIGISVKSESHEYVSAQYDTLQDEKKHHDDCRKYRRTRRNRLRYRKPRFDNRKRSEGWLAPSLEHKKQLNIRLIERYVSVIPITRATVEVGSFDTMLLQAIQKGESKPEGTDYQKGPRYNLATLREAVFYRDNYTCQVCGRKVADGAILHMHHMFYWKGRHGDSLNELLTVCEKCHTPANHQKGGKLYGFGENVKFADLSGAAFMNTVRWQIVNELYAAFGKDFVTVTYGAMTKEKRIALHLEKSHNNDAYAMGSFHPVNRCAFEHYEKVKRNNRILEKFYDSQYIDTRTGELTNGKSLFNGRISRSHKKDSENLHKYRGKRICKGHRALRRKKLALNPGDLVSLNGEILVVHGTHTKKNGSVNVEFKTPSRGGKKSASLKKLKIVKTSNLMHSAWTKVS

SEQ ID NO: 8197 - protein, 518 aa, Moorena sp.; identical to SEQ ID NO: 7410

SEQ ID NO: 8198 - protein, 430 aa, unidentified
  REGION 1..430: note = Human gut metagenome
MPKVYVLNRHGRPLMPCTPAKARHLLDAGKAKVRHRTPFTIQLLYGSTGYTQEVILGVDAGSKTIGLSAATETEELFSAEVKPRNDVVELMSARRQFRRARRNRTTRYRKPRFDNRVRSKHKGWLAPSVEVKIQEHMTAIRRACAILPVSKVVVETAEFDLQLLKAVAEGKPVPQGEDYQKGEMYGHYNVRQYVLWRDSYTCCICGVHGSVRKGVPLHVHHLESRRVGGDAPDNLVTLCTACHDKLHKGIIMAADIKKRKRRSTRDATFMGIMRMTLLRRLREQLPVPVVETRGYITKATRENLLVLPKSHTNDALAIAHGPQGFRAEHLPNIRQADRLYTIRPVRHHNRQLHKATILKGGVRKANQAEKYICGFRLYDKVLYNGIECFVWGRRTSGSFLLRQLNGEKVKDGVSYKHLKLLERSQSYLVA

SEQ ID NO: 8199 - protein, 417 aa, unidentified
  REGION 1..417: note = Fermentation metagenome
MIVYVLNKYGKPLMPCKPSKARKLLKQGKAKVVKKSPFTIQLLYGSSGYKQPITLGVDAGSKFIGLSATTDKQELFSAEVDLRNDIVRLLSDRRQYRKSRRSRTTRYRKPRYNNRVKSKNKGWLAPSVENKIQAHFNIIDKTHQILPISKIIVEVASFDIQKIKNPDIQGKEYQQGEQLNFWNTREYVLWRDGHKCQGKKGCKGNILNVHHIESRKTGGNSPDNLITLCENCHKDYHNGKLKLNLKRGQSFKDATFMGIMRWTFYNRLKEIYPNVNMTYGYITKNTRINNKLGKAHRIDARCISGNPTVKPLNYWYRIKQVRKHNRQIHKAKILKGGLRKLNQAPYEVKGFRLFDKVKYNGKECFIFGRRSSGYFDLRRLDGEVIHRSANYKNLELVDRRKSMLWEREVSVAVSSHD

SEQ ID NO: 8200 - protein, 427 aa, Microcoleus sp.
MCKVLLIDTEKRPLSPIYPAQARQLLRNKKAAVFRRFPFTLILKESRPDSPISPLRLKIDPGAKFTGIALVNDSTGEVVFAAELKHRGLAIRDSLTSRRQLRRSRRNRKTRYRPPRFLNRTRPLGWLAPSLQSRIGNIKAWVEKLRKFAPIAAISQELVRFDLQLMRNPDLQGKEYQQGTLAGYETREYLLEKWNRQCAYCGVKDVPLQIEHIYPRAKGGSNSITNLTLSCEKCNKKKGTKALKEFLKKDQSRLEKILKQAKRPLADAAAVNATRFALLYVLKETGLPVEIGSGGLTKFNRSQQNLEKSHWLDAACVGISTPILNIKGVKPLLICANGHGTRQSCRTDKFGFPIRHCSRTKFHFGFQTGDLVKAVVTRGKKVGEYVGRIVTRASGSFNISAKDGLVQGISHRYCSIIHKKDGYSYAS

SEQ ID NO: 8201 - protein, 381 aa, Moorena sp.; identical to SEQ ID NO: 6015

SEQ ID NO: 8202 - protein, 415 aa, unidentified
  REGION 1..415: note = Human gut metagenome
MIYVRSKDGKALMPSERGGRIGYLLRHGKAHVVSRVPFVVQLDYESTTYTQEVSLGIDAGSKHIGVSASSEKKELLAAQVELRIDVVNLLSTRRELRRTRRNRKTRYRKSRFDNRKRKDGWLAPSVEQKIESHLKVIRLVHKLLPITKTTIEVAQFDAQKIKNPDINGEEYQQGEQMGFWNVREYVLARDGNKCVHCKGKSKDPILNVHHLESRKTGGNSPSNLVTLCETCHKAYHRGEFELKIKRRNSLRDAAVMNIMRWAVYERAKEEFENVHLTYGYVTKHTRIENGIAKTHAADAFCIAKNINAMRLSTFFMCRCVPSHTRRLHVANPKKGGIRRSTIASHKIGKSRFQRFDMVRWKGKECFIFGSTHGNVVLRKINGVKVHETQAVSAKTIKFLKRIRNNILVEVRASEN

SEQ ID NO: 8203 - protein, 413 aa, unidentified
  REGION 1..413: note = Human gut metagenome
MTSYSFVLDANGKQLAPTKEPKAWFLIRKKRAALVSKYPMVIQLKKKIQENEICKDEIRCGIDDGGLHVGIALVQKCKSKNKVVFKGTIEQRNDVKHLMEVRRNYRRYHRYHKRYRQAGFDNRKSSKRKGRIAPSILQKRQATIRVINRLNKWINITNYWLEDVSIDIRVLTDGYKSYSWQYQKSNRLDENIRKATILRDGGKCMECGKSNCRLEVHHIKPRRRNGSNTLDNLITLCESCHQKTEGQEELYMDRYFSLLKSSDNKNLNYAQHVMIGKMWLRKQLSGLGVLYLTSGGDTANKRIDWNIEKSHTNDAVCITDLQPDTCDIKEWAIKPMRRQSKAKTDHVLGIHHRDLVEYTFKNGETHRGYVTALYPDQKAINFQSQTKHCKKVNARKCKLLWNYSKIYWFENAS

SEQ ID NO: 8204 - protein, 424 aa, Moorena sp.; identical to SEQ ID NO: 8180

SEQ ID NO: 8205 - protein, 512 aa, unidentified
  REGION 1..512: note = Human gut metagenome
MSTVYVLNKDGKPLMPTTRCGHVRRLLKEQKAQVVTSKPFTIQLLYETDDVVQPLYLGIDPGRTNIGVAVVKTDGTAVFTAHLETRNKEIPKLMQGRKKARRARRTNGRRCRRQRRAKANGTISKKCVKQATAQNGSVSKRAKKIGVIKRHLPGCEKEVLCIGIKNKEAKFSNRTRPEGWLTPTANQLLQTHINLVKKIQRFLPISDVVLEINKFAFMRLDNPNVQKWQYQQGPLYQKASLEEAVSEMQEHHCLFCKKPIAHYHHVVPQSENGSDTIGNIVGLCTKHHDLVHKDTAWQKKLAKKKTGLNKKYGALSVLNQIIPALTKELSFLFPKHFFATNGKSTYDYRAAHGVGKDHWLDAYCIAGSVLPNDVCDNNINNHVPYELKQFRRHDRRALHKENMGRVYTLNGKSVATNRHKAIKQTTDSLEEFRQRQPNDVCKLKVKEHHPEYRNPKRSFPGCVFLVGKQTHVMQGTSGSHNGKADGYYDTNGNSYSSGKCKFVAKNEGIVFA

SEQ ID NO: 8206 - protein, 470 aa, unidentified; identical to SEQ ID NO: 2825
  REGION 1..470: note = Human gut metagenome

SEQ ID NO: 8207 - protein, 533 aa, unidentified
  REGION 1..533: note = Human gut metagenome
MSTVYVLNKDGKPLMPTTRGGHVRHLLKEQKARVVQSNPFTIQLLYETNDAVQPLYLGIDPGRTNIGVAVVKADGTAVFTAHLKSRNKEIPKLMQDRKRARRARRTNGRRHRRQRRAKANGTISKKCVKQTTTQNGSVSKRAKEIGIIKRHLPGCEKDVLCIGIKNKETKYTNRERPEGWLTPTANQLLQTHVNLVKKVQKLLPISDVVLEVNKFAFMRLDNPDIQKWQYQQGPLYKKESLESAVSEMQEHHCLFCKKPIDHYHHVVPKSENGSNTIANIVGLCAEHHNLVHKDVAWQEKLAEEKTGLNKKYGALSVLNQIIPALTNKLSVLFPKHFFVTAGKSTHDYRAAHGVSKDHWLDAYCIACSVLPSNVCDSNINNHVPYELKQFRRHDRRVLHKANMSRVYTLNGKAVATNRHKAIKQTTDSLEEFRQNYPDDVYKLKVKEHHPAYRNLNRNYPGSVFLVGKQAHVMQGIASSKDGKTTKYNDTNATTITAGKCKFVAKNSGILFVQCKFRKALSDGTTKKLQYPVR

SEQ ID NO: 8208 - protein, 470 aa, Anaerostipes sp.; identical to SEQ ID NO: 2825

SEQ ID NO: 8209 - protein, 414 aa, unidentified
  REGION 1..414: note = Human gut metagenome
MPCSPAKARLLLKEKKAIVKRRTPFTIQLTIATGESKQPVSLGVDAGYKHVGFSASTEKAELYASEVELRQDVSDLLSARRALRQSRRNRKTRYRAPRFDNRIRTKRKGWLAPSVENRINAHLSRIEAVLRLLPVTKITVETASFDMQLLKNPDISGKEYQEGEQLGFWNVREYVLFRDGHVCQHCHGRSKDPVLNVHHLESRRTGGDSPGNLITLCETCHKALHRSEITLKTKRGQSFRAEAYMGLMRWEVLNRLKTSHPGLEVHNTYGYRTKYTRIVNGIDKSHCADAFCIAGNLGAERLGEFFFQKQTRRNNRQIHKLSILKGGIRKRNQAPFEVNGFRLFDKVACKGEEGFIFGRRSSGYFDVRKLDGTCISAGISYKKLHLLEKRRTYLTEIRKEEALPPLPEGSGLRA

SEQ ID NO: 8210 - protein, 410 aa, unidentified
  REGION 1..410: note = gut metagenome
MLVYVLNKDGKPLMPCKPRKARKLLEEKKAKVVKREPFTIQLLYGSSGYKQEITLGVDAGSKNIGLSATTEKSELYSSEIQLRTDIVDLLSTRRQNRRTRRNRLRYRKPRFLNRVRSKNKGWLAPSIEHKIATHLRCIENAHKILPISKIIVEVASFDIQKIKNPDIQGIEYQQGEQLDFWNVREYVLFRDSHTCQCCKGKKKDKILNVHHIESRKTGGDAPNNLITLCETCHNGYHNGTVKLPKTIKRGMSFKDATFMGIMRWSFYNRLKLQYSNVSLTYGYITKNTRIQSGLEKSHRVDARCISGNPLAKSLECWYFVKQVRKNNRQIHKANILKGGKKKLNQAPYEVKEFRLFDKVEYVGKEGFIFGRRSTGYFDIRTLDGISIHKSASYRKLKLIGLRRSLLLERR

SEQ ID NO: 8211 - protein, 456 aa, unidentified
  REGION 1..456: note = Human gut metagenome
MSTCVCVLSNNGERLMPTFRLGKVRRLLKDGKAKIVKHHPFTIQLLYDSKTNKQPIEICEDVGYNYIGISVKSESHEYVSAQYDTLQDEKEHHDDCRKMRRARRNRLRYRKPRFDNRKRSEGWLAPSLEHKKQLNISLIERYVSVIPITHVTVEVGSFDTMLLQAIQKGEAKPEGADYQKGPRYNLATLREAVFYRDNYTCQVCKRKIADGAILHMHHMFYWKGRHGYQLDELVTVCEKCHTPANHQKGGKLYGFGKDKKFANLSGAAFMNAVRWQIVNALYATYGKEFVTITYGAMTKEKRIALQLEKTHNNDAYAMGDYHPARRCKFRHYQKRRRNNRVLEKFYDATYVDTRTGNKAKGKELFNGRISRNHKKDCENLHKYRSKKVSKGRRSIRRQHYAIQPYDTVRLEGKTYITSGCHNKGTRLLIPVNGKSKSVAISKVQVVCHAGAWIQII

SEQ ID NO: 8212 - protein, 413 aa, unidentified; identical to SEQ ID NO: 8063
  REGION 1..413: note = Human gut metagenome

SEQ ID NO: 8213 - protein, 431 aa, unidentified
  REGION 1..431: note = Human gut metagenome
MPNKVYVINKHGRPLMPCSPAKARHLLDAGKAKVKKRTPFTIQLVYGSSGYTQEVILGVDAGSKTIGVSALTKKEELFAANVIPRNDVVDLLSTRREFRRARRNCKTRYRKPRFDNRVRSKHKGWLAPSVEVKIQGHITAIRRVCGILPVSKVVVETAEFDLQLLKAIADGKSVPQGEDYQKGEMYGHYNVRQYVLWRDNYTCQCCGAHATKKKEVRLHVHHLESRKVGGDAPSNLITLCDSCHEKFHKGIITAANLKKRKRRSMRDATFMGIMRKTLMQRLCSELPIHVVETRGYITKATREKLLVLPKSHINDALAIAQGKHGFNVGYLPEIAQIDKIYTIRPVRHHNRQLHKVTILKGGIRKSNQTGKYVFGYRLFDKVQFNGQDCFIWGRRTTGIFTIKTINGKMIKDGISFKKLKLVEKSTSYLIA

SEQ ID NO: 8214 - protein, 456 aa, unidentified
  REGION 1..456: note = Human gut metagenome
MNTCVCVLSNNGERLMPTFRLGKVRRLLKDGKAKIVKHHPFTIQLLYDSKTNKQPIEICEDVGYNYIGISVKSESHEYVSAQYDTLQDEKEHHDDCRKMRRARRNRLRYRKPRFDNRKRSEGWLAPSLEHKKQLNISLVERYVSVIPITHATVEVGSFDTMLLQAIQKGETKPEGADYQEGPRYNLATLREAVFYRDNYTCQVCGRKITDGAILHMHHMFYWKGRHGYKLDELVTACEKCHTPANHQKGGKLFGFGDDKEFADLSGAAFMNAVRWQIVNALHTTYSKEFVTITYGAMTKEKRIALQLEKSHNNDAYAMGDFHPVHRCGFRHYQKRRRNNRVLEKFYDATYIDTRTGNKAKGKELFNGRISRNHKKDSENLHKYRSKKVSKGRRSIRRRRYAIQPYDTVRLEGKTYITSGCHNKGTRLLIPVNGKSKSVAISKVQVVCHAGPWIQII

SEQ ID NO: 8215 - protein, 466 aa, unidentified
  REGION 1..466: note = Human gut metagenome
MSTCACVLSKNGERLMPTIRLGKVRHLLKDGKAKIIKHHPFTIQMLYDSKTDTQPIEICEDVGYNYIGISVKSESHEYVSAQYDTLQDEKDCHDDCRKMRRSRRNRLRYRQTRFDNRKRGEGWLAPSLEHKKELNVNVIKMYCEVAPITHATVEVGSFDTMLVKAIEEGKAAPEGVDYQKGPRYNLATLREAVFYRDNYTCQVCGREAQKDSAILHVHHMFYWKGRHGNSLSELLTVCEKCHTPANHQQGGKLYRFGENIKFANLSGAAFMNTVRWQIVNELYTAFGKLFVTFTYGAMTKEKRIAFHLEKCHNNDAYAMGNFHPVDRCAFEHYKKVKRNNRILEKFHDSQYIDIRTGKVANGRSLFNGRINRSHKKNSENLHKYRGKRTRKGYRALRRKKVALNPGDLVSLNGEILVVHSTHAGKNGYVGVEFKAPSKSGKKSASLKKLKIVKTSNSMRSAWTKVS

SEQ ID NO: 8216 - protein, 442 aa, unidentified; identical to SEQ ID NO: 4418
  REGION 1..442: note = Human gut metagenome

SEQ ID NO: 8217 - protein, 418 aa, Moorena sp.; identical to SEQ ID NO: 6948

SEQ ID NO: 8218 - protein, 419 aa, Moorena sp.
MQNYVFVIDANKQPLNPIHPRKARRLLDKGKAAVFRMYPFTIIIKTAIPNPTISPCQIKIDPGSKTTGFAIVQNDQVIWGMELEHRGGLIKKKLESRRAVRRGRRNRNTRYRKPRFLNRRRPQGWLPPSLEHRILTTQTWVKRLIKFCPVNEIWVERVKFDTQKMQNPEISGVEYQQGELAGYEVREYLLEKWGRECTYCGKPNTPLQIEHIHPRSKGGSNRVSNLCLACEKCNIRKGDKSIEDFLKKKPDLLKKIKSLAKQPLKDAAIVNATRNKLVKVLRTLKPVVTGTGAQTKYNRTKLRLPKQHWIDAACVGGIETLVLRTSQPLLVTCIGQGGRQKAALNKYGYPTRHNPLKPIKGWTTGDLAKHQKLGIGKVTPRSKGSFGFTPLGTKGYKSCKPQDISAIHRKDGYIYSFCQ

SEQ ID NO: 8219 - protein, 435 aa, Leptolyngbya sp.
MSNFVFVLDTKRQPLAPCHPARARELLAKGKAAIYRRYPFTIVLNRAVGDVPPSYQLKIDPGSQTTGLALVNRSQLVWGAELQHRGARIKAKLATRRVCRRNRRNRKTRYRKPRFLNRTRPKGWLTPSLNHRVETTMTWVNRLRKLCPIVCVSQELVRFDTQKLQNPEVSGIEYQQGELLGYEVREYVLQKWGRKCVYCGVENVPLEVEHIQPQSKGGSDRVSNLTLACRPCNQSKGNRDVREFLLEKPSVLERILRQAKTPLKDAAAVNATRWQLYQRLKETGLPVEVGTGGLTKFNRTRLGLPKAHWLDAACVGETPSLHLATETPIAILSKGHSTRFRTLIDRYGFPRAVRQTKAQVNGLQAGDIVRAIVPNGKYRGQWTGAIAGVRKKRPPALRPFGKKQIDLTAQTQIQIVHKQDGYEYDINSCGHSSRR

SEQ ID NO: 8220 - protein, 481 aa, unidentified
  REGION 1..481: note = Human gut metagenome
MWTTVLRDEKPYGRSSALPVRECVSITKGRRHRMVAVLSKAGIRLMPTSSYRARKLLARKKAVICGYRPFTIRLTERETGDVQPVELAVDTGYFHVGNSLKTAKHELAAVEIRTLMDEKQRYDDRRRYRRMRRSRLRYRAPRFDNRRRPEGWLAPSIQGRMEQNLAFLRRVLSVVPVTRIVMEMGQFDTQVLKAVEEGRPIPEGTDYQQGERYRIATLREAVFTRDNYTCQCCEKTVHDGVILHVHHIVYRSQGGTNRMGNLITVCEKCHTPKNHKPGGKLYKWKPTVKSFKGATFMTAVRWIMYRSVKDSFPDVDVRITYGAKTKLQRRTLDITKSHVNDAYVMGDFHPKHRVRPVILQKKRRNNRILEKFYDAKYIDTRDGSKKTGQQLFNGRTNRNHNTDTENLRLYRGKKLSKGRRAIRTTRYRIQPHDILVYQGQEMEASGCHNKGTRVMTTAKKSLPIGKVRVRRYSGGYYAVAE

SEQ ID NO: 8221 - protein, 420 aa, unidentified
  REGION 1..420: note = Human gut metagenome
MQYVYVLNKHGEPLMPCSPRKARLLLKQKKACVVKRTSFTIKLLYGSTGYKQPITLGVDAGSKHIGISATTEKHELYREEATPRNDVVDLLSARRAFRRSRRNRKTRYRAPRFNNRVHSKHEGWLAPSVEVKIREHITLIKRVCRILPVTLVRVETAEFDTQRLKAMLEGKPLPVGTDYQLGEMYDEYNVRQYVLKRDNYTCQCCGAHSTKTKDVKLHVHHIETRRTGGNAPNNLITLCTDCHKALHAGKVTLDGKKRGKPLKDAAFMGVMRKTLMERLHKKLKIPVQGTYGYITKYLREKNGIPKSHTNDARCISKNPLAIPCDTCYYTKAVRHHNRQLHKATILKGGIRKANQAPYIVKGYRLWDKVSCNGTECFITGRRTSGYFALKKLDGTVISNSISYKKLRLLEVATNYITERR

SEQ ID NO: 8222 - protein, 413 aa, unidentified; identical to SEQ ID NO: 5215
  REGION 1..413: note = Human gut metagenome

SEQ ID NO: 8223 - protein, 456 aa, unidentified
  REGION 1..456: note = Human gut metagenome
MSTCVCVLTNNGERLMPTFRLGKVRHLLKDGKAKIVKHHPFTIQLLYDSKTNTQPIETCEDVGYNYIGISVKSESHEYVSAQYDTLQDEKEHHDDCRKYRRTRRNRLRYRKSRFDNRKRDKGWLAPSLEHKKHLNISLIERYVSVIPITHVTVEVGSFDTMLLQSIQKGEAKPEGADYQKGPRYNLATLREAVFYRDNYTCQVCKRKIADGAILHMHHMFYWKGRHGYQLDELVTVCEKCHTPANHQKGGKLYGFGKDKKFANLSGAAFMNAVRWQIVNALYATYGKEFVTITYGAMTKEKRIALQLEKTHNNDAYAMGDYHPARRCKFRHYQKRCRNNRVLEKFYDANYVDTRTGNKAKGKELFNGRISRNHKKDCKNLHKYRSKKVSKGRRSIRRQHYAIQPYDTVRLEGKTYITSGCHNKGTRLLIPVNGKSKSVAISKVQVVCHAGAWIQII

SEQ ID NO: 8224 - protein, 418 aa, unidentified; identical to SEQ ID NO: 2425
  REGION 1..418: note = Human gut metagenome

SEQ ID NO: 8225 - protein, 412 aa, unidentified
  REGION 1..412: note = Human gut metagenome
MPCSPAKARLLLKEKKAIVVRRTPFTIQLTIATGEAKQPVSLGVGYKHVGLSASTEKAELYASEVELRQDVSDLLSARRALRQCRRNRKTRYRAPRFDNRIRTKRKGWLAPSVENRINAHLSRIEAVLRLLPVTKITVETASFDMQLLKNSDIAGKEYQESEQLGFWNVREYVLFRDGHVCQHCHGRSKDPVLNVHHLESRRTGGDSPGNLITLCETCHKELHRGEITLKAKRGQSFRAETFMGIMRWEVLDRLKASHPKLEVQNTYGYRTKHARIVNGIAKSHCADAFCIAGNLGAERLGEFFFQKQTRRNNRQIHKLSILKGGIRKRNQAPFEVKGFRLFDKVACQGEEGFIFGRRSSGFFDVRKLDGTRISAGISYKKLHLLEKRQTYLMEIRKEEAFPPLPEGRGLRA

SEQ ID NO: 8226 - protein, 430 aa, unidentified
  REGION 1..430: note = Human gut metagenome
LLKSGKAAVYKYHPFTIILVERKDGYTQSIEYCCDTGYQHIGISIKSQKHEYVNEERILLKDETERHNDCRKYRRTRRNRLRYRKALWNNRHDNLICKDGFAPSIRNKRDTHIILFKMYYEVCPITSATFEMGQFDTQLLKAIENGENIPQSTDYQHGEQYGYSTLREAVFTRDNYKCICCGKSAIKNGSILKIHHLGYRIGDRTNRMNNLATVCSNCHTSKNHQKGGKLYDLKPRLKGFKGATFMTMVRYDMFAKLKEVTPNIDFNMTYGALTKLKRKDYHIKKSHSNDAYVMGMFHPKHRTDFKCYQKLRRNNRILSKFYDAKYIDLRDGTVKSGKQLSYNRTSRNELRNSNKNERIYRGQKVSKGKIVVRKQHYQYRPYDFIWYENVKYIVKGVQDKGKRIALQNHLPVSLSRVDKCVHTNGWSLVN

SEQ ID NO: 8227 - protein, 423 aa, unidentified
  REGION 1..423: note = Human gut metagenome
MRVFVFNMRGEPLMPCTQRKARLLLKTGKAKIYKYNPFTIQLKYVTGENKQECHVGIDTGSKYIGLAVTSENKVLFKGEVELRQDVKSKIDTKRIYRRSRRNRKTRYRRCRFLNRKRFGKWLPPSLQNRINHTFKWIDKLCSFIPESILHIEVGKFDIAKMINPEVHSVDYSQGQTYGYQGERYFIFARDNYTCQVCGERNKPLQTHHIIYVSNGGTNRVDNQITVCKECHTSTNHKNGGIFYKWQKEHKKVKQYKAPPFMNVLRQQILNQYPQALITYGFETTIKRKNIGLEKTHYNDAIVISGVSTISENFHEWLLIRQFRKKKRSLHEGVPRKGRKEPNRIQKRNSKNTPYYRGFYLNDKVSVFGKSGYITGFTNSGAYVKGVDGEYIVLPNKSYKRVNIASLKFICHNNNWQYITKNAV

SEQ ID NO: 8228 - protein, 451 aa, unidentified
  REGION 1..451: note = Human gut metagenome
MSVAVISKTGERLMPTSEYRARKLLKSGKAIKYSYRPFTIQLTERETGDIQPIELCMDTGYIHIGISVKSEKHEYLADQIDTLTDERSRHDACRMYRRQRRNRKRYRQPRFNNRKKDKGWIAPSLEHKKDIHVQAISRINNVMPLTDITMEMGNFDTQVLKAKEEGKPLPQGADYQHGERYGIATLREAVFARDGYKCQCCGRTIKDGAILHVHHIKYRSQGGTNSMSNLATVCDKCHTPKNHKPGGKLYDWKPKLSSFKGATFMTTIRWQLYNEIKTLFPDIVIHITYGAATKERRQELNIDKSHVNDAFVMGQFHPKHRIKAVLYKKKRRNNRCLEKFYDAKYIDSRDGKKRSGQELFNGRINRNHKKDSKNLHQYRLQKVTAGKRTVRKQHYAIQPHDIVIFDKKQFETSGCHNNGTRAILLPQKKSIAIKNLSIWKYAGGYFKSKFV

SEQ ID NO: 8229 - protein, 456 aa, unidentified; identical to SEQ ID NO: 7423
  REGION 1..456: note = Human gut metagenome

SEQ ID NO: 8230 - protein, 453 aa, Lactobacillus sp.; identical to SEQ ID NO: 6768

SEQ ID NO: 8231 - protein, 379 aa, Arthrospira sp.; identical to SEQ ID NO: 2727

SEQ ID NO: 8232 - protein, 408 aa, unidentified
  REGION 1..408: note = Human gut metagenome
MVYVQDIDGKPMMPTTRHGKVRQLLKDKKAVVINTCPFTIKLMYKTSDYKQEIVLGVDAGTKHVGLSATTKSKELYSSEVILRSDIVDLLSTRRELRRTRRNRLRYRKPRFDNRIKSKRTGWVAPSVRHRIDAHIRVIDNVCSILPISRIIVEVAQFDTQKIKNPNISGNEYQEGNQLGFWNVREYVLTRDGHKCQHCKGKSKDPILNVHHIESRKTGGDSPSNLITLCETCHKEYHKGKIDLRVKRGKSLRDAAVMGIMKWKLYEELRSRYDNVSMTFGYITKYNRIKYGIEKSHISDAFVISKNFNALMLEYHYKVRLIRRHNRQIHKQKVLKGGVKKPNQSSFEVFGFRLFDRVMFEGNCYFIFGRRKSGSFNIRDIDGGNQRDITYKKLKLLRCKRFMIQKETN

SEQ ID NO: 8233 - protein, 421 aa, unidentified
  REGION 1..421: note = Human oral metagenome
MFVYVLDKNGQPLMPTQRFGKVRRLLRDKKAKVVKRCPFTIRLLYEPETKIVQDIVLGVDTGSKYVGVACVGNSKVLYQSQIELRDDIERKMDSCRMYRRSRRNRKTRYRKPRFLNRRNSIRKDRYCPTIVSKYYSHEREIEFCKKILPIKDIVLEAGKFDTQLMEKPWLQQYKWAYQRGVNYGYANAREHALVRDSYTCQCCGKKNCRLEVHHIKFRSEGGSDTLENLITLCEDCHKAVHLGKITLKLKGKHKSNLRHATQMSIIRSMLLKKYSDAIETFGFVTKANRENLSLKKDHYLDACVIASGGLEFEQSDILYRKRCVPVQNRVLTRGIRSERKIPTGKVHGFKRYDKVEYLGKVCFVKARRTKGDFVLMDIGNNSIDFRVIGGCQNPSHKKIKRLNTRRGVICIIQKVQNREER

SEQ ID NO: 8234 - protein, 431 aa, unidentified
  REGION 1..431: note = Human gut metagenome
MPNKVYVINKHGRPLMPCSPAKARHLLDAGKAKVKKRTPFTIQLVYGSSGYTQEVILGVDAGSKTIGVSALTKKEELFAANVIPRNDVVDLLSTRREFRRARRNRKTRYRKPRFDNRVRSKHKGWLAPSVEVKIQEHITSIKRVCRILPVSKVVIETAEFDLQLLKAIADGKPVPQGEDYQKGEMYGHYNVRQYVLWRDDYTCQCCGAHATKKKEVRLHVHHLESRKVGGDAPDNQVTLCESCHEKLHKGLIAEKDFKKRKRRSTRDATFMGIMRKTLMQRLCSELPIPVIETRGYITKATREKLLVLPKSHTNDALAIAQGKHGFNVGYLPGILQIDKIYTIRPVRHHNRQLHKAAILKGGIRKSNQAGKYVFGYRLFDKVQFNGQDCFIWGRRTTGIFTIKTINGKMIKDGISFKKLKPVEKSTSYLIA

SEQ ID NO: 8235 - protein, 442 aa, unidentified; identical to SEQ ID NO: 4418
  REGION 1..442: note = Human gut metagenome

SEQ ID NO: 8236 - protein, 413 aa, unidentified; identical to SEQ ID NO: 3587
  REGION 1..413: note = Human gut metagenome

SEQ ID NO: 8237 - protein, 416 aa, unidentified
  REGION 1..416: note = Human gut metagenome
MVYVLDKNGQPLMPTDRHRKVRLMLQSGQAKVIKRCPFTIQLNYDSGHQTQEISLGIDAGSKHIGVSATTKIKVLYEADVELRNDIVDLLSSRRELRRGRRNRKTRYRQAKFNNRRRGNGWLAPSIRQKIGTHLTVVENICKMLPISRIMVETASFDIQKIKNPDIQGAEYQQGDQLEFWNVREYVLFRDGHTCQCCKGKSKDKILNVHHIESRKTGGNAPNNLITLCETCHTGYHKGTVQLPKAIKRGMRFKDAAFMGIMRWAFYEALKQQYEPVGTPVHNTYGYITKHTRIAYNLPKEHYVDARCISGNPEASSNGEYYYQKKVRCHNRQIHKLTVLKGGIRKQNQATYLVKGYRLFDKVSYQGKGYFVFGRRQSGFFDIRTLSGEKVNKGSLSCKKLKFIATRTYYLTERRAV

SEQ ID NO: 8238 - protein, 535 aa, unidentified
  REGION 1..535: note = Human gut metagenome
MYRLTTEAGIPLIPERLHDTKKRKEASRMSEYIYVLGMDGDPQMPTKRKRHVEQLLQTGRARVFRQIPFTIQLTYENKPVLQPVTIAEDPGRSNIGMAVVSLSGELLSAAVVQTRNKEIVKLMEKRKQHRRASRNGERKARQRLAKKCHTMIKTGFLMRKLPMYGKDKRVRCNVIKNTEAKFCNRKREDGWLTPSAEHLVQTHINLIHKMQKFLPITDVAIEINRFAFLSLEDPSISGVDFQKGPLKGYDDLNAAVEDLQDGHCLMCNSPIEHRHHIVPRSMQGSNTIGNIAGLCCKCHEKVHKDSAFEDSLKKKKAGLNKRYAAVSVLNQAIPFICKRLEQEFGKEHVHYCSGRDTSMVRRSLGYHKTKEEQLHEVDAWCIAVLSLQHVPEKAPEFDHVHEILQFRRQDRSRIKAQTSRAYYYKGKKIAKNRKKAEGQREDSLQEWRKRQVERYGKEQTRKMISQLEVKESIRRYNRLDRLMPGAVFYYQGVRYVMRGQHCEGTYLQAVGMGSKDFPAKKCKIVAQNEGLVFVS

SEQ ID NO: 8239 - protein, 418 aa, unidentified; identical to SEQ ID NO: 5724
  REGION 1..418: note = Human gut metagenome

SEQ ID NO: 8240 - protein, 408 aa, unidentified
  REGION 1..408: note = Human gut metagenome
MVYVQDINGKPMMPTTRHGKVRRLLKDKKAVVVNLCPFTIKLTYVTSDYKQEIVLGVDAGTKHVGLSATTKSKELYSSEVILRNDIVDLLSTRRELRRARRDRMRYRKPRFNNRIKSKRPEWVAPSVRYKIDAHIRVVENVCSILPISRIVIEVAQFDTQKIKNPNISGKEYQEGDQLGFWNVREYILARDGHKCQYCKGKSKDSILNVHHIESRKTGGDSPSNLITLCETCHKEYHKGNIDLKIRRGKSLRDAAIMGIMKWRLYEELKSKYDRVFMTFGYVTKYNRIHNNIEKSHVSDAFVISKNFDAIRLGYYYKVRLVRRHNRQIHKQKIPKGGIKRLNQSPFEVFGFRLFDRVMFENSYYFIFGRRKTGRFNVRDIDGKNQKDITYKKLKLSRCKRFMIQKEMN

SEQ ID NO: 8241 - protein, 438 aa, Moorena sp.
MSNYVFVLDTNLKPLNPCTPTIASKLLDAGKAAVFRRYPFSIILKKEANSTPKTYRLKLDPGSKTTGIAILQDNKVIWGAELEHRGQQIKHGLESRRSLRRGRRVRKTRYRKPRFNNRKHPDSWLSPSLEHRVLTTMTWVNRLIKLCPISSIAQELVKFDTHKLQNPELQEREYQQGTLYQYEVREYLLEKWHHTCAYCATKDVPLEVEHIVPRSKGGSNRISNLAIACVPCNQAKSNHDIKDFLRGQPDLLKRLLAQAKSPLKDAAAVNSTRWKLFNALKGTGLSVTTATGGQTKFNRTQQGLPKSHWLDAACVGDIPKLEVKVSQPLLIKCAGHGKRQVMQVDKYGFQKRNKKGELVRKSTKVKNVLGFETGDLVKAVVTKGKKVGTYLGKVAIRKTGSFNIKTREGTIEGISWKYCQKIHRKDGYVYGLAHTDGE

SEQ ID NO: 8242 - protein, 423 aa, unidentified
  REGION 1..423: note = Human gut metagenome
MRVFVFNMRGEPLMPCTQRKARLLLKAGKAKIYKYNPFTIQLKYATGENKQECHVGIDTGSKHIGLAVTSENKVLFKGEVELRQDVKSKIDTKRIYRRSRRNRKTRYRRYRFLNRKRFGKWLPPSLQNRINHTFKWIDKLCSFIPESILHIEVGKFDIAKMINPEVHSMDYSQGQTYGYQGERYFIFARDNYTCQVCGERNKPLQTHHIIYVSNGGTNRVDNQITVCKNCHNSTNHKNGGIFYKWQKEHKKVKQYKEPPFMNVLRQQILNQYPQALITYGFETTIKRKNIGLEKTHYNDAIVISGISTISENLDEWLLIKQFRKKKRSLHEGVPRKGRKEPNRIQKRNSKNTPYYRGFYLNDKVSVFGKSGYITGFTNSGAYVKGVDGEYIVLPNKSYKRVNIASLKFICHNNNWQYITKNAV

SEQ ID NO: 8243 - protein, 437 aa, Clostridium sp.
MVYVLSKKGKPLMPTNRYAKVRVLLKFKKAVLVSSKPFTIKLLYNTKDFVQPITLGIDSGYLNIGFSAITKEKELISGEVKLLKCMSERLKEKAMYRRQRRSRLRYRKPRFDNRKRSENWLAPSIQHKYDSHIRFIDKLKKLLPITNIIIEVANFDTHKLKNPSIEGTAYQNGEQKDFFNLREYILYRDGHKCQNPNCKNKSPEPILQVHHIGFWKQDRSDRPGNLITLCNKCHTPKNHKGKGFLYGWHPKVKSFKEATFMSMIRWQLVNTLCCKHTYGYITKHNRIALNLEKTHYNDAFCIAGGSNQNRVKPSIFEQIKRNSRSLEKFYDAKVIDIRTNTKVSGAELFNGRRTRNKSFNSENLRKYRGIKISKGQRRIRTKRYFYQPGDLVKYEDKIYTVKGTQNKGKYIALKELKKVPKVELLAPYKFRKGLVCV

SEQ ID NO: 8244 - protein, 406 aa, unidentified; identical to SEQ ID NO: 2752
  REGION 1..406: note = Human gut metagenome

SEQ ID NO: 8245 - protein, 458 aa, Sharpea sp.
VIKPFCGIGTVLPTKKPLSNIGDGTPTALRSEKLNPLMGLRKGVRTMVYVLNQNGQPLMPTENHAKVRILLKSKKAKVIKKCPFTIQLLYSSTNYTQEISLGVDSGSKHIGLSATTKNKVLFESDVELRNDIVDLLSTRRQNRRTRRNHKTRYRKPRFDNRKRTDGWLAPSVQNKVDSHLTVIRKVHEILPISKIIVEVASFDIRKIKNPLISGTYYQQGEQLGFWNIREYVLFRDGHTCQCCKGKSKDKILNVHHIESRHTGGDAPNNLITLCETCHTGYHKGFVKLPKTIKRGMSFRDATFVGIMRWAFYNKLKELYPNVSLTYGYITKNTRIENGLLKDHYIDARCISGNPLAVSDGIVYYQKKVRCHNRQIHKNTILKGGIKKRNQASYEVMGFRLFDKVKWKGQNCFIFGRRSTGRMDLRLLDGTKVNASVGYKNLKMLEMRKNMLIELRKVV

SEQ ID NO: 8246 - protein, 447 aa, Marinobacter sp.
MAVFVLDRQKNPLMPCSEKRARLLLTRKRAVVVRVYPFSIRLKDRTGGTVQKVVIKIDPGSKETGLAVSRVSAQGEHVVCLIELIHRGRQISKALDQRRGFRSRRRGQLRYRAPRFNNRTKPKGWLAPSLQHRVDTTASIVKRLRALVPVKSISQELVRFDLQQMENPEISGVEYQQGTLLGYEVREYLLEKWGRECAYCTAIDTPLEIEHLVPKSNGGSNRISNLTIACHDCNQEKGSQTLAEFFQTSSRLKDKQNRMDNVLIQCKRPLRDAAAVNSTRWALFQSLKNTELPVNVGTGGQTKFNRQRLGIPKTHALDAACVGVVEQVFDWQKTTLRIKATGRGSYKRTRLTKHGFPRGYLMREKSVHGFQTGDMVRAIVPTGKKEGTWLGRVAIRKTGSFNIQTSDGAVQGIHHRHCRLMQKADGYGYHLQPTPQKGEGKQESLSC

SEQ ID NO: 8247 - protein, 422 aa, unidentified
  REGION 1..422: note = Human gut metagenome
MVICPLMPCTPAKARHLLDAGKAKVRHRTPFTIQLLYGSTGYTQEVILGVDAGSKTIGLSAATETEELFSAEVKPRNDVVELMSARRQFRRARRNRTTRYRKPRFDNRVRSKHKGWLAPSVEVKIQEHMTAIRRACAILPVSKVVVETAEFDLQLLKAVAEGKPVPQGEDYQKGEMYGHYNVRQYVLWRDSYTCYICGVHGSVRKGVPLHVHHLESRRVGGDAPDNLVTLCTACHDKLHKGFIMAADIKKRKRRSTRDATFMGIMRMTLLRRLREQLPVPVVETRGYITKATRENLLVLPKSHANDALAIAHGPQGFRAEHLPNIRQADRLYTIRPVRHHNRQLHKATILKGGVRKTNQAEKYICGFRLYDKVLYNGIECFVWGRRTSGSFLLRQLNGEKVKDGVSYKHLKLLERSQSYLVA

SEQ ID NO: 8248 - protein, 491 aa, Pseudomonas sp.; identical to SEQ ID NO: 6873

SEQ ID NO: 8249 - protein, 428 aa, Moorena sp.; identical to SEQ ID NO: 3486

SEQ ID NO: 8250 - protein, 442 aa, unidentified; identical to SEQ ID NO: 3218
  REGION 1..442: note = Human gut metagenome

SEQ ID NO: 8251 - protein, 455 aa, unidentified
  REGION 1..455: note = Mouse gut metagenome
MSVFVISKNGKRLMPTTRFGHVRHLLKDGRAKIYCRKPFTIQLLYDGPENVQDLELCIDTGAQHIGISLKSSKKEFISEQRDLLKDEKEKHDDQRMYRRTRRNRLRYRKPRFNNRISNKKEGWFAPSLKNKADQHIMLIQRLATVAPIKDIYLEVGSFDTQLLDAIAKGLPIQEGTDYQQGALYGEETLRKAVFQRDNYTCQVCGRTIKDGAKLHTHHFLYWKGRHGNRLDELCTVCEKCHTSANHQKGGKLYGWGADKKFKSYVSAAFMNTVRWYIVNQVKDLVSDTEVHTTYGAATKLARKDFQFEKSHVNDAYAMGKLHPNIRCETEYYKKVRRNNRCLEKFYDAKYIDIRDGKKKSGKELGCQRINRREPRMSEKNLRIYHGQKVSKGRRSIRKQRYSIRPGDVVLFNGQKYISKGCGSYGTQVLLDIGKSVSIKKVQIIRHTGGWINLNI

SEQ ID NO: 8252 - protein, 431 aa, unidentified
  REGION 1..431: note = Human gut metagenome
MPNKVYVINKHGRPLMPCSPAKARHLLDEGKAKVKKRTPFTIQLVYGSSGYTQEVILGVDAGSKTIGMSASTTKEELLSAEVKPRNDVVDLLSTRREFRRARRNRKTRYRKPRFDNRVRSKHKGWLAPSVEVKIQEHITAIRRVCGILPVSKVVIETAEFDLQLLKAIADGKPVPQGEDYQQGEMYGHYNVRQYVLWRDGYTCQCCGAHATKKKEVRLHVHHLESRKVGGDAPDNQVTLCESCHEKLHKGLIAEKDFKKRKRKSTRDATFMGIMRKTLMQRLCSELPIPVIETRGYITKATREKLLVLPKSHTNDALAIAQGKQGFNVGYLPGIVQINKIYTIRPVRHHNRQLHKATILKGGIRKSNQTEKYVFGYCLFDKVQFNGQDCFIWGRRTTGIFTIKTINGKMIKDGISFKKLKLAEKSTSYLIA

SEQ ID NO: 8253 - protein, 518 aa, unidentified; identical to SEQ ID NO: 7468
  REGION 1..518: note = Human gut metagenome

SEQ ID NO: 8254 - protein, 544 aa, unidentified
  REGION 1..544: note = Human gut metagenome
MKQKKQKVMIYILNKKGKPLMPTTRCGHVRKLLDSKKAVVVNSNPFTIRLKYDTPNGIQDVFAGIDSGRENIGSGASNEDGDCLYLGELKTSNKSIKIKMTERTGFRRERRRHDRQSKQRKAKKDHTEIQNGNDDICRTTISCKSVQISYPVAEESVTHKIIRGKEGKFANRHRDEGWITPSARQLVQMHMNDLKSMCKILPINHVTLERVAFDFQKLENENIKTWEYGKGKLYGYDSPEEYIHDVQDGKCLVCGKPHIDYLHHIIPRSKGGSDKVSNLAGLCYDCHYGPMGVHNCRETQDRLPELKNEANKQYKVSLLNSVMPVLIEEMDKLCKANSIIFSICEGHDTAKVRDMYDLQKDHCLDGFAISLVGRNVKSVDVMPDRIYQKQRYKKKSKNIIQKRNCREYYDGKKLVAVNRHKGTDQKADSLEEYMNTYAETHTADECKKHFDSLTVKPARRTYTFHKKGCICPFHIGDKVRYEKKNKIKGNTKVETFICESIHFYKDENKAKVEHNKTKSKRMKFCRVLEAGCTPYIDYRKLALM

SEQ ID NO: 8255 - protein, 413 aa, unidentified
  REGION 1..413: note = Human gut metagenome
MTGYAFVLDAAGKTLSPTKEQKAWFFVRKKRAKLISKYPLVIQLCRIISDDEICTDEIRCGIDDGGLHVGIAVVQRCKKKNKVLFKGTIEQRDDVKHLLCIRRGYRRHRRYQKRYRQVRFNNRIASTRKGRIAPSILQKRQATMRVIYRLQKWIKITSYWLEDVEIDIRALTDGCKLYKWQYQQSNRLDENIRKAVILRDGCKCVECGKEGSGLEVHHIKPKRLNGSNTLGNLVTLCGKCHQKTEGHELEFMDHYFAILKSSDNKYLNYATHVMIGKKWLRAKLSWLGMLHLTSGGDTANKRIDWGINKSHANDAVCITDLKPDIYDMKDWIIKPMRRQSKAKTDNVLGIRHRDLVEYTYRNGEIHQGYVTALYPELKALNFQSATKHCKKVNAYKCKLLWKFSKIYWLDNAG

SEQ ID NO: 8256 - protein, 458 aa, Moorena sp.
LKGVGMMSEIKKVDYIYVVDSNGTPLMPTSRLGMVRRWLKTGQAKWFGNSRNTIQFVRPVTTNTQELTLGVDAGFHLGLSVVGNNREYYVSESLRKSEKDRITSRRELRRTRRNRLRYRKVRFNNRRRKDGWLAPSIQHRLDFTIKEIKRLYKFLPITNLVVEVTPFDNQKLLNPDIQGWQYQEGKMYGFKTIKDYLLARDNYRDALDGKQYPASQLRVHHLVQRKDGGSNQPDNLVLLSDINHNQANHNNGILAKLKENRQKTLDYRGAYFMSILATRLSNYFDNYTITQGYLTANLRQKYEIKKSHLNDAFIIAGGTDTTLRTNNVYSRQKLRNNNRVLQKFYDAKYIDSRDGKKKTGKELSSGRTRRSQELNYDNLRQFRKEKVKKGRVSIRRGHYQLRPHDVVLNTRTNRIETVKGVQNSGTVIKFQTGKTCSIKSVVSLYHVNGILEKKMKNI

SEQ ID NO: 8257 - protein, 406 aa, unidentified; identical to SEQ ID NO: 2703
  REGION 1..406: note = Human gut metagenome

SEQ ID NO: 8258 - protein, 408 aa, Bacillus sp.
MFVYVINKHGEPLMPCSPRKARILLKQQKAKVVKSTPFTIQLLYGSSGYKQPISLGVDAGTKHVGLSATTEKQVLLEGEAKLRTDIQELLATRLQFRRTRRSRTTRYRQPRFLNRTRKVGWLAPSVQNKVEAHIKLVNLIHKILPVTNLTVEVAQFDTQLLKNPSIQGEEYQQGDQMGFWNTREYIFYRDGHTCQWCKGKKKDKILNAHHIESSKTGGDSPDNLLTLCESCHTELHQKGLEHLFQRKSKPLRDASQMTVMRWFIYNGLKNGFPEVQLTYGYKTKHTRISHGLAKEHCIDARCISGHPLAGPTDTTYLWKFVRKNNRQLHKANTLKGGKRKSNKAERFVKGFQLFDKVRYEGQSCFIFGRRSSGYFDLRLLDGTKIHASANYKKLKKVEYATTLLSEGR

SEQ ID NO: 8259 - protein, 496 aa, Streptomyces sp.; identical to SEQ ID NO: 4777

SEQ ID NO: 8260 - protein, 413 aa, unidentified
  REGION 1..413: note = Human gut metagenome
MTNYAFVLDADGKQLAPTKEQKAWFLIRKKRAILVSKYPMVIQLKKEIPDKEICKNEIRCGIDDGGLHIGVALVQKCQIRNKVIFKGVIEQRNDVKHLMDVRRGYRRYHRYHKRYRPARFNNRKSSKREGRIAPSILQKRQATIRIINQLNKWINITNYWLEDVAIDIRALTDGYKPYRWQYQKSNRLDENIRKAVILRDGCKCMECGKSNCRLEVHHIKPRRLKGSSTLDNLITLCTKCHQKTEGIEELYMDRYFGLLNSSDNKNLNYAQHVMIGKKWLREQLSNLGMLHLTNGGDTANKRIDWDIAKSHSNDAICIADLRPDTCEIKEWTIKPMRRQSKAKTDNVLGIKHRDLVEYTFRNGETHRGYVTALYPEQNALNFQSPTKHCKKVNASKCRLLWKYSKIYWLDNVS

SEQ ID NO: 8261 - protein, 419 aa, unidentified; identical to SEQ ID NO: 3927
  REGION 1..419: note = Human gut metagenome

SEQ ID NO: 8262 - protein, 431 aa, unidentified
  REGION 1..431: note = Human gut metagenome
MDAWDIIVVLNKRGKPLMPCSPAKARHLLKEKKAAVVRRTPFTIQLTIATGESKQPVSLGVDAGYKHVGLSASTEKAELYASEVELRQDITDLLSARRALRQSRRNRKTRYRAPRFDNRIRTKRKGWLAPSVENRINAHLSRIETVIRLLPVTKISVETTSFDMQLLKNSDIAGKEYQEGEQLGFWNVREYVLFRDGHVCQHCHGRSKDPVLNVHHLESRRTGGDSPGNLITLCETCHKALHRGEITLKAKRGQSFRAETFMGIMRWEVLDRLKASHPKLEVQNTYGYRTKHARISNGIAKSHCADAFCIAGNLGAERLGEFLFQKQTRRNNRQIHKLSIPKGGIRKRNQVPFEVKGFRLFDKVAYKGEEGFIFGRRSSGYFDVRKLDGTHISAGISYKKLRLLEKRQTYLTEIRKEEALPPLPEGSGLRA

SEQ ID NO: 8263 - protein, 431 aa, unidentified
  REGION 1..431: note = Human gut metagenome
MNRVFVLSKTGKALMPCRPARARQLLQSKKARVKRLYPFTIQLTQRSDGYIQPVELKFDPGSRQTGIGLVLHGKNRLSAIFGAVLTHRGQEIKGNLDSRRMIRRARRNRKTRYRQARFLNRVRSKHKGWLAPSVQSRVDNIVEWSKRFMRLSPVGFITVESVKFDMQKMENAAVEGIEYQRGTLFDYEVKEYLLEKYNYSCVYCGVKNVSFEKEHVIPRSCGGSNRISNLVLSCHDCNQKKDNLPIDEFLKDNPALLKKIKAQLKSSLKDAAAVNITRRQIVKELGNINVPVLTGTGAETKYNRVSQGYKKEHYIDALCAGTTGAKVYIPKKLKPLLIKKERRNNRQMCLVDKYGFPRGKAKGSKIVHGFKTGDIVKAVVLKGKKKGTYKGKVAVRSSGSFNIKVKQGIVEGIGWKNCVMLYRFDGYSYTC

SEQ ID NO: 8264 - protein, 465 aa, unidentified
  REGION 1..465: note = Human gut metagenome
MNTCVCVLSNNGERLMPTFRLGKVRRLLKDGKAKIVKHHPFTIQLLYDSKTNKQPIEICEDVGYNYIGISVKSESHEYVSAQYDTLQDEKEHHDDCRKMRRARRNRLRYRKPRFDNRKRSEGWLAPSLKHKKELNVNVVKMYCAVMPITHATVEVGSFDTMLVKAIQEGKAIPEGADYQKGPRYNLATLREAVFYRDNYVCKVCGRKATEGAILHMHHMFYWKGRHGNSLNELLTVCEKCHTPANHQKSGKLYGFGEDVKFADLSGAAFMNTVRWQIVNELYAAFGKPFVTITYGAMTKEKRIALQLEKSHNNDAYAMGEFHPNHRCAFEHYEKVRRNNRILEKFYDSQYIDIRTGEIATGKELFNGRINRNHKKDSENLHKYRGKRTYAGHRALLRKKVNLNPGDLVSLNGEPLVVLGTHTRKNGAVNVEFETPSKSGRKSASLKKLKIVKAADSIHPAWEKVS

SEQ ID NO: 8265 - protein, 398 aa, unidentified
  REGION 1..398: note = Human gut metagenome
ELCMDTGYIHIGISVKSEKHEYLAEQIDTLTDERARHDACRMYRRQRRGRKRYRQPRFNNRKRDKGWIAPSLEHKKDIHVQAISRINKVMPLTNITMEMGNFDTQVLKAKEEGKPLPHGADYQHGERYGIATLREAVFSRDGYKCQCCGKTISDGAILHVHHIKYRSRGGTNSMTNLATVCDKCHTPKNHKPGGKLYNWKPKLPNFKGATFMTTIRWQLYNEVKSLFLDINIHVTYGAATKEQRRKLNIGKSHVNDAFVMGKFYPKHRANAVLYKKKRRNNRCLEKFYDAKYIDSRDGSKKTGQELFNGRINRNHKKDSENLHQYRLQKIKAGKRTIRKQHYSIQPHDIVIYENRKRETLGCHNNGTRVMLLPDKKSVAIKKIKIYKYTGGYFKSAFN

SEQ ID NO: 8266 - protein, 438 aa, unidentified
  REGION 1..438: note = Human gut metagenome
LKDGKAKIVKHHPFTIQLLYDSKTNTQPIEICEDVGYNYIGISVKSEFHEYVSVQYDTLQDEKDCHDGCRRVRRSRRNRLRYRQARFDNRKRDDGWLAPSFEHKKELNVNVIKMYCKVMPITHAIVEVGSFDTMLVKAIEEGKATPESADYQKGPRYKLATLREAVFYRDNYTCQVCGRKANEGAILHVHHMFYWKGRHGNSLSELITVCEKCHTPANHQKGGKLYGFGEDIKFANLSGAAFMNTVRWQIVNVLYAAFGKPFVTFTYGAMTKEKRIALHLEKSHNNDAYAMGSFHPVNRCAFEHYEKVKRNNRILEKFYDSQYIDTRTGELTNGKSLFNGRISRSHKKDSENLHKYRGKRICKGHRALRRKKVALNPGDLVSLNGEILVVHGTHTKKNGSVNVEFKTPSRGGKKSASFKKLKIVKTTDSMHSAWEKMS

SEQ ID NO: 8267 - protein, 442 aa, unidentified
  REGION 1..442: note = Human gut metagenome
MVTVQQSTHHLPFGRVFIRRNLFMVYVISQDGKPLMPCSDPIARLLLKQGKAKVKKREPFTIKLTYETTNYTQGLTLGVDTGSGTIGTAVSKDNGDIVYMSEVVVRNDITDKMTQRAKYRRNRRNRKTRYRKARWLNRASSIKKDRFSPTMQSKLHSHVREIEYIQSILPVTEMVFETGQFDMHLMKNPSLANPKVRPWGYQKGANYGFENTKAMVLNRDNYTCQCCKGKHKDSKLEVHHIVFRSQGGSDEESNLLTLCHTCHKDLHSGKINPKLSGKVKGNLKYATQMNSIRKQLFRCYPNAIETFGYVTKVNRLHLGVAKEHYYDACTIATQGNAFNVKNNLYKKKCVSDGDFQKTKGIHSEQPIVTDKICGFRKFDKVRYFGNDYFIKGRMSTGYAILMDIDGNKIDFSTMPRGYKTPKLSNCKRITARSTVMTQVKVV

SEQ ID NO: 8268 - protein, 442 aa, unidentified
  REGION 1..442: note = Human gut metagenome
MVTVQQSTHHLPFGRVFIRRNLFMVYVISQDGKPLMPCSDPIARLLLKQGKAKVKKREPFTIKLTYETTNYTQGLTLGVDTGSGTIGTAVSKDNGDIVYMSEVVVRNDITDKMTQRAKYRRNRRNRKTRYRKARWLNRASSIKKDRFSPTMQSKLHSHVREIEYIQSILPVTEMVFETGQFDMHLMKNPSLANPKVRPWGYQKGANYGFENTKAMVLNRDNYTCQCCKGKHKDSKLEVHHIVFRSQGGSDEESNLLTLCHTCHKDLHSGKITPKLSGKVKGNLKYATQMNSIRKQLFRFYPNAIETFGYVTKVNRLHLGVAKEHYYDACTIATQGNAFNVKSNLYKKKCVSDGDFQKTKGIHSEQPIVTDKICGFRKFDKVRYFGNDYFIKGRMSTGYAILMDIDGNKIDFSTMPRGYKTPKLSNCKRITARSTVMTQVKVV

SEQ ID NO: 8269 - protein, 442 aa, unidentified
  REGION 1..442: note = Human gut metagenome
MVTVQQSTHHLPFGRVFIRRNLFMVYVISQDGKPLMPCSDPIARLLLKQGKAKVKKREPFTIKLTYETTNYTQGLTLGVDTGSGTIGTAVSKDNGDIVYMSEVVVRNDITDKMTQRAKYRRNRRNRKTRYRKARWLNRASSIKKDRFSPTMQSKLHSHVREIEYIQSILPVTEMVFETGQFDMQLMKNPSLANPKVRPWGYQKGANYGFENTKAMVLNRDNYTCQCCKGKHKDSKLEVHHIVFRSQGGSDEESNLLTLCHTCHKDLHSGKINPKLSGKLKGNLKYATQMNSIRKQLFRFYPNAIETFGYVTKANRLHLGVDKEHYYDACTIATQGNAFNVKSNLYKKKCVSDGDFQKTKGIRSEQPIVTDKICGFRKFDKVRYFGNDYFIKGRMSTGYAILMDVDGNKIDFSTMPRGYKTPKLSNCKRITARSTVMTQVKVV

SEQ ID NO: 8270 - protein, 462 aa, unidentified
  REGION 1..462: note = Human gut metagenome
MSVLVIGRNGRALMPTNPRKARLLLKKKTASVVCRHPFTIQLLYKTGCATQEGCIGIDTGSQHIGVGITCGDRVILKDEHALRSSMEKRSLLATRAVMRRGRRYRKVRYRKPKWRHHTKRMYFEKANRRGQHWRKVKTTTQSPRPKGWLPPSLQSKCDHHFRIIDRYLKYLPDPITRNLVIEAGRFDMARMNDPTIHGEMYQRGPMYDAENLRAYIFARDNYQCACCKAKAGTTRKADGTTVKLVAHHILFRSRGATDNPKYIISVCDHCHTTKAHQPGGILYSWMENNKKVARGLRDATFMNILRKRLFARYPQSAFTYGNITAADRKLLRLPKSHANDAVAISLFGKEASTVKNICQTMHYKQIRKSKRSLHEAIPRKGRKNPNTKAVRNKKNTTQVNGFKLWDSVLADGKKLFICSFTGTSAYLIDKNGCYISQPGKTYKQWPLSKLKRLHPNGNWLMA

SEQ ID NO: 8271 - protein, 455 aa, unidentified
  REGION 1..455: note = Human gut metagenome
VSFTVRYVLAYHFKHIKKRKEVPCMVYVLDINGQPLMPTTRHGKVRRLLNSHLAKVVKRCPFTIQLLYQSTKEIQPVSLGVDAGSKHIGMAATTEKKVVYQEELSPRNDVVKLLSLRRASRSSRRSRKTRYRKPRFNNRVHSKHKGWLAPSVEVKIQEHITAIKRICQILPISEIHVETAEFDLQRLKAVEEGRTLPVGTDYQLGEQYDFYNTRQYVLHRDGYTCQCCGTHDNNIKLHVHHIESRQTGGDAPSNLITLCEHCHKALHKGKLELPKGKKRGKTYRDATFMGIMRKTLLERLRKEVDVPASGTYGYITKYWRERAGLEKSHINDAICISKYPYAKPLDTYYLTKAVRNHNRQIHKSNFSKGGIRKRNQAPYLVKGFRLFDKVLYQGKEYFIFGRRATGYFDIRTLDGTKVNKGSISYKKLRIQDTAKAYLKEARAIPHMNKFTCVLA

SEQ ID NO: 8272 - protein, 426 aa, Lactobacillus sp.; identical to SEQ ID NO: 3294

SEQ ID NO: 8273 - protein, 424 aa, unidentified
  REGION 1..424: note = Human gut metagenome
MRVFVFNMRGRPLMPCSQRKARLLLRENKAMIYKYHPFTIQLTYTTGETKQDCHIGIDTGSKYIGAAVRSEDKVFLKGEIELRQDIRSNLDTKRIYRRSRRNRKTRYRKPRFLNRKRRNEWLPPSLQSRINHTFHWIDTLSSLVPNPILHIEVGKFDVAKMINPEIHGVDYQHGQTYDFFDERYFVFARDNYTCQCCGKSKNKILNTHHIIYRSNGGTNRVDNLITVCTDCHTSQNHRKGGIFYQWQEQHKKVKQYKEPPFMNTLRKRIFVAYPDAEITYGSETTPKRKAMKLDKTHYNDAIVISGINEIKENPEEWLLIKQFRKKKRSLHEATARKGRKKPNRNQTRNSKNTPYYKGFYLNDKVSVFGKSGYITGFTSNAAYIKDENNDYITLPNKTYKQVSINKMKLECHNNNWQYIIKNAV

SEQ ID NO: 8274 - protein, 427 aa, Enterococcus sp.; identical to SEQ ID NO: 2410

SEQ ID NO: 8275 - protein, 417 aa, unidentified
  REGION 1..417: note = Human gut metagenome
MPCSPAKARLLLKEKKAIVKRRTPFTIQLTIATGEAKQPITLGVDSGYKHIGLSATTEKAELYASQVELRQDITDLLSARLALRRSRRSRKTRYRAPRFDNRVASKRKGWLAPSVENRITAHMSRVEAVMRVLPVTAITVETAAFDTQLLKNPDIAGAAYQQGEQLGFWNVREYVFFRDGHVCQHCRGKYKDPILNVHHIESRRTGGDAPNNLITLCETCHKAFHRGEIKLKVKRGKSFKAATFMGIMRWTLFERLKKAHPELSVRNTYGYLTKHKRISHGIAKSHCADAYCIADNLGAKRLEGFFFQKQTRKHNRQIHKLSILKGGLRKKNQAPYEVKGFRLFDKVICKGKEAFIFGRRTSGSFDVRRLDGTRISAGISYKKLRLLEPRTTYLTEFRKEAALPPLHKCRGFRAEFL

SEQ ID NO: 8276 - protein, 430 aa, unidentified; identical to SEQ ID NO: 4320
  REGION 1..430: note = metagenome

SEQ ID NO: 8277 - protein, 512 aa, unidentified
  REGION 1..512: note = Human gut metagenome
MSTVYVLNKDGKPLMPTTRCGHVRHLLKEQKARVVTSKPFTIQLLYEADDVVQSLYLGIDPGRTNIGVAVVKADGTAVFTAHLETRNKEIPKLMKKRKESRRARRTNGRRCRRQRRAKANGTISKKCVKHDTAQNGSVSKRAKEIGVIKRHLPGCEKDVLCIGIKNKEAKFSNRTRPEGWLTPTANQLLQTHINLVKKIQKFLPISDVVLEINKFAFMRLDNPNVQKWQYQQGPLYQKANLEETVSEMQEHHCLFCKKKIDHYHHVVPQHKNGSNTIDNIIGLCTQHHDLVHKDATWQKRLAKKKTGLNKKYGALSVLNQIIPALTKELSSLFPKHFFVTNGKSTYDYRAAHGVSKDHWLDAYCIACSVLPNDTCDKTINSRVPYELKQFRRHDRRALNNENMSRVYTFNGKMVATNRHKATEQTTDSLEEFRQRQPNDVCNLKVKEHHPTYRNMNRNYPGSVFLVGNQVHVMQGIAGSKDGEATTYKDTNANSIAAGKCKFVAKNSGILFV

SEQ ID NO: 8278 - protein, 346 aa, unidentified
  REGION 1..346: note = Human gut metagenome
LYSQSKIAQSAQEYGVCRGGIENRRSRRNRKTRYRPPRFDNRVHSKHKGWLAPSVEVKIQEHITVIKRICRILPITLVRVETAEFDTQRLKAMLEGKPLPVGTDYQLGEMYDEYNVRQYVLKRDNYTCQCCGAHTTAKKAVKLHVHHLESRKMGGNAPGNLITLCITCHDALHKGKVSLDNKKRGKPMRDAAFMGIMRRTLMSRLREELPITVQGTYGYITKMQREQNDIKKSHVNDARCISKHPLAEPCSVCYRTKAIRHHNRQTHKANFSKGGIRKRSQMPYVVEGYRLWDKVLYKGQECFVSGRRASGSFTLKKLDGTRISKGVTFKKLRLLEPATNYLIERM

SEQ ID NO: 8279 - protein, 410 aa, Finegoldia sp.; identical to SEQ ID NO: 7766

SEQ ID NO: 8280 - protein, 442 aa, unidentified
  REGION 1..442: note = Human gut metagenome
MSTSVFVLDKKHRPLMPCRPARARRLLRAGRARVVKRFPFVIRLVDRTVEQSEVQPVLIKLDPGSRETGAAVVRDDEKKRHHALAFFVIKHRGGAIRDALKARSAFRRRRRSQNFRCRSPRFLNRVKPKGWLPPSLRHRVETTLSFVRRMCRYLPVSGIATELVKFDSQKLQNPEVSGVKYQQGTLFEYEVREYLLEKFGRKCVYCGAEGVPLNIDHVVPRAKGGSNRVSNLVLACVSCNQKKGARSLEDFLKGKPEVLARVRRELKTPLRDAAAVNATRWVLFNELKATGLPVETGSGALTKLNRHAFGVEKEHWLDALCVGRLNGVVTRKGLNVLEIRCMGRGSRQRTRLTKYGFPRGYLMRQKCVHGFATGDMVETNVPKGKKAGLWRGRVAVRVSGSFNIQTPKGVIQGVGWKHCRLISHNDGYGYAWLGHAPHSSPA

SEQ ID NO: 8281 - protein, 455 aa, unidentified
  REGION 1..455: note = Human gut metagenome
VWLSKPLATLGKDFDSSLEENSFFLVVNLLGKERDIMYVYVINKHGEPLMPCSSRKARTLLNNKKACVVKRTPFTIKLLYGSAGYKQPITLGVDAGSKHVGLSASTEKRELYSEEFTPRSDVVELLSTRRQNRRSRRNRKTRYRVPRFDNRVHNKHKGWLAPSVEVKIQEHITVIKHICKILPISLVRVETAEFDTQRLKAMLAGKPLPVGTDYQLGEMYDEYNVRQYVLKRDHYTCQCCGTHNTAKKVVKLHVHHLESRKTGGNAPSNLVTLCTTCHKNLHKGKVTLDGKERGKPLRDAAFMGIMRKTLMARLKEELPIPVQGTYGYITKMRREQNDIKKGHTNDARCISKHPLAEPCSVCYRTKAIRHHNRQTHKANFSKKGIRKRSQMPYLVEGYRLWDKVLYKEQECFVSGRRSSGSFTLKKLDGTSVSKGVTFKKLRLLEPATNYLIERM

SEQ ID NO: 8282 - protein, 553 aa, unidentified
  REGION 1..553: note = Freshwater metagenome
MHHVTSAATHQTDSGMLPQSRILEPHGKDRKGKASSVHRETAVAIKRSRGRARQRPTDAERRQSRGETTKARAAEVASRPKAEPKGSVEGQGRSVSSHVFVLDRHGKPLMPCSPARARQFLNKDRAKVHRFVPFTIRLVDRTVADSTLQPVALKLDPGSKTTGFALTRVEPESKTEHVLHLMELSHRGAAIKKAMTQRSGYRRRRRTVNLRYRPARFDNRTKPEGWLAPSLRHRVETVESWTRRYSRLAPLTDIHIESVKFDTHLLSNPEVSGIGYQQGELQGYEVREYLLERDGRTCVYCGIEHTPLQVEHVRPKASGGSNRVSNLVMACGPCNTRKGTRPVEEFLKGRPEVLARVLRQLKTPLRDAAAVNATRHAIRDRLKALGLPVSGWSGGRTKFNRSCLGVPKTHCLDAACVGELEHLAGWSDRSVLLVKATGRGDYQRTRVDASGFPRGYLLRRKDVNGFRTGDLVKAVVPSGKKRGTHVGRVAVRATGSFNVQKPSGTIQGVSCRHCVMLQRADGYGYSNGCVSSLTGAIGTAFLPVVNDRVSSGV

SEQ ID NO: 8283 - protein, 441 aa, unidentified; identical to SEQ ID NO: 6900
  REGION 1..441: note = Human gut metagenome

SEQ ID NO: 8284 - protein, 347 aa, Lactobacillus sp.; identical to SEQ ID NO: 3444

SEQ ID NO: 8285 - protein, 431 aa, unidentified
  REGION 1..431: note = Human gut metagenome
MNRVFVLSKTGKTLMPCSQARARQLLHSKKARVKRLYPFTIQLTQRSDGYIQPVELKFDPGSKETGIGIVLHGKNRLSAIYGSVLTHRGQEIKSNLDTRRMIRRSRRNRKTRYRQARFLNRVRSKHKGWLAPSIQSRMDNIIEWSKRFIRLSPVGFITVESVKFDMQKMENAAVEGLEYQRGTLFDYEIKEYLLEKYNYSCVYCGTKNVPFEKEHVIPRSRGGSNRISNLVLSCHDCNQKKDNLPIEEYLKDNPALLKKIKAQLKSPLKDAAAVNITRKQIVKELSDLNVSVMTGTGAETKYNRVSQGYPKEHYIDALCAGTTGAKVYIPSTLKPLLIKKERRNNRQMCLVDKYGFPRGKAKGPKIVRGFKTGDIVKAVVLKGKKKGVYKGKVAVRSSGSFNINVKQGRTEGIGWRNCVMLHRFDGYSYTY

SEQ ID NO: 8286 - protein, 442 aa, unidentified; identical to SEQ ID NO: 3333
  REGION 1..442: note = Human gut metagenome

SEQ ID NO: 8287 - protein, 411 aa, Moorena sp.
MLVYVLNQKSEPLMPCSPSKARKLLKQDKAKVIKTEPFTIQLLHGSSGYKQEIILGVDAGSKVVGLTATTTKKELFSAEVQLRNDIVDLLSTRRQNRRTRRNRLRYRKPRFSNRVKSKNKGWLAPSIENKILTHLTIVSKVYKILPVSNIIVEVASFDIQKIKNPSISGVAYQQGEQMDFWNVREYVLFRDGHHCHGKKGCKNKILNVHHIESRKIGGDSPSNLITLCEECHDDFHKGKLKLNLKRGQTFKDATFMGIMRWSFYNKLKKLYPAVSMTYGYITKNTRITHSLPKEHRIDALCISGNPLVERLDHFYFLKKVRCHNRQIHKVNLLKGGVKKLNRAQYEVKGFRLFDKVQYQGRLYYIFGRRNSGFFDIRTLDGTKVNKGSVSCKSLKLIEKRKTILTERRMAG

SEQ ID NO: 8288 - protein, 427 aa, Moorena sp.; identical to SEQ ID NO: 7675

SEQ ID NO: 8289 - protein, 413 aa, unidentified; identical to SEQ ID NO: 2636
  REGION 1..413: note = Human gut metagenome

SEQ ID NO: 8290 - protein, 442 aa, unidentified; identical to SEQ ID NO: 4843
  REGION 1..442: note = Human gut metagenome

SEQ ID NO: 8291 - protein, 433 aa, unidentified; identical to SEQ ID NO: 6804
  REGION 1..433: note = Human gut metagenome

SEQ ID NO: 8292 - protein, 470 aa, Cupriavidus sp.; identical to SEQ ID NO: 4434

SEQ ID NO: 8293 - protein, 310 aa, unidentified
  REGION 1..310: note = metagenome
TKRKGWLAPSVENRINAHLSRIEAVLRLLPITKITVETASFDMQRLKNPDISGKEYQEGEQLGFWNVREYVLFRDGHVCRHCHGRSKDPVLNVHHLESRRTGSDSPDNLITLCETCHKALHRGEITLKAKRGQSFRAQAFMGNMRREVLNRLKASYPELKVHETYGYLTKHARIANGIVKSHGADAFCIAGNLGAERLGEFFFQKQTRRNNRQIHKLSILKGSLRKRNQAPFEVKGFRLFDKVACQGEEGFIFGRRSSGSFDVRKLDGTRISAGISCKKLRLLEKRRTYLTEIRKEEALPPLPEGRGLRA

SEQ ID NO: 8294 - protein, 482 aa, unidentified; identical to SEQ ID NO: 2794
  REGION 1..482: note = Human gut metagenome

SEQ ID NO: 8295 - protein, 361 aa, unidentified
  REGION 1..361: note = Human gut metagenome
ICKDEIRCGIDDGGLHVGIALVQKCATKNKVILKGTIEQRNDVKHLMVTRKGHRKYRRYHKRYRQARFNNRASSRRKGRIAPSILQKRQATIRVVNQLNKWINVTNYWLEDVSIDIRVLTDGYRPYRWQYQISNRLDENIRKAVILRDKCRCMECGKSNCILEVHHIKPKRLNGSNTLENLITLCKSCHQKTEGNEELFMNKYFSLLKSSDNKGLNYAQHTMIGKYWLREHLSAMGLLHLTNGGDTANKRIDWDIVKTHCNDAICIADLKPDTCDVKEWTIKPIRRQSKAKTTSVLGIQHRDLVEYTLKNGETRRGYVTALYPQLTALSFQSPIQRYSKVNARKCKLLWKFNKIYWIENVI

SEQ ID NO: 8296 - protein, 468 aa, Moorena sp.; identical to SEQ ID NO: 2405

SEQ ID NO: 8297 - protein, 424 aa, unidentified
  REGION 1..424: note = Human gut metagenome
MASMQYVYVLNKHGEPLMPCSPGKARLLLKQQKACVVKRTPFTIKLLYGSAGYKQPVALGIDAGSKHVGLSASTEKRELYREEFTPRNDVVELLSTRRQNRRSRRNRKTRYRAPRFDNRVHSKHKGWLAPSVEVKIQEHITVIKRICRILPITLVRVETAEFDTQRLKAMLKGKPLPVGTDYQLGEMYDEYNVRQYVLKRDNYTCQCCGAHPTEKKPIRLHVHHIESRHVGGNAPNNLITLCVACHKALHEGKITLDKGKKRGKPLRDAAFMGIMRNTLLARLKDELNIPVKQTYGYITKLLREKNKIPKSHVNDARCIAKAPNAKPCDTMLYTRALRHHNRQIHKAKILKGGIRKKNQAPYLVKGFRLWDKVRYNGEECFITGRRSSGYFALKKYDGTVISNSASHKKLMLLEAATNYITERS

SEQ ID NO: 8298 - protein, 431 aa, Moorena sp.; identical to SEQ ID NO: 2933

SEQ ID NO: 8299 - protein, 406 aa, unidentified
  REGION 1..406: note = metagenome
MVYVQDIDGKPLMPTTRHGKVRRLLKSNKAVVVNLCPFTIRLTYISDSYKQEIVLGVDAGTKHVGLSATTKSKELYSSEVILRNDIVDLLSTRRELRKARRNRLRYRKPRFDNRVKSKRPGWIAPSVKYKVDAHIRVVENVCSILPISRIVIEVAQFDTQKIKNPEISGKEYQEGDQLEFWNTREYVLARDGHKCQYCKGKSKDSILNVHHIESRKTGGDSPSNLITLCETCHKEYHKGNIDLKIRRGKSLRDAAVMGIMKWRLYEELKSRYDRVFMTFGYITKHNRIKYGIEKSHTSDAFVISKNINAKRIERQYLKRLIRRHNRQIHKMKILKGGEKKNNQAPFEVFGFRLFDKVLYNNKIFFVYGRRKSGSFNIRDFNGENSKDVSRKKFKLIRGKRHPIILK

SEQ ID NO: 8300 - protein, 440 aa, Clostridium sp.
VPLMVYVLNKEGKPLMPTNRYAKIRVLLKSKKAVVVNSKPFTIKLLYNTEDFVQPITLGIDSGYLNIGLSAITKEKELISAEVKLLKGMSERLKEKAMHRRQRRSRLRYRKPRFDNRKRSKDWLAPSIQHKYDSHIRFIDKLKKLLPITNIIIEVANFDTHKLKDPSIEGADYQNGEQKDFFNLREYILHRDGHKCQNPNCKNKNAESILQVHHIGFWKQDRSDRPGNLITLCNKCHTPKNHKKNGFLYGWQPKVKSFKEATFMSMIRWRLVNTLDCNHTYGYITKSNRIALKLEKTHYNDAFCIAGGSSQSRVNPLIFEQIKRNSRSLEKFYDAKVIDIRTNTKVSGLELFNGRRTRNKNLNSENLRKYRGVKVSKGQRRIRTKRYFYQPGDLVKYEDKVYTVKGTQNKGKYIALKELKKVPKVELLAPYKFRKGLVCA

SEQ ID NO: 8301 - protein, 420 aa, unidentified
  REGION 1..420: note = Human gut metagenome
MVYVLNKNNEPVMPCSERKARLLLKQGRAVIYRKDVFTIKLINGSYGYKQHITLGIDCGSKHIGVSATTDKQELFSANAELRNDVVKLLSDRRMLRRSRRFRKTRYRKPRFDNRRIKEGWLAPSIRQKIDSHVRIVSLIHKLLPVKQVNVEVAAFDMQKIKNPDIKSSEYQMGEQLDSYNVREYVLSRDNHICQHCKGKSKDDVLQVHHIESRKTGGNAPNNLVTLCKTCHEKYHSGEITLNVNRGKSFRDASAMSTMRWFLYEELKSRFSNVNITYGYITKYKRIKLGLSKEHYNDAYCITGNLNTSRLCNHHLIRFIPRHSRILHMQKFSKGGVRRSASASYWLNGGKPSKSGAMFTMFDKVKFNGIVCFISGSSNGYAALRDINWNKVHGCKTTVTVNKLALVSRRRGSMLFGELCG

SEQ ID NO: 8302 - protein, 417 aa, unidentified
  REGION 1..417: note = Human gut metagenome
MPCSPAKARLLLKERKAIVKRRTPFTIQLTIATGEAKQPVTLGVDSGYKHIGLSATTEKAELYASEVELRQDITDLLSARLALRRSRRSRKTRYRVPRFDNRVASKRKGRLAPSVENRITAHMSRVEAVMRVLPVTAITVETAAFDTQLLKNPDIAGAAYQQGEQLRFWNVREYVLFRDGHVCQHCRGKSKDPILNVHHIESRRTGGDAPNNLITLCETCHKAFHRGEIKLKVRRGKSFKAETFMGIMRRTLFERLKKAHPELNVRNTYGYLTKHKRISYGIAKSHCADAYCIADNLGAKRLEGFFFQKQTRKHNRQIHKLLILKGGLKKKNQAPYEVKGFRLFDKVICKGEEAFIFGRRTSGSFDVRRLDGTRISAGINYKKLRLLEPRTTYLTEFRKEAALPPLHKCRGVCAEFL

SEQ ID NO: 8303 - protein, 425 aa, Aphanothece sp.; identical to SEQ ID NO: 6227

SEQ ID NO: 8304 - protein, 421 aa, unidentified
  REGION 1..421: note = compost metagenome
MLVFVKNKHGENLMPCKPSKARKLLKQKKAKIISYKPFTIQLLYGSSGYKQPVTLGVDLGSKHIGIAVTSEDKVLIKGEIELRNDVKKNLDIRRQYRRSRRYRKTRYRKPRFNNRKRPEDWLPPSIQSRIDNTFRWIDNFINLLPSPKLCIEVGKFDVQKMMNPDIEGVEYQQGETYGYYDVRYYVFARDNYTCQVCKKKGKILQTHHIVYKSKGGTDRPSNLITVCIDCHTHKNHQEGGIFYKWMMEKKKMPSYKETPFMNIVRRRVFEKYPEANIVYGSYTTIRRKELGLEKTHYNDAIAITGIESIKHNPDNYFKIKQFRKKKRSLHEAIPRKGRKEPNRTQKRNSKNTKYRNGFYLNDKVKVFGKVGFITGFTNGGAYIQDIEGNYITIPNRSYKQVSFKYIEFINHNNNWQFISHL

SEQ ID NO: 8305 - protein, 507 aa, unidentified
  REGION 1..507: note = Human gut metagenome
VLNKDGKPLMPTTRGGHVRHLLKEQKARVVRTKPFTIQLLYETDDVVQPLYLGIDPGRTNIGVAVVKTDGTAVFTAHLETRNKEIPKLMQGRKKARRARRTNGRRCRRQRRAKANGTISKKCVKQTTAQNGSASKRAKEIGVIKRHLPGCEKDVLCIGIKNKEAKFSNRTRPEGWLTPTANQLLKTHINLVKKIRKFLPISDVVLEINKFAFMRLDNPNIQKWQYQQGPLYQKASLEEAVSEMQEHHCLFCKKSIAHYHHVVPQSENGSNTIGNIVGLCTKHHDFVHKDTAWQKKLAKKKTGLNKKYGALSVLNQIIPALTKELSSLFPKHFFATNGKSTHDYRIAHGVSKDHWLDAYCIACSVLPNDTCDRTINSRVPYELKQFRRHDRRALHKENMSRVYTLNGKSVATNRHKATEQTTDSLEEFRQRQPNDVCKLKVKEHHPTYRNMNRNYPGSIFLIGKQVHVMQGIAGSKDGEATTYKDTNANSIAAGKCKFVAKNSGILFV

SEQ ID NO: 8306 - protein, 512 aa, unidentified; identical to SEQ ID NO: 5238
  REGION 1..512: note = Human gut metagenome

SEQ ID NO: 8307 - protein, 509 aa, unidentified
  REGION 1..509: note = Human gut metagenome
VYVLNKDSKPLMPTTRCGHVRYLLKEKKARVVKTKPFTIQLLYETNDVVQPLYLGIDPGRTNIGVAVVKADGTAVFTAHLETRNKEIPKLMKKRKDSRRARRTNGRRCRRQRRAKANGTISKKCVKQATAQNGSASKRAKKIGVIKRHLPGCEKEVLCIGIKNKEAKFNNRTRPAGWLTPTANQLLQTHINLIKKIQKLLPISDVVLEINKFAFMQLDNPNIQKWQYQQGPLYQKANLEEAVSEMQEHHCLFCKKKIDHYHHVVPQHKNGSNTIDNIVGLCTKHHDLVHKDTAWHEKLTKKKTGLNKKYGALSVLNQIIPALTKELSSIFPKHFFVTTGKSTYDYRAAHGVSKDHWLDAYCIACSVLPNDVCDSSINNRVPYELKQFRRHDRRALHKENMSRVYTLNGKKVATNRHKATEQTADSLEEFRQNHPDDVCKLKVKEHHSEYRNPERNFPGCVFLVGKRTHVMQGTSGSHNGKADGYYDTNGNSYSSSKCKFVAKNEGIIFA

SEQ ID NO: 8308 - protein, 427 aa, Enterococcus sp.; identical to SEQ ID NO: 5630

SEQ ID NO: 8309 - protein, 456 aa, unidentified
  REGION 1..456: note = Human gut metagenome
MSTCVCVLTNNGERLMPTFRLGKVRHLLKDGKAKIVKHHPFTIQLLYDSKTNTQPIETCEDVGYNYIGISVKSESHEYVSAQYDTLQDEKEHHNDCRKYRRTRRNRLRYRKSRFDNRKRDKGWLAPSLEHKKQLNISLVERYVSVIPITHVTVEVGSFDTMLLQSIQKGEAKPEGADYQKGPRYNLATLREAVFYRDNYTCQVCKRKIADGAILHMHHMFYWKGRHGYQLDELVTVCEKCHTPANHQKGGKLFGFGEDKEFADLSGAAFMNAVRWQIVNALHTTYSKEFVTITYGAMTKENRIALQLEKSHNNDAYAMGDFHPVHRCGFRHYQKRRRNNRVLEKFYDATYIDTRTGNKAKGKELFNGRISRNHKKDSENLHKYRSKKVSKGRRSIRRQRYAIQPYDTVRLEGKTYITSGCHNKGTRLLIPANGKSKSVAISKIQVVCHAGAWIQII

SEQ ID NO: 8310 - protein, 434 aa, unidentified; identical to SEQ ID NO: 6832
  REGION 1..434: note = Human gut metagenome

SEQ ID NO: 8311 - protein, 420 aa, Bacillus sp.; identical to SEQ ID NO: 5289

SEQ ID NO: 8312 - protein, 430 aa, unidentified; identical to SEQ ID NO: 4817
  REGION 1..430: note = gut metagenome

SEQ ID NO: 8313 - protein, 428 aa, unidentified; identical to SEQ ID NO: 5055
  REGION 1..428: note = Human gut metagenome

SEQ ID NO: 8314 - protein, 406 aa, unidentified; identical to SEQ ID NO: 6072
  REGION 1..406: note = Human gut metagenome

SEQ ID NO: 8315 - protein, 439 aa, unidentified; identical to SEQ ID NO: 3280
  REGION 1..439: note = Wastewater metagenome

SEQ ID NO: 8316 - protein, 431 aa, unidentified
  REGION 1..431: note = Human oral metagenome
MLVYVLKQNGQPFMPTARFGKIRRLLKAKKAKVVRREPFTIRLLYEPETDVVQECYCGVDTGSKHIGVAVVGNDKVLYQSQIELRNDIKRKMDARRMYRRNRRSRKTRYRKPRFLNRSNSTKSNRLPPSVKHKVQAHIDEIEFCKKILPISDSNLIVEVSQFDTALMKDPSLISEKVKHWGYQQGFNYGYSSRRIAILHRDNYTCQCCGKKNCRLEVHHIKFRSDGGTDDEENLLTLCEECHKGVHTGTVTLNKKPKKSKNLKHATHMSIIRSYLLKKYPNAIETFGFVTSENRNHLKLEKDHYIDACVIASGGLEFKRSDVIYKKRRVSIQDRVLTKGVRGEQKLPTRKIFGFKKFDKVEYLGETCFVKARRSSGAFVLMDIDNNSIDFRDRGGKREPLYKSIEKINARKSVLCISKRTKRKKKLIPILS

SEQ ID NO: 8317 - protein, 415 aa, Selenomonas sp.
MRGQALMPCSQRKARLLLKQKKAKIVGYKPFTIQLTYATGEAKQEVTVGVDEGARHIGIAVVSKDKVLAKGEIELRQDVHSLLMTRVQYRRSRRFRKTRYRKARFLNRRKPEGWLPPSIQAKLDANFAWVDKFCNLVPNPKLRIEVGKFDTAKMINPEIQGVDYQHGQTYGYYDVRYYVFARDEYTCQVCKKKGKILHTHHIVYRSEGGTDRADNLITVCTDCHTSENHKQGGILWKWMKEHKKVKQYKESPFMNTLRIRTFRKYPDAEITYGSETSPKRKDLGLEKTHYNDAVAITGVESINENAEDVFYIKQFRKKKRSLHEATPRKGRKAPNATQKRNSKNTKKLRGWHLNDEVACFGKRGWISGFTGTSSAYIVDGDGQYIQMPNKNYKQVTLSNATKICHNNTWQYFVAS

SEQ ID NO: 8318 - protein, 413 aa, unidentified; identical to SEQ ID NO: 2636
  REGION 1..413: note = Human gut metagenome

SEQ ID NO: 8319 - protein, 451 aa, unidentified; identical to SEQ ID NO: 2436
  REGION 1..451: note = Human gut metagenome

SEQ ID NO: 8320 - protein, 424 aa, Enterococcus sp.
MRVFVRNMRGKPLMPCSNRKARLLLKEGKAKIYQYNPFTIQLCYATGEYMQECHIGIDTGSEHIGIAVTSEEKVLFKGEVELRQDVKSNLDTRRSYRRDRRNRKTRYRKARFLNRKKKESWLPPSIENRVNHTFKWINKLIALLPNPKLHIEVGKFDVAKMINPDIQGVDYQHGQTYGFYDMRYFVFARDKYTCQCCGKSKGKILQTHHIIYRSNSGSNRADNLITVCTDCHTYENHQKGGILYQWQEKHKKTKQYKEPSFMNVLRKRIFKKYPNAVITYGSETTPKRKELGLEKMHYNDAIIISGISTIKENPNEWLLIKQFRKKKRSLHEATARKGRKEPNRLQKRNAKNKPYYKGFYLNDKVEVFGRIGYITGFTSGGAYIKNAENEYIILPNKSYKQVGISNIKLLHHNNNWQYVNKRIS

SEQ ID NO: 8321 - protein, 428 aa, Enterococcus sp.; identical to SEQ ID NO: 4335

SEQ ID NO: 8322 - protein, 415 aa, unidentified; identical to SEQ ID NO: 3500
  REGION 1..415: note = Human gut metagenome

SEQ ID NO: 8323 - protein, 442 aa, unidentified; identical to SEQ ID NO: 2903
  REGION 1..442: note = Human gut metagenome

SEQ ID NO: 8324 - protein, 471 aa, Acidithiobacillus sp.; identical to SEQ ID NO: 3868

SEQ ID NO: 8325 - protein, 464 aa, unidentified; identical to SEQ ID NO: 6330
  REGION 1..464: note = Human gut metagenome

SEQ ID NO: 8326 - protein, 413 aa, unidentified
  REGION 1..413: note = Human gut metagenome
MPCSPAKARLLLKEKKAIVKRRTPFTIQLTIATGETKQPVGLGVDAGYKHVGLSASTDKAELYASQVELRQDITDLLSARRALRRARRNRKTRYRAPRFNNRIRTKRKGWLAPSVENRINAHLSRIEAVLRLLPVTKITVETASFDMLLKNPDIAGKEYQEGEQLGFWNVREYVLFRDGHVCQHCYGRSKDPVLNVHHLESRRTGGDSPGNLITLCETCHEALHRGEIALKTKRGHSFRAEAFMGMMRWEVLNRLKASHSELEVNNTYGYRTKHARIVNGIDKSHCADAFCIAGNLGAERLCEFFFQKQTRRNNRQIHKLSILKGGIRKRNQAPFEIKGFRLFDKVACKGEESFIFGRRSSGYFDVRKLDGTRISAGISYKKLRLLEKRRTYLTEIRKEEALPPLPEGRGLRA

SEQ ID NO: 8327 - protein, 414 aa, unidentified; identical to SEQ ID NO: 4252
  REGION 1..414: note = Human gut metagenome

SEQ ID NO: 8328 - protein, 473 aa, unidentified
  REGION 1..473: note = Human gut metagenome
MPLNSLDGVRTVGNPYKPWDNIGEGHLTDLPVWAACSSVAATQKEIQMVYVQNRSGQPLMPTEDHRKVRLLLKNGLAVVVKRTPFTIRLATGSKNYVQPVILGVDAGSRTAGLSVSTKQRELFAAEVTLRNDVVNNLSARREFRRARRHRKTRYRQPRFHNRVHSKQKGWLAPSVEVKIQEHITVIKRVCRILPVSRVVVETAEFDLQLLKAIADGRPVPQGEDYQKGEQAGFYNVRQYVLWRDGYRCQCCGMHGKGIKLHIHHKESRKTGGDAPENLVTLCEVCHRKLHQGLIAEQSLKKRSRMSTRDAVFMGIMRRTLTERLCRELKVPVASTKGYITKYTRVELLHLPKSHTGDALAIAQGRYGFGVGQATFIKPAERIYQIKPVRHHNRQLHKATILKGGTRKSNQPPKYVKGFRLYDKVLYQGQECFIWGRRTTGSFLLKLLDGTKVKDGVSCKHLKLLERSSQYLAA

SEQ ID NO: 8329 - protein, 420 aa, unidentified; identical to SEQ ID NO: 5918
  REGION 1..420: note = Human gut metagenome

SEQ ID NO: 8330 - protein, 516 aa, unidentified
  REGION 1..516: note = Human gut metagenome
VLAPLQVLVIFRVQVQLIRLYSDISSEMIYNLVSIRERSFMKQKKQKVMVYILNKKGKPLMPTTRCGHVRKLLDSKKAVVVSSNPFTIRLKYDTPNGVQDVFAGIDSGRENIGSGASNEDGDCLYLGELKTSNKSIKMKITERAGFRKERRRRDRQNKQRKARKDHTEIQNGNADICRTTISCKSVQISYPAAEKSVTHKIIRGKEGKFANRHRDEGWITPSARQLVQMHMNDLKSMCKILPISHVTLERVAFDFQKLENENIKAWEYGKGKLYGYDSPEEYIHDVQGGKCLICGKPHIDYLHHIIPRSKGGSNKVSNLAGLCYDCHYGPMGVHNCQDTQDRLPELKNEANKQYKVSLLNSVMPVLIEEMDKFCKANSIIFSICEGHDTAKVRDIYDLQKDHCVDGFAISLVGRNVKSVDVMPDRIHQKQRYKKKSKNIIKKRNCREYYDGKKLVAVNRHKGTDQKADSLEEYMNTYAETHTADECKKHFESLTVKPARRTYTFHKEGRICPFHIG

SEQ ID NO: 8331 - protein, 426 aa, unidentified; identical to SEQ ID NO: 6088
  REGION 1..426: note = Cyanobacteria bacterium UBA11371

SEQ ID NO: 8332 - protein, 441 aa, unidentified
  REGION 1..441: note = Human gut metagenome
MPTFRLGKVRRLLKDGKAKIVKPHPFTIQLLYDSKTNKQPIEICEDVGYNYIGISVKSESHEYVSAQYDTLQDEKEHHDDCRKMRRARRNRLRYRKPRFDNRKRSEGWLAPSLEHKKQLNISLVERYVSVIPITHATVEVGSFDTMLLQAIQKGETKPEGADYQEGPRYNLATLREAVFYRDNYTCQVCGRKITDGAILHMHHMFYWKGRHGYKLDELVTACEKCHTPANHQKGGKLFGFGEDKEFADLSGAAFMNAVRWQIVNALHTTYSKEFVTITYGAMTKEKRIALQLEKSHNNDAYAMGDFHPVHRCGFRHYQKRRRNNRVLEKFYDATYIDARTGNKAKGKELFNGRISRNHKKDSENLHKYRSEKVSKGRRSIRKRRYAIQPYDTVRLKGKTYITSGCHNKGTRLLIPVNGKSKSVAISKVRVVCHAGAWIQII

SEQ ID NO: 8333 - protein, 556 aa, Moorena sp.
MSTSYSGEKTHQSVLPQRSALESVPADNPGAGTKRGAEIVHAVTGMRHGRGEHHQGVRQPDDRHGGTAQAEPPALFGSDPGVLQLNKKLPEPRHPRVFVLGKDKKPLMPSHPARARELLAKGRARVHRLHPFTIRLIDRRAEDSVVDGVAVKIDPGSRYTGISVASISDDGVVHGLHGIEVQHRGQQIREKMQVRAALRRGRRSRNIRYRAPRFSNRTRPNGWLAPSLRHRVEGTMTWVNRLHGLTPVASVAMELVRFDLQQQENPEITGVQYQQGTLAGFEVREYLLAKWGRMCAYCDATGVPLNIDHIQPRARGGSNRVSNLTLACIPCNQAKDSMPIEEFVANPARRQRITAQAKAPLRDAAVVNSTRWALYRALTATGLTVNTGSGGRTKFNRTRNGLPKSHALDALCAGKTGTVGSYAARVLVAESAGRGSYARTRSDRYGFPRLHLTRNKRHFGFQTGDHVRAVVRSGQKAGVYTGRVAVRASGSFNITTSAGIVQGIRHRHCTLLSRADGWAYTHREEEKRQSRAETETDRRAFFPALKHGVSAAFQDI

SEQ ID NO: 8334 - protein, 442 aa, unidentified; identical to SEQ ID NO: 2637
  REGION 1..442: note = Human gut metagenome

SEQ ID NO: 8335 - protein, 507 aa, unidentified; identical to SEQ ID NO: 6546
  REGION 1..507: note = Human gut metagenome

SEQ ID NO: 8336 - protein, 513 aa, Micromonospora sp.
VLPQPRTLESASADTAPRSHETGRGRHPAAGVRHGRGETGASRRHPEPASAGTGAGREAQTHPAVFVVDRHHRPLQPCTPARARKLIAGGRAVVHRHTPFVIRLKDRELASSQVDGVEVGIDPGSKFTGIAVFRTENADDDMVRTGLFGIEVRHRGGQIRDRLAARADLRRGRRSRNLRYRSSRYANRRRPQGWLAPSLRHRVDNTMSWVQRLCHWAPVTRLHVERVAFDTQLLQNPDISGVEYQHGTLHGYEVREYLLAKHGRKCAYCGAVGVPLNIDHIVPRSRGGSDRVSNLTLACIPCNQAKAAIPIGTFLADQPAVLARIRRQQKLPLRDAAAVSTTRWALWHALVATGLPVQVATGGRTKWNRHRTGAPKSHTLDALHVGVLTTVWSCPKQVLVATATGRGSYARTRADQHGFPRLRLPRTKTIRGFQTGDLVRAVVPTGKNTGRHEGRVAVRTTGRFNIRTRHTLVQSVHHRHVHLLQRADGWAYTREEERRFHPAPNDRVSTPHT

SEQ ID NO: 8337 - protein, 456 aa, unidentified
  REGION 1..456: note = Human gut metagenome
MSTCVCVLSNSGERLMPTFRLGKVRHLLKDGKAKIVKHHPFTIQLLYDSKTNTQPIEICEDVGYNYIGISVKSQSHEYVSAQYDTLQDEKACHDSCRKLRRTRRNRLRYRKPRFDNRKRSEGWLAPSLKHKKELNVNVVKMYCAVMPITHATVEVGSFDTMLVKAIEEGKATPESADYQKGPRYKLATLREAVFYRDNYTCQVCGRKANEGAILHVHHMFYWKGRHGNSLSELITVCEKCHTPANHQKSGKLYGFGENVKFADLSGAAFMNTVRWQIVNELYAAFGKDFVTVTYGAMTKEKRIALQLEKTHSNDAYAMGNCHPAHRCEFGHYQKRCRNNRVLEKFYDATYIDTRTGNKAKGKELFNGRISRNHKKDSEDLHKYRCKKVSKGRRSIRRQRYAIQPYDAVRLESKTYITSGCHNKGTRLLIPANGKSKSVAISKVQVVCHAGAWIQII

SEQ ID NO: 8338 - protein, 413 aa, Moorena sp.; identical to SEQ ID NO: 2636

SEQ ID NO: 8339 - protein, 421 aa, unidentified; identical to SEQ ID NO: 8171
  REGION 1..421: note = Human gut metagenome

SEQ ID NO: 8340 - protein, 536 aa, Anaerostipes sp.
VLRPRYQYPTRWYPSREQGSGNGCLSGEENTDLKQEVSGTLSKGDHSHPGEQDFCVPAITIQGGPAMSVFVVGLNGCRLMPTSERKARLLLKHGKASVYRKVPFTIKLNYKTGSTTQSGYLGIDTGSQHIGVSVVREDGAVLHKEEIGLRDSMSKRKLMQSRASSRRGRRHRKTRYRHPKWRPKAKRVYCEIPDRKRRHWKKKEITFTSKRPKGWLPPSLQSKTDHHIRWIKKLQDLLPEGYRLSIELGRFDPARLKDPEIHGELYQKGPQYDYENVRAYVLNRDRYTCQVCGKKGGKLHVHHILYRSYGATDDPQYMATVCSDCHNTENHHQGGILYQWMQKQKKFTRGLRDATFMNILRKRLIEAFPGATFTYGNITKADRERLRLPKSHGNDATAIAIVKTGIMTVKDKEPVVYIQQVRRKKRSLHEETPRKGRKEPNRKASRYDKNTKAVTVTKRKNKKKISITGCLFDRVELNGKKGWISGFTDKSCYVKDENDQYIRTSPKYKQVSLSKLKILHHCGNWAIGARRSLGKG

SEQ ID NO: 8341 - protein, 428 aa, unidentified
  REGION 1..428: note = Human gut metagenome
MQYVYVLNKHGEPLMPCSPCKARLLLKQKKACVVKRTPFTIKLLHGSAGYKQPITLGVDAGSKHVGLSASTEKRELYSEEFTPRNDVVELLSTRKQNRRSRRNRKTRYRAPRFNNRVHSKHKGWLAPSVEVKIQEHITVIKRICRILPVTLVRVETAEFDTQRLKAMLAGKPLPVGTDYQLGEMYDEYNVRQYVLKRDNYTCQCCGAHTTAKKTVKLHVHHLESRKVGGNAPSNLITLCTTCHNNLHKGKITLDGKKRGKTLRDAAFMGIMRKTLLARLHEELPIPVQGSYGYITKMRREQNDIKKSHVNDARCISKHQLAEPCSVCYRTKAIRHHNRQTHKANFSKDGIRKRSQMPYVVDGYRLWDKVLYEGQECFVSGRRASGSFTLKKLDGTRISKGVTFKKLRLLEPATNYLIERIRTGNSSHD

SEQ ID NO: 8342 - protein, 371 aa, Moorena sp.; identical to SEQ ID NO: 2871

SEQ ID NO: 8343 - protein, 369 aa, Homo sapiens
MIRKDFVKHMTQTLTKQTTQVCVLDQQGKPLMPTRRLGKVYRLLKNKKAHIFSYEPFTIQLDYEPKTHIIQPMTLGVDSGAIYSGYSVANEHREYYSAEVIARDNISDRISDRSMYRRNRRSRKTRYRKALFNNRKNQKEGWLPPSLKQKVAVQVNEIAHLHRYFPIEKIIIEVAEFDIQKIKNPDISGIEYQQGTLYGYNIRNYLLEKHGRKCFYCGKEVSDFEVEHMLPKARGGSNRIDNLTLSCHECNQKKGTLTAEEFIKQTLSARKAAAKLRQLPNERRLFKYMAHMNATRWTLYSNIKDNYENVQTTYGYITKYNCLQAHLPKAHHIDAKCITGFAVVPSIDQTVVKVKMRRHNRQLHRGNLQ

SEQ ID NO: 8344 - protein, 431 aa, unidentified; identical to SEQ ID NO: 3801
  REGION 1..431: note = Human gut metagenome

SEQ ID NO: 8345 - protein, 413 aa, unidentified
  REGION 1..413: note = Human gut metagenome
MTSYAFVLDANGKQLAPAKEQKAWFLIRKKRAALVSKYPMVIQLKKEIPENEICKDEIRCGIDDGGLHVGIALVQKCKTKNKVVFKGTMEQRNDVKHLMEVRRSYRRYHRYHKRYRLARFDNRKSSKRKKRIAPSILQKRQAIIRVIHWLNKWINITNYWLEDVSIDIRALTDGYKPYRWQYQKSNRLDENIRKAAILRDGGKCMECGKLNCRLEVHHIKPRRRNGSDTLDNLITLCESCHQKTEGQEELYMDRYFSLLKSSDHKNLNYAQHVMIGKEWLRKQLSSLGVLYLTNGGDTANKRIDWNIEKSHANDAVCITNLQPDTYDMKEWTVKPMRRQSKAKTDNVLGIKHRDLVEYTFKNGETHRGYVTALYPEQKAINFQSPTKHCKKVNARKCKLLWKYSKIYWLENAS

SEQ ID NO: 8346 - protein, 403 aa, unidentified
  REGION 1..403: note = Human gut metagenome
LRVFVLNKRGKPLMPCSPAKARLLLKEKKAIVKRRTPFTIQLTIATGETKQPVGLGVDAGYKHVGLSASTDKAELYASQVELRQDITDLLSARRALRRARRNRKTRYRAPRFNNRIRTKRKGWLAPSVENRINAHLSRIEAVLRLLPVTKITVETASFDMLLLKNPDIAGKEYQEGEQLGFWNVREYVLFRDGHVCQHCYGRSKDPVLNVHHLESRRTGGDSPGNLITLCETCHEALHRGEIALKTKRGHSFRAEAFMGMMRWEVLNRLKASHSELEVNNTYGYRTKHARIVNGIDKSHCADAFCIAGNLGAERLCEFFFQKQTRRNNRQIHKLSILKGGIRKRNQAPFEIKGFRLFDKVACKGEESFIFGRRSSGYFDVRKLDGTRISAGISCKKLRLLEKR

SEQ ID NO: 8347 - protein, 417 aa, unidentified
  REGION 1..417: note = Human gut metagenome
MPCSPAKARLLLKERKAIVKRRTPFTIQLTIATGEAKQPVTLGVDSGYKHIGLSATTEKVELYASEVELRQDITDLLSARLALRRSRRSRKTRYRAPRFNNRVASKHKGWLAPSVENRIAAHLSRVEAVMRVLPVTAITVETAAFDTQLLKDPDITGAAYQQGEQLRFWNVREYVLFRDGHVCQHCRGKSKDPILNVHHIESRRTGGDAPNNLITLCETCHKAFHRGEIKLKVRRGKSFKAETFMGIMRRTLFERLKKAHPELNVHNTYGYLTKHKRISHGIAKSHCADAYCIADNLGAKRLKGFFFQKQTRKHNRQIHKLSILKGGLRKKNQAPYEVKGFRLFDKVICKGEEAFIFGRRTSGSFDVRRLDGTRISAGINYKKLRLLEPRTTYLTEFRKEAALPPLHECRGFRAEFL

SEQ ID NO: 8348 - protein, 512 aa, unidentified
  REGION 1..512: note = Human gut metagenome
MSTVYVLNKDGKPLMPTTRGGHVRHLLKEQKARVVRAKPFTIQLLYETNDVVQPLYLGIDPGRTNIGVAVVKANGTAVFTAHLETRNKEVPKLMQDRKKARRARRTNGRRCRRQRRAKANGTISKKCVKQDTAQSKNPSKRAKEIGIIKRRLPGYKKDVLCIGIKNKEAKYTNRTRPEGWLTPTANQLLQTHINLVRKIQKFLPISDVVLEVNKFAFMRLDNPDIQKWQYQQGPLYQKGSLENAVSEMQEHHCLFCDKPIDHYHHVVPQSENGSNTIANIVGLCAEHHNLVHKDAAWQKKLAEEKVGLNKKYGALSVLNQIIPALTNKLSVLFPKHFFVTAGKSTHDYRAAHGVSKDHWLDAYCITCSVLPSNVCDSNINNHMPYELKQFRRHDRRVLNNENMNRVYTLDNKAVAINRHKATEQEAASLEEFRKEHPNDVCKLKVKEHHPTYRNMNRNYPGSIFLVGKHVHIMQGIAGSKDGKATTYKDSNANSITASKCKFVAKNSGILFV

SEQ ID NO: 8349 - protein, 413 aa, unidentified; identical to SEQ ID NO: 3290
  REGION 1..413: note = Human gut metagenome

SEQ ID NO: 8350 - protein, 431 aa, unidentified
  REGION 1..431: note = Human gut metagenome
MPNKVYVINKHGRPLMPCSPAKARHLLDAGKAKVKKRTPFTIQLVYGSSGYTQEVILGVDAGSKTIGVSALTKKEELFAANVIPRNDVVDLLSTRREFRRARRNRKIRYRKPRFDNRVRSKHKGWLAPSVEVKIQEHITTIRRVYGILPVSKVVVETAEFDLQLLKAIADGKPVPQGEDYQKGEMYGHYNVRQYVLWRDDYTCQCCGAHATKKKEVRLHVHHLESRKVGGDAPDNQVTLCESCHEKLHKGLIAEKDFKKRKRRSTRDATFMGIMRKTLMQRLYSELPIPVIETRGYITKATREKLLVLPKSHTNDALAIAQGKRGFNVGYLPEIAQIDKIYTIRPVRHHNRQLHKAAILKGGIRKSNQAGKYVFGYRLFDKVQFNGQDCFIWGRRTTGIFTIKTINGKMIKDGISFKKLKPVEKSTSYLIA

SEQ ID NO: 8351 - protein, 310 aa, Moorena sp.; identical to SEQ ID NO: 6328

SEQ ID NO: 8352 - protein, 441 aa, Anaerostipes sp.
MVTVQQSTHHLPFGRVFIRRNLFMVYVISQDGKPLMPCSDPIARLLLKQGKAKVKKREPFTIKLTYETTNHTQGLTLGVDTGSGTIGTAVSKDNGDIVYMSEVVVRNDITDKMTQRAKYRRNRRNRKTRYRKARWLNRASSIKKDRFSPTMQSKLHSHVREIEYIQSILPVTEMVFETGQFDMQLMKNPSLANPKVRPWGYQKGANYGFENTKAMVLNRDNYTCQCCKGKHKDSKLEVHHIVFRSQGGSDEESNLLTLCHTCHKDLHSGKINPKLSGKVKGNLKYATQMNSIRKQLFRFYPNAIETFGYVTKANRLHLGVDKEHYYDACTIATQGNAFNVKSNLYKKKCVSDGDFQKTKGIRSEQPIVTDKICGFRKFDKVRYFGNDYFIKGRMSTGYAILMDIDGNKIDFSTMPRGYKTPKLSNCKRITARSTVMTQVKV

SEQ ID NO: 8353 - protein, 430 aa, Mitsuokella sp.
MTWARRKILQKWKVAEMPNIKKYAFVLDAEGEQLDPTIEQNAWRQVRQHKAKLVSRFPMVIQLNKVVDIPNTDEIRCGIDDGANHVGIALVQKCQTRNKVLFKGIIEQRKDVKKKIEQRRSYRRYHRYHKHYRPARFNNRASSRRSGRLMPSIIQRKQATMRVIDRLRQWIRMDGYWLEDVKIDIRALTDGYKPYHWQYQKSNRLDTNLRIAAIFRDNCKCMECGKENTRFEVHHITPKKKGGADTISNLITLCPKCHARTFGREMQFADKYYKMIGPAGHIEGLDDAQRVMQGKHWFREQLQSRAPLVLTTGGDTANKREDWNIIKTHSNDAICIADLEPESVDIEEWSIKPMRRKSKAGVNEVCGFRHRDYVSYTYRNGETHAGYVTAMYPEIHALNFQAPTKHCKKANALKCRLIWRFDKIYWFKCA

SEQ ID NO: 8354 - protein, 433 aa, Moorena sp.
MSLVFVLSSDRQPLDPCHPARARQLLTRGKAAIFRRFPFTIILTDRTAAERVTHPHRVKIDPGSKTTGIAVVAEGTGRVVWAGELTHRGQQIRDRLSQRRAVRRSRRQRKTRYRQPRFLNRRRPEGWLAPSLQHRVETTLTWVNRLRRYAPIAALSVELVRFDTQQMQNAEVSGVAYQQGTLAGYEVRQYLLEKWNRRCAYCHATDVPLQIEHMTPRSRGGSDRVSNLTLACEPCNTRKGTQTAAEFGYPHLQAQARLPLKDAAAVNSTRWALSQRLVATCLPVEAGTGGRTTFNRTRLGLPKGHWMDAACVGASTPEALDTRGVRPLLIRATGHGSRQMCRMDRFGFPRTGAKQARRVKGLRTGDMVRAVVTTGKKVGTYTGRVAVRASGSFNITTANRTVQGLSYRFVRAIQRNDGYTYQPQPVPAHAEAG

SEQ ID NO: 8355 - protein, 404 aa, unidentified
  REGION 1..404: note = Human oral metagenome
MLVYVLKQNGQPFMPTERFGKVRRLLKEGKAKVVRREPFTIKLLYEPEIDVVQECYCGVDTGSKHIGVAVVGNDKVLYQSQTELRDDIKRKMDRRRAFRRNRRIRKTRYRKSRFLNRGNSIKKDRLPPSVKHKVQAHIDEIEFCKRILPISDLILEVSQFDTSLMKTPSLINEKVRHWGYQKGFNYGYSSRRKAVLHRDNYTCQCCGKKNCRLEVHHIKFRSDGGTDDEENLITLCKECHDGVHAGTVVLNKKPKESKNLKHATNMSIIRSWLLREYLDAIETFGFVTAENRNHLQLEKDHYIDACVIASGGLEFKELDVIYKKRRVSIQDRVLTDGIRDEKKLPTGKVHGFKRYDKVKYLGEICFVKGRRTSGGFVLMGIDNNSIDFRNKGGNLNPHYKFIKR

SEQ ID NO: 8356 - protein, 430 aa, unidentified
  REGION 1..430: note = Human gut metagenome
MPKVYVLNRHGRPLMPCTPAKARHLLDAGKAKVRHRTPFTIQLLYGSTGYTQEVILGVDAGSKTIGLSAATETEELFSAEVKPRNDVVELMSARRQFRRARRNRTTRYRKPRFDNRVRSKHKGWLAPSVEVKIQEHMTAIRRACAILPVSKVVVETAEFDLQLLKAVAEGKPVPQGEDYQKGEMYGHYNVRQYVLWRDSYTCRICGAHGSVRKGVPLHVHHLESRRVGGDAPDNLVTLCTACHDKLHKGIIMVADIKKRKRRSTRDTTFMGIMRMTLLRRLWEQLPVPVVETRGYITKATREKLLVLPKSHTNDALAIAHGPQGFRTEYLPNIRQADRLYTICPVRHHNRQLHKATILKGGVRKANQAEKFICGFRLYDKVLYNGIECFVWGRRTSGSFLLRQLNGEKVKDGVSYKHLKLLERSQSYLVA

SEQ ID NO: 8357 - protein, 420 aa, unidentified
  REGION 1..420: note = Human metagenome
MVYILNKHNEPMMPCSERKARLLLKQGRAVIYRKDVSTIKLINGSYGYKQHITLGVDCGSKHIGVSATTDKQELFSANAELRNDVVKLLSDRRMLRRSRRFRKTRYRKPRFDNRRIKEGWLAPSIRQKIDSHVRIVSLIHKLLPVKQVNVEVAAFDMQKIKNPDIKSSEYQMGEQLDSYNVREYVLFRDNHICQHCKGKSKDDVLQVHHIESRKTGGNAPNNLVTLCKTCHEKYHSGEITLNVNRGKSFRDAIAMSTMRWFLYEELKSRFSNVNITYGYITKYKRIKLGLSKEHYNDAYCIAGNLNTSRLCNHHLIRFIPRHSRILHVQKFSKGGVRRSASAPYWLNGGKPSKHGIIFTRFDKVKFNSVVCFISGSSNGFASLRDINWNKVYGCKTTVTVNKLALVSRRRGSMLFGELCG

SEQ ID NO: 8358 - protein, 428 aa, unidentified
  REGION 1..428: note = Human gut metagenome
LKVFVLNMRGQPLMPCSPAKARHLLKAGKAVVKRRTPFTIQLRIATGETKQNVTLGVDAGAKHVGLSATTEKEEVFASEVELRQDITGLLAARLSLRRDRRHRKTRYRAPRFLNRVRSKHKGWLAPSVENRIQAHMSRIDAICGLLPVTKIVIETASFDIQKIKHPDVEGTDYQQGDQLGFWNVREYVLFRDGHVCQHCHGHAKDKILNVHHLESRQTGGDAPNNLITLCETCHKACHAGKIKLKVKRGQSFRAEAFMGIMRWTLLDRVRKAHPGLPVENTYGYLTKNTRITLGLPKAHCVDAYCIAGNLKAVRRGVYLHQRQVRKHNRQIHKCTVLSKTLKDGTKIGYRKFNQTPHLVKNFRLFDKVRCLGQTGFIFGRRSSGYFDVRRLDGVKISSCISYRKLTLLEKRSTCLTELRKEDGASSPV

SEQ ID NO: 8359 - protein, 515 aa, unidentified
  REGION 1..515: note = Human gut metagenome
MATVYVLNKDGKPLMPTTRCGHIRHLLKEKKARVVRTNPFTIKLVYETDDVVQPLYLGIDPGRTNIGVAVVKVDGTAVFTAHLETRNKEIPKLMVKRKEHRQGRRHYRRCKRQRRAAAHGTLSKKCKKKDTAQGGNISKRAQTIGVFERNLPGCENSVLCIGIKNKEARFNNRVRPARWLTPTANQLLLTHVNFVKKICKFLPISDVVLEINKFAFMALDNPNIQKWQYQQGPLYQKGSLENAVSEQQDHHCLFCEKTIEHYHHVILRSENGSDTIANIVGLCAEHHDLIHKDDKLKEELAKKKQGLNKKYGALSVLNQIIPALTYELGSRFQGHFYVTTGKSTYDYRAAHSVSKDHWLDAYCIACSVLPDGCFDNTINSRVPYELKQFRRHDRQVCQQQNVKRKYYLDKKLVATNRHKAIKQETDSLEEYRNNGGTTDKLVVKEHKPTNKRLNRILPGALMAANGKLNVMVASRGLHNGIPDNYVFDNNSKAKPSKCTLINKNKGIVFVSNSVS

SEQ ID NO: 8360 - protein, 512 aa, unidentified; identical to SEQ ID NO: 3870
  REGION 1..512: note = Human gut metagenome

SEQ ID NO: 8361 - protein, 442 aa, unidentified; identical to SEQ ID NO: 3161
  REGION 1..442: note = Human gut metagenome

SEQ ID NO: 8362 - protein, 420 aa, unidentified; identical to SEQ ID NO: 2681
  REGION 1..420: note = Human gut metagenome

SEQ ID NO: 8363 - protein, 417 aa, unidentified
  REGION 1..417: note = Human gut metagenome
MPCSPAKARLLLKEKKAIVKRRTPFTIQLTIATGEAKQPVALGVDSGYKHIGLSATTEKAELYASEVELRQDITDLLSARLALRRSRRSRKTRYRAPRFNNRVASKRKGWLAPSVENRIAAHMSRVEAVMRVLPVTAITVETAAFDTQLLKNPDIAGAAYQQGEQLGFWNVREYVLFRDGHVCQHCRGKSKDPILNVHHIESRRTGGDAPNNLITLCETCHKAFHRGEIKLKVRRGKSFKAETFMGIMRWTLFERLKKAHPELRVRNTYGYLTKHKRISHGIAKSHCADAYCIADNLGAKRLEGFFFQKQTRKHNRQIHKLSILKGGLRKKNQAPYEVKGFRLFDKVICKGEEAFIFGRRTSGSFDVRRLDGTRISAGISCKKLRLREPRTTYLTEFRKEAALPPLHKCRGFRAEFR

SEQ ID NO: 8364 - protein, 469 aa, Burkholderia sp.; identical to SEQ ID NO: 4167

SEQ ID NO: 8365 - protein, 448 aa, Solobacterium sp.
MYWLIALNILKKKGSALMVYVLDINGQPLMPTTRHGKVRRLLNGHLAKVVKRCPFTIQLLYQSTKETQSTSLGVDAGSKHIGLAATTEKKVVYQEEFTPRNDVVKLLSARRILRHSRRNRKTRYRKPRFNNRVHSKHKGWLAPSVEIKIQEHITAIKRICQILPISEIHVETAEFDLQRLKALEDGNPLPVGTDYQLGEQYDFYNTRQYVLHRDGYTCQCCGTHDNNVKLHVHHIESRQTGGNAPNNLITLCEHCHSALHEGKLKLPKGKKRGKSYRDTAFMGIMRKTLLERLRKEIDIPVTETYGYITKYWREKVGLEKGHINDAVCISKHPYAEPLDIYYLTKAVRHHNRQIHKTKFSKGGIRKRNQAPYLVKGFRLFDKVLYQNREYFIFGRRATGYFDIRTLDGTKVNKGSISYKKLRIQDTANAYLKEVKAIPHMNKFTCVLA

SEQ ID NO: 8366 - protein, 478 aa, Pantoea sp.
VAVFVLDIHGKALMPCTEKRARLLLDRGRARVHRLLPMVVRLVDRQAGDCEFQPLRLKIDPGSKTTGLALVREVAAVDALTGEVQLGVAVLNLLELVHRGRQISEAMTARRQMRRRRRGNLRYRAPRFLNRGGDKTGRLAPSLQHRVDTTMTWVRSIQRWAPVRAISSELVRFDMQALQNPEIDGIEYQQGTLFGYELREYLLEKWGRQCAYCGARNLPLQIEHIRAKAHGGSNRASNLTLACACCNQKKAARSIEDFLAQDHKRLNAILAQAQKPLRDAAAVNATRWALANALQATGLPVELASGGRTKFNRSALGVPKTHALDAACVGQVHSIENWNSPTLALKAMGRGSYQRTRLDKFGFPRGYLMRSKRVHDFATGDMVRADVPKGLKAGVHTGRVAIRATGRFNIQLHQAGVSAVVQGIHYRHCRIVQRNDGYGYFLNPANHTKRDQVRPKASDASHPALYLPGMNAEVSRAL

SEQ ID NO: 8367 - protein, 413 aa, unidentified; identical to SEQ ID NO: 2636
  REGION 1..413: note = Human gut metagenome

SEQ ID NO: 8368 - protein, 419 aa, Moorena sp.
MQNYVFIVDTNKKPLNPIRPKRARNLLNSGKAAVLRMYPFTIILKTAVENPALRPVELKIDPGSKVTGLALVQDGEVIWGANLEHRGSEIKSDLQSRAATRRSRRNRKTRYREPRFSNRKRSKDWFPPSLMHRVLTIETWVKRICRYVPVTVIAMELVKFDTQALQSPETNGTAYQQGELFGYEVKEYLLAKWGRSCVYCGKENIQLEVEHIQPKSTGGSDRVSNLTLSCRCCNQKKGNKKIEEFLHKKPDLLKKIKAVAKTPMIDAAAVNSTRWKLYYTLNNIPELKITTGTGGRTKHNRIKNGFEKDHWIDASCVGETGMSVNLKTRQPIRIKANGVGSGRQMTRVNKFGFPCAKAKQCYQHGWRTGDIARFSDGRIGRVVVQSATRLEIRIGKQRISGTLNKFTKLHSLDGYNYAF

SEQ ID NO: 8369 - protein, 414 aa, unidentified
  REGION 1..414: note = Human gut metagenome
MPCSPAKARLLLKEKKAIVVRRTPFTIQLTIATGESKQPVSLGVDAGYKHVGLSASTEKAELYASEVELRPDVSDLLSARRTLRQSRRNRKTRYRAPRFDNRIRTKRKGWLAPSVENRINAHLSRIGAILRLLPVTKITVETASFDTQLLKNPDISGKEYQEGEQLGFWNVREYVLFRDGHACQHCHGRSKDPVLNVHHLESRRTGGDSPGNLLTLCETCHKALHRREIKLKTKRGQSFRAEAFMGIMRWEVLNRLKASHPELEVHNTYGYRTKHTRIVNGIDKSHCADAFCIAGNLGAKRLGEFFFQKQTRRNNRQIHKLSILKHGLRKRNQAPFEVKGFRLFDKVVCQGEEGFIFGRRSSGSFDVRKLDGTRISAGISYKKLRLLEKRRTYLKEIRKEEALPPLPEGRSLRA

SEQ ID NO: 8370 - protein, 456 aa, unidentified
  REGION 1..456: note = Human gut metagenome
MSTCVCVLSNNGERLMPTIRLGKVRHLLKDGKAKIIKHHPFTIQLLYDSKTNTQPIEICEDVGYNYIGISVKSESHEYVSAQYDTLQDEKEHHDDCRKYRRTRRNRLRYRKPRFDNRKRSEGWLAPSLEHKKQLNIRLIERYVSVIPITRATVEVGSFDTMLLQAIQKGESKPEGVDYQKGPRYNLATLREAVFYRDDYTCQVCGRKITDGAILHMHHMFYWKGRHGYQLDELVTACEKCHTPANHQKGGKLFGFGEDKEFANLSGAAFMNAVRWQIVDALHATYGKEFVTITYGAMTKEKRIILGIEKTHNNDAYAMGDYHPAHRCVFRHYQKRRRNNRVLEKFYDATYIDARTGNKAKGKELFNGRINRNHKKDSEDLHKYRSKKVSKGRRSIRRQRYAIQPYDTVRLESKTYITSGCHNKGTRLLIPVNGKSKSVAISKVQVVCHAGAWIQII

SEQ ID NO: 8371 - protein, 518 aa, Anaerostipes sp.; identical to SEQ ID NO: 3878

SEQ ID NO: 8372 - protein, 411 aa, unidentified
  REGION 1..411: note = Human gut metagenome
MVYVQDIDGKPMMPTTRHGKVRRLLKDNKAVVVNTCPFTIKLTYKTSDYKQEIVLGVDSGTKHVGLSATTKSKELYASEVILGSDVVDLLSTRRGLRRTRRSRLRYRKQRFNNRVKSKKDGWIAPSVRHKIDSHIRIISFVYPILPVSKLIVEVAKFDTQKIKNPEISGKEYQEGEQLGFWNVREYVLARDGHKCQHCKGKSKDPILNIHHIESRKIGGDSPSNLITLRETCHKEFHKGNIKLKVSGGKSLRDAAVMGIMKWKLYEELKSRYDNVSMTFGYITKYNRINHGIEKSHVSDAFVISRNFNSCRLGYYYKRKLVRRHNRQIHKMKILKGGIRKRNQAPFKVFGFKLFDKVMFQGEEYFIYARRLSGQFNIRDINGENKKDVSCKKLKYVSHGLVSVKTNLFLSQ

SEQ ID NO: 8373 - protein, 413 aa, unidentified; identical to SEQ ID NO: 2636
  REGION 1..413: note = Human gut metagenome

SEQ ID NO: 8374 - protein, 423 aa, Moorena sp.
MSNYVFLIDQNKVPLNPVHPAHARKLLDSGKAAVFRRYPFVLILKRPIENPNVYSLTLKIDPGSKFTGIALVTNQGDVVWAMELQHRGQQIKDALEHRLAMRRGRRNRNTRYRQARFLNRKRPNSWLAPSLRHRVLTVETWVKRLQKFAPIGSFAQELVKFDTQAIQNPEISGTEYQQGTLHGYECREYLLEKWNRQCAYCGVKDVSLEIEHIQPKSKGGSDRISNLCLACHKCNQRKGNKDIKDFLKGKSDVLNRVLRQAKAPLKDAASVNATRWALFSALKSFDLPVSTGTGGQTKFNRIRFELPKAHWIDAACVGVVGTIKLVTAKILKVKATGFGGRQRCQTNKFGYPQKHRPLRPILGFSTGDIVRADVPKGKYTGTFTARVCPMSHGYGEFVINKKRRSIKLDYLTPVHRKDGYDYA

SEQ ID NO: 8375 - protein, 462 aa, Halomonas sp.; identical to SEQ ID NO: 5295

SEQ ID NO: 8376 - protein, 470 aa, unidentified; identical to SEQ ID NO: 2825
  REGION 1..470: note = Human gut metagenome

SEQ ID NO: 8377 - protein, 456 aa, unidentified
  REGION 1..456: note = Human gut metagenome
MSTCVCVLSNSGERLMPTFRLGKVRRLLKDGKAKIVKHHPFTIQLLYDSKTNTQPIEICEDVGYNYIGISVKSESHEYVSAQYDTLQDEKEHHDDCRKYRRTRRNRLRYRKPRFDNRKRSEGWLAPSLEHKKQLNIRLVERYVSVIPITHATVEVGSFDTMLLQAIQKGESKPEGADYQKGPRYNLATLREAVFYRDNYTCQVCGRKIADGAILHMHHMFYWKGRHSNSLDELLTVCEKCHTPANHQKSGKLYGFGEDVKFANLSGAAFMNTVRWQIVNELYAAFGKPFVTFTYGAMTKEKRIALHLEKSHNNDAYAMGDYHPAHRCEFGHYQKRCRNNRVLEKFYDATYIDTRTGNKAKGKELFNGRISRNHKKDSEDLHKYRSKKVSKGRRSIRRQRYAIQPYDTVRLESKTYITSGCHNKGTRLLIPANGKSKSVAISKVQVVCHAGAWIQII

SEQ ID NO: 8378 - protein, 512 aa, unidentified
  REGION 1..512: note = Human gut metagenome
MSTVYVLNKDGKPLMPTTRCGHVRHLLKEQKARVVTSKPFTIQLLYEADDLVQSLYLGIDPGRTNIGVAVVKADGTAVFTAHLETRNKEIPKLMKKRKESRRARRTNGRRCRRQRRAKANGTISKKCVKHDTAQNSSVSKRAKEIGVIKRHLPGCEKDVLCIGIKNKEAKFSNRTRPEGWLTPTANQLLQTHINLVKKIQKFLPISDVVLEINKFAFMRLDNPNVQKWQYQQGPLYQKANLEETVSEMQEHHCLFCKKKIDHYHHVVPQHKNGSNTIDNIVGLCTQHHDLVHKDATWQKRLAKKKTGLNKKYGALSVLNQIIPALTKELSSLFLKHFFVTNGKSTYDYRAAHGVSKDHWLDAYCIACSVLPNDTCDKTINSRVPYELKQFRRHDRRALNNENMSRVYTFNGKMVATNRHKATEQTTDSLEEFRQRQPNDICNLKVKEHHPTYRNMNRNYPGSVFLVGNQVHVMQGIAGSKDGEATTYKDTNANSIAAGKCKFVAKNSGILFV

SEQ ID NO: 8379 - protein, 429 aa, Moorena sp.
MQIQANYVFLLNHDRTFLNMVHPARARELLTKQKAAVYRSYPFAIVLKQQILNPTLKPYRLKIDPGSKWTGFAIQCGEDIVFGMELKHRGLQISADLKQRASVRGSRRSRNLRYRAKRFNRKQPTGWLAPSLRHRVQTVETWIKRFMRYSPITEIEIEQVRFDTQLMQNPEISGVQYQAGELAGYEVKQYLLEKWEQKCSYCGATDTPLEVEHIQAKSKGGSNRVSNLALSCVPCNQKKGNRDIQDFLSGKPDLLQRILAQAKQPLKDVAAVNSTRFAIVRMAKELCDTVKCWTGGRTKFNRLRGLEKSHSIDAACVGKSGRSIQLRTTQPLIVTCFGHGTRQEIRVNKHGFPAVKNTRVRYKHVKTGDTVKFTLDTDRKNSRAGTYTARVKTPTAKSFEVLINQFRIGVSTIKNVKFIHRQDGYSYRF

SEQ ID NO: 8380 - protein, 456 aa, Halomonas sp.
MAVFVLDKQKQPLMPCSEKRARLLLQRGHAVVHKRYPLTLRLKDRIGGDTQPLRLGIDPGSKVTGLALMRESDGEQRHVLCLFELAHRGFQIRKALQQRAAFRRRRRSANLRYRAPRFNNRTKPKGWLAPSLQHRVDTVMAWVVRLRKLAPITALDQELVRFDTQKLENPEISGIEYQQGTLLGYEVREYLLEKWGRECAYCGDTETPLEIEHVVPRSRGGSNRVSNLTLSCHDCNTEKNRQSLADFFAASTGLRRRLKANGHTADARLDRVQRQLKQPLRDASAVNATRWALFNVLKATGLPVTVASGGRTKYNRQRLGIPKTHALDAACVGAFDTLNDWQVPTLTIKAMGRGSYQRTRLSKFGFPRGYLMRQKQVKGFQTGDMVKAIVPTGKKAGTHTGRVAVRKTGSFNIQTEQGAVQGISYKYCTVIQRGDGYGYHLTPTIHLIGGAEQAVA

SEQ ID NO: 8381 - protein, 521 aa, unidentified; identical to SEQ ID NO: 3983
  REGION 1..521: note = Human gut metagenome

SEQ ID NO: 8382 - protein, 451 aa, unidentified; identical to SEQ ID NO: 6972
  REGION 1..451: note = Human gut metagenome

SEQ ID NO: 8383 - protein, 413 aa, unidentified; identical to SEQ ID NO: 2636
  REGION 1..413: note = Human gut metagenome

SEQ ID NO: 8384 - protein, 427 aa, unidentified
  REGION 1..427: note = Human gut metagenome
MVYVISKRGKPLMPCENVVARLLLKDGKAKVKKRCPFTIQLTHDSTNYTQEVVLGQDTGSKHIGTACIGNDKVLYQSNVKLRDDIKLNMDSRRRARRNRRNRKTRYRESRFLNRKNSTKLNRLPPSVKHKVQAHIDEIEFCKKILPISKIVLEVSQFDTHLMKNPSLILEKVKHWGYQKGFNYGWASRREAILNRDGYTCQICGKKHTRLEVHHIVFRGRGGTDDENNLITLCEDCHTGVHSGKITLNKKPKKMNLKYATHMNIIRSQLLKAYPDAIETFGFVTKTNRENLNLPKDHFIDACVISSGGKEFKLNDTIYQKRRVSKGDYQLTRGVRGEQKIPVGKIQGFRKFDKVKYFGKEYFIKGRMSSGLAILMDIFNNKIDFGYMPRGYKTPKLSNCNRISARSSCLCISQKNHSQGEGANDDAI

SEQ ID NO: 8385 - protein, 473 aa, Actinoplanes sp.; identical to SEQ ID NO: 2808

SEQ ID NO: 8386 - protein, 457 aa, unidentified
  REGION 1..457: note = activated sludge metagenome
MPCSPKRARKLLEAGRARVHRPHPFTIRLVDRRLEDSTLQPLALKLDPGSKATGLALVRVERTVDADTGEIGDPVLHLRFLMELVHRGQAIRNAMQRRTMLRRGRRGRKTRYRAPRFDNRTRPEGWLPPSLQHRIETTMTWVARLRRLAPIAELTQELVRFDMQAIQNPEISGLEYQRGELFGYEVKAYLLEKFHRTCQYCDATGVPVEVEHIVPKARGGSNRVSNLTLACRPCNEAKDARDVHEFLAHDPARLARVLARANAPLRDAAAVNTTRWALANALQATGLPLEFASGGRTRFNRARLGIAKSHALDAACVGVVADLKDLRLTTLQVKCNGRGSRSRTRLDSYGFPRGCLMREKSIKGFRTGDRVRADVPKGRKAGVHIGRVAVRRTGSFNIQTAAGVVQGISHKHCKVLMRGDGYSYHSIATPQGKREQGRALRAALSRPAMNGEVGRAI

SEQ ID NO: 8387 - protein, 431 aa, unidentified
  REGION 1..431: note = Human gut metagenome
MNRVFILGKTGKTLMPCHPARARQLLHSKKARVKRLYPFTIQLTQRSNGYIQPVELKFDPGSKQTGVGLVLHGKNRLSAIYGAVLTHRGQEIKSNLDSRRMIRRARRNRKTRYRQARFLNRVRSKHKGWLAPSVQSRVDNIVEWSKRFIRLSPVGFITVESVKFDMQKMENAAVEGLEYQRGTLFDYEVKEYLLEKYNYSCVYCGVKNVPFEKEHVIPRSRGGSNRISNLVLSCHDCNQKKDNLPIEVFLKDNPVLLKKIKAQLKSSLKDAAAVNITRKQIIKELSDLNVPVLTGTGAETKYNRVSQKYPKEHYIDALCAGTTGAKVYIPYKLKPLLIKKERRNNRQMCLVDKYGFPRGKAKGPKIVHGFKTGDIVKAIVLKGKKKGIYKGKVAVRSSGSFNIKVKQGVVEGIGWKNCVMLHRFDGYSYTY

SEQ ID NO: 8388 - protein, 452 aa, Moorena sp.; identical to SEQ ID NO: 3322

SEQ ID NO: 8389 - protein, 419 aa, Moorena sp.; identical to SEQ ID NO: 2658

SEQ ID NO: 8390 - protein, 411 aa, unidentified; identical to SEQ ID NO: 3917
  REGION 1..411: note = Human gut metagenome

SEQ ID NO: 8391 - protein, 411 aa, Moorena sp.
MSNFVFVLDTEKRPLNPVQPGQARRLLKTEKAAVFRKYPFTIILKVAVTTTPESITLKIDPGSKTTGIALVQGGKVIFGAELTHRGQSIAASLDSRRSLRRSRRNRHTRYRQARFLNRTRKEGWLAPSLQHRVETTLTWVIKFIKRFDLQQLDNPEISGVEYQQGELQGYEVREYLLNKWNRKCAYCSIGNVHLQVEHIHPKAKGGTNRISNLCLACEKCNQKKGTQDVKQFLVKKPDILKHIFAQAKRPLKDAAAVNSTRWALFSRLKETLLPVLTGSGGLTKFNRTRLQLPKTHWLDAACVGQIESLFVLTSKPLLIKATGHGTRQMCRTDKFGFPSRYVPRNKFVRGFQTGDIAKAVVTSGKKIGEYVGRVAVRTTGSFNISASELVQGISYKYCKIVHKKDGYSYAF

SEQ ID NO: 8392 - protein, 415 aa, unidentified
  REGION 1..415: note = Human oral metagenome
VAEMPKKYSFVLDADGKQLDPTIEQNAWRLVRQKKARLVSKIPMIIQLNKVVENPNQDEIRCGIDDGTNHVGLALVQKCQTRNKVLFKGVIKQRKDVKHLMDVRRGYRRYRRYHKWYRPLRFNNRASSKRSGRLPPSIKQRKQAVIRVIDRLCKWVRISSYWLEDLKIDIRALTDGFKPYKWQYQESNRLDNNLRLAAIYRDNCQCMECGKKNTRFEVHHITPRSKGGADTIRNLITLCPECHFRTFGREEQFAELYYSRISSIGNIKGLADAQRVMQGKTWLRKQLTQRGKLFLTTGADTANKRDDWNIAKTHSNDAVCITNLKPENIDVEEWTIKPMRRKSKARTEQVSGFRHQDLITYTYRNGETHTGYVTALYPDKNQLNFQSPTKHCKRVNTLKTKLLWRFNKIYWLKCL

SEQ ID NO: 8393 - protein, 451 aa, unidentified; identical to SEQ ID NO: 2424
  REGION 1..451: note = Human gut metagenome

SEQ ID NO: 8394 - protein, 417 aa, unidentified
  REGION 1..417: note = Human gut metagenome
MPCSPAKARLLLKERKAIVKRRTPFTIQLTIATGEAKQPVTLGVDSGYKHIGLSATTEKAELYASQVELRQDITDLLSARLALRRSRRSRKTRYRAPRFNNRVASKHKGWLAPSVENRIAAHLSRVEAVMRVLPVTAITVETAAFDTQLLKNPDVAGAAYQQGEQLGFWNVREYVLFRDGHVCQHCRGKSKDPILNVHHIESRRTGGDAPNNLITLCETCHKAFHRGEIELKVKRGKSFKAETFMGIMRWTLFERLKKAHPELNVRNTYGYLTKHKRISHGIAKSHCADAYCIADNLGAKRLEGFFFQKQTRKHNRQIHKLSILKGGLRKKNQAPYEVKGFRLFDKVICKGEEAFIFGRRTSGSFDVRRLDGTRISAGISYKKLRLLEPRTTYLTEFRKEAALPPLHKCRGFRAEFL

SEQ ID NO: 8395 - protein, 431 aa, Acidithiobacillus sp.; identical to SEQ ID NO: 4478

SEQ ID NO: 8396 - protein, 413 aa, unidentified
  REGION 1..413: note = Human gut metagenome
MTSYSFVLDANGKQLAPTKEPKAWFLIRKKRAALVSKYPMVIQLKKKIQENEICKDEIRCGIDDGGLHVGIALVQKCKSKNKVVCKGTIEQRNDVKHLMEVRRNYRRYHRYHKRYRQARFDNRKSSKRKGRIAPSILQKRQATIRVINRLNKWINITNYWLEDVSIDIRVLTDGYKSYSWQYQKSNRLDENIRKATILRDGGKCMECGKSNCRLEVHHIKPRRRNGSNTLDNLITLCESCHQKTEGQEELYMDRYFSLLKSSDNKNLNYAQHVMIGKMWLRKQLSGLGVLYLTSGGDTANKRIDWNIEKSHTNDAVCITDLQPDTCDIKEWAIKPMRRQSKAKTDHVLGIHHRDLVEYTFKNGETHRGYVTALYPDQKAINFQSQTKHCKKVNARKCKLLWNYSKIYWFENAS

SEQ ID NO: 8397 - protein, 447 aa, unidentified
  REGION 1..447: note = Human gut metagenome
MYWLIALNISKKEVSCMVYVLDIDGQPLMPTTRHGKVRRLLNSHLAKVVKRCSFTIQLLYQSTKETQPVSLGVDAGSKHIGLAATTDKKVVYQEELVSHNDVVKLISARRILRRSRRNRKTRYRKARFNNRVHSKHKGWLAPSVEVKIQEHITTIKRICQILPISEIQVETAEFDLQRLKAMKEGKPLPVGTDYQLGEQYDFYNTRQYVLHRDGYTCQCCGTHDNNIKLHVHHIESRQTGGDAPNNLIILCEHCHKALHEGKLELPKGKKRGKSYRDATFMGVMRKTLLERLKKEIDVPVEGTYGYITKCWREKTGLEKSHINDAICISKHPYAKPLDTYYLTKAVRHHNRQIHKSNFSKGGIRKRNQAPYLVKGFRLFDKVLYQGKEYFIFGRRATGYFDIRTLDGTKVNKGSIKYKKLRIQDTAKAYLKEARAIPHVNKFTCVLA

SEQ ID NO: 8398 - protein, 496 aa, Streptomyces sp.; identical to SEQ ID NO: 4777

SEQ ID NO: 8399 - protein, 442 aa, unidentified; identical to SEQ ID NO: 3161
  REGION 1..442: note = Human gut metagenome

SEQ ID NO: 8400 - protein, 434 aa, Lactobacillus sp.; identical to SEQ ID NO: 6197

SEQ ID NO: 8401 - protein, 421 aa, unidentified; identical to SEQ ID NO: 6697
  REGION 1..421: note = Human gut metagenome

SEQ ID NO: 8402 - protein, 435 aa, unidentified; identical to SEQ ID NO: 7905
  REGION 1..435: note = Human gut metagenome

SEQ ID NO: 8403 - protein, 427 aa, Parasutterella sp.; identical to SEQ ID NO: 4733

SEQ ID NO: 8404 - protein, 442 aa, unidentified
  REGION 1..442: note = Human gut metagenome
MVTVQQSTHHLPFGRVFIRRNLFMVYVISQDGKPLMPCSDPIARLLLKQGKAKVKKRDPFTIKLTYETTNYTQGLTLGVDTGSGTIGTAVSKDNGDIVYMSEVVVRNDITDKMTQRAKYRRNRRNRKTRYRKARWLNRASSIKKDRFSPTMQSKLHSHVREIEYIQSILPVTEMVFETGQFDMHLMKNPSLANPKVRPWGYQKGANYGFENTKAMVLNRDNYTCQCCKGKHKDSKLEVHHIVFRSQGGSDEESNLLTLCHTCHKDLHSGKINPKLSGKVKGNLKYATQMNSIRKQLFRCYPNAIETFGYVTKVNRLHLGVAKEHYYDACTIATQGNAFNVKSNLYKKKCVSDGDFQKTKGIHSEQPIVTDKICGFRKFDKVRYFGNDYFIKGRMSTGYAILMDIDGNKIDFSTMPRGYKTPKLSNCKRITARSTVMTQVKVV

SEQ ID NO: 8405 - protein, 428 aa, Enterococcus sp.; identical to SEQ ID NO: 4335

SEQ ID NO: 8406 - protein, 442 aa, unidentified; identical to SEQ ID NO: 2903
  REGION 1..442: note = Human gut metagenome

SEQ ID NO: 8407 - protein, 423 aa, Moorena sp.; identical to SEQ ID NO: 3865

SEQ ID NO: 8408 - protein, 427 aa, Parasutterella sp.; identical to SEQ ID NO: 3787

SEQ ID NO: 8409 - protein, 465 aa, unidentified
  REGION 1..465: note = Human gut metagenome
MSTCVCVLSNNGERLMPTIRLGRVRHLLKDGKAKIIKHHPFTIQLLYDSKTNTQPIEICEDVGYNYIGISVKSQSHEYVSAQYDTLQDEKACHDSCRKLRCTRRNRLRYRKPRFDNRKRGEGWLAPSLKHKKELNVNVVKMYCTVMPITHATVEVGSFDTMLVKAIQEGKVIPEGADYQKGPRYNLATLREAVFYRDNYVCKICGRKATEGAILHMHHMFYWKGRHGNSLNELLTVCEKCHTPANHQKSGKLYGFGEKIKFADLSGAAFMNTVRWQIVNELYVAFGKPFVTITYGAMTKEKRIALQLEKSHNNDAYAMGEFHPNLRCMFEHYEKARRNNRILEKFYDSRYIDIRTGEIATGKELFNGRINRNHKKDSENLHKYRGKRTYAGHRALLRKKVNLNPGDLVSLNGENLIVHSTHTKKNGAVNVEFETPAKSGQKSASLKKLKIVKAANSIHPAWKKIS

SEQ ID NO: 8410 - protein, 231 aa, Moorena sp.; identical to SEQ ID NO: 2592

SEQ ID NO: 8411 - protein, 420 aa, unidentified; identical to SEQ ID NO: 6212
  REGION 1..420: note = Human gut metagenome

SEQ ID NO: 8412 - protein, 506 aa, unidentified
  REGION 1..506: note = Human gut metagenome
MVCVISNTGKRLMPTTEYKARKLMKKGRANIYQYEPFTIMILDREDGYTQSIELKCDIGDKHIGISVCSEKHEYVSVEVNPLKDEKERHNDQKKYRRTRRNRKRYRKPRFDNRKRKEGWLAPSLEHKVEIHKHWIEKYLKVIPIEKVILETGTFDTQRLKAINDGKTLPVGTDYQRGEQYDFYTMRDAVFSRDNYTCQCCKKSMNTNKNMVLRTHHIGYWKGDHSNRVSNLLTVCDKCHTQVNHQLSGKLYGLQPKSKKLPEAAFMNSVRYILVDEIYNLQEKLNVSFEVETTYGSMTKLKRKELGIEKSHVNDAYVIGAFHPKHRCKSEQYQKKRRNNRILSKFYDAKYIDSRDNSIKTGKELSSGRTNRNHKRDSEKLHQYRKQKVTKGKTTIRKNHYPFQPKDIVLYDGKKYKVNGTNNKGKSVQLYIEERVFIEDITLSKKKKNMQTEEIECGDKVIYEKKIYTIKKVIDTKHILLSGLISTKPENLKHLKYSNGYDKIEIV

SEQ ID NO: 8413 - protein, 501 aa, Nocardiopsis sp.
VLHQQLALESESADTPRNRDETGLGGRQASGAEDGRGEIPVASPGGESVTPNHQVREKGRESHPYVFVLDKHGTPLQPCTPARARKLLKKGRAVVHRHTPFVLRLKDRTAEDSEIDGVEVGVDPGSKHTGIAVFTAVAGERRGRYSVQLDHRGAQIRKKMEQRAAHRRRRRTSKLRYRAPRFLNRTRPEGWLAPSLHHRVATTMSWVGRLARWAPVRVVHVERVAFDTHAISVGEPLEGAEYQHGTLHGTEVREYLLAKWDRVCAYCGKQGVPLNIEHIRPRSCGGSDRVSNLAIACIPCNQAKSNRTVEDFLKGKPQLLTKILAQAKAPLRNAAAAQSTRWSLWRALDAMLPTHTDSGGRTKWNRGRCGLPKTHTLDALCVGKLGTVTEIVITALVAGCAGRGTHTRTRTDKHGFPRLRMPRQKQFFGYQTGDLVRAVVPTGKKTGVHTGRVAVRATGSFNITTAHGTVQGIRYKHVRLLQRADGYAYTTKREGVASSLV

SEQ ID NO: 8414 - protein, 430 aa, Vibrio sp.
MGSQPRCEAKLSGREEVEFAVCLKQSYTHNSKEIRAMLAYVLNKHGKPLMPCKAAKARKLLKNGMAKVIKRAPFTIKLLYGSSGHTQHVVAGMDTGSKYIGCAAIANGKVIYQSEVALRTDVSKKMQQRASMRKKGRLAPSLKSKLDSHLREKKQVEAILPISHWKVETASFDIHKITNPIVTGAGYQQGYYNVKAYVLQRDNYKCQSGHKTKHNAKLHVHHKVLRSQGGTDTPSNLIALCETCHNDLHAGKFDLKVKRSKTKHATEIGILKAQLKQCWDFEETFGYVTKFKREQVLGLPKTHYYDAVSICCENGELVQQAKHVLRKRHVASGDYQQIKGVRSEKRIPVGKLFGLKKHDFVQTPQGTGFVKGKRSSGYFALETILGDKVHASANIKKNTVRISARTTTLTQPMEAAIPLGTKVPRGIAVN

SEQ ID NO: 8415 - protein, 459 aa, Petrotoga sp.; identical to SEQ ID NO: 6495

SEQ ID NO: 8416 - protein, 506 aa, Halomonas sp.
MRAQGKTPKVLIAVGSAIVSRSRLSTFPRGDGAHASRHKTRKGIYTGENRMAVFVIDKQKQPLMPCSEKRARLLLGRGRAVVHKRYPFTIRLKDRVGGDMQPLRLGIDPGSKTTGLALMRETDTEQRHVLCLFGLVHRGYQIKKSLEQRAAFRRRRRSKNLRYRAPRFNNRTKPKGWLAPSLQHRVDTVMAWVNRLSRLAPITGICQELVRFDTQQLENPEISGVEYQQGTLLGYEVREYLLEKWGRECAYCGDTDTPLEVEHVVPRSRSGSNRVSNLTLSCHPCNQAKNSQALADFFAHDKGLHRRLKANGHTAAIRLERVQRQLKQSLRDASAVNATRWALFSALKTTDLPVAVSSGGRTKYNRQRLGIPKTHGLDAACVGAFDTLHAWQVPTLTIKAMGRGSYQRTRLNKYGFPRGFLMRQKQVRGFQTGDMVRALVPTGKKAGMHTGRVAVRKTGSFNIQTEHGAVQGVSHNYCTVIQRGDGYGYHHTPSINLTGGAGQAVA

SEQ ID NO: 8417 - protein, 552 aa, Streptomyces sp.
MTTFPVGEQTHQAVLPQQPALESVRADTPGSRDETAHGHPATARGTGREHGRGETDGRGTRPRRRHANSAATAAEAAENGSGDASPYNPSYAGGIGASRVFVLSKEGDPLMPCHPARARELLGKGRAVVARQVPFTIRLKDRTRAESEVDGVQLRIDPGSKGTGLALTDEKKEVDEQGAVVTVRRGLVAVELQHRGDQIHRSMQQRAGYRHRRRSANCRYRQPRSNNRTRPTGWLPPSMRHRVDTTYSQAARLCRYAPVTDIHIERVAFDTHAMSEGRALTASECQQGTLAGTEARAYLRAKWNNACVYCDATGVPLNIDHLRPRSRGGSDRISNLVLACAPCNQAKNNTSVEIFLADQPDRLAKIVRQLRTPLQDAAAMNATRWQLTGRLSDLGRPVHACSGGRTKWNRSAMGLPKTHTLDALSVGRLDHESGDAIVRYPARVVVVKATGRGSYARTTPDRFGFPRLRRSRTKQYFGYATGDLVRAKVPTGNWAGTWTGRIAVRANGQHSLTTSAGRFNVRHRNLRLMQRGDGYGYSSRPELAEATLRKTC

SEQ ID NO: 8418 - protein, 413 aa, unidentified; identical to SEQ ID NO: 2636
  REGION 1..413: note = Human gut metagenome

SEQ ID NO: 8419 - protein, 512 aa, unidentified; identical to SEQ ID NO: 3720
  REGION 1..512: note = Human gut metagenome

SEQ ID NO: 8420 - protein, 415 aa, Bacillus sp.; identical to SEQ ID NO: 6255

SEQ ID NO: 8421 - protein, 454 aa, unidentified
  REGION 1..454: note = Human gut metagenome
VSYTARYVPAYRIKHITKKEAPYMVYVLDIDGQPLMPTSRHRKVRKLLNSHLAKVVKRCPFTIQLLYQSTKETQPVSLGVDAGSRHIGLAATTEQKVVYQEELVPRNDVVKLLSARRALRSSRRSRKTRYRKPRFNNRVHSKHKGWLAPSVEVKIQEHITAIKRICQILPISDIHVETAEFDLQRLKAMEEGRPLPVGTDYQLGEQYDFYNTRQYVLHRDEYTCQCCGTHDNNVKLHVHHIESRQTGGDAPNNLITLCEHCHKLLHAGKTILPKGKKRGKSYRDATFMGIMRKTLLERLKKEIDVPVEGTYGYITKYWRERAGLEKSHINDAICISKHPYARPLETYYLTKAVRHHNRQIHKTKFSKGGIRKRNQAPYLVKGFRLFDKVLYQGESYFIFGRRITGYFDIRTLDGTKVNKGSTSYKKLRIQDTAEAYLTEVRAIPHMNEFTCVLA

SEQ ID NO: 8422 - protein, 415 aa, unidentified
  REGION 1..415: note = Human gut metagenome
MIYVRSKDGKALMPSERGGRIGYLLRHGKAHVVSRVPFVVQLDYESTTYTQEVSLGIDAGSKHIGVSASSEKKELLAAQVELRNDVVNLLSTRRELRRTRRNRKTRYRKVRFDNRKKKDGWLAPSVKQKVESHLKVIRLVRKLLPITKTTIEVAQFDAQKIKRPDIQGEEYQQGEQMGFWNVREYVLARDGHRCVHCKGKSKDHILNVHHLESRKTGGNSPSNLVTLCETCHKAYHRGEFELKIKRGNSLRDAAVMNIMRWVVYERAKEEFENVHLTYGYVTKHTRIENGIAKTHAADAFCIAKNVNAMRLSSFFMCRCVPRHTRVLHVANPKKGGIRRSTIASHKIGKSRFQRFDMVRWRGKECFIFGSTHGNVVLRKIDGVKVHETQAVSAKTIKFLKRIRNNILVEEIVSIS

SEQ ID NO: 8423 - protein, 494 aa, unidentified
  REGION 1..494: note = Human gut metagenome
MMMVYVQNKDGKPLMPTTRYCYVRLLLKEKKARVVCTTPFTIQLNYDTPDITQDLILGIDPGRTNIGVAVVKEDGSCVFSAHLETRNKDVPLLMQKRAAFRRNHRTLDRRRKRQRRAKAAGTTIAEGSVERLLSGYEKPIVCHHIRNKEARFNNRSRPAGWLTPTANHLLQTHINLIAKIAKVLPITKVVVELNRFAFMAMDNPNIRRWEYQQGPLYGLGPVEDAVYAQQDGHCLFCKKPIDHYHHVVPRHKGGSETLANRCGLCEKHHALVHKDKAWAEKLVTRKGGMNKKYHALSVLNQIIPHLMEYLGSETPYDVYATDGKSTKGFRVAKNVPKEHYTDAYCIACSILDADTKVSAPVEPFELKQFRRHDRQSCIRQMVDRKYLLDGKVVATNRHKSIEQKSDSLEEFREAYGDPAVSQLTVRPHLPQYKDMTRIMPGAVMDFDGIVGVFQGSEGFHNGKPDYYKSTKGAKVSTKRCALLAQNAGMVFIPA

SEQ ID NO: 8424 - protein, 512 aa, unidentified
  REGION 1..512: note = Human gut metagenome
MHTVYVLNKDGKPLMPTTRCGHVRRLLKEQKAQAVASKPFTIQLLYETDDVVQPLYLGIDPGRTNIGVAVVKTDGTAVFTAHLETRNKEIPKLMQGRKKARRARRTNGRRCRRQRRAKANGTISKKCVKQNTAQNGSVSKRAKEIGVIKRHLPGCEKEILCIGIKNKEAKFNNRTRPEGWLTPTANQLLQTHINLVKKIQKFLPISDVVLEANKFAFMQLDNPNIQKWQYQQGPLYQKANLKEAVSEMQEHHCLFCKKPIAHYHHVVPQSENGSNIIGNIVGLCTKHHDLVHKDAAWQEKLAKKKTGLNKKYGALSVLNQIIPALTKELSSLFPKHFFATDGKSTYDYRAAHGVSKDHWLDAYCIACSVLPKDVCDSSINSRVPYELKQFRRHDRRALHKENMKRMYTLNDKVVATNRHKAIKQTTDSLEEFRQRQPHDVCKLKVKEHHSEYRNPKRNFPGCVFLVGKHTHVMQGTRGSHNGKADGYYDTNGNSYSSGKCKFVVKNEGIVFT

SEQ ID NO: 8425 - protein, 515 aa, unidentified; identical to SEQ ID NO: 3339
  REGION 1..515: note = Human gut metagenome

SEQ ID NO: 8426 - protein, 413 aa, unidentified; identical to SEQ ID NO: 3476
  REGION 1..413: note = Human gut metagenome

SEQ ID NO: 8427 - protein, 445 aa, unidentified
  REGION 1..445: note = Microcoleaceae bacterium UBA11344
MSKIFVVDTNKNPLNPIHPGRARMLLQEGKAAVWKRYPFTIILKDVLPNPQIAPLRLKIDPGAKFTGLALVDDATGEVVWAAELEHRGFQIRDALTKRRQLRRGRRHRKTRYRQPRFDNRKRPTGWLPPSLQSRVENTVTWVRRLQKLALISDISQELVKFDTQLMENPDISGVAYQQGELAGYEVREFMLFKFNHTCMYCGAKDTRLEIEHLLPKSKGGSNRISNLGIACRNCHPKKGRQALREFLAQKPDLLQRILRQVKQQKADTAAVNSTRWALFNRLKETGLSVEVGTGGRTKFNRCRQNLPKTHWLDAACVGASTPLKLKVSGVVPLSIRAVGYGNRQMCQVDKFGFPKRGKEGKLIKRERQKNYFGFQTGDMVKAIVPTGKHAGTHVGKVTVRKSGAFDLTVAHVRLQSIRWKHCRAVHRFDGYSYASLSTNVEFLND

SEQ ID NO: 8428 - protein, 442 aa, unidentified; identical to SEQ ID NO: 3218
  REGION 1..442: note = Human gut metagenome

SEQ ID NO: 8429 - protein, 417 aa, unidentified
  REGION 1..417: note = Ga0307928_10010886
MLVYILNKQGKPLMPCKPTKAKHLLKEKKARVIQVEPFIIQLLFGSSNYRQPITLGVDPGYQNVGLSAISNKKEIYRSDVQLRIDIPKLLMERKMFRKNRRNRKTRYRKPRFDNRSKKNGRLVPSIKHKLDSHIRLVNAVEKILPITKIIIEVASFDSQKMQNPEISGVEYQQGTLHGYAVREYLLEKWSRECVYCGKRNVPLEIEHIVPKSRGGTDRVSNLTLSCHECNQEKSNMTAEEFGHPEIQKQAEKSLKATAFMNIVRWKLVNILNCKHTYGNITKRNRIKNDIVKSHSNDAFVIAGGTKDVDRSDVLIKQKQVRRNNRKLVKGQRGEISNKCPREVFGFRLFDKVVYNNKKYFVWGRRKGGSFLLKTLSGDKIERTYKKLQKVCGQVSFLVEIQFSSILNEGFLRGIINE

SEQ ID NO: 8430 - protein, 521 aa, Streptomyces sp.; identical to SEQ ID NO: 4093

SEQ ID NO: 8431 - protein, 462 aa, unidentified; identical to SEQ ID NO: 4177
  REGION 1..462: note = Human gut metagenome

SEQ ID NO: 8432 - protein, 512 aa, unidentified; identical to SEQ ID NO: 3870
  REGION 1..512: note = Human gut metagenome

SEQ ID NO: 8433 - protein, 424 aa, unidentified; identical to SEQ ID NO: 5907
  REGION 1..424: note = Human gut metagenome

SEQ ID NO: 8434 - protein, 529 aa, Moorena sp.
LEVAAADKPRVGTKRAATGELTLTLCCTTWSRGAAPQGARHQALKGNAPDVFRRHNKELGLAVCVLDRSGKALMPCSEKRARLLLARGRARVHRVVPFIIRLVDRRAHASRFQPLRIKVDPGSRTTGLALVRDTQLVDATSGEIQRGAAVLNLFELVHRGRQISEALSARRAMRRRRRGNLRYRAPRFLNRTRPAGWLAPSLEHRVATTMAWVNRLMDWTPVAALSSELVRFDMQALENPEIASVEYQQGTLAGYEVREYLLAKWGRRCAYCDQEHVPLQIEHILARASGGTNRISNLTLACACCNAKKAARPIEAFLARDPKRLAVILAQAKRPLKDAAAVNATRWALANALRATGLPVELASGGCTQFNRKQLGLPKTHALDAVCVGKVASVSVWYKPTLAVKCTGRGSYQRTRLDRYGFPRGYLTRSRRVHGFQTGDLVRAEVPTGKKAGRHTGRVAVRATGSFNIQVAGNVVQGIAHRHCRLIQRSDGYGYSRIALLKGDASDGTASLSALSLPAVNDGVSRAAG

SEQ ID NO: 8435 - protein, 475 aa, Blautia sp.; identical to SEQ ID NO: 4128

SEQ ID NO: 8436 - protein, 447 aa, unidentified
  REGION 1..447: note = Human gut metagenome
VPAYRIKHITKKEAPYMVYVLDIDGQPLMPTSRHRKVRKLLNSHLAKVVKRCPFTIQLLYQSTKETQPVSLGVDAGSRHIGLAATTEQKVVYQEELVPRNAVVKLLSARRALRSSRRSRKTRYRKPRFNNRVHSKHKGWLAPSVEVKIQEHITAIKRICQILPISDIHVETAEFDLQRLKAMEEGRPLPVGTDYQLGEQYDFYNTRQYVLHRDEYTCQCCGTHDNNVKLHVHHIESRQTGGDAPNNLITLCEHCHKLLHAGKTILPKGKKRGKSYRDATFMGIMRKTLLERLKKEIDVHVEGTYGYITKYWRERAGLEKSHINDAICISKHPYARPLETYYLTKAVRHHNRQIHKTKFSKGGIRKRNQAPYLVKGFRLFDKVLYQGESYFIFGRRITGYFDIRTLDGTKVNKGSTSYKKLRIQDTAEAYLTEVRAIPHMNEFTCVLA

SEQ ID NO: 8437 - protein, 552 aa, Streptomyces sp.; identical to SEQ ID NO: 4251

SEQ ID NO: 8438 - protein, 442 aa, unidentified; identical to SEQ ID NO: 3791
  REGION 1..442: note = Human gut metagenome

SEQ ID NO: 8439 - protein, 447 aa, Halolactibacillus sp.
LRVFVKSMRGSNLDPCKNQKARQLLKEKKAKIISYKPFTIQMLIPTGETTHESHVGIDLGAKYTGVAITQEDRVLAKGDIECRQNVKGLLETKKIYRRSRRSRKTRYRKCKFKHKTTRVFSNKKGKWVKKKLSFTSPRPKGWLPPSLESRTQNLFFWIDTFTSLLPKVKVHIEVGKFDVQKMKNPDIQGKAYQEGDTFGYHNIRYFVFARDNYTCQVCKKKGNILNMHHIIYRSHGGSDAPSNLISVCTDCHTSDNHKRGHILWHWMEKRKKVPTYKEPPFMNTLRIRTFRRYPDARIIYGSETTPRRKELHLEKTHYNDAIAISAIQQIKQNPNSMFYIKQFRKKKRSLHEATARKGRKNKNLTKKRNKKNTKEMKGIHLNNTVRIFGKVGFVSGFTTSGLYIKDTHNVYITKPGKTYKQVGFKDVTVKNHNNNWQFISHLAPDGA

SEQ ID NO: 8440 - protein, 471 aa, Moorena sp.
MTMVITLDKRKRPLGVCTERRARILLKKKRACVYKTFPFVIILKDKDTREVKPEGTYRVKIDPGAKYTGVAVVRNEDNAVVFFQQIEHRGDQVKKNLQTRNQCRRNRRSRETRYRKPKWGNKQLPEGKKPQYDSSRPDGWLPPSQRSIGDNVISWVIRLKRLFNITDCSFEAVRFDSQLMDNPDIEGVQYQQGTLAGTEIREYLLEKYAHTCQYCGGESNDSIMEWEHVIPRSRGGSDSVKNATLSCHTCNQEKGSMNPKEWLESINVKPKKTKLDKARLKGIKAVMDGKVQKNSNRYSAWAGILRRYEENGLFVIFGDVECSTGGKTKYNRTKLNLPKDHHYDALCVGTVPKEGFKDLTNGYFLYAEAMGRGTHFRGKINKCGIIIQKLGKTPKRIFGFQNGDIVTADVPKGKYKGKHTGRVSTRASGYFDIKTTEGERVTVNYKTCKFKQYGNGYRYSYKRTPLGDSSR

SEQ ID NO: 8441 - protein, 456 aa, unidentified; identical to SEQ ID NO: 5524
  REGION 1..456: note = Human gut metagenome

SEQ ID NO: 8442 - protein, 428 aa, unidentified
  REGION 1..428: note = Human gut metagenome
LKVFVLNMRGKPLMPCSPAKARHMLKAGKAFVVRRTPFTIKLTIATGETKQDVTLGVDAGARHVGISATTEKEEVFASEVALRQDITGLLADRLAFRRARRNRKTRYRAPRFNNRVRSKHKGWLAPSVENRIQAHISRIEAVCRLLPVTKIVIETASFDIQKIRNPEVEGTGYQQGDQLGFWNVREYVLFRDGHICQHCRGRSKDPILNVHHLESRKTGGDAPNNLITLCETCHKAYHAGKIKLKVKRGQSFRAEAFMGIMRWTLLDRVRKAHPGLPVENTYGYLTKHTRITHGLPKTHCVDAYCIAGNLKAVRRGVYLHQRQMRKHNRQIHKFTVLSKRLEDGTKIGYRKLNQSPYLVHGFRLFDKVRCLGQIGFIFGRRSSGYFDVQRLDGVKLSPSISWRKLTLLEKRSTYLTELRKQDGASSPV

SEQ ID NO: 8443 - protein, 521 aa, Streptomyces sp.; identical to SEQ ID NO: 4093

SEQ ID NO: 8444 - protein, 414 aa, unidentified
  REGION 1..414: note = Human gut metagenome
MPCSPAKARLLLKEKKAIVKRRTPFTIQLTIATGETKQPVSLGVDAGYKHVGLSASTEKAELYASEVELRQDITDLLSARRALRQSRRNRKTRYRAPRFDNRIRTKRKGWLAPSVENRINAHLSRIEAVLRLLPVTKITVETASFDMQLLKNPDISGKEYQEGEQLGFWNIREYVLCRDGHVCQHCYGRSKDPVLNVHHLESRRTGGDSPGNLVTLCETCHKALHRGEITLKAKRGQSFRAEAFMGIMRWEVLNRLKASHPELEVNNTYGYRTKHARIANDIAKSHCADAFCIAGNLGAERLGEFFFQKQTRRNNRQIHKLSILKGGIRKRNQAPFEVNGFRLFDKVACKGEEGFIFGRRSSGYFDVRKLDGTCISAGISYKKLHLLEKRRTYLTEIRKEKALPPLPGGSGLRA

SEQ ID NO: 8445 - protein, 452 aa, unidentified; identical to SEQ ID NO: 3325
  REGION 1..452: note = Ga0315285_10043415

SEQ ID NO: 8446 - protein, 494 aa, Moorena sp.
MTMVYVQNKDGKPLMPTTRYCYVRLLLKEKKARVVSRTPFTIQLNYDTPDITQDLILGSDPGRTNIGVAVVKEDGQCVFSAHMETRNKDVPLLMKKRAGFRRQHRTLDRRRKRQRRAKAAGTTIAEDFVERLLPGYEKPVVCHHIRNKKARFNNRKRPQGWLTPTANHLLQTHINLIAKVAKFLPITKVVVELNRFAFMAIDNPNIHRWEYQQGPLYGLGSVEDAVYAQQDGHCLFCKKPIDHYHHVVPRHKGGSETLANRCGLCEKHHDLVHKDKAWAGKLVTRKEGMNKKYHALSVLNQIIPHLLEYLGDETLYDIYATNGRSTKGFRIAKNVPKEHYTDAYCIACSILDTDIKVSAPVEPFELKQFRRHDRQACIRQMVDRKYLLDGKVVAANRHKAIEQKSDSLEEFREAYGDAAVSQLTVRPHSPQYKDMTRIMPGAVMDFDGTVGVFQGSEGFHNGKPDYYKSTKGKKVLTRRCALLAKNVGMVFIPA

SEQ ID NO: 8447 - protein, 420 aa, unidentified
  REGION 1..420: note = Human gut metagenome
MQYVYVLNKHGEPLMPCSPRKARLLLKQKKACVVKRTSFTIKLLYGSTGYKQPITLGVDAGSKHIGISATTEKHELYREEATPRNDVVDLLSARRAFRRSRRNRKTRYRAPRFNNRVHSKHEGWLAPSVEVKIREHITLIKRVCRILPVTLVRVETAEFDTQRLKAMLEGKPLPVGTDYQLGEMYDEYNVRQYVLKRDNYTCQCCGAHSTKTKDVKLHVHHIETRRTGGNAPNNLITLCTDCHKALHAGKVTLDGKKRGKPLKDAAFMGVMRKTLMERLRKKLKIPVQGTYGYITKYLREKNGIPKSHTNDARCISKNLLAIPCDTCYYTKAVRHHNRQLHKATILKGGIRKANQAPYIVKGYRLWDKISCNGTECFITGRRTSGYFALKKLDGTVVSNSTSYKKMRLLEVATNYITERR

SEQ ID NO: 8448 - protein, 456 aa, Halomonas sp.
MAIFVLDKKKQPLMPCSEKRARLLLARGRAVVHKRYPFTIRLKDRVGGSTQPLRLGIDPGSKTTGLALMREPDSQQRHVLCLFELIHRGFQIKKALQQRAAFRRRRRSANLRYRAPRFNNRTKPKGWLAPSLQHRVDTVTAWVNRLNRLAPVTAISQELVRFDTQKLDNPEINGVEYQQGTLLGYEVREYLLEKWGRECAYCGTGDTPLEIEHVVPRSCGGSNRVSNLTLSCHPCNQSKDALSLVDFFATDKGLKKRLKANGHTANARLERVQRQLKQPLRDASAVNATRWALFSALKTTDLPVAVSSGGRTKYNRQRLNIPKTHALDAACVGAFGKLYDWTVPTLTIKAMGRGSYQRTRLTKHGFPRGFLMRQKQVHGFQTGDMVRAIVPTGKKAGTHTGRVAIRKTGSFNIQAEYGAVQGISHKYCTLIQRSDGYGYYVTLFSNLTGEAGRAVA

SEQ ID NO: 8449 - protein, 427 aa, Nostoc sp.; identical to SEQ ID NO: 2670

SEQ ID NO: 8450 - protein, 408 aa, unidentified; identical to SEQ ID NO: 6548
  REGION 1..408: note = Human gut metagenome

SEQ ID NO: 8451 - protein, 466 aa, unidentified
  REGION 1..466: note = Human gut metagenome
LSIKPLINIGEGVIYSSICTGLSLQTYQKRKEVPCMVYVLDINGQPLMPTTRHGKVRRLLNSHLAKVVKRCPFTIQLLYQSTKEIQPVSLGVDAGSKHIGMAATTEKKVVYQEELSARNDVVKLLSARRTLRRTRRNRKTRYRKPRFNNRVHSKHKGWLAPSVEVKIQEHITTIKRICQILPISEIQVETAEFDLQRLKAMEEGRTPPVGTDYQLGEQYDFYNTRQYVLHRDGYTCQCCGTHDNNIKLHVHHIESRQTGGDAPNNLIILCEHCHKALHEGKLELPKGKKRGESYRDATFMGVMRKTLLERLKKEIDVPVEGTYGYITKYWRERAGLEKSHIHDAVCISQYPYAKPLDIYYLTKTVRHHNRQIHKSNFSKGGIRKRNQAPYLVKGFRLFDKVLYQGKEYFIFGRRATGYFDIRTLDGTKVNKGSVSYKKLRIQDTAKAYLKEARAIPHMNKFTCVLA

SEQ ID NO: 8452 - protein, 419 aa, unidentified
  REGION 1..419: note = Human gut metagenome
MVYVISQDGKPLMPCSDPIARLLLKQGKAKVKKREPFTIKLTYETTNHTQGLTLGVDTGSGTIGTAVSKDNGDIVYMSEVVVRNDITDKMTQRAKYRRNRRNRKTRYRKARWLNRASSIKKDRFSPTMQSKLHSHVREIEYIQSILPVTEMVFETGQFDMQLMKNPSLANPKVRPWGYQKGANYGFENTKAMVLNRDNYTCQCCKGKHKDSKLEVHHIVFRSQGGSDEESNLLTLCHTCHKDLHSGKINPKLSGKLKGNLKYATQMNSIRKQLFRFYPNAIETFGYVTKANRLHLGVDKEHYYDACTIATQGNAFNVKSNLYKKKCVSDGDFQKTKGIRSEQPIVTDKICGFRKFDKVRYFGNDYFIKGRMSTGYAILMDIDGNKIDFSTMPRGYKTPKLSNCKRITARSTVMTQVKVV

SEQ ID NO: 8453 - protein, 456 aa, unidentified; identical to SEQ ID NO: 5876
  REGION 1..456: note = Human gut metagenome

SEQ ID NO: 8454 - protein, 419 aa, unidentified
  REGION 1..419: note = Human oral metagenome
MVYVINKEGQALMPTERFGNVRRLLKNGLAHVVCRIPFTIQLDYETTNFVQPISLGVDAGSKHIGISATTSEKELYAADVELRNDIVDKLSTRREQRRTRRSRLRYRKARFNNRVSSKHKGWLAPSVENKIQTHLTVVEKIHKFLPITKIIVETASFDIQKIKNPSISSKEYQQGEQLGFFNVREYVLFRDNHTCQHCKGKSKDHILNVHHIESRKTGGNSPSNLITLCESCHKAYHYGNIDIKIKRGASFRDATFMGIARWTTYERLKNIYPNVSMTFGYITKNTRITNWLPKEHHVDARCISGNPKSKPLGYYFYQKKVRCQNRQIHKANFLKGGRKKLNQSPFLVKGYRLFDLVEYQNNLYYIFGRRDSGFFDIRKLDGTKVNKGSISCKHIRLVNIRKSILTERRNSCSIPPTKL

SEQ ID NO: 8455 - protein, 413 aa, unidentified; identical to SEQ ID NO: 7541
  REGION 1..413: note = Human gut metagenome

SEQ ID NO: 8456 - protein, 424 aa, unidentified
  REGION 1..424: note = coral metagenome
MFVFVLNSSRKPLNPTHPARARKLLKTGKAAVFKRYPFTIILKEEVAEPNNQQLRIKIDPGAKTTGIAILRNESVLWGAELTHRGDQIRSALTSRRQLRRSRRNRKTRYRQPRFNNRCRQEGWLPPSLISRVENILTWVKRLWLLSPIAHISTELVRFDTQLIQNPEISGIEYQQGTLAGYELREYMLEKWHRRCVYCGATDTKLEIEHIVAKSKGGSNRLSNLTLSCRKCNQKKGNKPIEQFLENNPLLLKSILSQAKRSLADTAAVNATRWKLFNGLKELGIPVETGTGGRTKYNRCRQNLPKTHWLDAANVGYSTPDTLKILVSRPMRIKATGHGNRQMCGTNAFGFPIRHRSNTKKHFGFQTGDIVKAVVTKGKKVGSYIGRVLCRATGSFDITTATGRVAGISHKYCSFVHRSDGYSYQ

SEQ ID NO: 8457 - protein, 465 aa, unidentified; identical to SEQ ID NO: 8068
  REGION 1..465: note = Human gut metagenome

SEQ ID NO: 8458 - protein, 430 aa, Moorena sp.; identical to SEQ ID NO: 7477

SEQ ID NO: 8459 - protein, 424 aa, Moorena sp.; identical to SEQ ID NO: 7441

SEQ ID NO: 8460 - protein, 443 aa, Ktedonobacter sp.; identical to SEQ ID NO: 5715

SEQ ID NO: 8461 - protein, 439 aa, Aeromonas sp.; identical to SEQ ID NO: 5240

SEQ ID NO: 8462 - protein, 411 aa, unidentified
  REGION 1..411: note = Human gut metagenome
MVYVQDIDGKPMMPTTRHGKVRRLLKDNKAVVVNTCPFTIKLTYKTSDYKQEIVLGVDSGTKHVGLSATTKSKELYASEVILRSDVVDLLSTRRGLRRTRRSRLRYRKQRFNNRVKSKKDGWIAPSVRHKIDSHVRIISFVYSILPVSKLIVEVAQFDTQKIKNPEISGKEYQEGEQLGFWNVREYVLARDGHKCQHCKGKSKDPILNIHHIESRKIGGDSPSNLITLCETCHKEFHKGNIKLKVSRGKSLRDAAVMGIMKWKLYEELKFRYDNVSMTFGYITKYNRINHGIEKSHVSDAFVISRNFNSCRLGYYYKRKLVRRHNRQIHKMKILKGGIRKRNQAPFKVFGFRLFDKVMFQGEEHFIYARRLSGQFNIRDINGENKKDVSCKKLKYVSHGLVSVKTNLFLSQ

SEQ ID NO: 8463 - protein, 518 aa, unidentified; identical to SEQ ID NO: 3878
  REGION 1..518: note = Human gut metagenome

SEQ ID NO: 8464 - protein, 457 aa, unidentified
  REGION 1..457: note = Human gut metagenome
VWLTQTTCDIGEGFQLSAKRERLLFSRQIFRKEHGIMQYVYVLNKHGKPLMPCSPGKARLLLKEGKARVVKRTPFVIKLLHGSAGYKQPVALGVDAGSRHVGLSACTEGRELYKEELSPRNDVVELLSVRRQYRRSRRNRKTRYRAPRFNNRVHSKHKGWLAPSVEVKIQEHITVIKRVCRILPIVLVRVETAEFDTQRLKAMLEGKPLPVGSDYQLGEMYDEYNVRQYVLKRDNYTCQCCGAHPAEKKPVRLHVHHIESRHVGGNAPNNLITLCAECHKALHEGKITLGNGKKRGKPLRDAAFMGIMRNTLLARLKDELNIPVKQTYGYITKLLREENHVEKSHTNDARCIAKAPNAKPCDTMFRTRALRHHNRQIHKAKILKGGTRKKNQAPYLVKGFRLWDKVRYNGEEYFITGRRTSGYFAIKKYDGTVISNSASYKKLTLLEAATNYITERS

SEQ ID NO: 8465 - protein, 384 aa, unidentified
  REGION 1..384: note = Human gut metagenome
LRVFILNKRGKPLMPCSPAKARLLLKEKKAIVVRRTPFTIQLTIATGEAKQPVSLGVDAGYKHVGLSASTEKAELYASEVELRQDVSDLLSARRALRQSRRSRNTRYRAPRFDNRIRTKRKGWLAPSVENRINAHLSRIETVIRLLPVTKISVETTSFDMQLLKNPDISGKEYQEGEQLGFGNIREYVLCRDGHVCQHCYGGSKDPVLNVHHLESRRTGGDSPDNLLTLCETCHKALHRGEITLKTKRGQSFRAETFMGIMRWEVLNRLKASHSELKVHNTYGYLTKHARIENGIAKSHGADAFCIAGNLGAERLGEFFFQKQTRRNNRQIHKLSILKGALRKRNQAPFEVKGFRLFDKVACQGEEGFIFGRRSSGFFDVRKLD

SEQ ID NO: 8466 - protein, 413 aa, unidentified
  REGION 1..413: note = Human gut metagenome
MPCSPAKARLLLKEKKAIVARRTPFTIQLTIATGEAKQPVSLGVDAGYKHVGLSASTEKAELYASEVELRQDVSDLLSARRALRQSRRSRNTRYRAPRFDNRIRTKRKGWLAPTVENRINVHLSRIETVLRLLPVTKITVETASFDTQLLKNPDIAGKEYQEGEQLGFWNVREYVLFRDGHVCQHCHGRSKDPVLNVHHLESRRTGGDSPGNLITLCETCHKALHRGEIKLKAKRGRSFRAETFMGIMRWGVLNRLKASHPKLEVHNTYGYRTKHARIANGIAKSHCADAFCIAGNFGAKRLGEFFQKQTRRNNRQIHKLSILKGGIRKRNQAPFEVKGFRLFDKVACQGEEGFIFGRRSTGYFDVRKLDGTCISAGISYKKLHLLEKRRTYLTEIRKEEALPPPPEGRGLRA

SEQ ID NO: 8467 - protein, 442 aa, Lactobacillus sp.; identical to SEQ ID NO: 5193

SEQ ID NO: 8468 - protein, 431 aa, Aphanizomenon sp.
MEGLMSKTLVLDTNKRPLYPIHPAQARQLLKNKKAAVFRQFPFTIILKESRPDSPVSPLRLKIDPGAKFTGMALVNDSTGEVVFAAELKHRGFVIRDALTSRRQLRRSRRARKTRYRQPRFLNRTRPNGWLAPSLQSRVENIKTWVKKLRKFAPIEAISQELVRFDMQLMANPDIQGKEYQQGTLAGYETKEYLLEKWNRQCAYCGVKDVPFQVEHIHPRAKGGSNSITNLTLSCEKCNTKKGTKDIKDFLKKDPTRLQKILKQAKRPLADAAAVNATRWALFRVLKDTGLPVETGSGGLTKFNRSQQNLAKTHWIDAACVGQSTPILTIKGIKPLLIAANGHGSRQSCRTDKFGFPSRYVPRFKFVKGFQTGDIVKAVVTAGKKVGEYFGRVAIRTSGTFNISTNSRLVQGISHKYCLATHKKDGYSYAN

SEQ ID NO: 8469 - protein, 417 aa, unidentified; identical to SEQ ID NO: 8087
  REGION 1..417: note = Human gut metagenome

SEQ ID NO: 8470 - protein, 408 aa, unidentified; identical to SEQ ID NO: 3257
  REGION 1..408: note = Human gut metagenome

SEQ ID NO: 8471 - protein, 430 aa, unidentified
  REGION 1..430: note = Human gut metagenome
MPKVYVLNRHGRPLMPCTPAKARHLLDAGKAKVRHRTPFTIQLLYGSTGYTQEVILGVDAGSKTIGLSAATETEELFSAEVKPRNDVVELMSARRQFRRARRNRTTRYRKPRFDNRVRSKHKGWLAPSVEVKIQEHMTAIRRACAILPVSKVVVETAEFDLQLLKAVAEGKPVPQGEDYQKGEMYGHYNVRQYVLWRDSYTCCICGVHGSVRKGVPLHVHHLESRRVGGDAPDNLVTLCTACHDKLHKGIIMAADIKKRKRRSTRDATFMGIMRMTLLRRLREQLPVPVVETRGYITKATRENLLVLPKSHTNDALAIAHGPQGFRAEYLPNIRQADRLYTIRPVRHHNRQLHKATILKGGVRKANQAEKYICGFRLYDKVLYNGIECFVWGRRTSGSFLLRQLNGEKVKDSVSYKHLKLLERSQSYLVA

SEQ ID NO: 8472 - protein, 420 aa, unidentified
  REGION 1..420: note = Human gut metagenome
MQYVYVLNKHGEPLMPCSPGKARLLLKQQKAHVIKRTPFTIKLLYGSTGYKQPITLGVDAGSKHVGLSASTEKRELYREEFTPRNDVVDLLSTRKQNRRSRRNRKTRYRPPRFDNRVHSKHKGWLAPSVEVKIQEHITVIKRICRILPITLVRVETAEFDTQRLKAMLAGKPIPVGTDYQLGEMYDKYNVRQYVLKRDNYTCQCCGAHTTAKKAVKLHVHHLESRKMGGNAPGNLITLCITCHDALHKGKVSLDNKKRGKPMRDAAFMGIMRRTLMSRLREELPITVQGTYGYITKMQREQNDIKKSHVNDARCISKHPLAEPCSVCYRTKAIRHHNRQTHKANFSKGGIRKRSQMPYVVEGYRLWDKVLYKGQECFVSGRRTSGSFTLKKLDGTRISKGVTFKKLRLLEPATNYLIERM

SEQ ID NO: 8473 - protein, 250 aa, unidentified
  REGION 1..250: note = Human gut metagenome
KGEMYGHYNVRQYVLWRDGYTCQCCGAHATKKKEVRLHVHHLESRKVGGDAPDNQVTLCESCHEKLHKGLIAEKDFKKRKRRSTRDATFMGIMRKTLMQRLCSELPIPVVKTRGYITKATREKLLVLPKSHTNDALAIAQGKRGFNVGYLPEIAQIDKIYTIRPVRHHNRQLHKATILKGGIRKSNQTEKYVFGYRLFDKVQFNGQDCFIWGRRTTGIFTIKTINGKMIKDGISFKKLKPVEKSTSYLIA

SEQ ID NO: 8474 - protein, 415 aa, unidentified
  REGION 1..415: note = Human gut metagenome
MVYVVANDGQPLMPTERHGKVCRMLRSGMAKVIKKCPFTIQLQYESERNVQPVSLGVDAGSKHIGISATTKAKVLYESDVELRDDIVKLLATRRQLRRSRRSRKTRYRPARFDNRKRKEGWLAPSIRQKIGSHLTVVANVCKILPINQIIVETASFDIQKIKNPEIQGIEYQQGEQMDFWNVREYVFFRDGHTCQCCKGRSKDKILNVHHIESRKTGGNAPNNLITLCETCHKGYHNGTVILPKNIKRGMQFKDAAFMGIMRWAFYNALKEQYEPAVPVSMTYGYLTKNTRIEHGLLKEHYIDARCISGNPDAVSDGTYYYQKKVRCHNRQIHKQTILKGGIRKSNQAEYLVKGYRLFDKVRYQGREYFIFGRRKTGFFDIRTLSGEKVNKGSISVKKLTFADTRKNYLTERRTA

SEQ ID NO: 8475 - protein, 417 aa, unidentified
  REGION 1..417: note = Human gut metagenome
MPCSPAKARLLLKEKKAIVKRRTPFTIQLTIATGEAKQPVALGVDSGYKHIGLSATTEKAELYASEVELRQDITDLLSARLALRRSRRSRKTRYRAPRFDNRVASKREGWLAPSVENRIAAHMSRVEAVMRVLPVTAITVETAAFDTQLLKNPDIAGEAYQQGEQLGFWNVREYVLFRDGHVCQHCRGKSKDPILNVHHIESRRTGGDAPNNLITLCETCHKAFHRGEIKLKVKRGKSFKAETFMGIMRWTLFERLKKAHPELRVRNTYGYLTKHKRISHGIAKSHCADAYCIADNLGAKRLEGFFFQKQTRKHNRQIHKLSILKGGLRKKNQAPYEVKGFRLFDKVICKGEEAFIFGRRTSGSFDVRRLDGTRISAGINYKKLRLLEPRTTYLAEFRKEAAHPPLHECRGFRAEFL

SEQ ID NO: 8476 - protein, 420 aa, unidentified; identical to SEQ ID NO: 2681
  REGION 1..420: note = Human gut metagenome

SEQ ID NO: 8477 - protein, 482 aa, unidentified
  REGION 1..482: note = Human gut metagenome
LVWNVQAPWDVHPSPTLCGLCLKVLRGRNGDADKKPIPTLTKDENRPSGRTTGLRAEQAEPAGIRKGDTLKVFVLNMRGKPLMPCSPAKARHMLKAGKAVVVRRTPFTIKLTIATGETKQDVTLGVDAGARHVGISATTEKEEVFASEVALRQDITGLLADRLAFRRARRNRKTRYRAPRFNNRVRSKHKGWLAPSVENRIQAHMSRIEAVCRLLPVTKIVIETASFDIQKIRNPEVEGTGYQQGDQLGFWNVREYVLFRDGHICQHCRGRSKDPILNVHHLESRKTGGDAPNNLITLCETCHKAYHAGKIKLKVKRGQSFRAEAFMGIMRWTLLDRVRKTHPKLPVENTYGYLTKHKRIALGLPKTHCADAFCIAGNLKALRRGDFLFQQQTRKHNRQIHKCSILKGGVRTLNQAPFLVKGFRLFDKVRIGGQIGFVFGRRVRGTFNIRRLDKTVIGTDINCKKLSLLETRKTFLTELRKE

SEQ ID NO: 8478 - protein, 470 aa, Sulfobacillus sp.; identical to SEQ ID NO: 2748

SEQ ID NO: 8479 - protein, 465 aa, unidentified; identical to SEQ ID NO: 3070
  REGION 1..465: note = Human gut metagenome

SEQ ID NO: 8480 - protein, 529 aa, Moorena sp.
LEVAAADKPRVGTKRAATGELTLTLCCTTWSRGAAPQGARHQALKGNAPDVFRRHNKELGLAVCVLDRSGKALMPCSEKRARLLLARGRARVHRVVPFIIRLVDRRAHASRFQPLRIKVDPGSRTTGLALVRDTQLVDATSGEIQRGAAVLNLFELVHRGRQISEALSARRAMRRRRRGNLRYRAPRFLNRTRPAGWLAPSLEHRVATTMAWVNRLMDWTPVAALSSELVRFDMQALENPEIASVEYQQGTLAGYEVREYLLAKWGRRCAYCDQEHVPLQIEHILARASGGTNRISNLTLACACCNAKKAARPIEAFLARDPKRLAVILAQAKRPLKDAAAVNATRWALANALRATGLPVELASGGCTQFNRKQLGLPKTHALDAVCVGKVASVSVWYKPTLAAKCTGRGSYQRTRLDRYGFPRGYLTRSRRVHGFQTGDLVRAEVPTGKKAGRHTGRVAVRATGSFNIQVAGNVVQGIAHRHCRLIQRSDGYGYSRIALLKGDASDGTASLSALSLPAVNDGVSRAAG

SEQ ID NO: 8481 - protein, 372 aa, Moorena sp.
MMGNYHVRICRRVGAGDSPLDSIGIALVNNRDEVIWGMELHHRGQQIKDSLETRKAVRRGRRARHTRYRQTRFLNRTRPEGWLNAPSLRHRVLTIETWVKRLMKFAPIVTLTQELVKFDLQAMQNPEIFGTEYQQGTLHGYECREYLLEKWNRQCAYCGIKDVPLEVEHIQPKSKGGSDRISNLCLACHKCNQNKGNKDVKEFLKGKPEVLSRILKQAKSPLKDAAAVNSTRWALLKVLGRFGLKVYANSGARTKFNRIKLGLPKAHWIDAACVDFVEKLIILTTKILTVKSTGKGTRRLCRINKFGFPCSNPRTSYEHGWNTGDVATGKGVTGRVVVQSKTRLEIRIDGKRIGAQLSDFKKLHCKDGYSYA

SEQ ID NO: 8482 - protein, 418 aa, unidentified
  REGION 1..418: note = Human gut metagenome
MVYVLSKTGQPLMPTENHAKVRVLLKQQKAKIVHGCPFTIQLLYDSTDYTQPVSLGIDAGSRHIGVSATTETKVLYEADVTLRNDIVDLLSTRREARRTRRSRKTRYRKPRFNNRTRKDGWLAPSVRQKVDTHLTTVRKVTEILPVNSITVETASFDIQKIKNPDIAGTGYQQGEQLDFWNVREYVLFRDGHKIQCCKGKSKDPVLNVHHIESRKTGGNAPNNLITLCETCHKGYHNGTVSLPKNIRRGMKFNDAAFMGIMRWAFFNRVKETYEPLGIMVKMTYGYITKNTRIEHDLPKDHFIDARCISGHPDATSDGTVFYQKKVRCHNRQIHKQKILKGGIRKRNQAPYLVKGFRLFEKVKYHGKQYFIFGRRSSGFFDIRTLDGTKVNKGSVSCKKIRSLDMPRSYLTEERKAIV

SEQ ID NO: 8483 - protein, 416 aa, unidentified
  REGION 1..416: note = Human gut metagenome
MVYVLDKNGQPLMPTDRHRKVRLMLQSGQAKVIKRCPFTIQLNYDSGHQTQEISLGIDAGSKHIGVSATTKIKVLYEADVELRNDIVNLLSSRREFRRGRRNRKTRYRQAKFNNRRRGNGWLAPSIRQKIGTHLTVVENICKILPISRIMVETASFDIQKIKNPDIQGAEYQQGDQLGFWNVREYVLFRDGHICQCCKGKSKDKILNVHHIESRKTGGNAPNNLITLCETCHTGYHKGTVQLPKAIKRGMRFKDAAFMGIMRWAFYEALKQQYEPVGTPVHNTYGYITKHTRIAYNLPKEHYVDARCISGNPEASSNGEYYYQKKVRCHNRQIHKLTVLKGGIRKQNQATYLVKGYRLFDKVSYQGKGYFVFGRRQSGFFDIRTLSGEKVNKGSLSCKKLKFIATRTYYLTERRAV

SEQ ID NO: 8484 - protein, 440 aa, Clostridium sp.
VPLMVYVLNKEGKPLMPTNRYAKIRVLLKSKKAVVVNSKPFTIKLLYNTEDFVQPITLGIDSGYLNIGLSAITKEKELISAEVKLLKGMSERLKEKAMHRRQRRSRLRYRKPRFDNRKRSKDWLAPSIQHKYDSHIRFIDKLKKLLPITNIIIEVANFDTHKLKDPSIEGADYQNGEQKDFFNLREYILHRDGHKCQNPNCKNKNAESILQVHHIGFWKQDRSDRPGNLITLCNKCHTPKNHKKNGFLYGWQPKVKSFKEATFMSMIRWRLVNTLDCNHTYGYITKSNRIALKLEKTHYNDAFCIAGGSSQSRVNPLIFEQIKRNSRSLEKFYDAKVIDIRTNTKVSGLELFNGRRTRNKNLNSENLRKYRGVKVSKGQRRIRTKRYFYQPGDLVKYEDKVYIVKGTQNKGKYIALKELKKVPKVELLTPYKFRKGLVCV

SEQ ID NO: 8485 - protein, 431 aa, unidentified; identical to SEQ ID NO: 7729
  REGION 1..431: note = Human gut metagenome

SEQ ID NO: 8486 - protein, 423 aa, Moorena sp.
MSNYVFLIDSNQTPLNPVHPKQARKLLDAGTASVFRRYPFTLILKRVIDNPNVYPLTLKIDPGSKFTGIALVTNQGNVIWGMELQHRGQQIKNALLARKAVRRGRRNRNTRYRLARFLNRKRPNGWLAPSLKHRILTTQTWVKRIQKFASIGSIVQELVKFDTQVIQNPEISGIEYQQGTLKGYECRQYLLEKWNRQCAYCGVQDVRLEIEHIQPKSKGGSDRISNLCLACHKCNQRKGNKDIKDFLKGKSELLNRVLKQAKTPLKDAASVNSTRWALFNTLKSFGLPLSTGTGGQTKFNRMQFGLPKAHWIDAACVGSVQTIKLITTRILKVKARGFGGRQRCQTDKFGYPQKHRPLRPILGFSTGDIVRADVPKGKYAGTFTARVCPMSHGYGEFVIDNKRRSIKLEYLTPVHQKDGYDYP

SEQ ID NO: 8487 - protein, 410 aa, Moorena sp.
MTKEFAFVLDEKGKQLSPTSVNNAWYLIRKKRAKLIQKYPMVIQLNKTVDNEDIDESTFHCGIDDGSKHVGIAIVQECKTKNKVVFKGQIEQRQDVKHLMDIRRGYRRYRRSHKGYRPARFDNRRNSKRIERIAPSIKQKRDAVLRVINKLKQWIRISKITLEDVMIDIRVLTEGKKLYSWQYQQSNRLDENLRKAVLLRDDFTCMECDKTNCVLEVHHIVPRRLKGADSINNLITLCSKCHDKTEGVEEQFIERYQSMMKGKNVRTDYAQHVMQGKNYLRQEVSKIAELELTTGGDTANKRIDWGIEKSHSNDAIIITGLKVDDVNVKEWLIRPMRRKSKTKAEEVNGFKHRDLIEYVKRNGEKYIGWITAMYPEKKQCNITTVDGKVLKRYGLKNCRLLWRFNKIYWL

SEQ ID NO: 8488 - protein, 480 aa, unidentified; identical to SEQ ID NO: 2726
  REGION 1..480: note = Human gut metagenome

SEQ ID NO: 8489 - protein, 362 aa, unidentified
  REGION 1..362: note = Human gut metagenome
LKGLSRTCGSLRFKEKTLKVFVINKRGKPLMPCKPAKARHLLRDGKARVVRRTPFTIQLTIATGENVQPIHLGVDAGSKHIGLSATTEKEELFSSEVELRKDITDLLSSRREMRRARRNRKTRYRAPRFDNRVHAKNKGWLAPTLENKISAHLSRIKAIRAILPVSRITIEVASFDIQKIKNPEIEGEQYQQGEQLGFWNVREYVLFRDGRKCCHCHGKSKDPILNVHHIESRKTGGDAPNNLITLCETCHKAYHAGKIQLTAKRGEKFTDATHMGIMRWELFKRAKEANLGIPVKATFGYITKVRRIQFGIAKTHCADAFCIAGNLNAKRLGEYLYQKQTRKHNRQIHKMAILKGGYRKRI

SEQ ID NO: 8490 - protein, 346 aa, unidentified; identical to SEQ ID NO: 4983
  REGION 1..346: note = Human gut metagenome

SEQ ID NO: 8491 - protein, 472 aa, unidentified
  REGION 1..472: note = Human gut metagenome
VVGNRLLSIKPLINIGKGVIYSSICTDLSLQTYQKRKEVPCMVYVLDINGQPLMPTTRHGKVRRLLNSHLAKVVKRCPFTIQLLYQSTKEIQPVSLGVDAGSKHIGMAATTEKKVVYQEELSPRNDVVKLLSARRTLRRTRRNRKTRYRKPRFNNRVHSKHKGWLAPSVEVKIQEHITAIKRICQILPISDIHVETAEFDLQRLKAMEEGRPLPVGTDYQLGEQYDFYNTRQYVLHRDEYTCQCCGTHDNNVKLHVHHIESRQTGGDAPNNLIILCEHCHKALHEGKLELPKGKKRGKSYRDATFMGVMRKTLLERLKKEIDVPVEGTYGYITKYWRERAGLEKSHINDAICISKHPYARPLETYYLTKAVRHHNRQIHKTKFSKGGIRKRNQAPYLVKGFRLFDKVLYQGKSYFIFGRRITGYFDIRTLDGTKVNKGSTSYKKLRIQDTAEAYLTEVRAIPHMNEFTCVLA

SEQ ID NO: 8492 - protein, 421 aa, unidentified
  REGION 1..421: note = Human gut metagenome
MQYVYVLNKHGKPLMPCSPGKARLLLKEGKARVVKRTPFVIKLLHGSAGYKQPVALGVDAGSRHVGLSACTEGRELYKEELSPRNDVVELLSVRRQYRRSCRNRKTRYRAPRFNNRVHSKHKGWLAPSVEVKIQEHITVIKRVCRILPIVLVRVETAEFDTQRLKAMLEGKPLPVGSDYQLGEMYDEYNVRQYVLKRDNYTCQCCGAHPAEKKPVRLHVHHIESRHVGGNAPNNLITLCAVCHKALHEGKITLGNGKKRGKPLRDAAFMGIMRNTLLARLKDELNIPVKQTYGYITKLLREENHVEKSHTNDARCIAKAPNAKPCDTMFHTRALRHHNRQIHKAKIIKGGTRKKNQAPYLVKGFRLWDKVRYNGEECFITGRRTSGYFAIKKYDGTVISNSVSYKKLTLLEAATNYITERS

SEQ ID NO: 8493 - protein, 464 aa, unidentified; identical to SEQ ID NO: 6574
  REGION 1..464: note = Human gut metagenome

SEQ ID NO: 8494 - protein, 413 aa, unidentified; identical to SEQ ID NO: 5215
  REGION 1..413: note = Human gut metagenome

SEQ ID NO: 8495 - protein, 414 aa, Moorena sp.; identical to SEQ ID NO: 7784

SEQ ID NO: 8496 - protein, 535 aa, unidentified; identical to SEQ ID NO: 6116
  REGION 1..535: note = Human gut metagenome

SEQ ID NO: 8497 - protein, 428 aa, Sutterella sp.; identical to SEQ ID NO: 5624

SEQ ID NO: 8498 - protein, 442 aa, unidentified; identical to SEQ ID NO: 2903
  REGION 1..442: note = Human gut metagenome

SEQ ID NO: 8499 - protein, 490 aa, unidentified
  REGION 1..490: note = Human gut metagenome
MNYVYVLDKKGKPLMPTTRYGKVRRMLKSGQAKPVQNLPFTIQLTYIPKTTVCQPVIVGFDPGRTNIGISAVREDGTCLNLTHCETRNREIPKLMQKRKEHRQTSRRGERLVRKRLAKRHGTVSSKPLERILPSCEKPLKVKDIINTESRFNNRLRSEGWLTPTATQLLRTHVNLLKRMCQILPATDVVMEVNRFAFMQLDQPNVKKCGIDFQHGPLFGTDGIKEAVSIQQDGRCLLCEKRTIEHYHHIVPRAYRGSDTAENIAGLCAGCHKLVHTSREASNKLKHKKDGINKKYGGISVLNQVIPFLFMEFEQMFPGHTYATNGWNTKQFREKYRLAKDHSVDAYCIAASILPEPKVELPEDTHEIVQYRRHDRARIKRQTERTYCLGKKGVCKNRHKRFEQKTDSLEEYVEKYPNFLSNLTVKKSQRSYNDLKRVLPGAVILYQGKRYILSGRSSGGKQYRMLGYGNQNFTASKCTIVQQNTGLVYVS

SEQ ID NO: 8500 - protein, 414 aa, unidentified
  REGION 1..414: note = Human gut metagenome
MPCSPAKARLLLKEKKAIVKRRTPFTIQLTIATGESKQPVTLGVDAGYKHVGLSASTEKAELYASEVELRQDVSDLLSARRALRQSRRNRKTRYRAPRFNNRLRTKRKGWLAPSVENRINAHLSRIEAVLRLLPVTKISVETASFDMQLLKNPDIAGKEYPEGEQLGFWNVREYVLFRDRHVCQHCYGRSKDPVLNVHHLESRRTGGDSPGNLITLCETCHKALHRGDITLKAKRGKSFRAEAFMGIMRWEVHNRLRALHPGIEVSNTYGYRTKHARIANGIAKSHCADAFCIAGNLGAERLCEFFFQKQTRRNHRQIHKLSILKGGIRKRNQAPFEVKGFRLFDKVACQGEEGFIFGRRSSGFFDVRKLDGTRISAGISCKKLHLLEKRRTYLTEIRKEEALPPLPEGRGLRA

SEQ ID NO: 8501 - protein, 414 aa, unidentified
  REGION 1..414: note = Human gut metagenome
MVYVINKQGQALMPTERFGKVRRLLKNSLAHVVCRIPFTIQLDYDTTDYTQPVSLGVDAGSKHIGISATTSEKEMYAADVELRNDIVDKLSTRREQRRTRRSRLRYRKARFNNRVYSKRKGWLAPSVENKIQTHLTVVEKIHKFLPITNIVVETASFDIQKINNPSISGSEYQQGEQLDFFNVREYVLFRDNHICQHCKGKSKDKVLNVHHIESRKTGGDSPNNLITLCETCHKAYHRGEFKLNIKRGKSFRDAVFMGIMRWGFYDRLKNIYPNVSMTFGYITKNARITNNLPKEHYVDARCISGNPTAKPLGYYFYQKKVRCQNRQIHKANFLKGGRKKLNQAPFLVKGFRLFDLVEYQKELYYIFGRRSNGSFDIRKLDGTKVNKGSINCKYLRLISTRKSILTEKRTQVNL

SEQ ID NO: 8502 - protein, 545 aa, Actinomadura sp.
VLLQRAALESGLADTPRIGNETGLRPPARLGGGTGAGHVRGETTGTSPGPGGVTPDLRGGERRREAHHVFVLDKDGAPLQPCHPARARRLLASGRAVVARHTPFVIRLKDRTAAASEVEGVEVGIDPGSRHTGIAVFTARKGERRGRYAIQLDHRGARIRKKLGQRAAYRRRRRSANLRYRAPRFLNRVRPDGWLAPSLKHRVDTTTSWVERLARWAPVEAVHVELAAFDTHALSAGRSLEGVEYQHGTLYGYQVREYLLEKWGRACAYCGAVNVPLTVDHIHPRSKGGADRVCNLALACVPCNQSKSDRPIELFLAHRPATVVRVLAQAKAPLRDAAAINSTRLGLRHALDRRFPGRVVVGSGGRTRWNRTRSGLPKSHTLDALCVGETGAVTAYPATVLVVACTGRGGHSRTRTDRYGFPRLRLPRSKTVRGFQTGDLVKAVVPGGKRAGTHLGRVAVRATGSFNITTRHGTVNGVGHRYARLLQRADGYGYNTRPEIAARVHGPDAGRQVPALKAGTSSLQCLAGDPIPPTPHGGGFLEGSP

SEQ ID NO: 8503 - protein, 324 aa, Nostoc sp.
MSKVFLIDSEKRPLNPIHPAQARQLLRNKKAAIYRQFPFTLILRKSSAEVSVSSLRLKLDPGARVTGLALVNDATGEVVFAAELKHRGFAIRDALTSRRQLRRSRRARKTRYRKPRFLNRTRPQGWLAPSLQSRVENIKTWVDRLRRFAPITAISQELVRFDMQLMRDPNIQGKEYQQGTLQGFETREYLLEKWNRECAYCGVKDVPFQVEHIQPKSNGGSNSITNLTLSCGRCNIKKGTKDIKDFLKKDPARLEKILKQAKRPLADAAAVNTTRFALLEVLKGTGLSVETGSGGLTKFNRSQQNLEKSHWIDAAKQWVFQLQF

SEQ ID NO: 8504 - protein, 512 aa, unidentified
  REGION 1..512: note = Human gut metagenome
MSTVYVLNKDGKPLMPTTRGGHVRYLLKEKKARVVTSKPFTIQLLYETDDVVQPLYLGIDPGRTNIGVAVVKTDGTAVFTAHLETRNKEIPKLMQGRKKARRARRTNGRRCRRQRRAKANGTISKKCVKQTTAQNGSVSKRAKKIGVIKRHLPGCEKKVLCIGIKNKEAKFSNRTRPEGWLTPTANQLLQTHINLIKKIRKFLPVNDVVLEINKFAFMQLDNPNIQKWQYQQGPLYQKASLEEAVSEMQEHHCLFCKKPIAHYHHVVPQSENGSDTIGNIVGLCTKHHDLVHKDTAWQKKLAKKKTGLNKKYGALSILNQIIPALTKELSSLFPKHFFATNGKSTHDYRAAHDVSKDHWLDAYCIACSILPNDTCDKNINGRVPYKLKQFRRHDRRALHKENMSRVYTLDGKKVATNRHKAIKQTTDSLEEFRQRQPNDVCKLKVKEHHPEYRNPERNFPGCVFLVGKHTHVVQGTSGSHNSKADGYYDTNGNSYSSGKCKFVAKNKGIVFA

SEQ ID NO: 8505 - protein, 416 aa, unidentified; identical to SEQ ID NO: 4039
  REGION 1..416: note = Human gut metagenome

SEQ ID NO: 8506 - protein, 418 aa, unidentified; identical to SEQ ID NO: 6784
  REGION 1..418: note = Human gut metagenome

SEQ ID NO: 8507 - protein, 424 aa, Caldicoprobacter sp.; identical to SEQ ID NO: 7521

SEQ ID NO: 8508 - protein, 472 aa, Cupriavidus sp.
MVVLVLDKQGRPLMPCSEKRARLLLARGRARVHRVVPFVIRIVDRRQADSRLQALRVKLDPGSKVTGIALVRDLPSGVGEAGDCAPGAAVLSLIELVHRGRRISEALTARRAFRRRRRGANLRYRAPRSQNRTRAARWLPPSLQHRVDTTLTWVARLRRWAPVSALSCELVRFDPQALEQPEIAGVEYQQGTLFGYELREYLLVKWGRRCAYCDQENLPLQVEHIQARAKGGSDRVANLTLACGPCNQAKGAQPIGRFLARQPARLARILAQAKRPLKDAAAVNATRWALVDALTGTGLPVELSSGGRTKFNRTRLGIPKTHALDAVCVGQMSHAQAWHRPTLTITCTGRGCYQRTRLDRYGFPRGYLMRGKSVYGFRTGDTVWAKIPTGKKAGEYVGRVAVRASGSFNIRAQSGLVQGIGHRHCRLVQRADGYGYQFQPTDSITQEGAGSGRASHAALSLAGRKARVSRPA

SEQ ID NO: 8509 - protein, 410 aa, unidentified
  REGION 1..410: note = Human gut metagenome
IEICEDVGYNYIGISVKSQSHEYVSAQYDTLQDEKDCHDSCRKMRRTRRNRLRYRKPRFDNRKHDKGWLAPSLEHKKELNVNVIKMYCEVMPITHATVEVGSFDTMLVKAIEEGKATPESTDYQKGPRYNLASLREAVFYRDNYTCQVCGRKANEGAILHVHHMFYWKGRHGNSLNELVTVCEKCHTPANHQKGGKLYGFGENIKFANLSGAAFMNTVRWQIVNELYAAFGKPFVTFTYGAMTKEKRIALHLDKSHSNDAYAMGNFHPVDRCAFEHYEKVKRNNRILEKFHDSRYIDIRTGKEAKGKELFNGRISRSHKKDSENLHKYRGKRIRKGYRALRRKKVALNSGDLVSLNGETLIVHGTHTNKKGNVRVEFKVAALNGKKSASLKKLKIVKTSTPMHSAWAKVS

SEQ ID NO: 8510 - protein, 450 aa, Moorena sp.; identical to SEQ ID NO: 2935

SEQ ID NO: 8511 - protein, 560 aa, unidentified
  REGION 1..560: note = Human gut metagenome
MANDYVFVVDRKGNPLMPTKRRGRVRHLLKEGKAVVIKTHPFTVKIKYDVGHYTQPMYEGIDSGRQNIGNAVSRENGENVLLEDVRTNNKSIKKNLMKRKVHRQERRRNNRHSRQRKAIHDGTEIKNGDDDKWHTDKDCKSVKVSYPAADNAVTHKVIRGKEGKFANRKRPDGWITPSARQIVQLTLNMVKETCSIMPIRRISFERVAFDFQKLANQNIHAWEYGKGPLYGFKTYKDCIYAEQKGKCPFCGKPITQYHHIIPRSAGGIDNVKNIIGLCDEHHTMVHNDAAFAETLSDAKAGVEQEYHAGLLNSAVPALIEALSVYCKEKSIELLITDGRTTRETRVKYGFDDKKDHCIDAYAISLADRNVKNISFAGRIIMKRRYKKKSKNIISARNQRIYVLDGQVIACNRHKAENQKENSLEEFLTQYRETHTEKKVQQMMHHIRILPAVRSYTFHKDGLKAICHPGDIVEYKKLNKTSGRMKRNIFVCTSVNFDGKDKYGNYCAAENHIGYDNGKGNGNRKAKFCTVLDSGCLQCTGIKRTDDYIAQLKADPSKKKG

SEQ ID NO: 8512 - protein, 415 aa, unidentified; identical to SEQ ID NO: 3582
  REGION 1..415: note = Human gut metagenome

SEQ ID NO: 8513 - protein, 293 aa, unidentified
  REGION 1..293: note = Human gut metagenome
MPDKVYVISRLGHPLMPCSPAKARHLLDDKKAKVVKRMPFTIRLLYGSTKYIQPIILGVDAGSKTIGLSASTAKGEVFAAEVMPRNDVVENLSTRREFRRARRNRTTRYRKPRSDNRVRSNHERWLAPSVKVKIQEHITSIKRVCTILPISKVVIETAEFDLQLLKAIQEGKPIPEGEDYQKGEMYGSYNVCQYVLWRDNYTCICCGVRGTPKNPVRLHVHHFESRKYGGNAPDNHGTLCDDCHKKFHLGIIADVKLKTRRRQSTRDAAFMGIMRKTLSALRLCVWLFDNRYI

SEQ ID NO: 8514 - protein, 413 aa, unidentified; identical to SEQ ID NO: 3295
  REGION 1..413: note = Human gut metagenome

SEQ ID NO: 8515 - protein, 403 aa, Moorena sp.; identical to SEQ ID NO: 3354
  SITE 17: note = misc_feature - Xaa can be any naturally occurring amino acid

SEQ ID NO: 8516 - protein, 512 aa, unidentified
  REGION 1..512: note = Human gut metagenome
MSTVYVLNKDGKPLMPTTRCGHVRHLLKEQKARVVTSKPFTIQLLYETNDVVQPLYLGIDPGRTNIGVAAVKTDGTAVFTAHLETRNKEIPKLMQGRKKARRARRTNGRRCRRQRRAKANGTISKKCVKQTTAQNGSVSKRAKEIGVIKRHLPGCEKELLCIGIKNKEAKFSNRTRPEGWLTPTANQLLQTHINLVKKIQKFLPISDVVLEINKFAFMQLDNPNIQKWQYQQGPLYQKASLEEAVSEMQEHHCLFCKKPIAHYHHVVPQSENGSNTIGNIVGLCTKHHDLVHKDATWQKKLAKKKTGLNKKYGALSVLNQIIPALTKELSSLFPKHFFATNGKSTYDYRAAHGVSKDHWLDAYCIACSVLANDVCDSNINSHVPYELKQFRRHDRRALHKENMSRVYTLNGKSVATNRHKAIKQTTDSLEEFRQRQPNDVYKLKVKEHHPEYRNPKRNFPGCVFLVGKHTHVVQGTSGSHNSKADGYYDTNGNSYSSGKCKFVAKNKGIVFA

SEQ ID NO: 8517 - protein, 413 aa, unidentified; identical to SEQ ID NO: 2815
  REGION 1..413: note = Human gut metagenome

SEQ ID NO: 8518 - protein, 414 aa, unidentified; identical to SEQ ID NO: 2588
  REGION 1..414: note = Human gut metagenome

SEQ ID NO: 8519 - protein, 420 aa, unidentified
  REGION 1..420: note = Human gut metagenome
MQYVYVLNKHGEPLMPCSPGKARLLLKQQKARAVKRTPFTIKLLHGSAGYKQPITLGVDAGSKHVGLSASTEKRELYSEEFTPRNDVVELLSTRRQNRRSRRNRKTRYRAPRFNNRVHSKHKGWFAPSVEVKIQEHITVIKRICRILPITLVRVETAEFDTQRLKAMLAGKPLPVGTDYQLGEMYDEYNVRQYVLKRDNYTCQCCGAHTTAKKAVKLHVHHLKSRKVGGNAPSNLITLCVTCHNNLHKGKITLDGKKRGKTLRDAAFMGIMRNTLLTRLRNELNIPVQNTYGYITKLLREQNDIKKSHVNDARCISKHPLAEPCSVYYRTKAIRHHNRQIHKAKILKGGIRKANQAPYIVKGFRLWDKVLYNGQECFISGRRSLGYFALRKLDGTAITNSISFRKLRLLELATNYLIERM

SEQ ID NO: 8520 - protein, 424 aa, unidentified
  REGION 1..424: note = Ga0315295_10019812
LRVYVKNQRSQPLMPTTPQKARLLLKQGMAKVVKRTPFTIQLLQATGETRQEVTLGVDAGSKVIGISATTVKEEVFAAEVQLRNNIVDLLATRLQNRRTRRNRLRYRPARFSNRVSTKKEGWLAPSIQNKVQTHLKLMDRVQQLLPISKIIVEVASFDIQKIKNPNIQGKEYQEGDQLGFWNVREYVLFRDGHQCQGKKGCKGKILNVHHIESRKTGGDSPDNLITLCEECHQAFHEGKLKLNLKRGQSFRDAAFMGIMRWAFYNKLKELHPQVQLTYGYITKNTRITNQLPKEHRIDALCITGNPMVKQCDDWYCIKQVRKHNRQIHKANILKGGKKKLNQAPYLVKGFRLFDKVRFENQQYFIFGRRSSGFFDIRDLDGNKVNKGSISCEKLELLEKGRSLLWERRKQDFGVSEHSSTSLKA

SEQ ID NO: 8521 - protein, 415 aa, Bacillus sp.; identical to SEQ ID NO: 5517

SEQ ID NO: 8522 - protein, 470 aa, unidentified; identical to SEQ ID NO: 2925
  REGION 1..470: note = Human gut metagenome

SEQ ID NO: 8523 - protein, 279 aa, unidentified; identical to SEQ ID NO: 5082
  REGION 1..279: note = Human gut metagenome

SEQ ID NO: 8524 - protein, 418 aa, unidentified
  REGION 1..418: note = Human gut metagenome
MVYVINKEGQALMPTERFGKVRRLLKNGLAHVVCRIPFTIRLDYETTHFVQPISLGVDAGSKHIGISATTSEKELYAADVELRNDIVEKLSTRREQRRTRRNRLCYRKARFTNRLSSKRKGWLAPSVENKIQTHLTVVEKIHKFLPITKIVVETASFDIQKIKNPSISSEEYQRGEQLDFFNVREYVLFRDNHTCQHCKGKSKDPILNVHHIESRKIGGNSPSNLITLCESCHKAYHSGKIDLKVKRGASFRDAAFMGIARWTTYERLKNIYPNVSITFGYITKNTRITNGLPKEHYVDARCISGNPKSKPLGFYFYQKKVRCQNRQIHKVNFLKGGRKKLNQAPFLVKGYRLFDLVEYQKNLYYIFGRRNSGFFDIRKLDGTKVNKGSISCKQIRLVDIRRSILTERRNSCSIPPTN

SEQ ID NO: 8525 - protein, 413 aa, unidentified; identical to SEQ ID NO: 2636
  REGION 1..413: note = Human gut metagenome

SEQ ID NO: 8526 - protein, 420 aa, unidentified; identical to SEQ ID NO: 6582
  REGION 1..420: note = Human gut metagenome

SEQ ID NO: 8527 - protein, 414 aa, unidentified
  REGION 1..414: note = Human gut metagenome
MPCSPAKARLLLKEKKAAVVRRTPFTIQLTIATGESKQSVSLGVDAGYKHVGLSASTEKAELYASEVELRQDISDLLSARRALRQSRRNRKTRYRAPRFDNRIRTKRKGWLAPSVENRINAHLSRIETILRLLPVTKITVETASFDMQLLKNPDISGKEYQEGDQLGFWNVREYVLFRDGHVCQHCHGRSEDPVLNVHHLESRRTGGDSPSNLITLCETCHKALHRGEITLKAKRGQSFRAEAFMGIMRREVLNRLKASHPELEVHNTYGYRTKHARIANGIDKSHCTDAFCIAGNLGAKRLGEFLFQKQTRRNNRQIHKLSILKGGLRKRNQAPFEIKGFRLFDKVACKGEESFIFGRRSSGYFDVRKLDGTRISAGISYKKLRLLEKRRTYLTEIRKEEALPPLPEGRGLRA

SEQ ID NO: 8528 - protein, 442 aa, unidentified; identical to SEQ ID NO: 2637
  REGION 1..442: note = Human gut metagenome

SEQ ID NO: 8529 - protein, 413 aa, unidentified; identical to SEQ ID NO: 2858
  REGION 1..413: note = Human gut metagenome

SEQ ID NO: 8530 - protein, 383 aa, unidentified
  REGION 1..383: note = Human gut metagenome
LDYATGETKQECTVGIDTGSKNIGIAVRSENKVLFKGEVELRQDVKSNLDTRRIYRRSRRNRKTRYRKPRFLNRKRPDTWLPPSLENRIRHTFRWIDAFCLLVPSPSLHIEVGKFDTAKMIDPKIQGVDYQHGQTYGYYDVRYFVFARDHYTCQVCGKSRDKILRTHHIRYRSNGGTDRADNLITVCTDCHTGQNHQKGGILYRWQEENKKVRSYKEPPFMNILRQRIFQRYPYAHITYGSETTQRRKELCLGKTHYNDAIAISGIQTITEDPKEWLLIRQSRKKKRSLHEANPRKGRKKPNRTQERSSKNTPSYRNFYLNDKVSVLGRSGYISGFTSGGCYVKDTDGQYITLPGKTYKQVGIANVHRICHNNNWQYITKRAL

SEQ ID NO: 8531 - protein, 413 aa, unidentified; identical to SEQ ID NO: 3476
  REGION 1..413: note = Human gut metagenome

SEQ ID NO: 8532 - protein, 470 aa, unidentified; identical to SEQ ID NO: 2825
  REGION 1..470: note = Human gut metagenome

SEQ ID NO: 8533 - protein, 456 aa, unidentified
  REGION 1..456: note = Human gut metagenome
LGIDPGRTNIGVAVVKADGAAVFTAHLETRNKEVPKLMKKRKESRCARRTNGRRCRRQRRAKTNGTISKKCVKQTTAQNGSVSKRAKEIGVIKRHLPGCEKDVLCIGIKNKEAKFTNRARPEGWLTPTANQLLQTHINLVKKIQKFLPISDVVLEVNKFAFMQLDNPNIQKWQYQQGPLYQKGSLENAVSEMQEHHCLFCEKPIEHYHHVVPKSENGSNTIANIVGLCTEHHNLVHKDATWQKKLVKEKVGLVKKYSALSVLNQIIPALTKEMNSLFPKHFFVTNGKSTYDYRTAHGVSKDHWLDAYCIACSVLPNDVCDSNINSHVPYELKQFRRHDRRVLHKANMSRVYTLNGKTVATNRHKAIKQTTDSLEEFRQSHPGDVCKLKVKEHHPAYRNLNRNYPGSVFLVDGQVHVMQGVSGSHNGKADGYYNTNGNAYPYYKCKFVVKNEGIVFA

SEQ ID NO: 8534 - protein, 557 aa, Blautia sp.; identical to SEQ ID NO: 7395

SEQ ID NO: 8535 - protein, 434 aa, Lactobacillus sp.
MQNRVFVINRQGEPLMPCTQRKCRKLLQSGKAKVIRKEPFTIQLLFGSTGYKQPVSIGVDSGQHHIGLAVTSQDKVLFQGEVSLRQDVKKLLDTRRSYRRGRRDRNTRYRPPRFLNRAKPVGWLPPSVASKIQHNINWIQRLQAVLPKAELHIEVGKFDMAKMVQPGITGLGYQQGDLYGYETTKQYVLDRDNYTCRICHGKTKDPKLKIHHIIYRSTGGTNQVSNLLTVCATCHTQANHQPGGKLYALQAKRFQSHHSLKGATFMNILRRRLFTAFPEAKFQYGAQTTLNRAKLELPKAHYNDAVTISGIQRISQQPTAVVMFRQFRKKKRSLHEATARKGRKTPNTTSKRNAKNTKAINGFHLNDYVQLPNGLRGNISGFSGKTACYVKAGDDHYLTINPKYKQVNLSKLKVIRHQNNWNVAEINTSDYMMA

SEQ ID NO: 8536 - protein, 431 aa, unidentified; identical to SEQ ID NO: 7173
  REGION 1..431: note = Human gut metagenome

SEQ ID NO: 8537 - protein, 424 aa, unidentified
  REGION 1..424: note = Human gut metagenome
MVYVLSKDGKPLMPCSNVIARLLLKQGKAKVRKRQPFTVKLNYETANYTQNLTLGVDTGSGTFGTAVTRDNGEIVYLSEVTVRNDITDKMTQRASYRRSRRFRKTRYRKARFLNRKNSIKEGRFSPTMRSKLHSHVKEIEWIRSILPVTAMVFEAGQFDTHLMKNPALADPKIRPWGYQKGPNYGYANTKAMVLNRDGYTCQYCHGKRKSSRLEVHHIQYRHMGGSDDSDNLITLCRSCHKDVHDGKIKLSNIGKKKGTLKYATQMNSIRKQLFLSYPEAIETYGYVTKENAQLLGIEKRHGLDACVIATQGQPFTVKSLLYRKKCIPKGDFQQTKGVRSEQPVTTGKIGGFRKFDKVRYLGKEYFIKGRMASGYAILMDFEGKKADFSYMPRGQKTPKLSRMKRLEARNSWMVTAEADIQNTA

SEQ ID NO: 8538 - protein, 424 aa, unidentified; identical to SEQ ID NO: 5018
  REGION 1..424: note = Human gut metagenome

SEQ ID NO: 8539 - protein, 329 aa, Nostoc sp.
MCKVFVIDNEKRSLNPIHPAQARQLLKRGKAAVFRRFPFTIVVKESYTDATVSPLRLKFDPGAKYTGIALVNDVNGEVVFAAELKHRGFAIRDALTSRRQLRRSRRSRKTRYRQPRFFNRTRPQGWLAPSLQSRVENIKTWVNRLRKVAPITAISQELVKFDTQLIRHPDIQGKEYQQGTLAGFETRQYFLEKWNRECAYCGIKDVPLQIEHIHPKSKGGSNSITNLTLSCEKCNLKKGTQDIKNFLKKDKSRLEKILALTKKSLADAAAVNTTRFALLEVLKSTGLPVEIGSGGLTKFNRTQQGLNKSHWLDACCVGASTPILKIKGY

SEQ ID NO: 8540 - protein, 413 aa, unidentified; identical to SEQ ID NO: 2636
  REGION 1..413: note = Human gut metagenome

SEQ ID NO: 8541 - protein, 493 aa, Moorena sp.
MSMTKLDRELHDADFIYIISADGYPLMPTRRRGHVKRLLNHGKARIVLHVPFTVQLKYKSPEKTQPVYAGIDPGRTNIGVSAVTEDGECIYRAHVSSRNRDVPKKMKKRRECRRASRRGERLRRKRRAKRNGTVTSFPNGRMLPGYEKPVMVKDIINETVRFIYRKRPDGWLTSTARQLVQTHESIVRLVSSILPVTEWTLEVNKFSFMQMDSGRCYGADFRNGRMKGYEGSHEYVYARQGGVCPFCGKPIEHYHHMIPRSMGGSDLPENLIGLCRDCHEEIHLGRLSTKTEGIMKKYGALSVLNQAIPFIVRRLADKYGEEHVHFCTGKDTHAMRTAMHMPKDHDTDAVCIACTGMNVIPSASLPKKFEVMQFRRHDRALIKSQRERTYMLDGETVCKNRHRRFEQKCDSLDEFRKEHPKLVSELNVSKSVRYYNNPDRLMPGAVFLFGGERHVLQSQLTGGKYYRAVGCGKKSFPSAKCTVIRCNSGLVYI

SEQ ID NO: 8542 - protein, 431 aa, unidentified
  REGION 1..431: note = metagenome
MPNKVYVINKHGRPLMPCSPAKARHLLDAGKAKVKKRTPFTIQLVYGSSGYTQEVILGVDAGSKTIGMSASTTKEELLSAEVKPRNDVVDLLSTRREFRRARRNRKTRYRKPRFDNRVRSKHKGWLAPSVEVKIQEHITSIKRVCRILPVSKVVIETAEFDLQLLKAIADGKPVPQGEDYQKGEMYGHYNVRQYVLWRDDYTCQCCGAHATKKKEVRLHVHHLESRKVGGDAPDNQVTLCESCHEKLHKGLIAEKDFKKRKRKSTRDATFMGIMRKTLMQRLCSELPIPVVETRGYITKATREKLLVLPKSHTNDALAIAQGKRGFNVGYLPEIAQIDKICTIRPVRHHNRQLHKATILKGGIRKSNQTEKYVFGYRLFDKVQFNGQDCFIWGRRTTGIFTIKTINGKMIKDGISFKKLKLVEKSTSYLIA

SEQ ID NO: 8543 - protein, 433 aa, unidentified
  REGION 1..433: note = Human gut metagenome
LITGKHMSSARYWHEEKFSGRKVSEMTDYAFVLDANGKQLAPTKEQKAWFLIRRKRATLVSKYPLVIQLKKKIPDKEICKDEIRCGIDDGGLHVGVALVQKCQTRNKVVFKGTIEQRNDVKHLMDVRRGYRSYHRYHKRYRPARFNNRDSSKREGRIAPSILQKRQATIRVINQLNKWINITNYWLEDVAIDIRALTDGYKPYRWQYQKSNRLDENIRKAVILRDGCRCMECGKSNCRLEIHHIKPRRLKGSSTLGNLITLCTKCHQKTEGIEELYMDRYFALLNSSDNRNLDYAQHVMIGKKWLREQLSNLGMLYLTNGGDTANKRIDWDITKSHSNDAICITDLRPDTCEIKEWVIKPMRRQSKAKTDNVLGIKHRDLVEYTFRNGETHRGYVTALYPEQNAINFQSPAKHCKKVNAGKCKVLWKYSKIYW

SEQ ID NO: 8544 - protein, 415 aa, unidentified; identical to SEQ ID NO: 6534
  REGION 1..415: note = Human gut metagenome

SEQ ID NO: 8545 - protein, 422 aa, Petrotoga sp.; identical to SEQ ID NO: 5403

SEQ ID NO: 8546 - protein, 442 aa, unidentified
  REGION 1..442: note = Human gut metagenome
MSTSVFVLDKKHRPLMPCRPARARRLLRAGRARVVKRFPFVIRLVDRTVEQSEVQPVLIKLDPGSRETGAAVVRDDEKKRHHALAFFVIKHRGGAIRDALKARSAFRRRRRSQNFRCRSPRFLNRVKPKGWLPPSLRHRVETTLSFVRRMCRYLPVSGIATELVKFDSQKLQNPEVSGVKYQQGTLFEYEVREYLLEKFGRKCVYCGAEGVPLNIDHVVPRAKGGSNRVSNLVLACVSCNQKKGARSLEDFLKGKPEVLARVRRELKTPLRDAAAVNATRWVLFNELKATGLPVETGSGALTKFNRHAFGVEKEHWLDALCVGRLNGVVTRKGLNVLEIRCMGRGSRQRTRLTKYGFPRGYLMRQKCVHGFATGDMVEANVPKGKKAGLWRGRVAVRVSGSFNIQTPKGVIQGVGWKHCRLISHNDGYGYAWLGHAPHSSPA

SEQ ID NO: 8547 - protein, 477 aa, Blautia sp.; identical to SEQ ID NO: 2707

SEQ ID NO: 8548 - protein, 425 aa, Aphanothece sp.; identical to SEQ ID NO: 6227

SEQ ID NO: 8549 - protein, 491 aa, unidentified
  REGION 1..491: note = Human gut metagenome
MPTKRKRHILKLLNTGKARIAEKVPFTIQLKYENIPVLQPVTLAEDPGRTNIGVAVLSPLGNLMFAAVIETRNKEIKKLMADRKAHRQASRRGERRARQRLAKKYGTIIKAGMAMRKLPQYAADKFVACKFIRNTEARFCNRKRRTDWLTPTVNHLVQTHLNVIKKISRYLPVTDIAIEVNRFAFMQMENPNASGVDFQNGPLKGFNDVKAAIREQQHGKCLMCKNDIEHFHHMVPRSKGGSDTIQNQVGLCPKCHAKVHTDTSFRKKLGDKKSGLLKKYGALSALNQAIPFICKGLLEEYGEKHVRFCTGKETSLIRTSLGYEKTNENQMHEVDAYCIGLAMLGVKNIKFQQFDNTYKIKQFRRQNRSIIHHQTERSYYLGKQKIATNRKPRFEQTGDAISDWYEKQLKTCENGEAGKLLSALKVKKSSRFYNSKGRLMPGTIFFYNGQRHVISGQLTGGRYLRAYGDTKTNYPISKCKILKHNEGLVFI

SEQ ID NO: 8550 - protein, 477 aa, unidentified; identical to SEQ ID NO: 2707
  REGION 1..477: note = Human gut metagenome

SEQ ID NO: 8551 - protein, 442 aa, Lactobacillus sp.; identical to SEQ ID NO: 4549

SEQ ID NO: 8552 - protein, 420 aa, unidentified; identical to SEQ ID NO: 6507
  REGION 1..420: note = Human gut metagenome

SEQ ID NO: 8553 - protein, 413 aa, unidentified
  REGION 1..413: note = Human gut metagenome
MTSYAFVLDANGKQLAPAKEQKAWFLIRKKRAALVSKYPMVIQLKKEIPENEICKDEIRCGIDDGGLHVGIALVQKCKTKNKVVFKGTIEQRNDVKHLMEVRRSYRHYHRYHKRYRPARFDNRKSSKRKKRIAPSILQKRQAIIRVIHWLNKWINITNYWLEDVSIDIRALTDGYKPYRWQYQKSNRLDENIRKAAILRDGGKCMECGKLNCRLEVHHIKPRRRNGSDTLDNLITLCKSCHQKTEGQEELYMDRYFSLLKSSDHKNLNYAQHVMIGKKWLRKQLSSLGVLYLTNGGDTANKRIDWNIEKSHANDAVCITNLQPDTYDMKEWTMKPMRRKSKAKTDNVLGIRHRDLVEYTLKNGETHRGYVTALYPEQKAINFQSPTKHCKKVNARKCKLLWKYSKIYWFENAS

SEQ ID NO: 8554 - protein, 429 aa, Salipiger sp.; identical to SEQ ID NO: 3575

SEQ ID NO: 8555 - protein, 420 aa, unidentified
  REGION 1..420: note = Human gut metagenome
MQYVYVLSKHGEPMMPCSPGKARLLLKQQKACVVRRTPFTIKLLYGSAGYKQPITLGVDAGSKHVGLSASTEKRELYSEEFTPRSDVVELLSTRRQGRRSRRNRKTRYRAPRFDNRVHSKHKGWLAPSVEVKIQEHITIIKRICKILPISLVRVETAEFDTQRLKAMLAGKPLPVGTDYQLGEMYDEYNVRQYVLKRDNYTCQCCGAHTTAKKLVKLHVHHLESRKTGGNAPSNLVTLCTTCHKNLHKGKVTLDGKERGKPFRDAAFMGIMRKTLMVRLKEELPIPVQGTYGYITKMRREQNDIEKSHTNDARCISKHPLAEPCSVCYRTKAIRHHNRQTHKANFSKKGIRKRSQMPYLVEGYRLWDKVLYKEQECFVSGRRSSGSFTLKKLDGTSVSKGVTFKKLRLLEPATNYLIERM

SEQ ID NO: 8556 - protein, 465 aa, unidentified
  REGION 1..465: note = Human gut metagenome
MSTCVCVLSNNGERLMPTIRLGKVRHLLKDGKAKIIKHHPFTIQLLYDSKTNTQPIEICEDVGYNYIGISMKSEFHEYVSVQYDTLQDEKDCHDGCRRVRRSRRNRLRYRQARFDNRKRDDGWLAPSFEHKKELNVNVIKMYCKVMPITHAIVEVGSFNTMLVKAIEEGKATPESADYQKGPRYKLATLREAVFYRDNYTCQVCGRKANEGAILHVHHMFYWKGRHGNSLSELITVCEKCHTPANHQKGGKLYGFGEDIKFANLSGAAFMNTVRWQIVNVLYAAFGKPFVTFTYGAMTKEKRIALHLEKSHNNDAYAMGSFHPVNRCAFEHYEKVKRNNRILEKFYDSQYIDTRTGELTNGKSLFNGRISRSHKKDSENLHKYRGKRICKGHRALRRKKVALNPGDLVSLNGEILVVHGTHTKKNGSVNVEFKTPSRGGKKSASLKKLKIVKTSNLMHSAWTKVS

SEQ ID NO: 8557 - protein, 359 aa, unidentified
  REGION 1..359: note = Human gut metagenome
STEKAELYASEVELRQDITDLLSARRALRQSRRNRKTRYRAPRFDNRIRTKRKGWLAPSVENRINAHLSRIETVIRLLPVTKISVETTSFDMQLLKNSDIAGKEYQESEQLGFWNVREYVLFRDGHVCQHCHGRSKDPVLNVHHLESRRTGGDSPGNLITLCETCHKELHRGEITLKAKRGQSFRAETFMGIMRWEVLDRLKASHPKLEVQNTYGYRTKHARIVNGIAKSHCADAFCIAGNLGAERLGEFLFQKQTRRNNRQIHKLSILKGGIRKRNQVPFEVKGFRLFDKVACKGEEGFIFGRRSSGYFDVRKLDGTRISAGISYKKLRLLEKRQTYLTEIRKEEALPPLPEGRGLRA

SEQ ID NO: 8558 - protein, 406 aa, unidentified; identical to SEQ ID NO: 3567
  REGION 1..406: note = Human gut metagenome

SEQ ID NO: 8559 - protein, 421 aa, Sutterella sp.
LRVFVINQRGKPLMPCSPAKARVLLREKKVRVKRRTPFTIQLTTATGEARQDVSLGVDAGYRHVGLSASTEKAELYASEAVLRDDITDLLSARLALRRARRNRKTRYRAPRFSNRVHSKNKGWLAPSVEHKIASHLKLVENVCRLLPVTNITVETASFDMQAIKNPDIKGTEYQQGEQLGFWNVREYVLWRDGHQCQHCRGKSGDPILNVHHLESRRTGGDAPNNLVTLCETCHKAYHAGRIDLKLKRGRSMRAEAFMGIMRWTFFYRLKEIHADKTVENTYGYLTKHTRITHGIEKSHCADAYCIAGNLSAERLPEYLYQKQVRKHNRQIHKLTIGRGGIRKRQQTPFEVKGFRLFDKVRLGGEEGYIFGRRSSGYFDVRRLDGQKLSAGVSFKKLHLLEKRKTYLTVLLPRLKTKVSAP

SEQ ID NO: 8560 - protein, 420 aa, unidentified
  REGION 1..420: note = Human gut metagenome
MQYVYVLSKHGEPMMPCSPGKARLLLKQQKACVVRRTPFTIKLLYGSAGYKQPITLGVDAGSKHVGLSASTEKRELYREEFAPRNDVVELLSTRRQNRRSRRNRKTRYRAPRFDNRVHSKHKGWLAPSVEVKIQEHITIIKRICKILPISLVRVETAEFDTQRLKAMLAGKPLPVGTDYQLGEMYDEYNVRQYVLKRDNYTCQCCGAHTTAKKLVKLHVHHLESRKTGGNAPSNLITLCTTCHKNLHKGKVTLDGKERGKPLRDAAFMGIMRKTLMARLKKELPIPVQGTYGYITKMRREQNDIKKSHTNDARCISKHPLAEPCSVCYRTKAIRHHNRQTHKANFSKKGIRKRSQMPYLVEGYRLWDKVLYKEQECFVSGRRSSGSFTLKKLDGTSVSKGVTFKKLRLLEPATNYLIERM

SEQ ID NO: 8561 - protein, 431 aa, Escherichia coli; identical to SEQ ID NO: 3801

SEQ ID NO: 8562 - protein, 465 aa, unidentified; identical to SEQ ID NO: 3603
  REGION 1..465: note = Human gut metagenome

SEQ ID NO: 8563 - protein, 442 aa, unidentified; identical to SEQ ID NO: 7529
  REGION 1..442: note = Human gut metagenome

SEQ ID NO: 8564 - protein, 441 aa, Acidithiobacillus sp.; identical to SEQ ID NO: 5206

SEQ ID NO: 8565 - protein, 414 aa, unidentified
  REGION 1..414: note = Human gut metagenome
MPCSPAKARLLLKEKKAIVKRRTPFTIQLTIATGETKQPVGLGVDAGYKHVGLSASTDKAELYASQVELRQDITDLLSARRALRRARRNRKTRYRAPRFNNRIRTKRKGWLAPSVENRINAHLSRIEAVLRLLPVTKITVETASFDMLLLKNPDIAGKEYQEGEQLGFWNVREYVLFRDGHVCQHCYGRSKDPVLNVHHLESRRTGGDSPGNLITLCETCHEALHRGEIALKTKRGHSFRAEAFMGMMRWEVLNRLKASHSELEVNNTYGYRTKHARIVNGIDKSHCADAFCIAGNLGAERLCEFFFQKQTRRNNRQIHKLSILKGGIRKRNQAPFEIKGFRLFDKVACKGEESFIFGRRSSGYFDVRKLDGTRISAGISYKKPRLLEKRRTYLTEIRKEEALPPLPEGRGLRA

SEQ ID NO: 8566 - protein, 424 aa, unidentified; identical to SEQ ID NO: 3232
  REGION 1..424: note = Human gut metagenome

SEQ ID NO: 8567 - protein, 408 aa, unidentified
  REGION 1..408: note = Lachnospiraceae bacterium UBA2815
  REGION 375..393: note = misc_feature - Xaa can be any naturally occurring amino acid
VDHRGCGVIRKYENPQVSATAENVSFFDSGRKEASAVMQSVAVLSRTGRKLMPTNAYRARKLLKSGRAGIECYKPVFTIRLTDREEGAVQPVEYTCDTGYQHVGISIKSEKHEFVHNQYDMLKDETERHNDCRKYRRVRRNRKRYRKPRFDSRSKKNKDIAPSLRHRMGNQIRLFESFCRVLPITTATFEMGKFDTQFLQAIAEEEPLPKGRDYQHGSKYLYQTERMAVFGRDHYTCQICGRSVRDGAILHTHHIGFWMSPPYRSGRISNLLTVCEKCHTAWNHKPGGRLWGIKPKLTNLTAATYMSTVRWAMYRRLVKTHPDVDIHIQYGAKTGITRQERHIAKTHANDAYCIGQFHPLHRCKEVLFAKRRRNXXXXXXXXXXXXXXXXXXXKEVRCTAVMRQNQPQ

SEQ ID NO: 8568 - protein, 451 aa, unidentified
  REGION 1..451: note = Human gut metagenome
MPVAVISKTGERLMPTSEHRARKLLKSGKAIKYSYHPFTIQLAERESGDVQPIELCMDTGYIHIGISVKSEKHEYLAEQIDTLTDEKARHDACRMYRRQRRSRKRYRQPRFNNRKRNDRWIAPSLEHKKSIHIQAILRICKVMPVTDITLEMGNFDTQVLKAREEGKSLPQGVDYQHGERYGITTLREAVFSRDGYTCQCCGRTIKDGAILHVHHIVYRSQGGTNRMSNLITVCDKCHTPANHKQGGKLYNWKPKIASFKGATYMTTIRWKLYNEVKALCPDIDIHITYGAETKERRRALDIDKSHVNDAFVIGQFHSKHRSEPICYKKKRRNNRCLEKFYDAKYIDSRDGKKRSGQELFNGRISRNHKKDSENLHQYRLQKVTPGRRAIRRQHYPIQPHDIIVYNGNKIEVLGCQHKGTRVVFSKTKKSVQISKIKLFKYAGGYSKSVFN

SEQ ID NO: 8569 - protein, 512 aa, unidentified
  REGION 1..512: note = Human gut metagenome
MSTVYVLNKDGKPLMPTTRGGHVRHLLKEQKARVVRTKPFTIQLLYETDDVVQPLYLGIDPGRTNIGIAVVKTDGAAVFTAHLETRNKEIPKLMKKRKDSRRARRTNGRRCRRQRRAKANGTISKKCVKQTTAQNGSVSKRAKEIGVIKRHLPGCEKEVLCIGIKNKEAKFNNRTRPEGWLTPTANQLLQTHINLVKKIQKFLPISDVVLEVNKFAFMQLDNPNIQKWQYQQGPLYQKANLEEAVSEMQEHHCLFCKKPIDHYHHVVPQHKNGSNTISNIVGLCTKHHDLVHKEAVWQEKLAKKKTGLNKKYGALSALNQIIPALTKELSSLFPKHFFATNGKSTYDYRTAHGVSKDHWLYAYCIACSVLANDVCDSNINSHVPHELKQFRRHDRRALHKENMSRVYTLNGKKIATNRHKATEQTADSLEEFRQNHPDDVCKLKVKEHHPEYRNPKRNFPGCVFLVGKQAHVMQGISGSHNGKADGYYDTNGNSYPSSKCKFVAKNEGIVFA

SEQ ID NO: 8570 - protein, 310 aa, unidentified
  REGION 1..310: note = Human gut metagenome
TKRKGWLAPSVENRINAHLSRIEAVLRLLPITKITVETASFDMQRLKNPDISGKEYQEGEQLGFWNVREYVLFRDGHVCRHCHGRSKDPVLNVHHLESRRTGSDSPDNLITLCETCHKALHRGEITLKAKRGQSFRAQAFMGIMRREVLNRLKASYPELKVHETYGYLTKHARIANGIVKSHGADAFCIAGNLGAERLGEFFFQKQTRRNNRQIHKLSILKGGIRKRNQAPFEAKGFRLFDKVACQGEEGFIFGRRSSGSFDVRKLDGTRISAGISCKKLRLLEKRRTYLTEIRKEEALPPLPEGRGLRA

SEQ ID NO: 8571 - protein, 421 aa, unidentified; identical to SEQ ID NO: 3082
  REGION 1..421: note = Human gut metagenome

SEQ ID NO: 8572 - protein, 469 aa, unidentified
  REGION 1..469: note = Human gut metagenome
MNERKLNKVFAEIKEKANMDYAITNPDEYGDCNACVNSELASEFGVDSKGIYAKHWLKGMNAGGPLMPTDRHGKVKRLLKSKMAKVVKRTPFTIQLLYKSNKYTQPLTLGVDAGSKHIGLSVNTESKEVYAGQIEPRQDVSKKLEERRQYRRSRRNRLRHRKARFNNRTATKHKGWIAPSVECKIQSHINVIEKLHQILPITKIIVEVAEFDTQKINNPKIQGKEYQEGPLLNNNLRQYVFARDGYTCQWCKGKSGSRVLHTHHWNFWRGDHTDKPDSLITLCDICNDSKNHKKGQFLFGWEPKITNNLKDAAFMNISRWMLYNRLKEIYPNVELTYGYITKTIRYDNKIEKSHINDALCIANHPNAVQTDNYYLLKKNRVHNRQIHKANKLKGDRLKLNQAPHLVKGYRLNDIVLYNGQTYAITGRRKTGYFQLKNYKTGEKLPSVGYKKLKLFEKAKYYTTERITRS

SEQ ID NO: 8573 - protein, 420 aa, Pseudoalteromonas sp.
MLAYVLNKHGKPLMPCKAAKARKLLKAGEAKVVKRTPFTIKLLHGSSGHTQHVVAGMDTGSKHVGCAAIANGKVIYQSEVALRTDVSKKMQQRAMYRRTRRNRKLRYRPARWLNRASMRKEGRLAPSLKSKLDSHLREKKQVEAILPISHWKVETASFDIHKITNPIVTSAGYQQGALLGYYNVKAYVLQRDNYKCQSGRKTKHNAKLHVHHKVFRSQGGTDALSNLIALCETCHNDLHVGKFELKVKRSKTKHATEIGILKAQLKQCWDFEETFGYVTKFKREQVLGLPKTHYYDAVSICCEDGELVQQGKHVLRKRHVASGDYQQTKGGRSEKRIPVGKLFGLKKHDFVQTPQGTGFVKGKRSSGYFALETILGDKVHASANIKKNTVRISARTTTLTQLMEAAIPLCTKVPSILAVN

SEQ ID NO: 8574 - protein, 425 aa, unidentified
  REGION 1..425: note = Human gut metagenome
MDGDPLDPTHPAKARILLKNKKAKVVRRLPFTIKLTYEIKNPKTQKYTLGVDTGFSKLGAAVINEKDEVVYLSEVTLRNDIKKIMKNRSETRRARRNRNTRYRKPRWLNRKNSIKEDRYSPTMISKFNSHMKEIKFIKSILPISTINLELAKFDNHALSNPLVKNNKWIYQKGLKFGFANTKAFVLNRDKYTCQHCKTKQGTLEVHHIIFRSNGGSDEPDNLITLCRQCHRDLHLEKISLKNTKGLKRKNKQAAATQMNNLRSMIIKKFNLHFNLNFTETYGFITKEVRQYLNLPKEHYFDGVAICYCDKVNKSKVFFKTNLVNLKRCISKGSYKRQKFTRGKMINLPKGKMQGFKRYDTVEYFGKRYFIMSRMSSGFAKLADINLNIIDFSFLGKGRKTPKLKNLKRISSRKSWITDQKIIQNI

SEQ ID NO: 8575 - protein, 485 aa, Moorena sp.
LVAVLDRKKRPLAPCSEKRARQLLERGRAVVYRIYPVFTIRLKDRLLEECGTPPVRLKVDPGAKTSGFSLLREDSAERATVVHQSHLVHREDVKDRVDTRRACRRGRRNRHTWYREPRFNNRPRVKCRVCGRNARKGKDTCREHAGVPRDLYPKEVWLPPSLKARLDELLSWVRRYCRIFPVSSISVEWAKFDTQKLQNPEISGVEYQHGTLFGYEVKEYLLEKWGRKCAYCGAENVPLEVEHVVPRNPKRGPKGTDRISNLTLSCKECNDDKGNKQPEEWLEELKKSGKAIDRVRAENLPKVLAQLEEPLKEAAFMNAVRYALVNELKKLGFPLELGTAAQTKKNRLRLGLPKLHCYDAACVGESTPATINGLDSPIAVIRAVGRGTRRMCNTDAYGFPVGHRGRKKLHYGFMTNDLVAADVPSGKYAGRYVGFVAVRASGYFDIKDVSGHRLAQGVSWKHCWLIQRFDGYTYGREVPAHSFPQ

SEQ ID NO: 8576 - protein, 406 aa, unidentified; identical to SEQ ID NO: 6079
  REGION 1..406: note = Human gut metagenome

SEQ ID NO: 8577 - protein, 413 aa, unidentified; identical to SEQ ID NO: 3220
  REGION 1..413: note = Human gut metagenome

SEQ ID NO: 8578 - protein, 424 aa, unidentified
  REGION 1..424: note = Human gut metagenome
MVYVLSKEGTPLMPTNRHGRVRHLLDAGEAKAVKRCPFTIQLLYQSTTYTQEITLGVDAGSKTIGLSASTEKKELYASETRLRMDITDLLSVRRQFRRTRRNRKTRYRKARFNNRVHAKHKGWLAPGIEAKIGTHFRAVRDVCRILPVTEIIVETASFNLQKIKALEKGEPVPEGTDYQKGDQLGFWNVREYVLWRDGYKCRCCNGKSKDQVLNVHHIESRKTGGDAPNNLATLCGYCHKQYHKGTILLPKSVRRGNSFRDAAFMGIMRRTFYNRLKEQYPRVAMTYGYITKNTRIRNSLPKTHYADARCIAGHPQAEPLEVYYFQKKVRCHNRQIHKSNILKGGKKKRNQAEYLVKGYRLYDRVRYQNREYYVFGRRASGFFDIRTLGGNKGNKGSVSCKKLRFLEPRKTMLIERRMQEREAV

SEQ ID NO: 8579 - protein, 442 aa, unidentified; identical to SEQ ID NO: 8056
  REGION 1..442: note = Human gut metagenome

SEQ ID NO: 8580 - protein, 396 aa, unidentified; identical to SEQ ID NO: 4508
  REGION 1..396: note = Human gut metagenome

SEQ ID NO: 8581 - protein, 408 aa, unidentified
  REGION 1..408: note = Human gut metagenome
VKTYPFTIRLVDRLLENSAVQPVAVKVDPGSEQSGMAVVRDDGKAHHHALFFINLVHRGKVIRDRLTGRRAFRHRRRSANLRYRAPRFLNRKRRKGWLPPSLQHRVDTTMSWVKKLRKLVPVTALWVENVKFDTQKLQNPEVSGVEYQQGTLFGFEVREYLLEKFGRRCVYCGAENTPLNIDHVVPRAKGGSDRVSNLVLACTDCNQKKGAQPLEAFLKDKPQQFERIRRQLKAPLRDAAAVNATRWALFNALKQTGLPVATGTGAQTKFNRKAFGIPKEHWLDALCVGRINGADHPEGMGVLQVRCTGRGSYQRTRLNKYGFPRGHLMRQKRVHGFATGDMVKAVVPSGKKAGIHQGRVAVRVTGSFAIQKADGKVDGIHWRHCRLISHNDGYGYAWLRPAPHSSLV

SEQ ID NO: 8582 - protein, 456 aa, Halomonas sp.
MAVFVLDKQKRPLMPCSEKRARLLLARGRAVVHKRYPFTIRLKDRVGGSTQPLSLGVDPGSKTTGLALMRETDSEQRHVLCLFELIHRGFQIKKALQQRAAFRRRRRSANLRYRAPRFNNRIKPKGWLAPSLQHRVDTVMAWVNRLSRLAPVTAISQELVRFDTQKLNNPEINGVEYQQGTLLGYEVREYLLEKWGRECAYCGTADTPLEIEHVVPRSCGGSNRVSNLTLSCHPCNQSKDALSLVDFFATDKGLKKRLKANGHTANARLERVQRQLKQPLRDASAVNATRWALFNALKATSLPVAVGTGGRTKYNRQRLGIPKTHALDAACVGAFDALHAWQVPTLTIKAMGRGSYQRTRLTKHGFPRGYLMRQKQVHGFQTGDMVRAMVPTGKKAGTHTGRVAVRKTGSFNIQTEQGAVQGISHKYCTLIQRSDGYGYHFTPFTHLTGGAGQAVA

SEQ ID NO: 8583 - protein, 425 aa, unidentified; identical to SEQ ID NO: 2429
  REGION 1..425: note = Human gut metagenome

SEQ ID NO: 8584 - protein, 450 aa, Moorena sp.; identical to SEQ ID NO: 2935

SEQ ID NO: 8585 - protein, 413 aa, unidentified; identical to SEQ ID NO: 2636
  REGION 1..413: note = Human gut metagenome

SEQ ID NO: 8586 - protein, 433 aa, Clostridium sp.; identical to SEQ ID NO: 7140

SEQ ID NO: 8587 - protein, 411 aa, unidentified
  REGION 1..411: note = Human gut metagenome
MVYVQDIDGKPMMPTTRHGKVRRLLKDSKAVVVNTCPFTIKLMYKTSDYKQEIVLGVDAGTKHVGLSATTKSKELYSGEVILRNDIVELLSTRRESRRTRRNRLRYRKPRFNNRIKSKRLGWVAPSVRHRIDAHIRIINNVCSILPVSRVIVEVAQFDTQKIKNPEISGKEYQEGDQLGFWNVREYVLARDGHKCQHCKGKSKDPILNIHHIESRKTGGDSPSNLITLCETCHKEFHKGNIKLKVKRGKSLRDAAVMGIMKWRLYDKLKSLYPNVRMTFGYITKHDRINHGIEKSHVSDAFVISRNFDSERLGYYYKLKLVRRHNRQIHKMKIPKGGKKRMNQSPFKVFGFKLFDKVMFQGEERFIYARRLSGQFKIKDIDGNNERNISYKKLRYVSHGLISIKTNLFLSQ

SEQ ID NO: 8588 - protein, 448 aa, unidentified
  REGION 1..448: note = Human gut metagenome
MVAVLSKTGIRLMPTSSYRARKLLAKKKAVICGYCPFTIRLTERETGDVQPVELAVDTGYFHVGNSLKTAKHELAAVEIRTLMDEKQRYDDRRRYRRMRRSRLRYRAQRFDNRRRLEGWLAPSIQGRMEQNLAFLRRVLSVVPVTRIVMEMGQFDTQVLKAVEEGRPIPEGTDYQQGERYGIATLREAVFTRDNYTCQCCEKTVHDGVILHVHHIVYRSQGGTNRMGNLITVCEKCHTPKNHKPGGKLYKWKPTVKSFKGATFMTAVRWIMYRSVKESLPNVDVRITYGAKTKLQRRTLDITKSHVNDAYVMGDFHPKHRARPVILQKRRRNNQILEKFYDAKYIDTRDGSKKTGQQLFNGRTNRNHNTDTGNLRLYRGMKLSKGKRAIRTTRYRIQPHDILVYQGQEIEASGCHCKGTRIMTTAKKSLPIGKVRVRRYSGGYYAVAE

SEQ ID NO: 8589 - protein, 442 aa, unidentified; identical to SEQ ID NO: 2903
  REGION 1..442: note = Human gut metagenome

SEQ ID NO: 8590 - protein, 430 aa, unidentified
  REGION 1..430: note = Human gut metagenome
MPKVYVLNRHGRPLMPCTPAKARHLLDAGKTKVRHRTPFTIQLLYGSTGYTQEVILGVDAGSKTIGLSAATETEELFSAEVKPRNDVVELMSARRQFRRARRNRTTRYRKPRFDNRVRSKHKGWLAPSVEVKIQEHMTAIRRACAILPVSKVVVETAEFDLQLLKAVAEGKPVPQGEDYQKGEMYGHYNVRQYVLWRDSYTCRICGVHGSVRKGVPLHVHHLESRRVGGDAPDNLVTLCTACHDKLHKGIIMAADIKKRKRRSTRDATFMGIMRMTLLRRLREQLPVPVVETRGYITKATRENLLVLPKSHTNDALAIAHGPQGFRAEYLPNIRQADRLYTIRPVRHHNRQLHKATILKGGVRKANQAEKYICGFRLYDKVLYNGIECFVWGRRTSGSFLLRQLNGEKVKDGVSYKHLKLLERSQSYLVA

SEQ ID NO: 8591 - protein, 419 aa, unidentified
  REGION 1..419: note = Human gut metagenome
MVYVISQDGKPLMPCSNPIARLLLKQGKAKAKCREPFTIKLIYETTDYTQDLTLGIDTGSGTIGTAVSKNNGDIVYMSEVVVRNDITDKMAQRAKYRRNRRNRKTRYRKARWLNRSNSIKKDRFSPTMQSKLHSHVREIEYIQSILPITEMVFETGQFDMHLMKNPSLANPKVRHWGYHKGTNYGFENTKAMVLNRDNYTCQCCKGKHKDSKLEVHHVIFRSQGGSNEESNLITLCHTCHKNLHSGKVNLKLKGKMKGNLKYATQMNSICKQLFRLYPNAIETFGYVTKANRLHLGVDKEHYYDACIIATQGNAFNIKSNLYKKKCVSDGDFQKTKGIRSEQSIVTDKIWGFRKFDKVCYFGNDYFIKGRMSTGYAILMDIDGNKIDFSTMPRGYKTPKLSNCKRITARSTVMMQVEVV

SEQ ID NO: 8592 - protein, 512 aa, unidentified
  REGION 1..512: note = Human gut metagenome
MSTVYVLNKDGKPLMPTTRCGHVRHLLKEQKARVVTSKPFTIQLLYEADDVVQSLYLGIDPGRTNIGVAVVKADGTAVFTAHLETRNKEIPKLMKKRKESRRARRTNGRRCRRQRRAKANGTISKKCVKHDTAQNGSVSKRAKEIGVIKRHLPGCEKDVLCIGIKNKEAKFSNRTRPEGWLTPTANQLLQTHINLVKKIQKFLPISDVVLEINKFAFMRLDNPNVQKWQYQQGPLYQKANLEETVSEMQEHHCLFCKKKIDHYHHVVPQHKNGSNTIDNIVGLCTQHHDLVHKDATWQKRLAKKKTGLNKKYGALSVLNQIIPALTKELSSLFLKHFFVTNGKSTYDYRAAHGVSKDHWLDAYCIACSVLPNDTCDKTINSRVPYELKQFRRHDRRALNNENMSRVYTFNGKMVATNRHKATEQTTDSLEEFRQRQPNDVCNLKVKEHHPTYRNMNRNYPGSVFLVGNQVHVMQGIASSKDGEATTYKDTNANSIAAGKCKFVAKNSGILFV

SEQ ID NO: 8593 - protein, 427 aa, Enterococcus sp.; identical to SEQ ID NO: 5630

SEQ ID NO: 8594 - protein, 589 aa, Streptomyces sp.
VTRVHREREGRSLAPSALGRSSDQPKSSRSKDQGGVPMTTLPAGEQTHQAVLPQQPALESVGADTPGSRYETAHGHLVAVRGAVGKHGRGETDGLGTCTRRRHVENAATAAEEAETGSGDAPAHEHVYTGGVGAGRVFVLSKEGHPLMPCHPARARELLGKGRAVVARYVPFTIRLKDRTLADSEVDGVQLRIDPGSKGTGLHLTDEKKEINEQGVTGTVRRGLISFELQHRGDQIRGRMQQRAGYRRRRRSANCRYRAPRSDNRTRLGSWLPPSLRHRVDTVFSQAARLCRYAPVAEIHVESGGFDTHSMSTGRPLRGAGYTQGALAGTDARAYLHARWNSSCSYCGITGVPLNIEHVRPRSRGGSSRISNLVLACVPCNMRKGTLPVEVFLAASPDRLAKILQQGETPLHDAAAMNATRWPLREALSSLGRPVFGWPGGLTKRNRAAMGLDKSHTLDALSVGHLAHESGDAIVRFPSQVLVVKATGRGSYARTTPDRFGFPRLRRARTKQHFGYVTGDLVRTTVPTGKWAGTWTGRICVRARGQHSLSTSKGRINVSHRHLRLLQRGDGYDYSTRPEPPPSISRKTG

SEQ ID NO: 8595 - protein, 417 aa, unidentified
  REGION 1..417: note = Human gut metagenome
MRGRPLMPCSQRKARLLLRENKAKIYKYHPFTIQLTYTTGETKQDCHIGIDTGSKYIGAAVRSEDKVFWKGEIELRQDIRSNLDTKRIYRRSRRNRKTRYRKPRFLNRKRRDEWLPPSLQSRINHTFHWIDTLSSLVPNPILHIEVGKFDVAKMINPEIHGVDYQHGQTYGFFDGRYFVFARDNYTCQCCGKSKNKILNTHHIIYRSNGGTNRVDNLITVCTDCLTSQNHRKGGIFYQWQEQHKKVKQYKEPPFMNTLRKRIFVAYPDAEITYGSETTPKRKAMKLDKTHYNDAIVISGINEIKENPEEWLLIKQFRKKKRSLHEATARKGRKKPNRNQTRNSKNTPYYKGFYLNDKVSVFGKSGYITGFTSNAAYIKDENNDYITLPNKTYKQVSINKMKLECHNNNWQYIIKNAV

SEQ ID NO: 8596 - protein, 447 aa, Marinobacter sp.
MSVFVLDKRKHPLMPCTERRARLLLSRRRAVVVRAYPFTIRLKNRTGDVTQPLRIKIDPGSKATGIAVVRENGQKQHVLALMELVHRGRQISKSLDQRRAFRRRRRNQLRYRAPRFLNRTKPKGWLAPSLQHRVDITRSLVNRLRSLVPVVSISQELVRFDTQKMETPEVSGVEYQQGTLLGYEIREYLLEKWGRECAYCADTDTPLQIEHIDPKANGGSNRISNLTLACRPCNQEKDRKSLVSFFATSKRLKNHQARLDRILKQCKKPLRDASAVNSTRWALYQALKQTGLPVEVGTGGRTKFNRCRLRIPKTHALDAACVGEVEIVEGWDVPTLAIKATGRGSYKRTRLTKHGFPRGYLMRQKQVQGFQTGDMVRAVVPAGTKAGTWQGRVAVRKTGSFNIQTSSGAIQGISHRHCVLTQRADGYGYHIQPNQRKEEGDRENESR

SEQ ID NO: 8597 - protein, 414 aa, unidentified
  REGION 1..414: note = Human gut metagenome
MSEYIYVIGVDGDPQMPTKRKRHVEKLLQAGRARVFRQIPFTIQLTYENKPVLQPITIAEDPGRSNIGMAVVSLSGELLSAAVVQTRNKEIVKLMEKRKQHRRASRNGERKARQRLAKKCHTMIKAGSLMRKLPMYGKDKRVQCNVIRNTEARFCNRKREDGWLTPSAEHLVQTHINLIHKMQKFLPITDVAFEINRFAFLSLEDPSISGVDFQNGPLKGYDDLNAAIEDLQDGHCLMCNSPIEHRHHIVPRSMQGSNTIGNIAGLCCKCHERVHKDARFEDRLKKKKAGLNKRYAAVSALNQAIPFICKRLEQEFGKEHVHYCSGRDTSMVRRSFGYHKTKEEQLHEVDAWCIAVLSLRQIPEKAPEFDHVHELLQFRRQDRSRIKSQTSRAYYHEGKKIAKNRKKAEGQRED

SEQ ID NO: 8598 - protein, 428 aa, unidentified
  REGION 1..428: note = Ga0307928_10027261
MSVFVYVLNMRGQPLMPCKPRKARILLKEGKAKVKKRTPFTIQLKIPTGENKQKLNLGIDPGSKKVGTAVRRSGTKEIVYASEVTLRDNITKKLKQRSNYRRTRRNRKTRYRQPRFLNRTRSEGWLPPSVVSKINSIKKELDYILSILPITRITFEYSKFDIHRLTNKFVKGFWYQKGDMYGYESTKAYVLERDNYKCQACKGKKKDKRLEIHHVIYRRNGGTNKPSNLLTLCSTCHDLVHAEKLILTNAQLKNCKNTVDATQVSIISKRIWKYLQTLKPKYILAKTYGYSTKVKRRLLKIRKSHTLDAVAISYGRNKHYRKGLRKPRIKSNFYHKICAAKGDYQQTKGKHSEKKIPTGKIQGFRKFDLVRYLGKIYSIKGRRSTGYAELMDQTVKNIRLRPIPKFGNLTRLQSRTSWIIFPNTVQNI

SEQ ID NO: 8599 - protein, 447 aa, Halolactibacillus sp.
LRVFVKSMRGFNLDPCKNQKARQLLKEKKAKIISYKPFTIQMLIATGETTHESHVGIDLGAKYTGVAITQEDRVLAKGDIECRQDIKALLETKKIYRRSRRSRKTRYRKCKCKHKTTRVYSNKKGKWVKKKTSFTSPRPKSWLPPSLESRTQNLFFWIDTFTSLLPKVKLHIEVGKFDVQKMKSPDIQGKAYQEGDTFGYHDVRYFVFARDHYTCQVCKKKGNILNTHHIIYRSHGGSDAPSNLISVCTDCHTSDNHKRGRILWHWMEKRKKVPTYKEPPFMNALRIRTFRRYPDARIIYGSETTPRRKELHLEKTHYNDAIAISGIQHIKENPHTIFYIKQFRKKKRSLHEATARKGRKNKNLTQKRNKKNTKEMKGIHLNDTVRIFGKIGFVSGFTTTGIYIKDIHNAYITKPGKTYKQVGFKDVTVENHNNNWQFISHLAPDGA

SEQ ID NO: 8600 - protein, 413 aa, unidentified; identical to SEQ ID NO: 3924
  REGION 1..413: note = Human gut metagenome

SEQ ID NO: 8601 - protein, 427 aa, Moorena sp.; identical to SEQ ID NO: 7268

SEQ ID NO: 8602 - protein, 512 aa, unidentified; identical to SEQ ID NO: 6787
  REGION 1..512: note = Human gut metagenome

SEQ ID NO: 8603 - protein, 420 aa, unidentified
  REGION 1..420: note = Human metagenome
MQYVYVLNKHGEPLMPCSPRKARLLLKQKKACVVKRTPFTIKLLYGSTGYKQPITLGVDAGSKHIGISATTEKHELYREEATPRNDVVDLLSARRAFRRSRRNRKTRYRAPRFDNRVHSKHEGWLAPSVEVKIREHITLIKRVCRILPITLVRVETAEFDTQRLKAMLEGKPLPVDTDYQLGEMYDEYNVRQYVLKRDNYTCQCCGAHPTKTKAVKLHVHHIETRRTGGNAPNNLITLCTVCHKALHAGKVTLDGKKRGKPLKDAAFMGVMRKTLMERLRKELKIPVQGTYGYITKYIREKNGIPKSHTNDARCISKNPLAIPCDTCYYTKAVRHHNRQLHKATILKGGIRKANQAPYIVKGYRLWDKVSYNGTECFITGRRTSGYFALKKLDGTVVSNSISYKKLRLLEVATNYITERK

SEQ ID NO: 8604 - protein, 624 aa, Streptomyces sp.; identical to SEQ ID NO: 4253

SEQ ID NO: 8605 - protein, 431 aa, unidentified
  REGION 1..431: note = gut metagenome
MPNKVYVINKHGRPLMPCSPAKARHLLDAGKAKVKKRTPFTIQLVYGSSGYTQEVILGVDDGSKTIGISASTKKEEVFAADVTPRNDVVNLLSARREFRRARRNRKTRYRKSRFDNRVRSKRKGWLAPSVEVKIQEHITSIKMVCRILPVSKVVIETAEFDLQLLKAIEEGKPVPQGEDYQQGEMYGHYNVRQYVLWRDNYTCQCCGAHATKKKEVRLHVHHLESRKVGGDAPDNQVTLCESCHEKLHKGLITEGDFKKRKRRSTRDATFMGIMRKTLMQRLCSELPIPVVETRGYITKATREKLLVLPKSHTNDALAIAQGKQGFNVGYLPEILQIDKIYTIRPVRHHNRQLHKAAILKGGIRKSNQAGKYVFGYRLFDKVQFNGQDCFVWRRRTTGIFTIKTINGKMIKDGISFKKLKLAEKSTSYLIA

SEQ ID NO: 8606 - protein, 447 aa, unidentified; identical to SEQ ID NO: 5316
  REGION 1..447: note = Human gut metagenome

SEQ ID NO: 8607 - protein, 465 aa, unidentified
  REGION 1..465: note = Human gut metagenome
MSTCVCVLSNSGKRLMPTFRLGKVRHLLKDGKAKIVKHHPFTIQLLYDGKTNTQPIEICEDVGYNYIGISVKSQSHEYVSAQYDTLQDEKACHDSCRKLRRSRRNRLRYRKPRFDNRKRGEGWLAPSLRHKKELNVNVVKMYCAVMPITHATVEVGSFDTMLVKAIQEGKAIPEGADYQKGPRYNLATLREAVFYRDNYTCQVCGRKVADGAILHMHHMFYWKGRHGDSLNELLTVCEKCHTPANHQKGGKLYGFGENVKFADLSGAAFMNTVRWQIVNELYAAFGKPFVTITYGAMTKEKRIALRLEKSHNNDAYAMGEFHPNCRCTFEHYEKVRRNNRILEKFYDSRYIDIRTGEIATGKELFNGRINRNHKKDSENLHRYRGKRTYAGHRALLRKKVNLNPGDLVSLNGEVLVVHSTHTNKKGAVNVEFKTPGKSGQKSASLKKLKIVKAADSMHSAWEKIS

SEQ ID NO: 8608 - protein, 420 aa, unidentified
  REGION 1..420: note = Human gut metagenome
MQYVYVLNKHGEPLMPCSPGKARLLLKQQKACVVKRTPFTIKLLYGSAGYKQPITLGVDAGSKHVGLSASTEKRELYSEEFTPRSDVVELLSTRRQNRRSRRNRKTRYRAPRFDNRVHSKHKGWLAPSVEVKIQEHITIIKRICKILPISLVRVETAEFDTQRLKAMLAGKPLPIGTDYQLGEMYDEYNVRQYVLKRDHYTCQCCGAHNTAEKVVKLHVHHFESRKVGGNTPSNLVTLCTTCHKNLHKGKATLDGKERGKPLRDAAFMGIMRKTLMARLKEELPIPVQGTYGYITKMSREQNDIKKSHVNDARCISKHPLAEPCSVCYRTKAIRHHNRQTHKANFSKKGIRKRSQMPYLVEGFRLWDKVLYKGQECFVSGRRSSGSFALKKLDGTSISKGVTFKKLRLLEPATNYLIERM

SEQ ID NO: 8609 - protein, 426 aa, Lactobacillus sp.; identical to SEQ ID NO: 3294

SEQ ID NO: 8610 - protein, 431 aa, unidentified
  REGION 1..431: note = metagenome
MPNKVYVINKHGRPLMPCSPAKARHLLDAGKAKVKKRTPFTIQLVYGSSGYTQEVILGVDAGSKTIGVSASTKKEELFAANVIPRNDVVDLLSTRRESRRARRNRKTRYRKPRFDNRVRSKHKGWLAPSEEVKIQEHITAIRRVCGILPVSKVVVETAEFDLQLLKAIADGKPVPQGEDYQKGEMYGHYNVRQYVLWRDDYTCQCCGTHATKKKEVRLHVHHLESRKTGGDAPGNLVTLCDSCHEKLHKGLITEDDFKKRKRRSTRDATFMGIMRKTLMQRLCSELPIPVVETRGYITKATREKLLVLPKSHTNDALAIAQGKRGFNVGYLPGIIQTDKIYTIRPVRHHNRQLHKAAILKGGIRKSNQAGKYVFGYRLFDKVQFNEQDCFIWGRRTTGIFTIKTINGKMIKDGISFKKLKLVEKSTSYLIA

SEQ ID NO: 8611 - protein, 456 aa, unidentified; identical to SEQ ID NO: 7423
  REGION 1..456: note = Human gut metagenome

SEQ ID NO: 8612 - protein, 512 aa, unidentified; identical to SEQ ID NO: 4049
  REGION 1..512: note = Human gut metagenome

SEQ ID NO: 8613 - protein, 456 aa, unidentified
  REGION 1..456: note = Human gut metagenome
MNTCVCVLSNNGERLMPTFRLGKVRRLLKDGKAKIVKHHPFTIQLLYDSKTNKQPIEICEDVGYNYIGISVKSESHEYVSAQYDTLRDEKEHHDDCRKMRRARRNRLRYRKPRFDNRKRSEGWLAPSLEHKKQLNISLVERYVSVIPITHATVEVGSFDTMLLQAIQKGETKPEGADYQEGPRYNLATLREAVFYRDNYTCQVCGRKITDGAILHMHHMFYWKGRHGYKLDELVTACEKCHTPANHQKGGKLFGFGEDKEFADLSGAAFMNAVRWQIVNALHTTYSKEFVTITYGAMTKEKRIALQLEKSHNNDAYAMGDFHPVHRCGFRHYQKRRRNNRVLEKFYDATYIDARTGNKAKGKELFNGRISRNHKKDSENLHKYRSEKVSKGRRSIRKRRYAIQPYDTVRLKGKTYITSGCHNKGTRLLIPVNGKSKSVTISKVQVVCHAGPWIQII

SEQ ID NO: 8614 - protein, 423 aa, Deinococcus sp.; identical to SEQ ID NO: 5121

SEQ ID NO: 8615 - protein, 442 aa, unidentified; identical to SEQ ID NO: 2637
  REGION 1..442: note = Human gut metagenome

SEQ ID NO: 8616 - protein, 417 aa, unidentified
  REGION 1..417: note = Human gut metagenome
MPCSPAKARLLLKERKAIVKRRTPFTIQLTIATGEARQPVALGVDSGYKHIGLSATTEKAELYASEVELRQDITDLLSARLALRRSRRSRKTRYRAPRFDNRVASKRKGWLAPSVENRIAAHMSRVEAVMRVLPVTAITVETAAFDTQLLKNPDIAGAAYQQGEQLGFWNVREYVLFRDGHVCQHCRGKSKDPILNVHHIESRRTGGDAPNNLITLCETCHKAFHRGEIKLKVRRGKSFKAETFMGIMRWTLFERLKKAHPELRVRNTYGYLTKHKRISYGIAKSHCADAYCIADNLGAKRLEGFFFQKQTRKHNRQIHKLSILKGGLRKKNQAPYEVKGFRLFDKVICKGEEAFIFGRRTSGSFDVRRLDGTRISAGINYKKLRLLEPRTTYLTEFRKEAALPPLHKCRGFRAEFL

SEQ ID NO: 8617 - protein, 249 aa, unidentified
  REGION 1..249: note = Human gut metagenome
LPVGTDYQLGEMYDEYNVRQYVLKRDNYTCQCCGAHPTEKKPIRLHVHHIESRHVGGNAPNNLITLCVACHKALHEGKITLDKGKKRGKPLRDAAFMGIMRNTLLARLKDELNIPVKQTYGYITKLLREKNKIPKSHVNDARCIAKAPNAKPCDTMLYTRALRHHNRQIHKAKILKGGIRKKNQAPYLVKGFRLWDKVRYNGEECFITGRRSSGYFALKKYDGTVISNSASYKKLMLLEAATNYITERS

SEQ ID NO: 8618 - protein, 490 aa, unidentified
  REGION 1..490: note = Human oral metagenome
MYVVYVLDRQGKPLMPTKRFGHVRRMLKTNKAKAISTKPFVIQLQYESTDFVQPLYGGTDPGRTNIGEAVLNNKGEVVYAAYVITRNKEIPKLMADRATHRRASRRGERLRRKRRAKANGTMTCFPEGRKLSGYKDGVLELKGIINTESRFNNRKRPARWLTPTARQCIQTHLNMVQNICKILPVTDWTLEYNRFAFMRLEDDSVRGWDFQNGRLKGYASKEDYIYALQGGVCICCGASIEHYHHIKPRHKGGSDTPENLVGLCSVCHTEIHTGKRSLDKIGKYKEYAGTSIVNIAIPFIWDGIVKMFGDKAHICEGQETAELRKANSIPKEHFADAVCIAGIGSGIIPQYDDNQPFELRQFRCHDRSSINAQVERTYLDGKTVVAKNRKPRFEQKGDALSDLQSKMTKEHGELAARRVVSKFVVKKSYRRYNAYERIKPSAVFVFNNKKYLLSGQLTNGRYYRAFGEGTKNFPSRNCELVSFGCSLTYM

SEQ ID NO: 8619 - protein, 430 aa, unidentified
  REGION 1..430: note = Human gut metagenome
MPKVYVLNRHGRPLMPCTPAKARHLLDAGKAKVRHRTPFTIQLLYGSTGYTQEVILGVDAGSKTIGLSAATETEELFSAEVKPRNDVVELMSARRQFRRARRNRTTRYRKPRFDNRVRSKHKGWLAPSVEVKIQEHMTAIRRACAILPVSKVVVETAEFDLQLLKAVAEGKPVPQGEDYQKGEMYGHYNVRQYVLWRDSYTCRICGAHGSVRKGVPLHVHHLESRRVGGDAPDNLVTLCTACHDKLHKGIIMVADIKKRKRRSTRDTTFMGIMRMTLLRRLWEQLPVPVVETRGYITKATRENLLVLPKSHTNDALAIAHGPQGFRAEYLPNIRQADRLYTIRPVRHHNRQLHKATILKGGVRKANQAEKYICGFRLYDKVLYNGIECFVWGRRTSGSFLLRQLNGEKVKDGVSYKHLKLLERSQSYLVA

SEQ ID NO: 8620 - protein, 476 aa, Ferroplasma sp.
MEKNMKEKQKLDWRNTYTPTDAPQVRGNCDHALNREETLSVHGLKTPSNNPDVDIQSGMAGQDLRVPVINMRDEPLMPTTPEKARKLLKEKKAKVAFSNPFTIQLLYATGETKQPVTLGIDAGYKHIGFSALTEKRELISGEAVIRTDIPKLNEEKAMYRRKKRNKLWYRKPRFMNRGNNKEGWFAPSIEHKLETHIRLIEKLKRILPVSNTVIEVASFDTQKMKNPEISGIEYQQGELQGYEIREYLLEKFHHICVYCGKTGVPLEIEHLTPRSRGGPDTVNNLAISCHECNQKKNNLTAEEFGYPEVRKRALITMRDAAFMNTVRWKLTQLAGAGYTFGYITKKNRISLGLDKSHANDAFVIAGGTNQARTSPFTITQRRRNNRSIQTNRKGFRPSIRRKRYAFQPGDIVVYDHERFSVVGMHNYGKSIVIKGGGKKMDINTKKVKLVKYGKGLQFAPQFLPTLSDGVSLGGVR

SEQ ID NO: 8621 - protein, 425 aa, Tolypothrix sp.
MQNYVFVIDQNKQPLNPIPAARARELLTKQKAAVYRMYPFVLILKHAVDNPNPKPLTIKLDPGSRFTGITILDENKVIWAAELEHRGWQIKNSLLSRRSLRKCRRSRKTRYRQPRFDNRKRPEGWLPPSLMHRVLTVETWVKRLCLYSPITQIAMELVKFDTQKMQNPEIDGVEYQQGERAGYEVREYLLEKWGRKCAYCDKEDVALQIEHIHPRSKGGSNRVSNLTLSCERCNIKKGTKFIDEFLHKDASRLEKIKRQAKQPLKDAAAVNSTRWTLFRTLKNILPTTTGTGGQTKYNRTRFELAKHHWVDAACVGEVENLNLLTQQPLKIKCTGWGTRQMCGTDKYGFATRHRERKQIHFGFKTGDIIKAVVTSGKKVGIYIGRVLCRKTGSFDIATKSGRVAGVSHRFCISIHKKDGYSYGFG

SEQ ID NO: 8622 - protein, 518 aa, unidentified
  REGION 1..518: note = Human gut metagenome
MANLKLIDELLEKTEYIYVLGIDGKPQMPTNRKVRVRSLFKSGMAKIVDTVPFTMQLLYENKPVLQPITIAEDPGRTNIGAAVLTQLGDLVFSAVVETRNKSIKKLMSDRKAHRQASRHGERKARQRLAKKYKSMIKAGMIMRKLPQYAADKFVTCKVIKNTEARFCNRKRMPDWLTPTVNHLVQTHINLIKKVEKYLPITDVAIEVNRFAFMQMENPDASGVDFQNGPLKGFDDVKAAIREQQHGKCLMCKNDIEHFHHIIPRSKGGSNTIQNQVGLCKKCHAKVHTDAEFQAKLKDKKEGLIKKYGALSALNQAVPFICKELLKIYGAEHVHFCTGKDTSLIRSSLGYDKTKDNQMHEVDAYCICLAAIGADKTKRPDFNNVFKIKQFRRQDRSIINYQRERTYYLDGKKIATNRKPRFEQKGDALSDWYSEQVKLKGKKYADKLTGRITVKKSTRGYNSKDRVMPGTIFYYGGKRLVLSGQTTRGKYYKAYGDPKTNYPAAKCQIYKHNKGFVFI

SEQ ID NO: 8623 - protein, 434 aa, Anabaena sp.
MSKVFVLDTKKRPLDPINPAQARQLLRNKKAAIFRQFPFTIILKKSCPDSPVSSLRLKIDPGAKFTGMALVNDSTGEVVFAAELKHRGFAIRDALTSRRPRRQLRGSRRARKTRYRQPRFLNRNLPEGWLAPSLQSRVENIKTWVERLRKLAPIEDISQELVRFDMQLMANPDIQGKEYQQGTLAGYESREYLLEKWGRQCAYCGVKDVPFQVEHIHPRAKGGSNSITNLTLSCEKCNTKKGTKDIKDFLKKDPLKLEKILKQAKRPLADAAAVNATRLVLLFVFKATGLPVETGSGGLTKFNRSQQNLEKTHWIDAACVGQSTPILNIKGVKPLLITANGHGTRQSCRTDKYGFPSRYVPRFKFVNGFQTGDIVKAVVTKGKKIGAYIGRVAVRTSGSFNISTISGLIQGISYKYCKSIHKKDGYEYGKSKIC

SEQ ID NO: 8624 - protein, 553 aa, Streptomyces sp.; identical to SEQ ID NO: 4116
